United States Patent Application Publication US 2004/0214272 A1 - sequence listing, part 47

SEQ ID NO: 214769 - protein, 151 aa, Zea mays
  Clone ID: MRT4577_127468C.1.pep
LVLESPLEVFFHDFLWALSILSCLLPEAKLFPQKDIGDLAFRDPRKRKVSEYNAISYSDQMRLITAVELLKATKDIESQLEKISSTLLILHGAADMVTDPQVSKFLYEKASTKDMTLKLYEGSYHSILEGEPDDRISTAINDIISWLDSHC

SEQ ID NO: 214770 - protein, 66 aa, Zea mays
  Clone ID: MRT4577_127469C.1.pep
IFPSYGDMVRTRKTAHKSTGPVGVPRHQLAPGHEESSCGSNDPIGDLEAMVEQLRTELRHRNRIWA

SEQ ID NO: 214771 - protein, 44 aa, Zea mays
  Clone ID: MRT4577_12746C.1.pep
RNAFVGSIEDGNNTCRGRKAQAFVAAVAWVRSRWNVENINTLHK

SEQ ID NO: 214772 - protein, 1547 aa, Zea mays
  Clone ID: MRT4577_127470C.1.pep
MSGDHAKKEMETGEKPTTSHGSTSSEESRTKRYYKKKGGDAHVCREWDSDESSSDSSDEEDAANIAVTKGLLFPNVGHKCLMAKDGKKKVKSKSSTRYESSSDDNASDEEDNLRTLFADLNMQQKEKLNELISAIHEKDDLLDSQEDFLIKENKKHVKVKNAYALQVEKCEKLSSELSTCHETIDNLRNENTILIAKVDFHVCNASIPNLRNDNDDLLAKIKELNDSLASLRIENENLIAKAKDFDVCNTTISDLRTKNDMLHAKVVELKSCKLSTSNVEHVSICTRCRDVNIDAIHDHMALIKQQNDHIAKLDAKIAEHNLENEKFKFARSMLYNGRRPGIKDGIGFQRGDNVKLNAPPKNLSNFVKGKAPMPQDNEGYILYPAGYPESKIRRTHSRKSHSGPKYAFMYKGETSSSRQPTRAKLPRKKTPIASNDHDISFKTFDASYVLTNKSGKVVAKYVGGKHKGSKTCVWVPKVLVSNAKGPKTIWVYASGGSSWILDSGCTNHMTGEKKMFSSYEKNQDPQRAITFGDRNQDSLDYNLLSVSQLCQMGYNCLFTDIGVTVFRRSDDSIAFKGVLEGQLYLVDFDRAELDTCLIAKTNMGWLWHRRLAHVGMKNLHKLLKGEHILGLTNVHFEKDRICSACQAGKQVGAHHPHKNIMTTDRPLELLHMDLFGPIAYISIGGSKYCLVIVDDYSRFTWVFFLQEKSQTQETLKGFLRRAQNEFGLRIKKIRSDNGTEFKNSQIEGFLEEEGIKHEFSSPYTPQQNGVVERKNRTLLDMARTMLDEYKTSDRFWAEAVNTACYAINRLYLHRILKKTSYELLTGKKPNISYFRVFGSKCFILVKRGRKSKFAPKTVEGFLLGYDSNTRAYRVFNKSTGQVEVSCDVVFDETNGSQVEQVDLDEIGIEEAPYIALRNMSIGDVCPKESEEPPKAQDQPSSSMQASPPTQNEEEAQVDEEEDQSNKPPQDNDIDQGGDANDQDKEDEEQRPPHPRVHQAIQRDHPIDTILGDIHKGVTTRSRVAHFCEHYSFVSSIEPHRVEEALQDSDWVVAMQEELNNFTRNEVWHLVPRPNQNVVGTKWVFRNKQDEHGVVTRNKARLVAKGYSQVKGLDFGETYAPVARLESIRILLAYATYHGFKLYQMDVKSAFLNGPIKEEVYVEQPPGFEDSEYPNHVYKLYKALYGLKQAPRAWYECLRDFLIANGFKVGKADPTLFTKTLENDLFVCQIYVDDIIFGSTNESTCEEFSRIMTQKFEMSMMGELKYFLGFQVKQLQEGTFISQTKYTQDILTKFGMKDAKPIKTPMGTNGHLDLDTGGKSVDQKVYRSMIGSLLYLCASRPDIMLSICMCARFQADPKEAHLTSVKRILRYLAYTPKFGLWYPRGSTFDLIGYSDADWAGCKINRKSTSGTCQFLGRSLVSWASKKQNSAALSTAEAEYIAAGHCCAQLLWMRQTLRDYGYKLTKVPLLCDNESAIKMADNPVEHSRTKHIAIRYHFLRDHQQKGDIEISYINTKDQLADIFTKPLDEQSFNKLRHELNILDSRNFFC

SEQ ID NO: 214773 - protein, 151 aa, Zea mays
  Clone ID: MRT4577_127471C.1.pep
MCKISEDVTPPAPVLKALSILSCLLPEAKLFPQKDIGDLAFRDPRKRKVAEYNAISYSDQMRLRTAVELLKATKDIESQLEKISSPLLILHGAADMVTDPQVSKFLYEKASTKDKTLKLYEGSYHSILEGEPDDRISTAINDIISWLDSHC

SEQ ID NO: 214774 - protein, 88 aa, Zea mays
  unsure (1)..(88): unsure at all Xaa locations
  Clone ID: MRT4577_127472C.1.pep
SSMEISVSLSRLHITYRGGTMALRSRETDDSXRWVFHKPDVFANLHYIYMLGQAMKRQGHLIIGPSDWVHNVYSPSESTTSMHLGYRL

SEQ ID NO: 214775 - protein, 887 aa, Zea mays
  Clone ID: MRT4577_127473C.1.pep
MTTDRPFELLHMDLFGPIAYISIGGSKYCLVIVDDYSRFTWVFFLQEKSQTQETLKGFLRRAQNEFDLRIKKIRSDNGTEFKNSQIEGFLEEEGIKHEFSSPYTPQQNGVVERKNRTLLDMARTMLDEYKTSDRFWAEAVNTACYAINRLYLHRILKKTSYELLIGKKPNISYFRVFGSKCFILVKRGRKSKFAPKTVEGFLLGYDSNTRAYRVFNKSTGLVEVSCDVVFDETNGSQVEQVDLDEIGDEEAPCIALRNMSIGDVCPKESEESPNTQDQPSSSMQASPPTENEDEAQVDEVEDQANEPPQDDSNDQGGDTNEEDKEDEEQRPPHPRVHQAIQRDHPVDTILGDIHKGVTTRSRVAHFCEHYSFVSSIEPHRIEEALQDSDWVVAMQEELNNFTRNEVWHLVPRPNQNVVGTKWVFRNKQDEHGVVTRNKARLVAKGYSQVEGLDFGETYAPVARLESIRILLAYATYHGFKLYQMDVKSAFLNGPIKEEVYVEQPPGFEDSEYPNHVYKLSKALYGLKQAPRAWYECLRDFLIANGFKVGKADPTLFTKTLENDLFVCQIYVDDIIFGSTNESTCEEFSRIMTQKFEMSMMGELKYFLGFQVKQLQEGTFISQTKYTQDILNKFGMKDAKPIKTPMGTNGHLDLDTGGKSVDQKVYRSMIGSLLYLCASRPDIMLSVCMCARFQADPKEAHLTAVKRILRYLAYTPKFGLWYPKGSTFDLIGYSDADWAGCKINRKSTSGTCQFLGRSLVSWASKKQNSVALSTAEAEYIAAGHCCAQLLWMRQTLRDYGYKLTKVPLLCDNESAIKMADNPVEHSRTKHIAIRYHFLRDHQQKGDIEISYINTKDQLADIFTKPLDEQSFNKLRHELNILDSRNFFC

SEQ ID NO: 214776 - protein, 123 aa, Zea mays
  Clone ID: MRT4577_127474C.1.pep
MGTTAAHRRPGSIPSAVALALLFLSTTLRFAAAVQPYGGGGGPCALAVAPLGYPCEEHQVTTEDRVHPEPAKDPQWRALAGTGRRARARGRWPDLARGADGAPAARGLRGRHVMAAGLAEEAL

SEQ ID NO: 214777 - protein, 499 aa, Zea mays
  unsure (1)..(499): unsure at all Xaa locations
  Clone ID: MRT4577_127475C.1.pep
MSGDHAKKEMGTSEKSISSHGKAPSGESYNKGKGKEKESPSHKSRRSGDKKKMMRKVVYYETDSSSPSTSGSDTPSVTSKRHERKKFSKIPLRYPRIPKHTPLLSVPLGKPPTFDGEDYARWSDMMRYHLTSLHKRDQDYDEDEVAQIVHFNSQATTILLVSLSREEYNKVQGLKSAKEIWDVLKTAHEGDEVTKITKRETIEGELGRFWLRQGEEPQDMYNRLKTLVNQVRNLGSKKWDDHEMVKVILRSLVFLNPTQVQLIRGNPRYTLMTPEEVIGNFVSFELMIKGSKKINELDGPSTSEAQPVAFKAXEEKKEESTSSRTPIDASKLDNEEMVLIIKSFRQILKQRRGKDYKTRSKKVXYKCGKPGHFIAKCPLSSDSDRGDDKKGRRKEKKRYYKKKGGDAHVCREWDSDESSSDSSSDEDAANIAVTKGLLFPNVDHKCLCWNLLSAARGSNGGSSDVNRVLAQDGNSSVNLASHGHCAGVFIGIRVPSVLC

SEQ ID NO: 214778 - protein, 137 aa, Zea mays
  unsure (1)..(137): unsure at all Xaa locations
  Clone ID: MRT4577_127476C.1.pep
MEEKKKSTPSRLPIDASKLDNEEMSLIIKSFRQILKKRRGEDYKPRSKRVWYRCGKSSHFIAKCPYSSESDRDEDKKGKKKMEKKKYYKKKGSEAHMXREWDSDESSTNSSSDEDAANITVNKGLLFPNVGHKSRKI

SEQ ID NO: 214779 - protein, 1531 aa, Zea mays
  Clone ID: MRT4577_127477C.1.pep
MRDLGTGDKTASSRRTHSRESAHKHKEKSSSSIKSHRMGDKKKKMRKVVYYETDSSSPSTSGSESASTTSKSQERKKYSKMPLRYPHISRRTPLLSVPLGKPPMFEGEDYPMWSDKMRHHLTSLHKSIWDIVEYGVQVPKKGDEDYDSEEVKQIQHFNSQATTILLASLSREEYNKVQGLKSAKEIWDVLKTAHEGDEVTKITKREMIEGELGRFRLRQGEEPQDMYNQLKTLVNQVRNLGSKKWDDHKMVKVILRSLVFLNPTQVQLIRGNPRYTLMTPEEVIGNFVSFELMIKGSKKIVELDGPSTSEAQPVAFKATEEKKEESTSSRTPIDASKLDNEEMALIIKSFRQILKQMRGKDYKSRSKKVCYKCGKPGHFIAKCPLCSDSDRDNDKKGKRREKKRYHKKRGSDAHVCREWNSNESSSDSSSDEDAANIAITKGLLFPNVGHKCLMAEDGKRKKVKSKSSSKYATSSDEDNSSDEEDNLRTLFANLNMQQKEKLNELISAIHEKDELLDSQEDFLIKENKKHVKVDSNACDDSISNIRDDNVNLLAKIEELNVSLASLRNENVKSIAKAKDLDVCNVTISNLRNENDILHAKIVELKSCKPSTSTIEHVSICTRCRDINVEAIHDHLALIKKKNDHIAQLNAKINEHDLENEKIKFARSMLYSGRCPGIKDGIGFQKGDNVKLNAPPKRLSNFVKGKAPMPQDNEGYILNPAGYPEHKIRRNHSRKSHSGPNHAFMYKGETSSSRQSTRAKLPKKKTPIASNDSNISFKTFDAYYVLTNKSGKIVAKYVGGKHKGSKTCVWVPKVLVSNVKGPKIVWEKSHTQETLKGFLRRAQNEFGLRIKKIRSDNGTEFKNSQIEGFLEEEGIKHEFSSPYMPQQNGVVERKNRTLLDMARTMLDEYKTSDRFWAEAVNTACYAINRLYLHRILKKTSYELLTGKKPNVSYFRVFGSKCFILVKRGRKSKFAPKAVEGFLLGYDSNTRAYRVFNKSSGLVEVSCDIVFDETNGSQVEQVDLDELDDEEAPCVALRNMSIGDVCPKESEEPPQAQDQPSSSTQASPPTQDEGKAQNDEGEDQEVEPPQEESNDQGGDAHDQDEEDEQATRPTHPRPHKVEEALQDSDWVVAMQEELNNFTRNEVWHLVPRPNQNVVGTKWVFRNKQDEHGVVTRNKARLVAKGYSQVEGLNFGETYAPVARLESIRILLSYATYHGFKLYQMDVKSAFLNGPIKEEVYVEQPPGFEDSEYPNHVYKLSKALYGLKQAPRAWYESLRDFLITNGFKVGKADSTLFTKTLENDLFICQIYVDDIIFGSTNESTCKEFSRIMTQKFEMSMMGELKYFLGFEVKQLQEGTFISQTKYIQDILNKFGMKDAKPIKTPMGTNGHLDLDTGGCKINRKSTSGTCQFLGRSLVSWASKKQNSVALSTAEAEYIATGHCCAQLLWMRQTLRDYGYKLTKVPLLCDNESAIRMADNPVEHSRTKHIVIRYHFLRDHQQKGDIEIAYINTKEQLADIFTKPLDEQTFTKLRH

SEQ ID NO: 214780 - protein, 44 aa, Zea mays
  Clone ID: MRT4577_127478C.1.pep
KKKKKKKKKKKKKKKKKKKKGKKKKKKKKKKKKKKKKKKRGRPF

SEQ ID NO: 214781 - protein, 1776 aa, Zea mays
  Clone ID: MRT4577_127479C.1.pep
MSGDHTKKEMVTGEKPATSHEKAPSGESCNKGKEKESPSHKSHRSGDKKKKMRKVVYYETDSSSPSTSGSDTPSVTSKRHERKKFSKIPLRYPRFPKHTPLLSVPLGKPPTFDGEDYARWSDLMRYHLTSLHKSIWDVIEFGVQVPSVGDEDYDEDEVAQIQHFNAQATTILLASLSREEYNKVQGLKRAKEIWDTLKTAHEGDEVTKITKRETIKGELGRFRLRQGEEPQDMYNRLKTLVNQVRNLGSKKWDDHEMVKVILRSLVFLNPTQVQLIRGNPRYTLMTPEEVIGNFVSFELMIKGSKKINELDGPSTSEAQPVAFKATEKKKEESTSSRQPIDASKLYNEEMALIIKSFRQILKQRRGEDYRPRSKKVCYKCGKPGHFIAKCPLSSDSDRGDDKKGRRKEKKRYYKKKGDDAHVCREWDSDESSSDSSSDEDAANITVTKGLLFPNVGHKCLMAKDSKNKKVKSKSSTRYESSSDEENASDEEDNLRTLFANLNMQQKEKLNELISAIHDKDDLLDSQEDFLIKENKKHVKVKNAYALEVEKCEKLSTLIKKQNDHIAQLNAKINEHDLENEKFKFARSMLYSGRRPGIKDGIGFQKGDNVKLNAPPKRLSNFVKGKAPMPQDNEGYILYPAGYPESKIRRIHSRKSHSGPNHAFMYKGETSSSRESTRAKLPKKKTPSASNDHDISFKTFDASYVLTNKSDKVVAKFVGGKHKGSKTCVWVPKVLVSNAKGPKTVWVYASGGSSWIIDSGCTNHMTGEKNMFSSYEKNQDPQRAITFGDGNQGVTVFRRSDDSIAFKGVLEGQLYLVDFDKAELDTCLIAKTNMGWLWHRRLAHVGMKNLHKLLKGEHILGLTNVHFEKDRICSACQAGKQVGIHHPHKNIMTTDRPLELLHMDLFGPIAYISIGGSKYCLVIVDDYSRFTWVFFLQEKSHTQETLKGFLRRAQNEFGLRIKKIRSDNGTEFKNSQIEGFLEEEGIKHEFSSPYTPQQNGVVQRKNRTLLDMARTMLDEYKTSDRFWVEAVNTACYAINRLYLHRILKKTSYELLIGKKPNISYFRVFGSKCFILVKRGRKSKFAPKTVEDFLLGYDSNTRAYRVFNKSSGLVEVSCDVVFGETNGSQVEQVDLDEIGNEEAPCIELRNMSIGDVCPKEFEEPPNAQDQPSSSTQASPPTQNEDEAKVDEGQDPRDEPPQDDDNDQGGDANDQDKEDEEPRPPHPRVHQAIQRDHPVDTILGDIHKGVTTRSRVAHFCEHYYFVSSIEPHRVEEALQDSDWVVAMQEELNNFTRNEVWHLVPRPNQNVVGTKWVFRNKQDEHGVVTRNKARLVAKGYSQVEGLDFGETYALVARLESIRILLAYATYHGFKLYQMDVKSAFLNGPIKEEVYVEQPPGFKDSEYPNHVYKLSKALYGLKQAPRAWYECLRDFLITNGFKVGKADPIIFTKTLNNDLFVCQIYVDDIIFGSTNESTCEEFSRIMTQKFEMSMMGELKYFLGFQLKQLQEGTFISQTKYIQDILNKFGMKDAKPIKTPMGTNGHLDLDTEGKSVDQKVYRSMIGSLLYLCASRPDIMLSVCMCARFQADPKEAHLMAVKRILRYLVHTPKFGLWYPRGSTFDLIGYSDADWAGCKINRKSTSGTCQFLGRSLVSWASKKKNSIALSTAEAEYIVAGHCCAQLLWMRQTLRDYGYKLTKVPLLCDNESAIRMADNPVEHSRTKHIAIRYHFLRDHQQKGDIEIAYINTKEQLADIFTKPLDEQSFNKLRHELNILDSRNFF

SEQ ID NO: 214782 - protein, 41 aa, Zea mays
  Clone ID: MRT4577_12747C.1.pep
VPDSAAAEMLMPKKNRIAIYEILFKEWFMVAKKDVHMSKHP

SEQ ID NO: 214783 - protein, 556 aa, Zea mays
  Clone ID: MRT4577_127480C.1.pep
EKSQTQETLKGFLRRAQNKFGLRIKKIRSDNGTEFKNSQIEGFLEEEGIKHEFSSPYTPQQNGVVERKNRTLLDMARTMLDEYKTSDRFWAEAVNTACYAINRLYLHRVLKKTSYELLTGKKPNISYFRAFGSKCFILVKRGRKSKFAPKTVEGFLLGYDSNTRAYRVFNKSSGQVEVSCDVVFDETNGSQVEQVDLDEIGIEEAPCIALRNMSIGDVCPKESEEPPNAQDQPSSSTQASPPTQNEDEAQVDEGGDQADEPPQDDDNDQGGDANDQDKEDDEPKPPHPRVHQAIQRDHPVDTILGDIHKGVTTRSRVAHFCEHYSFVSSIEPHRVEEALQDSDWVVAMQEELNNFTRNEVWHLVPRPNQNVVGTKWVFRNKQDEHGVVTRNKARLVAKGYSQVEVGKADPTLFTKTLENDLFVCQIYVDDIIFGSTNESTCEEFSRIMTQKFEMSMMGELKYFLGFQVKQLQEGTFLSQTKYTQDILSKFGMKDAKPIKTPMGTNGHLDLDEGGKSVDQKGERVILRALMIPFLAIHAKGGESMSPKQKDRTATNL

SEQ ID NO: 214784 - protein, 64 aa, Zea mays
  Clone ID: MRT4577_127481C.1.pep
KLLGPKIGPVKNKAQLLMKMPIMVNPKGRQRGEKDWGPIFTKAGFSDYKVGKKIGARGVIKVHP

SEQ ID NO: 214785 - protein, 896 aa, Zea mays
  Clone ID: MRT4577_127482C.1.pep
MSGDHTKREMETGDKPTTSQGSTSSEESRTKRKEKKKDSSKRKEKRSSSSRHKEKKEKSSSHKSHRKGDKHKRMRKVVYYETDTSSTSTSDSDAPSVTSKRQERKKFSKIPSHYSRTSRHTPLLSVPLGKPPTFDGEDYARWSDLMKFHLTSLHKSIWNVVEFGAQVPSIGDEDYDTDEVAQIEHINSQATTILLASLSKEEYNKVQGLKNAKEIWDLLKTAHEGDELTKITKRETIEGELGRFRLRQGEEPQGMYNRLKTLVNQVRNLGSKKWDDHEVVKVILRSLIFLNPTQVQLIRGNPRYTLMTPEEVIGNFVSFEYMIKGSKKINELDEPSTSEAQPVAFKATEEKKEESTPSRQPIDASKLDNEEMALIIKSFRQILKQRRGKDYKPRSKKVCYKCGKPGHFIAKCPISSDSDRGNDKKGKRREKKKYYKKKGGDAHVCREWDSDESSTESSSDEDAANIAVTKGLLFPNIGHKCLMAKDGKRKKVKSKSSTKYESSSDDNASDEENNLRTLFADLNMQQKEKLNELISAIHEKDDLLDSQEDFLIKENKKHVKVKNAYALEVEKCNKLSSKLSTCHDTIDNLRNENARLIAKVDSHVCDVSIPNLRNDNDDLLAKIKELNDSLDSLRVENENLIAKAKDFDVCNTTISDLRTKNDMLHAKVVELKSCKPSTSTVEHTSICTRCRDVDINAIHDHMTLIKQQNDHIALLDAKIAEHNLENEKFKFARSMLYNGRRPGIKDGIGFQRGDNVKLNAPPKNLSNFVKGKAPMPQDNEGYILYPAGYPESKIRRTHSRKSHSGPNHAFMYKGETSSSRQPTRAKLPKKKTPNASNDHSISFKTFDASYVLTDKSGKVVAKFVGGKHKGSKTCVWVPKVLVSNAKVWGIDIPWAH

SEQ ID NO: 214786 - protein, 1384 aa, Zea mays
  unsure (1)..(1384): unsure at all Xaa locations
  Clone ID: MRT4577_127483C.1.pep
MSGDHAKKEVMTGEKPATSHGKAPSRESGSKGKGESHSHKSHRSGDKKKMKKVVYYKADSSSPSTFGSDAPSVTSKRHERKKFSKPPVFYGEDYNMWSDKMRHRLTSLHTSIWDVVEFGVQVPSVGDEDYDSDEVAQIQHFNSQATTILLASLSQEEYNKVQGLKSAKEIWDVLKTAHEGDEVTKITKRETIERELDRFMLNQGEDPQAMYNRLKTLVNQVCNLESTKWDDHEMVKVILRSLVFLNPTQVQLIRGDPRYKLMSPEEVIGKFMSFELMIKGSKKIIEQGASSVPETQLVAFKATEEKKEANDSDRDNDRRGKKKEKKRYYKKKGGDAHVCREWDSDESSTDSSDDEDAANIAINKGLLFPNVGHKCLMAKDGKKKKVKSRSSTKYVTSSDEENSSDDEDNLLTLFANLNMQQKEKLNELISAIHEKDELLDSQEDFLIKKNKKHVKTKNAYAQEVDKNEKLTSELSTCHDTISNLRIENANLIAKVEKSNICGDSITNLRNDNANLIAKIDKLNASLASLKNENENLIAKAKDLDVCNVSISNLRDENVILHAKIVELNDYVVDAIHNHLAMIKQQNDHIAKLDAKIAEHELENEKFKFARSMLYSGRRPGIKDGIGFQQGDNVKLNAPPKRLSNFVKGKAPMPQDNEGYILYPAGKVVAKYVGGKHKGSKTCVWVPKVYASGGSSWIIDSGCTNHMTGEKKMFSSYEKNQDSQRAITFGDGNQGLVKGLGKIAISPDHSISNVFLVDSLDYNLLSVSQICKMGYNCLFTDTGVTVFRRSDDSVAFKGVLEGQLYLVDFNRAERDTCLIAKTNMGWLWHRQLAHVGMKNLHKLLKGEHILGLTNVHFEKNRICSACQAGKQVGVHHPHKNIMTTDKPLELLHMDLFGPIAYISIGGSKYCLVIVDDYSRFTWVFFLQDKSQTQETLKGFLRRAQNEFGLRIKKIRSDNGTEFKNSQIEGFLEEEGIKHEFSSPYTPQQNGVVERKNRTLLYMARTMLDEYKTSDRFWAKAVNTACYAINRLYLHRILKKTSYELLIGKKPNVSHFRVFGSKCFILVKRGRKSKFAPKAVEGFLLGYDSNTRAYRVFNKSTGLVEVSCDIVFDETNGSQVEQVDLDELDDEEALCVALRNMSIGDVCPKESEEPPQAQDQPSSSMQASPPTQGEDEAQDDEGEDQEDEPPQEGGNDQGGDANDQDKEDEQDPRPPHPRVHPAIQRDHPVNTILGDIHKGVTTRSRIAHFCEHYTFVSSIEPHRVEEALXDSDXVLATQEELNNFTRNEVWNLVPRPNQNVLGTKWVFRNKQDEHGVVTRNKAXLMAKGYSQVEGLDFGETYALIARLESIRILLAYATYHGFKLYQMDVKSAFLNGPIKKEVYIEQ

SEQ ID NO: 214787 - protein, 90 aa, Zea mays
  Clone ID: MRT4577_127484C.1.pep
MWSAFFFFFFFFFFFFCFVFFFFFFFFFFFSPRQVLFPPVYKQIQCFANSLGNELGRRANIRPGASGCPKKNIFAQPNHCWGELPPVVNF

SEQ ID NO: 214788 - protein, 69 aa, Zea mays
  Clone ID: MRT4577_127485C.1.pep
PGHTRALGPAPTRVNMPCVLYLGMKTVSEIFGFSKTVFDFFRSDSPVTVIFENEIGNRNFIPESVSESV

SEQ ID NO: 214789 - protein, 164 aa, Zea mays
  Clone ID: MRT4577_127486C.1.pep
MASAEAPAARPILYSYWRSSCSHRVRIALNLKGIDYEYRAVNLLKGEQSDPEFMKLNPMKFVPALVDGDAVIGDSYAIALYLEDKYPQRPLLPQDLKKKALNIQIASIVCSGIQPLHNLTLVRFIEQKVGTGESIPWVQQQIDRGFTAVENMIKGCAGKFAMGD

SEQ ID NO: 214790 - protein, 74 aa, Zea mays
  Clone ID: MRT4577_127487C.1.pep
PTLLTSFALISSFTPYGAGFKIGWAHPTPSTQPKFTTSYPISQEHLPTSSTPPSFLSSPSYIHPTPSFYPNLSS

SEQ ID NO: 214791 - protein, 52 aa, Zea mays
  Clone ID: MRT4577_127488C.1.pep
KGPECIELDRIYLKRFIKFGIKHLRVRGSRNQGIHCELVGIALNTCGLSGIR

SEQ ID NO: 214792 - protein, 89 aa, Zea mays
  Clone ID: MRT4577_127489C.1.pep
SLNTYTATDVEYVESEGGRISSTVQNVVMLHACSVLHFILKPINILYILPYDTYIFDHSLYLFGLSVSLHAFAINPMMRHACLCVCKAT

SEQ ID NO: 214793 - protein, 126 aa, Zea mays
  unsure (1)..(126): unsure at all Xaa locations
  Clone ID: MRT4577_12748C.1.pep
PRFLKPQRRKTRGPFPKGGXEEKNPQEKPRGAPPHPNNQGWGPKPPTQXGPDPPGGEKVSPQKTGGKTPPGTSQTEPXHKTPXPIGRPIRARRNHGPKGAPGENGPPPQDHPPPLPXKKDPNPGGP

SEQ ID NO: 214794 - protein, 82 aa, Zea mays
  Clone ID: MRT4577_127490C.1.pep
QPRVPGNFGLGPPVHLEKKTQKGPVLGVFSGPKNPPTSGNFGLQKTDSMPLGLCGGGPPLKKIFFLKKPRATHLFESFNGDN

SEQ ID NO: 214795 - protein, 108 aa, Zea mays
  Clone ID: MRT4577_127491C.1.pep
HSDVAASYIETQLIKAREQQHQQPPQQQQQQQQIQMQQMLLHRAAQQQQQQQRRDGSLLNGTASGFSGNDPLIRQNPANANSMAAKMYEERLKLPPQRDSLDEASIKL

SEQ ID NO: 214796 - protein, 241 aa, Zea mays
  Clone ID: MRT4577_127492C.1.pep
MMSGRSGGRDGEAAGPVIRIRVSHGATFREVVVPAQATFGELKRILVQTTGLEPERQRLFFRGKEKSDREFLHTAGVKDGAKLLLLEKPAPANIEQKVEPVIMDESMMKACAAVARVRVEVDKLSAKVCDLEKNVLGGRKVEDKEFVVLTELLMMQLLKLDGIEAEGEARAQRKAEVRRVQSLVETLDKLKARNANPFSDHNNAVSVTTQWETFENGMGSFSAPPPHVPSEQVNTDWEQFD

SEQ ID NO: 214797 - protein, 404 aa, Zea mays
  unsure (1)..(404): unsure at all Xaa locations
  Clone ID: MRT4577_127493C.1.pep
MAKSGASFPESSWMERDFLAAIGKEQQHPHKEEAGAEESAYFGGAGAAAAAPAMDWSFASKPGAAPALMSFRSASFPQFSSFDGAKNPAPRILTHQRSFGPDSTHYAAAHRTQHALNGARVTPVSSPFNQNSPMFRVQSSPSLPNGTAFKQPPFAINNNAAASSTVGFYGTRDVVRPKTAQLTIFYAGSVNVFDNVSAEKAQELMLLASRGSLPSSAPVARKPEAPILAPAKVTAPEVLHATQMLFQKPQHVSPPSSAISXQSLASCKLQVSPGAPRALTLTPHFQNLQCHXSCFSCXQAPRAQPATIAATTAAAIMPRAVPQARKASLARFLEKRKERVTTAAPYPSAKSPMESSDTFGSGSANDKSSCTDIALSSNHEESLCLGQPRNISFIQESPSTKLQI

SEQ ID NO: 214798 - protein, 259 aa, Zea mays
  Clone ID: MRT4577_127494C.1.pep
MMSGRSGGRDAEGEWEVRPGGMLVQRRDGEAAGPVIRIRVSHGANFREVVVPAQATFGELKRILVQTTGLEPERQRLFFRGKEKSDREFLHTAGVKDGAKLLLLEKPAPANIEQKVEPVIMDESMMKACAAVARVRVEVDKLSAKVCDLEKNVLGGRKVEDKEFVVLTELLMMQLLKLDGIEAEGEARAQRKAEVRRVQSLVETLDKLKARNANPFSDHNKAVSVTTQWETFENGMGSLSAPPPRVSSTQANTDWEQFD

SEQ ID NO: 214799 - protein, 81 aa, Zea mays
  unsure (1)..(81): unsure at all Xaa locations
  Clone ID: MRT4577_127495C.1.pep
MMLLQRSFGPDSTHYAAAHRTQHALNXARVTPVSSPFNQNTPMFRVQSSPSLPNGTAFKQPFAINNNAAASSTGGFYGTRD

SEQ ID NO: 214800 - protein, 106 aa, Zea mays
  Clone ID: MRT4577_127496C.1.pep
FKNFTSPLWSIHSSFYLKEFTLSLRDIHYIQMVVIKYRDARALVFYMQLLPSPCCANEHLPEPFTIDRYPFQLITIQDDSMESDPTYLAVTAAIVKREQIVCPRAE

SEQ ID NO: 214801 - protein, 122 aa, Zea mays
  Clone ID: MRT4577_127497C.1.pep
CSWAALNIGTLRGCLRGQCLCMMTCRWRSHCQTCHCSPSGSWLMGKVQQVVTLQEKYTQIKTSFGAQMQICPKELRCCDALRNKCPVFRTLGARIWILPFLSFLQESSKGRLSSLRDTSCRI

SEQ ID NO: 214802 - protein, 216 aa, Zea mays
  Clone ID: MRT4577_127498C.1.pep
MAYGDRVTTFEDSEKESEYGYVRKVSGPVVVADGMGGAAMYELVRVGHDNLIGEIIRLEGDSATIQVYELGPGILGNIFDGIQRPLKTIAIKSGDVYIPRGVSVPALDKDVLWEFQPTKLGVGDVITGGDLYATVFENTLMQHHVALPPGSMGKISYIAPAGQYNLQDTVLELEFQGIKKKFTMLQTWPVRSPRPVASKLAADTPLLTGQRVLDAL

SEQ ID NO: 214803 - protein, 62 aa, Zea mays
  Clone ID: MRT4577_127499C.1.pep
VYEADARVLYLVPASELIAFLPPITGPRCMGALAIIAYGDSHPCPHEWRRVGLRWSMWCSVT

SEQ ID NO: 214804 - protein, 34 aa, Zea mays
  unsure (1)..(34): unsure at all Xaa locations
  Clone ID: MRT4577_12749C.1.pep
PPTSPLFSPSPLSPPPPPPHPMMSPPPPSPXPPP

SEQ ID NO: 214805 - protein, 39 aa, Zea mays
  Clone ID: MRT4577_1274C.1.pep
PSCGIQHLMMYAFLVMSAPLSHWVIKHRRYGWLPTLHYC

SEQ ID NO: 214806 - protein, 82 aa, Zea mays
  unsure (1)..(82): unsure at all Xaa locations
  Clone ID: MRT4577_127501C.1.pep
PGCFGFGIQKPIDFGIKYDPSTGIYGMDFYVVLXRAGDRVPRPPRCKSRVGIQPRVPKEDPIKWFPVKYEGVILNKAQAHPS

SEQ ID NO: 214807 - protein, 74 aa, Zea mays
  unsure (1)..(74): unsure at all Xaa locations
  Clone ID: MRT4577_127504C.1.pep
MITDEDVLKVQTLMLSLYIHCDGCEKNVKKTLHKIDGVYHIRIDAEQAKVTVSAXLDPDTIITKLNMAGKPTQM

SEQ ID NO: 214808 - protein, 146 aa, Zea mays
  Clone ID: MRT4577_127505C.1.pep
YSMSSWKTCSQTSRISTVRVGTTSSFMETLIVYMLSSAFMYTPNARLDDYDDLGDEGPVDIREQVVVGLAHPHHLLVVHGLERAVDVQALHVRDDTVPLLVRYGRPSTCRFTRQTRTTSRGMSSLSSRSSLCLWLVIDKRIAGESL

SEQ ID NO: 214809 - protein, 101 aa, Zea mays
  Clone ID: MRT4577_127506C.1.pep
RAGPPGIILRHCVLILCPGLSRCASVDFFCCNFPTIHLWWPPLWPPHGHRCCSFNTAIVSCGDHPFPAFGGDYLLGCFGDCFPLMPLSSNLLKKKTKTTIT

SEQ ID NO: 214810 - protein, 60 aa, Zea mays
  Clone ID: MRT4577_127507C.1.pep
RSHIHLNQHKKVTLQDTHLHHPWYVITFRVYLFPLIISITLRLIIYTHTHTRSTNTYRQY

SEQ ID NO: 214811 - protein, 111 aa, Zea mays
  Clone ID: MRT4577_127508C.1.pep
PDRQARPDPRDMYSTKGKGPQGGGSSKTTRARAEPAEDNEGTPPPTPAAPAEGAPDTPLQPEADGATTEKEAAPAPEGRARGFRLHGEDTTAHKALGGGKTADDQVWKDKK

SEQ ID NO: 214812 - protein, 146 aa, Zea mays
  Clone ID: MRT4577_127509C.1.pep
ILGARPSLYSSNTTTCGLAKRFSPHESLGEGPVLGEEEMVVKKEESQTSMPAVGASPLYRRRRSRRPQQPFLPLAAPVTGRCPQPQPATVGGGGGSSRSLSKPGSPWPGGLGFPARGGTEGGSGGGSDRSGRSAAGGVGGVEAEAG

SEQ ID NO: 214813 - protein, 72 aa, Zea mays
  Clone ID: MRT4577_12750C.1.pep
QQCVERNAKHFIMSIVIGLYQSLSRAAVSGFATHMPCTCTALEDFYKSLNRPDDDNDEQRSLNPYSEYLRKS

SEQ ID NO: 214814 - protein, 53 aa, Zea mays
  Clone ID: MRT4577_127510C.1.pep
EAPFASNDLACHHSRVTDRACQWHMRTCDSQHTRTIISRSQANTSMSRSQGLE

SEQ ID NO: 214815 - protein, 64 aa, Zea mays
  Clone ID: MRT4577_127511C.1.pep
MRLAQCTIQLTFQDGKGSKPVHLILTLNVATICDVDIKDHCGYDLSFTLKEGPTCTWTLYTNAR

SEQ ID NO: 214816 - protein, 1649 aa, Zea mays
  Clone ID: MRT4577_127512C.1.pep
MSGDPAKKEMETGEKPTTSHGSTSSEESRTKRKEKKKSSSHKGKEKKSSSHHKEKKERSSSHKPHRRGDKHKRMRKVVYYETDTSSTSTSDSDAPSVTSKHQERKKFSKIPLHYPRISKNAPLLSVPLGKPPTFDGEDYARWSDLMRFHLTSLHKSIWDVVEFGAQVPSVGDKDYDEDEVAQIEHFNSQATTILLASLSREEYNKVQGLKSAKEVWDVLKTAHEGDELTKITKRETIEGELGRFRLRKGEEPQHMYNRLKTLVNQVRNLGSIKWDDHEMVKVILRSLIFLNPTQVQLIRGNPRYTKMTPEEVIGNFVSFECMIEGSRKINELDDPSTSEAQPVAFKATEDKKEESTPSRQPIDASKLDNEEMSLVIKSFRQILKQRRGKDYKSRSKKVCYKCGKPGHFIAKCPVSSDGDRGDDKKGRRKEKKRYYKKKGGDAHVCREWDSDESSSDSSDDEDAANIAVTKGLLFPNVGHKCLMAKDGKRKKVKSNSSTKYESSSDDNASDEEDNLRVLFANLNMEQKEKLNELISAIHEKDDLLDSQEDCLIKENKKHVKVKKAYALEVEKCEKLSSELSTCREMIDNLRNENASLNTKVDSHVCIVSTFNPKNNNDLLARIEELNMSLASLRVENENLIAKAKEIDACNVTISDLRDNNDILRAKIVELNSCKPSTSSIEHVSICTRCRDVDINAIHDHMTLIKQQNDHIAILDAKIAEHNLENEKFKFARSMLYSGRRPGIKDGIGFQRGDNVKLSAPPKRLSNFVKGKAPMPQDNEGYILYPAGYPESKIRRIHSRRSHSGPNHAFMYKGETSSSRQPTHAKLPKKKIPNASNEHSISFKTFDASYVLTNKSGKVVAKFVGGKHKGSKTCVWVPKVLVSNAKGPKTVWVYASGGSSWILDSGCTNHMTGEKKMFSSYEKNQDPQRAVTFGDGNQGVTVFRRSDDSIAFKGVLEGQLYLVDFDRAELDTCLIAKTNMGWLWHRRLAHVGMKNLHKLLKGEHILGLTNVHFEKDREKSQTQETLKRFLRRAQNEFALRIKKIRSDNGTEFKNSQIEGFLEEEGIKHEFSSPYTPQQNGVVERKNRTLLDMARTMLDEYKTSDRFWAEAVNTACYAINRLYLHRILKKTSYELLTGKKPNISYFRVFGSKCFILVKRGRKSKFAPKTVEGFLLGYDSNTRAYRVFNKSTGLVEVSCDVVFDETNGSQIEQVDLDEIGEEEAPCIALRNMSIGDVCPKESEEPPIAQDQPSSSMQASPPTQIEDQAQVDKVEDQANEPPQDDGIDQGGDANEENKEDEEQRPLHPRVHQAIQRDHPVDTILGDIHKGVTTRSRVAHFCEHYSFVSSIEPHRVEEALQDSDWVVAMQEELNNFTRNKVWHLVPRPNQNVVGTKWVFRNKQDEHGVVTRNKARLVAKGYSQVEGLDFGETYAPVARLESIRILLAYATYHGFKLYQMDVKSAFLNGPIKEEVYVEQPPGFEDSKYPNHVYKLSKALYGLKQAPRAWYECLRDFLIANGFKVGKADPTLFTKTLENDLFVCQIYVDDIIFGSTNESTCEEFSRIMTQKFEMSMMGELKYFLGFQVKQLQEGTFISQTKYTQDILTKFGMKDAKPIKTPMGTNGHLDLDTGGEETTSRALTVPFLAIHAKKGEK

SEQ ID NO: 214817 - protein, 1397 aa, Zea mays
  Clone ID: MRT4577_127513C.1.pep
VPKKGDKDYDSEEVEQIQHFNSQTTTIVLASLSREEYNKVQGLKSAKDIWDVLKTAHEGDEVTKITKRDTIEGELGRFMLHQGEEPQAMYNRLKTLVNQVRNLGSTKWDDHEMVKVIFRSLVFLNPTQVQLIRGDPRYQLMSPEEVIGKFVSFELMIKGSKQIIERGATSTPEVQPVAFKATEEKKEESTSSRLPIDASKLDNEEMTLIIKRFRQILKQRKGKDYKPRSKKVCYKCGKPDHLIAKCPLSSDSDSGDDKKGKRREKKRYYKKKGGDAHVCREWDSDESSTDSSDEDATNIAVTKGLLFPNVGHKCLMAKDGKRKKVKSRSSTKYATSSDEASSSDDEDDLLTLFANLNMQQKEKLNELISAIHDKDELLDTQEDFLIKENKKHVKVKNAYAQEIEKCENLTSELSTCHDTISNLRFENDKLIAKVEKLNVCDDSIVNLRNDNASLIAKIDKLNASLSSLKVENEKLIAKAKDLNVCNVSISNLRDENAILHAKIVELNTCKPSTSTVSHVSICTRCRDVNVDAIHDHIAMIKQQNDNIAKLDAKIAEHELENEKFKFARSMLYSGRCPGIKDGIGFQKGDNVYASGGSSWIIDSGCTNHMIGEKKMFSSYEKNHDPQRAITFGDGNQGLEKSQTQETLKGFLRRAQNEFGLRIKKIRSDNGTEFKNSQIEGFLEDEGIKHEFSSPYTPQQNGVVERKNRSLLDMARTMLDEYKTSDRFWAEAINTACYAINCLYLHRILKKTSYELLTGKKPNVSYFRVFGSKCFILVKRGRKSNFAPKAVEGFLLGYDSNTRAYRVFNKSTRLVEVSGDIVFDETNGSQVEQVDLDELDDEETLCVTLRNMSIGDVCPKESKDSPQAQDQPSSSNQASPPTQDEDQAQDDENEDQEDEPPQEEGNDQGGDARDQDKDDNDGPRPPYPRVHQAIQRDHPVNSILDDIHKGVTTRSRVAHFCEHYSFVSSIEPYRVEDALRDSDWVLAMQEELNNFTRNEVWHLAPHPNQNVVGTKWVFRNKQDEHGVVTRNKARLVAKGYSQVKGLDFGETYAPVARLESIRILLAYATYHGFKFYQMDVKSAFLNGPIKEEVYVEQPPGFEDSEYPNYVYKLSKALYGLKQAPRAWYECLRDFLITNSFKVGKADPIIFTKNIAKDLFVCQIYVDDIIFGSTNKSTCEEFSRIMIQKFEMSMMGELKYFLGFQVKQLQEGTFICQTKYIQDILNKFGMKDAKPIKTPMGTNGHLDLDTRGCKIDKKSTSGTCQFLGRSLVSWASKKQNSVALFTAEAEYIAAGHCCAQLLWMGQTLRDYGYKLSKVLLLCDNESAIRMADNPVEHNRTKHIDIRYHFLRDHQQREDIEIAYVSTKEQLANIFTNPLDEKTFSKLRNELNILDSRNFD

SEQ ID NO: 214818 - protein, 52 aa, Zea mays
  Clone ID: MRT4577_127514C.1.pep
SQARKCVQLTVLPGAACIIDRSIYKLGCRTLLYMYVWPPVRVASIPLLVHPV

SEQ ID NO: 214819 - protein, 1215 aa, Zea mays
  Clone ID: MRT4577_127515C.1.pep
MRKVVYYETDTSSPSTSGSDASSITSKRHERKKFSKIPLRYPRIPKHTPLLSIPLGKPPMFDGEDYARWSDLMRFHLSSLHKSIWDVVEFGVQVPSVGDEDYDEDEVAQIQHFNSQASTILLASLSREEYNKVQGLKGAKEIWDTLKTAHEGDEVTKITKRETIEGELGRFRLRQGEEPQDMYNRLKTLVNQVRNLGSKKWDDHEMVKVILRSLVFLNPTHVQLIRGNPRYTLMTPEEVIGNFVSFELMIKGSKKINELDGPSTSEAQPVAFKTTEEKKEESTPSRTPIDASKLDNEEMALIIKSFRQILKQRRGKDYKPRSKKVCYKCGKPGHFIAKCPISSDSDRGDDKKGRRKEKKKYYKKKGGDAHVCREWDSDESSTDSSSDEDAANISVTKGLLFPNVGHKCLMAKDDKKKKVKSRSSTKYETSSDEDDASNEEDNLRILFANLNMQQKEKLNELISAIHEKDDLLDTQEDFLIKENKKHVKVKNAYALEVEKCEKLSSELSTCHETIDNLRNENANLLAKVDSNVCDVSIPNLRNDNDDLLAKIEELNISLASLRIENGKLLAKAKELDVCNITISDLRDKNDILCAKIVELNSCKPSTSTTEHVTICTRCRDVDVNAIHDHLSMIKQQNDHIAKLDAKIAEHELENKKFKFARSMLYNGRRPGIKDGIGFQRGGNVKLNAPPKKLSNFVKGKAPMPQDNEGYILYPAGYPESKIRRIHSRKSHSGPNHAFMYKGETSSSRQPTRAKLPKKKTPSASNDHDISFKTFDASYVLTNKSGKVYASGGSSWIIDSGYTIHMTGEKKMFSSYEKNQDPQRAITFGDGNQGVTVFRRSDDSITFKGVLEGQLYLEKSHTQETLKGFLRRAQNEFGLRIKKIRSDNGTEFKNSQIEGFLEEEGIKHEFSSPYTPQQNGVVERKNRTLLDMARTMLDEYKTSDRFWAEAVNTACYAINRLYLHRILKKTSYELLTGKKPNISYFIVFGSKCFILVKRGRKSKFAPKTVEGFLLGYNSNTRAYRVFNKSSGLVEVSCDVVFDETNGSQVEQVYLDEIGDEEAPCIALRNMSIGDVCPKESEEPPNAQDQPSSSTQASPPTQNENEAQVDEGEDQENEPPQDDDNDQGGDANDQDKEDEEPRPPHPRVHQAIQRDHLIDTILGDIHKGVTTRSRVAHFCEHYSFVSSIEPHRVEEALQDSDWVVAMQEELNNFTRNK

SEQ ID NO: 214820 - protein, 1676 aa, Zea mays
  Clone ID: MRT4577_127516C.1.pep
MSGDHAKKEMETGEKPTTSQGSTSSEESRTKRKEKKKISSNKGKEKKSSSHHKEKKEKSSSHKPHRSKDKQKRMRKVVYYETDTSSTSTSGSDAPSVTSKRQERKKFSKIPLHYPRISKHAPLLSVPLGKPPTFDGEDYARWSDLMRFHLTSLHKSIWDVVEFGAQVPSVGDKDYDEDEVAQIEHFNSQATTILLASLSREEYNKVQGLKSAKEVWDVLKTAHEGDELTKITKRETIEGELGRFRLRKGEEPQHMYNRLKTLVNQVRNLGSVKWDDHEMVKVILRSLIFLNPTQVQLIRGNPRYTKMTPEEVIGNFVSFECMIEGSRKINELDDPSTSEAQPVAFKATEEKKEEATPTRQPIDASKLDNEEMALVIKSFRQILKQRRGKDYKSRSKKVCYKCGKPGHFIAKCPISSDSDRGDDKKGRRKEKKRYYKKKGGDAHVCREWDSDESSSDSSDDEDAANIAVTKGLLFPNVGHKCLMAKDVKRKKVKSNSSTKYESSSDDNASDEEDNLRTLFANLNIEQKEKLNELISAIHEKDDLLDSQEDCLIKENKKHVKVKKAYALEVEKCEKLSCELSTCREMIDNLRNENASLNAKVDSHVCNVSIPNPRDNNDNLLARIEELNISLASLKVENEDLIAKAKELDVCNATISNLRDKNDILHAKIVELNSCKPSTSIVEHVSICTRCRDVDINAIYDHMALIKQQNDHIAKLDAKIAEHNLENEKFKFARSMLYNGRRPGIKDGIGFQRGDNVKISAPPKRLSNFVKGKAPMPQDNEGYILYPAGYPESKIRRIHSRKSHSGPNHAFMYKGETSSSRQPTHAKLPRKKTPIASNEHSISFKTFDASYVLTNKSGKVVAKYVGGKHKGSKTCVWVPKVLVSNAKGPKTIWVYASGGSSWILDSGCTNHMTGEKKMFSSYEKNQDPQRAITFGDGNQGLVKDYNLLSVSQLCQMGYNCLFTDIGVTVFRRSDDSIAFKGVLEGQLYLVDFDRAELDTCLIAKTNMGWLWHRRLAHVGMKNLHKLLKGEHILGLTNVHFEKDREKSQTQETLKGFLRRAQNEFGLRIKKIRSDNGTEFKNSQIEGFLEEEGIKHEFSSPYTPQQNGVVERKNRTLLDMARTMLDEYKTSDRFWAEAVNTACYAINRLYLHRILKKTSYELLTGKKPNISYFRVFGSKCFILVKRGRKSKFAPKTVEGFFLGYDSNTRAYRVFNKSTGLVEVSCDVVFDETNGSQVEQVDLDEIGEEEAPCIALRNMSIGDVCPKESEEPPNAQDQPSSSTQVSPPTQNEDEAQVDEVEDQANEPPQDNGNDQGGDANEEDKEEEEQRPPHPRVHQAIQRDHPVDTILGDIHKGVTTRSRVAHFCEHYSFVSSIEPHRVEEALQDSDWVVAMQEELNNFTRNEVWHLVPRPNQNVVGTKWVFRNKQDEHGVVTRNKARLVAKGYSQVEGLDFGETYAPVARLESIRILLAYATYHGFKLYQMDVKSAFLNGPIKEEVYVEQPPGFEDSEYPNHVYKLSKALYGLKQAPRAWYECLRDFLIANGFKVGKADPTLFTKTLENDLFVCQIYVDDIIFGSTNESTCEEFSRIMTQKFEMSMMGELKYFLGFQVKQLQEGTFISQTKYTQDILTKFGMKDAKPIKTPMGTNGHLDLDTGGEDSTSRALMVPFLAIHAKKGEK

SEQ ID NO: 214821 - protein, 946 aa, Zea mays
  Clone ID: MRT4577_127517C.1.pep
MGSSSLRAERESRLVGGNEIDGSWFLTLVMHRRLDHVGMKNLHKLLKGEHILGQTNVHFEKDRVCSACQAGKQVGTHHPHKNIMMTDRSLELLHMDLFGPIAYISISRKTLKGFLRRAQNEFGLRIKKIRSDNGTKFKNSQIEGFLEEEGIKHEFSSPYTPQQNGVVERKNRTLLDMSRTMLDEYKTPDRFWAEAINTACYSINRLYLHRILKKTSYELLTGKNPNVSYFRVFGSKCFILVKRGIKSKFAPKGVEGFLLGYDSNTKAYRVFNKSTGLVEVSCDIMFDETNGSQVEQVNLDELDDEEAPCVALRNMSTADVCPKEFEEPPQAQDQPSSSNQASPPTQDEDQAQDNEEDDQEDEPPQEESNDQGGDDHDKDKEDDQEIQGQRPPHPRVHQAIQRDHPVNSILGDIHKGVTTRSRVAHFCEHYSFLSSIEPYRMEDALRDSVWVLAMQEELNNFTRNEVWHLVPRPNQNVVGTKWVFCNKQDEHGVVTRNKARLVAKGYSQVEGLDFGETYASVARLESIRILLAYATCHDFKIYQMDVKSAFLNGPIKEEVYVEQPPGFEDSEYPNHVYKLSKALYGLKQAPRAWYECLRDFLITNGFKVGNADPTLFTKTIANDLFVCQIYVDDIIFGSTNKSTCEEFSRIMIQKFKMSMMGELKYFLGFQVKQLQEGTFISQTKYIQDILTKFGMKDAKPIKIPMGTNGHLDLDTRDKSVDQKVYRSMIGSLLYLCASRPNIMLSVCMCARFQADPKEVHLRVMKRILRYLVHTPKFGLWYPKGSTFDLIGYSDADWAGCKIDRKSTSGTCQFLGRSLVSWASKKQNSVALSTAKAEYIAAGHCFAQLLWMRQTLRDYGYKLSKVPLLCDNESAIRMADNPVEHSRTKHIAIRYHFLRDHQQRGDIEIAYVSTKEQLVDIFTKPLDEKTFTKHRNELNILDSRNFD

SEQ ID NO: 214822 - protein, 115 aa, Zea mays
  Clone ID: MRT4577_127518C.1.pep
KTGFVKKQLLLHIVPTPFPKQFLGEFGFGHLAKKVKSRGFFPRPPFFFTKIGEIFFLGRSIEKSPVNKTRALFINNSRQQRLVFFFLSPPFSRFVGQNHILLLANFQLKSLFCGG

SEQ ID NO: 214823 - protein, 1216 aa, Zea mays
  unsure (1)..(1216): unsure at all Xaa locations
  Clone ID: MRT4577_127519C.1.pep
MSGEHAKKEIMTGDDKSTIHGKAPSGESDNKMKGAPSHTKSHRSGDKKKKMKKVVYYETDSSSPSTSGSDTPSVTSKRHERKKFRDEAYDSDEVAQIRHFDSQATTILLASLSREEYNKVQGLKSAKEIWDVLKTVHEGDEVTKITKRETIEGKLGRFILNQGEEPQAMYNRLKTLVNQVRNLGSTKWDDHEMVKVILRSLVFRNPMQVQLIRGDPRYKLMSPEEVIGKFVSFELMIKGSKQIVEQGGTSTPEVQPVAFKATEEKKEESMSSRLPIDASKLDNEEMALIIKSFRQILKQRRGKDYKSRFKKVCYKCGKPGHFIAKCPLSSDSDRGDDKKGRRKEKKKYYKKKGDDAHVCREWDSDESSTYSSSDEDAANIAVTKGLLFPNVGHKCLMAKNGKKKKVEKCENLSSELSTCHDVISNLRNENAKLIAKVEKSNVCDDSIDNLRNDNASSIAKIEKLNASLASLRIENDKLTAKAKDLDVCNASISNLRDENAILHAKIVELNDCKPSTSSIDHVSICTRCRDINIDAIHGHLAMIKQQNDHIAKLDAKIVEHELENEKFKFARSMLYSGRRPGITDGIGFQQGDNVKLNAPPKRLSNFVKGKAPMPQDNEGYILYPIGYPEHKIRRIHSRKSHSGPNHAFIYKSETSSSRQSTHAKLPKKKTPIASNDHNISFKTFDASYVLTNKSGKVVAKYVGGKHKGGCTNHMTGEKKMFSSYEKNHDPQRAITFVDGNQGVTVFRRSDDSVAFKGVLEGQLYLVDFDRAELDTFLIAKTNMGWLWHRRLAHVGMKNLHKLLKGEHILGLTNVHFEKDRVRSACQAGKQVGVHHPYKNIMTTDRPLELLHMDLFGPIAYISIGGRKISNSRDLKGILETVERKNRTLLDMARTMLDEYKTSDRFWAEAVNTACYAINRLYLHRILKKTLYELLIGKKPNVSYFRVFGSKCFILVKRGRKSKFAPKAVEGLLLGYDSNTRAYRVFNKSTGLVEVSCDIVFDETNGSQVEQVDLDELDDEEALCIALRNMSIGDVCPKKSEEPPQAQDQPSSPMQASPPTQDEDQDQDNDDEDQEEPPQEEDNDQRGDANDQDKEDDEGTKWVFRNKQDEHGVVTRNKARLVAKGYSQVEGLDFGETYAPVARLESIRILLAYATYHGFKLYQMDVKSAFLNGPIKEEVYVEQPPSFEDSEYPNHVYKLXKALYGLKQAPRAWYECL

SEQ ID NO: 214824 - protein, 93 aa, Zea mays
  Clone ID: MRT4577_12751C.1.pep
RCLHMKLGAQRTGITHIPVYDQRRDAITAAHVWILQDTMHVAHSELQPLADPLSELVWSMQSIELMHDTDKASSRARTRGVSCMVTIHRIIVA

SEQ ID NO: 214825 - protein, 1647 aa, Zea mays
  Clone ID: MRT4577_127520C.1.pep
MSGDHTKKEMETGEKPTTSHGKTSSEESRNKRKEKKDSSKGKEKKSSSHKEKKEKSSSHKPHRSGDKKKKMRKVVYYETDSSSTSTSGSDAASVTSKRQERKKYSKIPLRYPHISKHTPLLFVPLGKPPTFDGEDYARWSDLMRFHLTSLHKSIWDVVEFGAQVPSVGDEDYDEDEVAQIEHFNSQATTILLASLSREEYNKVQGLKSAKEVWDVLKTAHEGDELTKITKRETIEGELGRFRLRKGEEPQNMYNRLKTLVNQVRNLGSKKWDDHEMVKVILRSLIFLNPTQVQLICGNPRYTLMTPEEVIGNFVSFECMIEGSRKINELDDPSTSEAQPVAFKATEEKKESTPSRQPIDASKLDNEEMALVIKSFRQILKQRRGKDYKLRSKKVCYKCGKPDHFIAKCPISSDSDRGDDKKGRRKEKKKYYKKRGGDAHVCREWDSDESSSDSSDDEDAANIAVTKGLLFPNVGHKCLMAKDGKKKKVKSKSSTRYESSSDENVSDEEDNLRTLFANLNMQQKEKLNELISAIHEKDDLLDTQEDFLIKENKKHVKVKNAYALEVEKCEKLSNELSTCHETIDNLRNENSNLLAKVDSIACNVSIPNLRNDNDDLLAKIEELNLSLVSLKNENEKLIAKAKDFDVCNATISDLRTKNDILHAKVVELKSCKPSTSTVEHTSICTRCRDIDVNAIHDHMTLIKQQNDHIAKLDAKIAEHNLENEKFKFARSMLYSRRRPGIKDGIGFQRGDNVKLNAPPKRLSNFVKGKAPMPPDNEGYILYPAGYPEDKIRRTHSRKSHSGSNHAFMYKSETSSSRQPTRAKLPKKKTPSASNDHDISFKTFDASYVLTNKSSKVYASGGSSWIIDSGCTNHMTGEKKMFSSYEKNQDPQRAITFGDGNQGVTVFRRSDDSIAFKGVLEGQLYLVDFDRAELDTCLIAKTNMGWLWHRRLAHVGMKNLHKLLKGEHILGLTNVHFEKDRICSACQAGKQVGAHHPHKNIMTTDRPLELLHMDLFGPIAYISIGGSKYCLEKYQTQETLKGFLRRAQNEFTLRIKKIRSDNGTEFKNSQIEGFLEEEGIKHEFSSPYMPQQNGVVERKNRTLLDMARTMLDEYKTSDRFWAEAVNTACYAINRVFGSKCFILVKRGRKSKFAPKTVEGFLLGYDSNTRAYRVFNKSSGQVEVSCDVVFDETNGSQVEQVDLDEIGDEEAPCIALRNMSIGDVCPKKSEEPPNAQDQPSSSTQASPPTQNEDEAQIDEGEDQANEPPQYDGNDQGGDANDQDKEDEEQRPPHPRVHQAIQRDHPVDTILGDIHKGVTTRSRVAHFCEHYSFVSSIEPHRVEEALQDSDWVVAMQEELNNFTRNEVWHLVPRPNQNVVGTKWVFRNKQDEHGVVTRNKARLVAKGYSQVEGLDFGETYAPVARLESIQILLAYATYHGFKLYQMDVKSAFLNGPIKEEVYVEQPPGFEDSEYPNHVYKLSKALYGLKQAPRAWYECLRDFLITNGFKVGKADPTLFTKTLENDLFVCQIYVDDIIFGSTNESTCEEFSRIMTQKFEMSMMGELKYFLGFQVKQLQEGTFISQTKYTQDILNKFGMKDAKPIKTPMGTNGHLDLDTGGEESNVRALMIPFLAIHAKGGESMSPKQKDRTTT

SEQ ID NO: 214826 - protein, 121 aa, Zea mays
  unsure (1)..(121): unsure at all Xaa locations
  Clone ID: MRT4577_127521C.1.pep
ILLDRSPYPAGFMLVXLTDSYTFFLFDKGTNNLLHTFDREGNAPLLWGITAHGXLAPSDYIHMLKGSCGKSLAPNPQGCSYYNALGGLKCYENPTHKVTPHPGDKEEICGAXSRWRKGLLS

SEQ ID NO: 214827 - protein, 1622 aa, Zea mays
  unsure (1)..(1622): unsure at all Xaa locations
  Clone ID: MRT4577_127522C.1.pep
MSGEHAKKEMETDDKPATSHGKASSEESRKKGKGKEKKASSHKSHRSGDKKKKMRKVVYYETDTSSPSTSGSDAPSVTSKRHERKKFSKIPLHYPRTSRHTPLLSVPLGKPPTFDGEDYARWSDLMKFHLTSLHKSIWNVVEFGAQVPSVGDEDYDEDEVAQIEHFNSQATTILLASLSREEYNKVQGLKSAKEVWDVLKTAHEGDELTKITKRETIEGELGRFRLRQGEEPQDMYNRLKTLVNQVRNLGSKKWDDHEVVKVILRSLIFLNPTQVQLIRGNPRYTLMTPEEVIRNFVSFEFMIKGSRKINELDGPSTSEAQPVAFKVTEEKKEESTPSRTHIDASKLDNEEMALVIKSFRQILKQRRGKDYKPRSKKVCYKCGKPGHFIAKCPISSDSDRGDDKKGRRKEKKRYYKKKGGDAHVCREWDSDESSSDSSDDEDGANIAVTKGLLFPNVGHKXCLMAKDGKKKKXKLNELISAIHEKDDLLDSQEDFLIKENKKHVKVTNDYALEVEKCEKLSSELSTCHETIDNLRNENSNLLAKVDYIACNVSIPNLRNDNDDLLAKIEELNISLASLRIENEKLLAKAKELDVCNISISDLRDKNNILRAKIVELNSCKPSTSTVEHTSICTRCRDVDINAIHDHMALIKQQNDHIAKLDAKIAEHELENKNFKFARSMLYSGRRPGIKDGIGFQKGDNVKLNAPPKKLSNFVKGKAPMPQDNEGYILYPVGYPESKIRRIHSRKSHSGPNHAFMYKGETSSSRQPTRAKLPKKKTPSASNDHDISFKTFDASYVLTNKSGKVYASGGSSWIIDSGCTNHMTGDKKMFSYEKNQDPQRAITFGDGNQGVTVFRRSDDSIAFKGVLEGQLYLVDFYRAELDTCLIAKTNMGWLWHRRLAHVGMKNLHKLLKGEHILRLTNVHFEKDRICSACQAGKQVGAHHPHKNIMTTDMPLELLHMDLFGPIAYISIGGSKYCLVIVDDYSRFTWVFFLQEKSHTQETLKGFLRRAQNEFGLRIKKIRSDNGTEFKNSQIEGFLEEEGIKHELSSPYTPQQNGAVERKNRTLLDMARTMLDEYKNSDRFWAEAVNTACYAINRLYLHRILKKTSYELLTGKKPNISYFRVFGSKCFILVKRGRKSKFAPKTVEGFLLGYDSNTKAYRVFNKSSGQVEVSCDVVFDETNGSQVEQVDLDEIGDEEAPCIALRSMSIGDVCPKESKEPPNAQDQPSSSTQACPPTQNEDEAQVDEGEDQTNEPPQDDGNDQGGDANDQDKEDDEPRPPHPRVHQAIQRDHPVDTILGDIHKGVTTRSRVAHFCEHYSFISSIEPHRVEEALQDSDWVVAMQEELNNFTRNEQDEHGVVTRNKARLVAKGYSQVEGLDFGETYAPVARLESIRILLAYATYHGFKLYQMDLKSAFLNGPIKEEVYVEQPPGFEDSEYPNHVYKLSKALYGLKQAPRAWYECLRDFLITNGFKVGKVDPTLFTKTLENDLFVCQIYVDDIIFGSTNESTCEEFSRIMTRKFEMSMMGELKYFLGFQVKQLQEGTFLSQTKYTQDILSKFGMKDAKPIKTPMGTNGHLDLDTEGNSVDQKGERIILRALMTPFLAIHAKGGESISPKQKDRTTI

SEQ ID NO: 214828 - protein, 1207 aa, Zea mays
  unsure (1)..(1207): unsure at all Xaa locations
  Clone ID: MRT4577_127523C.1.pep
MKKVVYYEIDSSSPSTFGSDAPSVTSKRHERKKFSKIPLRYPRISKRTPLLSISLGKPPIFYGEDYCMWSDKLRHHLTSLHASIWDIVEFGAQVPPIGDEDYDSNEIAQIWHFDSQATTILLASLCREEYNKVQWLKSAKKIWDVLKTAHEGDEVTKTTKRETIEGELGRFVLNQGEEPQAMYNRLKTLVNQIILRSLIFRNPTQVQLIRGDPRYKLMSPEEVIGKFVSFELMIKGSKQIVNLEQGDTSTPEVQPIAFKATEDKKEESTSSRLPIDASKLDNEEMTLIIRSFRQILKQRRGKDYKPRSKRVCYKCGKPRHFIAKCPMSSDSDRDNDKKGMKKEKNKYYKKKGDDAHVCWEWDSSSDEDAANIIVNKGLLFPNVGHKCYMAKDGKKKRVQARTTXKYTTSSDEXGKAPKAQDNEGYILYPAGYPEHKIRRSHARKSHSVSHHAFMYKNEASSSRHSTYVKMSKKITPTASNEPNVSFKTFDASYALTNKSGKIVAKYVGGKHKGSKTRVWVPKVYASWSSSWIIDSRCTNHMTWEKRMFSSYEKNDDPQRVITFGDGNQDLGVTVFRRSDDSIAFKGVLEXNIMTTDRPLELLRMDLFGSIAYISIXREKSQTQETLKGFLRRAQNEFGLRIKKIRSDNGTEFKNSQIEGFLEDEGIKHEFSSPYTPQQNGVVERKNRTLLDMARTMLDEYKTPDWFWVEAINTACYSINRLYLHRILKKTSYEFLXRNMSIGDVCPKESEEPTQAQDQPSLSCKHXPPTQDEDQAQDNEDGDQEDEPPQEEDNDQGGYEVDQDKEDDQELQGQRPPHPRVHQAIQRDHPVNSILGDIHKGVTTRSRVAHFCEYYSFVSSIEPYRVEEALRDLDWVLAMQEELKNFTRNXGTKWVFHNKQDEHGVETRNKARLVANGYSQVXKLYQMDMKSSFLNGPIKEEVYVEQPPGFEVSEYPNHVYKLSKALYGLKQAPRAWYKCLRDFLITNGFKVGKADPTLFTKTIAKDLFVCQIYVDDIIFGSTNKSTCEEFSRIMIQKFEMSMMGELKYFLGFQVKQLQEGTFISQTKYIQNILTKFGMKDAKPIKTPMGTNGHLDLDTRGCKIDRKSTSGTCQFLGRSLVSWASKKQNSVALSTAEAEYIAAGHCCVQLLWMRQTLRDYGYKLSKVPLLCDNESAIRMEDNLVEHSRTKHIDIQYHFLRDHQQRGISK

SEQ ID NO: 214829 - protein, 1373 aa, Zea mays
  Clone ID: MRT4577_127524C.1.pep
MSGDHAKKMVIGDDKSATSHGKAPSRESANKKKDGSPSRIRSHKSGEKKKKMKKVVYYETDSSLPSTSGSDTASVTSKRQERKKCSTIRRDEDYDEDEVAQIVHFNSQATTILLTSLSREEYNKTAHEGDAVTKITKRETIEGELGRFRLRQGEEPQEMYNRLKTLVNQVRNLGSKKWDDHEMVKATEEKKEGSTSSRLPIDASKLDNEEMALIIKSFRQILKQRRGKDYKSRSKKVCYKCGKPGHFIAKCPISSDSDRGDDKKGKRREKKRYYEKKGGDAHVCREWNSDENSSDSSSDEDAANIAVTKGLLFPTSATSASWQKTAKGRSDEDNSCDEEDNLRALFANLNMQQKEKLNELISSIHEKDELLDSQEDFLIKENKKHVKVKNAYALELEKCEKLSSELSTCHDIIANLRNENAKIIAKIDSNVCDVSIPNLRDDNVSLLAKIEELNVSLASLRNENEKLIAKAKNLDVCNITISNLRNENDILHANIVELKSCKPSTSTVEHVFICTRCRDINVDAIHDHLALIKKQNNHIAQLNAKLNEHDLENEKFKFARSMLYSGRCLGIKDGIGFQKGDNVKLNALLKDCLILLRARLPCLRITRVYASGGSSWIIDSGCTNHMTGEKKMFSSYEKNQDPQQAITFGDGNQGVTVFRRSDDSVAFKGVLEGQLYLVDFDRAELDTCLIAKTNMGWLWHRRLAHVGMKNLHKLLKGEHILGLTNVHFEKDRVCSACQTGKQVGVHHPHKNIMTTDRPLELLHMDLFGPIAYISIGGSKYCLVIVDDYSRFTWVFFLQEKSHTQETLKGFLRRAQNEFDLRIKKIRSDNGTEFKNSQIEGFLEEEGIKHEFSSPYMPQQNGVVNRNNRTLLDMARTMLDEYKTSDRFWAEAVNTACYAINRLYLHRILKKTSYELLTGKKPNVSYFRVFGSKCFILVKRGRKSKFAPKTVEGFLLGYDSNTRAYRVFNKSTGLVEVSCDIVFDETNGSQVEQIDLDELDDEEAPCVALRNMSIGVVCPKESEEPPQAQDQPSSSMQASPPTQDEDEAQNDEGEDQEVEPPQEESNDQGGDAHDQDEEDEQVQRPPHPRVHQAIQRDHPVNTILGDIQKGVITRSRVAHFCEHYSFVSSIEPHKVEEALQDSDWVVAMQEELNNFTRNELYQMDVKSAFLNGPIKEEVYVEQPPGFEDSEYPNHVYKLSKALYGLKQAPRAWYECLRDFLITNGFKVGKADPTLFTKTLENGLFVCQIYVDDIIFGSTNESTCEEFSRIMTQKFEMSMMGELKYFLGFQVKQLQEGTFISQTKYIQDISNKFGTKDAKPIKTPMGTNGHLDLDTGGKSVDQKKEHIGDLPVLGKVSGVLGFKEAKFHSSFYCQS

SEQ ID NO: 214830 - protein, 103 aa, Zea mays
  Clone ID: MRT4577_127525C.1.pep
PCRQPRVKATIYVAEVLLPWAIPPLTVWQSGTRKESRKKFEKSHKFHDTKSNHDLSLEIKPYISKRMCIATYHSKQMYNTSPDVDGCWPRGRLDWRLVPCQLV

SEQ ID NO: 214831 - protein, 152 aa, Zea mays
  Clone ID: MRT4577_127526C.1.pep
MAWADRADPTATVRPSARVPARAVASGLEGGTPFASKFSSEKFSTKTTFVPFDYIDNGILKTTRETSNGKADRAKGLLRLRDTDTLLITFRERNELPPHQKGCKITNSKRLTGDHCTSSDNDLCLGRLDSSNDYPRANATVKRPSPLSPHGG

SEQ ID NO: 214832 - protein, 58 aa, Zea mays
  unsure (1)..(58): unsure at all Xaa locations
  Clone ID: MRT4577_127527C.1.pep
ITSIKFVSSLKSSGPFGAWGVGSASQFAIPVXQGSAIVGFFARAGVDLRPHGVDVRSL

SEQ ID NO: 214833 - protein, 117 aa, Zea mays
  Clone ID: MRT4577_127528C.1.pep
MAGRGGNGVPAEQEFPGWSVAKAQEDPHPPVRHVHAARGLPAQARHKNEEGPAHFIPGISNSMPSHHHQFPGAQWSKNPTPHVPSPVEFIIEAFQHQKDELKEKARQKLIRLSGGGN

SEQ ID NO: 214834 - protein, 101 aa, Zea mays
  unsure (1)..(101): unsure at all Xaa locations
  Clone ID: MRT4577_127529C.1.pep
MAKHDPELMVCRSQPAMPIGRLCEKRDGXCVDCNSFVRPWTLNRLWDKCNGGPFQGRCQICRGVPISYTYYCTDATHHDNDRDGCPKIVTLRSAKTDLFDE

SEQ ID NO: 214835 - protein, 199 aa, Zea mays
  Clone ID: MRT4577_12752C.1.pep
MRDAVVVMAVPGGGGGGGGSASSAAAAPCAACKLLRRRCAAGCVFAPYFPPGEPHKFANVHKVFGASNVSKLLQEIPAQHRGDAVSSLVYEANARVRDPVYGCVGAISSLQEQVEALQAQLALAQAEMVRLRMTNDYIVHRLKAASRAGGGGSSYAGSPSSMSSPKTAEPEAHCKATPELLDMVVDQPGMDDAHFWSSY

SEQ ID NO: 214836 - protein, 246 aa, Zea mays
  Clone ID: MRT4577_127530C.1.pep
MTEYWVSQGNKWCDFCKIYIANNSFSIRTHELGKRHKDNVTKRLSTMQKESETKEKEQQQAARALQQIEAKAKKSYQKDLENNQRNVDGDTSAAPGDGWVLDSASGYYHDKSTGLYYDSNSGFYYSDSLGKWVTQEEAYKSVQASKSDAGQSSASQTKAPAAAETAVPAIKGGAAPGRVVTKPLNPMRPIKGTPAPSAVAVNKRKRDDGKPKAVSKEEEAALKAREAARKRVEDREKPLMGLYKTY

SEQ ID NO: 214837 - protein, 116 aa, Zea mays
  Clone ID: MRT4577_127531C.1.pep
ILKFCCIPFHSSCKLLKFCCIPFHSSCKLLPCTTAALKTDGETDDYYNRGEQHKGFKKERKKESLLYTGMHGRDLRRPVGCRHGRGERAPSSPRSPLNPKSLQLAPSPSLARSPVS

SEQ ID NO: 214838 - protein, 70 aa, Zea mays
  Clone ID: MRT4577_127532C.1.pep
QKKVWIADVQGSSTFAGYCKGPLFYRTCYRLLLEGLRTLKNSKFKVPDFIHVVVGDSLSLDTIKLIQPHK

SEQ ID NO: 214839 - protein, 80 aa, Zea mays
  unsure (1)..(80): unsure at all Xaa locations
  Clone ID: MRT4577_127533C.1.pep
SVIKLIVLRDPICCSVSPXPCSSYXAIPRASYDACATSSSFASGASSPFVPXPTXIPNGIYGNPILPMLETFSNGTPSEK

SEQ ID NO: 214840 - protein, 156 aa, Zea mays
  unsure (1)..(156): unsure at all Xaa locations
  Clone ID: MRT4577_127534C.1.pep
VLFFFXXGGFLGGLGGPRVVVFGLGWPVALAVGGVRLGSGLCVPGAVGPAFLFSPFPVLAVXXRWVVXAAGAPGPFLFLGPGVLPCPPVVAVAPFFVVPXGLGFGPPFXGSVVVGLPPVAFVVLCAFSLFWPLWGGGPGFVLWSPPPRVFCFFVPG

SEQ ID NO: 214841 - protein, 87 aa, Zea mays
  Clone ID: MRT4577_127535C.1.pep
KEGSPTNFICNSRDRKTRWWYPAGPCKVLMRFLRTGRAHFFTGAQTGKTLDKRSGDKLNPPTKGMLAFSSQAQARVGERYLARGETI

SEQ ID NO: 214842 - protein, 189 aa, Zea mays
  Clone ID: MRT4577_127536C.1.pep
PPGRGKKKKKKKKKKKKKKKKKKKKKKKKKKKKKKKKKKKKKEKKKNSRGGGGGEREKKNTRGGAQKGVPPPEFAPWVRGLKKFLKGFMGPKIWVGENLGGFFVPKPFLGPQKFGGGRPLFLFFGKGFKFVFNYGGGFSFLGKPLVFVVGKVRKKKTPPGGFGGGFSFPKTKENYGVVNKTKGGFRFPP

SEQ ID NO: 214843 - protein, 233 aa, Zea mays
  unsure (1)..(233): unsure at all Xaa locations
  Clone ID: MRT4577_127537C.1.pep
APHRHPCPARLTDGGPHRPAPLVGEPSSPPPPPHRSPGQEIRPTPVARTRRPASRSCWAPGCRRPAPDGFPDRAGAASRREGASELSDLESSILSYITQIMEKLQDCNSKSLVALPGSLVLHLFRLFGQQDQSSWQKYILGSFLLVRKGCYSSGESKKHSDVFRDISXLDFFPYATDSDSEXLELKEQKPVPKAQAGGDSSGNRSNDCYFPGLHDDLSQDCLAWXSRSDHPFL

SEQ ID NO: 214844 - protein, 112 aa, Zea mays
  unsure (1)..(112): unsure at all Xaa locations
  Clone ID: MRT4577_127538C.1.pep
GPERELKVALESFWDGKSTDEDLEKAAAGSRAXLWKQRADAGNRSIPNSTFLNYDQGFDTTDVLGTSPVRYYWTVREDRCVTYLSMRRGSATVRAMDMTKWFDTNCHSIVRE

SEQ ID NO: 214845 - protein, 55 aa, Zea mays
  unsure (1)..(55): unsure at all Xaa locations
  Clone ID: MRT4577_127539C.1.pep
PIFFFFFFFFFXLLFPXSFLYHLXLSKXSSLLRLLVGTGPPCKLERGHATGITKG

SEQ ID NO: 214846 - protein, 236 aa, Zea mays
  Clone ID: MRT4577_12753C.1.pep
MNALEQLASIDLIELCKEARIERCRATRDLSSCGRYVHHVLNSCGHASLCAECSQRCDVCPICRSPIPDNGNRVQLRLYYKCLEEGLISKQHDERFQEKEDHGNPVSMDVQQLHSLFDVAVQNNLTSLICHYITDVCLDENAVSSDPLLAFLLDEVVIKDWCKRAVNVLITEIGVIYRSGSETMRSRLSQLQKFATQLAGIYSILEGMVSSFNEAVSAHVNDLHQLIEKTLQAKQH

SEQ ID NO: 214847 - protein, 115 aa, Zea mays
  unsure (1)..(115): unsure at all Xaa locations
  Clone ID: MRT4577_127540C.1.pep
LRPPLFPFSQLGFAYXREQQFFPFNQLGALDPAAFLRRQIFFPFGQLVAANRGSFLTQHRLWPFSQRFGANPAPLLQLHQLWPLGPLALAGPGASSQQPIFGGALLLGGFLGGIQ

SEQ ID NO: 214848 - protein, 66 aa, Zea mays
  Clone ID: MRT4577_127541C.1.pep
LLVMQRHGNPDAMMQSWMDQFEADSDNKCWTSFQERVSRAPNQVLRYCREPNAKRNMCIMQVGQSS

SEQ ID NO: 214849 - protein, 67 aa, Zea mays
  Clone ID: MRT4577_127542C.1.pep
YALRANNEGSFKDMNEALLMIVVSHMEMIAGIYIDIITMLMMDKTTVPIILAHTDWHNLSDQEGDAA

SEQ ID NO: 214850 - protein, 412 aa, Zea mays
  unsure (1)..(412): unsure at all Xaa locations
  Clone ID: MRT4577_127543C.1.pep
SSAKKLISLRITSLDDETEEXRTRISPLQQDXAAAADSDDDDEEEEVEVTLGVLSKPKHPGLLLRHLFPSKAGGIPAWLDPVNLPSEKSSCCGFCGEPLQFVLQIYAAVEDNVAAFHRTLFMFMCPSMACLLRDQHEQWKHKHGNPCRSVKVFRCQLPRTNAFYSVQPPKHDRSDKPLCPGAHVCHWCGTWKGDKICSSCKKARYCSEKHQALHWRTGHKNDCLQIISSSAASNSVLPTVGKVPANTSWPEFEIKIDYEGRFDCDSGDENNSKLLVMQRHGKPDAMMQSWMDQFEADSDNKCWASFQERVSRAPNQVLRYCREPNAKPLWALSSGCPSNADIPSCSYCKDPLCYEFQVMPQLLYFFGVGNQPDSLDWATIAVYTCQGACDQSVSYKEEFAWVQLYPTTTTRQ

SEQ ID NO: 214851 - protein, 43 aa, Zea mays
  Clone ID: MRT4577_127544C.1.pep
VAIIKKKKKKKKKKKKNKKKKKKKKKKKKNKKKKKKKKKKACT

SEQ ID NO: 214852 - protein, 259 aa, Zea mays
  Clone ID: MRT4577_127545C.1.pep
FLLPCAGLANGGVEVKQTPASPVPKSVESSLPLVKIPTPESSKENSGVMWISSPDRLEDPRRPFQYSNSSGSPCVSESGSDIYGKREVIQKLRQHLKKRDEMIMEMQTQIADLKNSLNIQVTQSSNLQSQLDAANRDLFESEREIQHLRKIIADHCVTEALSHDKPLQAAHWQPDAANGHSNGYGDGCVDDADLHCISIEKRKVEVERVEMLKKEVVELKEVIEGKDFVLQSYKEQKVELFSKIRELQEKLSAQVPIIL

SEQ ID NO: 214853 - protein, 289 aa, Zea mays
  Clone ID: MRT4577_127546C.1.pep
MRKKLDTRFPAPRIKKIMQTDEDVGKIAQAVPVLVSKALELFLQDLCDRTYDITIRKGVKTVGSSHLKQCIQTYNVYDFLREVVSKVPDIGPSDVIADDKLGKRRKAEEDGSEEELKRTRNETESYTSNGRGRGRGRGRGRRGVRGAWREVVTSPEQFKEENQSSKVASLKVEVADEVSNVTEAKQDTTPMSNARPSLRNIDLNLDPTDEEDEVTVPPQPQLSAPATSCDAATAAPGPSVPRLREGAKLKDFFGAWELADMNKMEMDPVQFALSTNHRLEEDEDYDNED

SEQ ID NO: 214854 - protein, 69 aa, Zea mays
  Clone ID: MRT4577_127547C.1.pep
FTTYKLPCPCFPHSISNFLTTIDTPLTCRTISLFSYYLPSYNYINVCAYLVQVASRPRSWALSCARWGK

SEQ ID NO: 214855 - protein, 68 aa, Zea mays
  Clone ID: MRT4577_127548C.1.pep
YSTPFMSHDTSSCILSLLIALCGQLVHGGKSLIESQHALAKLHFTNRCTIVSSIWRIQYFHMCMTLVA

SEQ ID NO: 214856 - protein, 81 aa, Zea mays
  unsure (1)..(81): unsure at all Xaa locations
  Clone ID: MRT4577_127549C.1.pep
MDTRPASAGSRGRPAHATEDDDREEGEIVVDTPAPXRAGGRPLVLLCTLCFATPEGGNSXAACGSSIRPLHSFCSAKGFWG

SEQ ID NO: 214857 - protein, 250 aa, Zea mays
  unsure (1)..(250): unsure at all Xaa locations
  Clone ID: MRT4577_12754C.1.pep
ATVHASKEPSFPFRSSPSPSQTAEELATQIEQQTLDEQKTENALEQLASIDLIELXKEARIERCRATRDLSSCGRYVHHVLNSCGHASLCAECSQRCDVCPICRSPISDNGNRVHLCLYYKCLEAGLISKQHDDKFQEKEDHVNPVSMDVQRLHSLXCCSPEQSYFPYLPLYPPLEAAYAFPYHIFFCWFLNILXDITDVXLDENAMSSDPLLAXLLDEVVIKDWCKKAVNALITETGVICIQNSRSSIH

SEQ ID NO: 214858 - protein, 109 aa, Zea mays
  Clone ID: MRT4577_127550C.1.pep
FHRHHGNSSGAAARTDDDDAGILLSGCQTDETSADVAAAGGGSACGAFSAALQAVLAAHPAPMSNREVVLRAREVLGEQGFQQHPCLYCSDANADAPFLGQHESMAKSN

SEQ ID NO: 214859 - protein, 121 aa, Zea mays
  Clone ID: MRT4577_127551C.1.pep
IRHEESTLHLVLRLRGGMQIFVKTLTGKTITLEVESSDTIDNVKAKIQDKEGIPPDQQRLIFAGKQLEDGRTLADYNIQKESTLHLVLRLRGGMQIFVKTLTGKTITLCSVSVVVSKSWVV

SEQ ID NO: 214860 - protein, 144 aa, Zea mays
  Clone ID: MRT4577_127552C.1.pep
MGKEKTHMNIDDIDHVIPDKWTTTGHLIYKLGGTDKRAIKRIVMEAAEMNKRSLKYAWVLDKLKAERERSITSDITTGKVETTKYYCAVIDAPGHQDFIKNMITDTSHADCAVLIIDYTTGGFEAEIFKDGQTREHAHLAFTLE

SEQ ID NO: 214861 - protein, 103 aa, Zea mays
  unsure (1)..(103): unsure at all Xaa locations
  Clone ID: MRT4577_127553C.1.pep
KEGRTLXEQQTQKESTLPLVNRHRGGTQNLVKTLTGKTKTLEVESSDTIDNVKAKIQDKEGIPPDQQRLIFAGKQLEDGRTLADYNIQKESTLHLVLRLRGGQ

SEQ ID NO: 214862 - protein, 306 aa, Zea mays
  Clone ID: MRT4577_127554C.1.pep
MADKKKVEVKETKVEVKTAVYKVYVHCGQCARDIQTQFTEFQGVEEVKVDAGAGKVTVKGFGFDVEKLRKKVEKGCRKKVELIPPAPPKDDMVVDVKTKKEELKVITVKLPLHCPDCAVRVKEVLLENKSIYEAKTDLGKNTCTIEGVIEEDKLVKYIYERMRKKGVVDKVEKKVIIKEEKVLVKKADKEKEKKEKEKEKEKEKAKEKVKEAVDKVKEVIAPYFIPCTHPNFVDYSHPWHRGGGGYCSSYGDGYGYGYGGGCGGYPPYGFSYTHSELKGYHDTSFLHCTHPNEFISEENPYACAVM

SEQ ID NO: 214863 - protein, 127 aa, Zea mays
  Clone ID: MRT4577_127555C.1.pep
SRDPAKGMVDSAGKDAIMVDPSGRPRQRQIPPWRRRRRGSTTGRVQAGRGAASDSTRQGVVDAGDGRSAKGGTRRAAQASRGAGQRPAPRLDEGRPTPVRRGVARTDGQEGKEVADGGTCCGGDEVG

SEQ ID NO: 214864 - protein, 135 aa, Zea mays
  Clone ID: MRT4577_127556C.1.pep
SSDTIDNVKAKIQDKEGIPPDQQRLIFAGKQLEDGRTLADYNIQKESTLHLVLRLRGGMQIFVKTLTGKTITLEVESSDTIDNVKAKIQDKEGIPPDQQRLIFAGKQLEDGRTLADYNIQKESTLHLVLRLRGGQ

SEQ ID NO: 214865 - protein, 91 aa, Zea mays
  Clone ID: MRT4577_127557C.1.pep
KESTLHLVLRLRGGMQIFVKTLTGKTITLEVESSDTIDNVKAKIQDKEGIPPEQQGLIFAGKQVEDGRTLAEYNILKESPLPLVVRFRGGQ

SEQ ID NO: 214866 - protein, 36 aa, Zea mays
  Clone ID: MRT4577_127558C.1.pep
LSRLINPQGQHRCMYTQFPLYGAVRAHTVNTTNYSA

SEQ ID NO: 214867 - protein, 43 aa, Zea mays
  Clone ID: MRT4577_127559C.1.pep
ASRTFYLPTIFSEFPQNFTAGANVLFMGIHNPFYLVSHNYMYT

SEQ ID NO: 214868 - protein, 217 aa, Zea mays
  Clone ID: MRT4577_12755C.1.pep
MNGSGSVFANPCKGDLNMSTLMYRPFGSWAGNSEWSMRFEGEDVKALALGAGWVAAVFSLNFLRIFTEGGLQMHILSVSGPVVTAAGYEDQLAIVSHASDCLPSGDQVLDVKVFNISEGTQSMSGRLVLTPLSRLSWFGFSENGQLSSYDSKGILRVFSNQFGGSWLPLFSSVKARKSEDESHWVVGLDANNIFCILCKTPQSYPQVMPKPVLSILE

SEQ ID NO: 214869 - protein, 124 aa, Zea mays
  Clone ID: MRT4577_127560C.1.pep
MAGGVHEARAGGSRPRWRRPRRVLMFPLPFQGHINPMLQLGDALHARGLAVTVLHARLNAPDPARHPEFRFVPVPDGVPAHVAARGNVIDIIEAMNAAMEADGSGPVRAVLESVVADVEQPPAG

SEQ ID NO: 214870 - protein, 88 aa, Zea mays
  Clone ID: MRT4577_127561C.1.pep
PPPLVLRPRGGIHVFVKALPEKTITLEVESLVPIDNVKAKIQDKEGIPPVQQRLIFAGKQLEDGRPLAGYNIPKESPLPLVLRLRGGQ

SEQ ID NO: 214871 - protein, 110 aa, Zea mays
  unsure (1)..(110): unsure at all Xaa locations
  Clone ID: MRT4577_127562C.1.pep
KELVRLFLVGFSNIPRNGRAALHPVFPASGGGMQIFXKTLDEKTITLEVRSLGAFDNVXKVKIQDKEGIPPDQQCLFFPGKQLEDGRPLXGYNIQKESSLPLVLRLRGGQ

SEQ ID NO: 214872 - protein, 78 aa, Zea mays
  unsure (1)..(78): unsure at all Xaa locations
  Clone ID: MRT4577_127563C.1.pep
GIQIFVKXLTVKTITLKVESSDTIDNVKAKIQDKEGIPPAKQSLIFSGKXLENARXLTSSKIPKKAPLPLVLRFRGGQ

SEQ ID NO: 214873 - protein, 126 aa, Zea mays
  unsure (1)..(126): unsure at all Xaa locations
  Clone ID: MRT4577_127564C.1.pep
PTSAKQAIPPDQQXRLILPGHQLEEGRPLPGSNIQKESTLPLVLRLRGGNQIFVKALAGKTITLEVESSDPIGNVKAKIQGKEGIPPDQQRLIFAGQQLEDGRPLAGYNIQKESPLPLVLPLRGGQ

SEQ ID NO: 214874 - protein, 80 aa, Zea mays
  unsure (1)..(80): unsure at all Xaa locations
  Clone ID: MRT4577_127565C.1.pep
KRAANHAKEPKNVNRISLTTNKVQPDQSASQPKHVANAXKYRGLITYXLESISYIHPXNNRLNIDXDIAIESTPGSLLNT

SEQ ID NO: 214875 - protein, 44 aa, Zea mays
  Clone ID: MRT4577_127566C.1.pep
EGIPPAQKGLFFAGKQLEDGRPLADYNIQKESPPPLVPRPRGGQ

SEQ ID NO: 214876 - protein, 63 aa, Zea mays
  Clone ID: MRT4577_127567C.1.pep
GVHMHPKQWKYSGLYHSFTIYASPVTCYHASSRYMYHPLPYSSFATGCAHQHMIIHPGIFLLP

SEQ ID NO: 214877 - protein, 64 aa, Zea mays
  Clone ID: MRT4577_127568C.1.pep
RELCVLMDEKSCARGGFFLVRPWAGTFDVSSKTGGPFGTMKTPVELWHVVNAGLVIMLWIATPL

SEQ ID NO: 214878 - protein, 122 aa, Zea mays
  Clone ID: MRT4577_127569C.1.pep
QRRALNQHPVWSSLNLCFYPANFLLQMQQALPHHYQQQEQHHEGHDDEDHEAAHHLLAPPPAALVSPFLHDFGGAMAAAPPPPMLAGGFGGKRMYPDVGGMAGDDSHHLHAEPQQQQEQQAS

SEQ ID NO: 214879 - protein, 304 aa, Zea mays
  Clone ID: MRT4577_12756C.1.pep
MFSKIKCRVFHDLPFFSYRSLITNQHQLMGHQRMKRVIATYFRNSAPGMIEVIGKGKFERIIGSHLGGGTILGLARLLTGCSSYEEFLELSQRGNNLSVDLTVGDIYGEEGYPKIGLPASTTAASFGKVNSSKLSEYKVEDLAAALLNSFTYNIGQIAYFVANLSGLKRIFFRGAYVCGHEKTMDKISRSLKYWSKGEVQTTFLCHEGFLGTLGAFWSYENMGIDSLAAHEVIREVLLGAPYTGQFPSLPVTQQQENGEHGTLEGEVESLRHDNALLKAEVERLQRENALLRAKLVRSGETSTL

SEQ ID NO: 214880 - protein, 131 aa, Zea mays
  unsure (1)..(131): unsure at all Xaa locations
  Clone ID: MRT4577_127570C.1.pep
TSAXAYLPNXXTXXTTXFSQLXADVXALLXLLDTXTTXLLGRSKPAXAAXLTXWHPFLPTXQQLAXXFXTNLGFDPNPXQRSNXTXXIXLVVGPXXRIGLMSYYPSIMXXFFGMKCLVAFSQXXKKRYKIS

SEQ ID NO: 214881 - protein, 70 aa, Zea mays
  Clone ID: MRT4577_127571C.1.pep
QRREKVKRQHRPRRPRWQPRSKSKPRPPWMQPGKIGGRAPFGLLALFPPLLQLARGFGVDPRAPKITCFL

SEQ ID NO: 214882 - protein, 50 aa, Zea mays
  Clone ID: MRT4577_127572C.1.pep
GLFLFFFFFFFFFFGFFYFFGVFFFFFFRGSWTPVFLYKGYARLPLDLKI

SEQ ID NO: 214883 - protein, 50 aa, Zea mays
  Clone ID: MRT4577_127573C.1.pep
PSYDWCLPMFYMRLAGAIFMACSSFGLLSALSWVCPSLGGGGGGRLPPGG

SEQ ID NO: 214884 - protein, 84 aa, Zea mays
  Clone ID: MRT4577_127574C.1.pep
VQWCSAGACAFSRRRFTVCLLCVGKDVLWRLGSAPANSHHVERAPPHHQRLRSPVVTCVRPLASVLDPLHVWDRYASPWPDEIE

SEQ ID NO: 214885 - protein, 117 aa, Zea mays
  Clone ID: MRT4577_127575C.1.pep
MATTRKHVSVPAILLALAVLSCLLLVSAAGNRRALLPREPADTYASGGRGQVVLPTTTTAAAEEGAAVLGAELAEAERDETMVVDTAAGGRGCCRLRLPRGLGPTAATIRGTRTDSD

SEQ ID NO: 214886 - protein, 52 aa, Zea mays
  unsure (1)..(52): unsure at all Xaa locations
  Clone ID: MRT4577_127576C.1.pep
XGXDRKDRNSXXSRXGXXEGKARGTXANTXXXNKXXNGEXGPKTTQGPTGEK

SEQ ID NO: 214887 - protein, 104 aa, Zea mays
  Clone ID: MRT4577_127577C.1.pep
MATTRKHVSVPAILLALAVLSCLLLVSAAGNRRALLPREPADTYAGGGRGQVVLPTTTTAAEEGAAVLGAELAEAERDETMVVDTAARRAGLLQTQDYPGSGPN

SEQ ID NO: 214888 - protein, 98 aa, Zea mays
  Clone ID: MRT4577_127578C.1.pep
STRAYRHGEGYQSKAQKSEYDQCVVHDKRSCKTMQSPMEERVLRQTGSQWKCSSLRFGKRQLVVFAQRVIHNSVWSSLGPAVATTRSRSGRDLFIAGP

SEQ ID NO: 214889 - protein, 93 aa, Zea mays
  Clone ID: MRT4577_127579C.1.pep
PPNEVSQQQVFKNFAVATRIKGAFLQPPPKTKKKGGKLKKLFSPGSICMRGQNHRQGHPSPGGKKKKRRDNARNLSPRVKIPERGKKNRLFPP

SEQ ID NO: 214890 - protein, 66 aa, Zea mays
  unsure (1)..(66): unsure at all Xaa locations
  Clone ID: MRT4577_12757C.1.pep
MKKRPVRMKAFVXKLSPFQQKVMLGLWKDITPGVHGKVTXSWVSATLLLTPVGGANQYAMWHKEQE

SEQ ID NO: 214891 - protein, 57 aa, Zea mays
  Clone ID: MRT4577_127580C.1.pep
AILTLIHYKYHTSSCEGAECTQLAARHTGVLCLWTMTYCHDILSEYIARKRSFWGWR

SEQ ID NO: 214892 - protein, 75 aa, Zea mays
  Clone ID: MRT4577_127581C.1.pep
VTQVLYTWSNHYLEQDLDENPDVLSMSDSSVIAARRAVLGPDLAELQRVMAPVATKAYRDDWLDVRPRPNVEIVL

SEQ ID NO: 214893 - protein, 115 aa, Zea mays
  unsure (1)..(115): unsure at all Xaa locations
  Clone ID: MRT4577_127582C.1.pep
YFPNPTHAGDGDAALSPKLAPSQVVEVFVRVTGGEFGEVXSLGPXIGPLGLSXKKIGQDLGGETAXDWEGLXVTVKLTVQNGRAKVSVVSSAGALVISALKQPGRDRKKVKNIKD

SEQ ID NO: 214894 - protein, 118 aa, Zea mays
  Clone ID: MRT4577_127583C.1.pep
CPYSSALSSSRLLVLFLLASLSVLSGYSSMAFPGSFFYLPLLRLRCFLGPCTVHRLRHWCRFTPWCLAAVSCFSGPLVPCLGRVRDLAYGDDNLLLAGVVVLLSGFRLPSPAVVFSYR

SEQ ID NO: 214895 - protein, 38 aa, Zea mays
  Clone ID: MRT4577_127584C.1.pep
TGPRLYPQLAPNTYTCTERTHRAILRHIALTAINLMRR

SEQ ID NO: 214896 - protein, 72 aa, Zea mays
  Clone ID: MRT4577_127585C.1.pep
TFPSHQVCCTPKLSANLLPMVITLMFLSVSSWSSILEHGLNVAQRRREPPNHRSLDSRLLRSKFIPPRRSGV

SEQ ID NO: 214897 - protein, 105 aa, Zea mays
  Clone ID: MRT4577_127586C.1.pep
LLKPRMFSPFPGRHLLCFTTTVSAIKLMFPRARIPASVITSDVATPKSVGSKLLKVSCASEQSVMRTMSLHEQTASPLFPSFERQPTRRPGPGRGADAGRPGCRT

SEQ ID NO: 214898 - protein, 484 aa, Zea mays
  Clone ID: MRT4577_127587C.1.pep
MASPSYRLAAAITAPSTGEFLVVRQPRPPSPPEEEEDYRRFVDSDLYDLPSAPLGPLEGAPRSEVAIGGADSVASRLDLSRLDVSAALDQIFHQFGLPAGMSGEWRLLKYVEEAEFGPDAGINTVYIVGSLELRLDDLPESCKWMSKECALRLLSEAKPGNDRIGQYAYIGLLNSELSSNCTASPALPFQEYPPGITLVPMKSRTLAPFRTTNLVVVRSTNGAGGSTCSDFFASGEALLIDPGCSSQVHAELADLIDSLPKRLLVLVTHYHQDHIEGLSVVQRCNPNAVLLTHQSTMDRIGKGTWQIDYTSVTGGEKICIGDQELQVVFAPGHTDGHMGLLHVNTNTLVVGDHCVGHGSATLDSRNGGNMKDYFETTYKFLELSPHVLIPMHGRINLWPKYMLCGYLRNRRAREASILHSIENGAQTLFDIVSKTYSDVDRKLWIPASFNVRLHVDHLNSLHKLPKDFSLEMFSRSCDDFISRV

SEQ ID NO: 214899 - protein, 225 aa, Zea mays
  Clone ID: MRT4577_127588C.1.pep
MASSSCLASPSGATLCRPRRPRCRVACSAADAGGSTGPAWAKGAGRLACGVLAAWSVASASNPVIAASQRLPPLSTEPNRCERAFVGNTIGQANGVYDKPLDLRFCDYTNEKTNLKGKSLAAALMSEAKFDGADMSEVVMSKAYAVGASFKGTDFTNAVIDRVNFEKADLTGAIFKNTVLSGSTFDDAKMDDVVFEDTIIGYIDLQKLCTNTSISPDARLELGCR

SEQ ID NO: 214900 - protein, 133 aa, Zea mays
  Clone ID: MRT4577_127589C.1.pep
GYFESTYKFLELSPHVLIPMHGRINLWPKYMLCGYLRNRRAREASILHSIENGAQTLFDIVSKTYSDVDRKLWIPASFNVRLHVDHLNSLHKLPKVSTTRNIIIMRISLWKCSVEVVMILSLEFDGKYEKRIF

SEQ ID NO: 214901 - protein, 81 aa, Zea mays
  Clone ID: MRT4577_12758C.1.pep
FSRGPGRTSEGALARRIHKPLVCYAGRAPFYGNTDGLMYEHYHVHADLTIKRGCIEHSYRDLSLLDTEKDEHENNRLENEA

SEQ ID NO: 214902 - protein, 118 aa, Zea mays
  Clone ID: MRT4577_127590C.1.pep
PLNPWYPPRVPGRGGFLGCKFYGGGWGTHGPFVPPVEGPGADSDPVCVFFFRSPRCFFVPPLLGWGFPCAVKVYVPIKFMSKKKKKKKKKKKKKKKKKKNQKKKKKKKKKSPLRCYHC

SEQ ID NO: 214903 - protein, 63 aa, Zea mays
  Clone ID: MRT4577_127591C.1.pep
FSLPPSSVFRPYPDYPQFSLYLSELPFSSIKSCALIFTLNTTYTFPMTYRAALKDLSGYIICN

SEQ ID NO: 214904 - protein, 84 aa, Zea mays
  Clone ID: MRT4577_127592C.1.pep
RWHVHQLDVKNAFLHGDLSKRVYAFQSSGFNDKDFPNHVCLLHRSLYGLKQAPRVWYQRFASELLNLGFRSTRSDSRSWCWCSY

SEQ ID NO: 214905 - protein, 90 aa, Zea mays
  unsure (1)..(90): unsure at all Xaa locations
  Clone ID: MRT4577_127593C.1.pep
PPLGFWPNPYWFCVXTPGXVKIWALESKHVVQDPKPDIQFSKNQILFCPSFIWSPNGSPLSPGYPDGSIRVWKILWIWLPRLNVEIQSRV

SEQ ID NO: 214906 - protein, 73 aa, Zea mays
  Clone ID: MRT4577_127594C.1.pep
TPVPIFAQKVYLGINKKLFPLKLIVVPSSSVWKMLSPNYPISCSSLAWKYKLCTSILKLLSLYYEMFPIISSF

SEQ ID NO: 214907 - protein, 79 aa, Zea mays
  Clone ID: MRT4577_127595C.1.pep
FCHDGARLTCHGCQLIQMRIPAANMDNGCGEQHEGIELTSSGRPKLPNVKRRLTANFVRYTYLVTRAKVQLIWIGIFKC

SEQ ID NO: 214908 - protein, 87 aa, Zea mays
  Clone ID: MRT4577_127596C.1.pep
KILDEAKPFFPFPTQEKMVVASGIKQNWVKKNGGNKFIVPEAKNKLPGINHQRSSHGQPMEHPFMVNFRQQIVNPMWEARHQNQKTT

SEQ ID NO: 214909 - protein, 93 aa, Zea mays
  Clone ID: MRT4577_127597C.1.pep
MGFIMDFAENLILRLMEDPDKRDQVRREHVYKMKERCERTKAAWSLPLRPYGFWTFDRFNSQLSWDPQISQAAGRRDPYDDLIARHSGSPPSS

SEQ ID NO: 214910 - protein, 93 aa, Zea mays; identical to SEQ ID NO: 214909
  Clone ID: MRT4577_127598C.1.pep

SEQ ID NO: 214911 - protein, 81 aa, Zea mays
  Clone ID: MRT4577_127599C.1.pep
REERGYGLQGVEQGRSSPVRWWAWSMVLGCSVKRVDDIRGLLQQVVVVPQEVNPHMSCRQRRNHGRERGVASEQKMRTEHE

SEQ ID NO: 214912 - protein, 41 aa, Zea mays
  Clone ID: MRT4577_12759C.1.pep
IQLAPIDHAVDPIIVSVGTTSQAAPIMALRSYAASRSRELH

SEQ ID NO: 214913 - protein, 62 aa, Zea mays
  Clone ID: MRT4577_1275C.1.pep
SAAQRLATDEVKTAATHEARRALNLCNTYYLYAADKLSSCNSRHQVFRSLSHHPRHDNHAGS

SEQ ID NO: 214914 - protein, 93 aa, Zea mays; identical to SEQ ID NO: 214909
  Clone ID: MRT4577_127600C.1.pep

SEQ ID NO: 214915 - protein, 91 aa, Zea mays
  Clone ID: MRT4577_127601C.1.pep
GGASTWQPMGGVYWMPSLFFIHGTKLQTLTVGSRFLNTLGHLGTCLVPLGQDLALLVHSDAGLAALRDEPRPDRHEHNVLKGHGDLDHKGP

SEQ ID NO: 214916 - protein, 75 aa, Zea mays
  Clone ID: MRT4577_127602C.1.pep
QPALDSTYVIGAWPIHCFLFSILCVLVCVNSLFNKGFLCYKIVLCLPISCLIESCFKNKGLCMCVSHSKKSKKTL

SEQ ID NO: 214917 - protein, 163 aa, Zea mays
  unsure (1)..(163): unsure at all Xaa locations
  Clone ID: MRT4577_127603C.1.pep
MKALLVTVLLLLSSTLAASQWCVCRQDASQAALQKTIDYACGSGADCNSIHETGACYNPNTVAAHCSWAANSYYQNNKAKGATCDFTXTAALTTSDPSSSGCSYPTGASAVGTMTPTTAGTMGGGTAGTLTGTGTAGAGMGTGTATGTAGTGFGGLGQARTLA

SEQ ID NO: 214918 - protein, 213 aa, Zea mays
  Clone ID: MRT4577_127604C.1.pep
MKALLVTVLLLLSSTLAASQWCVCRQDASQAALQKTIDYACGSGADCNSIHETGACYNPNTVAAHCSWAANSYYQNNKAKGATCDFTGTAALTTSDPSSSGCSYPTGASAVGTMTPTTAGTMGGGTAGTSTGTGTGTAGAGMGTGTAAGTAGTGFGGLGPGTDASMDTRGGGGLAPSPKSWVGWAPPSPRFSSPPWCSRDAFSMASETWPACC

SEQ ID NO: 214919 - protein, 172 aa, Zea mays
  unsure (1)..(172): unsure at all Xaa locations
  Clone ID: MRT4577_127605C.1.pep
MGNMLPSCLVVQQGTAAGALPAMNPKRRLISLNLLVKGIHRVKKMPAGPGKAPEIDSKKSSSSEALETARSNKAARSTNNPKGAVLRSRXPRPAERRRXGKKAGKQGVVRVKVVLTKEEAARLLSLTVGGGQKHTTTAAQIVAEMRKMEARRRVAAGASWRPALASIPEESS

SEQ ID NO: 214920 - protein, 186 aa, Zea mays
  Clone ID: MRT4577_127606C.1.pep
MKALVVTVLLLLSSTLAASQWCVCRQDASQAALQKTIDYACGSGADCNSIHETGACYNPNTVAAHCSWAANSYYQNNKAKGATCDFTGTAALTTSDPSSSGCSYPTGASAVGTMTPTTGGAMGGATVGTFTPGAGGMGTGTATGTAGTFGGLGPGTDASMDTAAAAGLLPPPRTGGLAAAPRRASP

SEQ ID NO: 214921 - protein, 163 aa, Zea mays
  Clone ID: MRT4577_127607C.1.pep
MKALVVTVLLLLSSTLAAAQWCVCRQDASQAALQKTIDYACGSGADCNSIHETGACYNPNTVAAHCSWAANSYYQNNKAKGATCDFTGTAALTTSDPSSSGCSYPTGASAVGTMTPTTAGTMGGGTAGTSTGTGTAHRRWHGDRHCHRNCGYGVRRPRTRHGR

SEQ ID NO: 214922 - protein, 119 aa, Zea mays
  Clone ID: MRT4577_127608C.1.pep
LEGGRDEVFLRGADRPFCVQVYNNPGCEYQQKDGDFVANLAASWKAWTQSLPSSASVFLGLPASPAAAGSGYVPPDDLVSRVLPAVSGSANYGGLMLWNRYYDNSTGYSARILSSIIFF

SEQ ID NO: 214923 - protein, 92 aa, Zea mays
  unsure (1)..(92): unsure at all Xaa locations
  Clone ID: MRT4577_127609C.1.pep
STEDQVPANSTTGPQIEGQGTNRGSTSXYNIKTDPPFLTTEQRHITLHTYPSICRRGNTRPGRALNPSTKNPPSGHAAYLGNTTATGEAPLQ

SEQ ID NO: 214924 - protein, 39 aa, Zea mays
  Clone ID: MRT4577_12760C.1.pep
IRTGRTGPKGIAVPARPRDRKNRRFTRASSAVPPIVSQT

SEQ ID NO: 214925 - protein, 74 aa, Zea mays
  Clone ID: MRT4577_127610C.1.pep
SLTFYSRVVGLNPSIERKMFYPPLFYLKCMPHGHMDMVTNFLDLIDKTQQMANWVQLPTEYKSLLEHHFLFFRA

SEQ ID NO: 214926 - protein, 73 aa, Zea mays
  Clone ID: MRT4577_127611C.1.pep
PKISGKAKKDDHDAATAIKSDDSSRSGGKKKMVRKCKSTVDELKVSQLIQGPRLRRSVGMRRDWSFEDLGNAA

SEQ ID NO: 214927 - protein, 108 aa, Zea mays
  Clone ID: MRT4577_127612C.1.pep
FSGGLGDFFMSVGGRFFPLGTGLLGKPLLWELVPSFGAPGFSLFVSGSYWFVEFLSGTLFFREAVFPFVPPGFYWVPFRGSWVASGFRSEISGWAPGAAPGSVKKKNP

SEQ ID NO: 214928 - protein, 91 aa, Zea mays
  Clone ID: MRT4577_127613C.1.pep
MKGVLPIKGASGREKKAPKELESVLNRYFGYSGFRGKQLEAIEAVLSGRDCFCLMPTGGGKSMCYQIPALVKTGIVLVISPLIGELIRVFP

SEQ ID NO: 214929 - protein, 111 aa, Zea mays
  Clone ID: MRT4577_127614C.1.pep
QQLGRLAVTPVGCACCSWRASPSRAHGVEVVSAMDRLSGASMDRLLGVSISSGCVPPTRWMLTAVAASKGRGAPLWLCSCYARTRPLLLLLLLSVLLVRERCPLFFFLFFF

SEQ ID NO: 214930 - protein, 65 aa, Zea mays
  unsure (1)..(65): unsure at all Xaa locations
  Clone ID: MRT4577_127615C.1.pep
TPILHPXPYRHVGXSSTXXSLSIEHLAPFLXPPFRIWNATREVTRAQGASESLRGGRXXLLVAGX

SEQ ID NO: 214931 - protein, 60 aa, Zea mays
  Clone ID: MRT4577_127616C.1.pep
KKELQKTGFKPLPKISKRRAAAQIKGVKPKAKPKKKQGEVPKGAKPPKAPPPELFQNFNP

SEQ ID NO: 214932 - protein, 126 aa, Zea mays
  unsure (1)..(126): unsure at all Xaa locations
  Clone ID: MRT4577_127617C.1.pep
RPSPARRTSTCSSAGTRPRPPHTASRSSQTRXPPAPTLXRRTDHLASRAAATRPHRRCPGAPSLTRTSCCRGASRSSMSLPPSRPSRARAPPRPITRPSSRSPASASGRKAPMQPPTPRTPAATPR

SEQ ID NO: 214933 - protein, 105 aa, Zea mays
  Clone ID: MRT4577_127618C.1.pep
MRKAGKMYNAPIAREMSYLDNVHRFHYDKGCLYACIFTGLSCFCCYKTCESCLDCLCCCCNYPGIAPEDGRDSTDGGRLRFFYLATNLPTDDDSPPAYAAGGTVH

SEQ ID NO: 214934 - protein, 61 aa, Zea mays
  unsure (1)..(61): unsure at all Xaa locations
  Clone ID: MRT4577_127619C.1.pep
LIARSRNRCRWCSAAGPVXPSGXRSLSPAIPCSRXRRRPWCQLTRRXHRSTLRKPTTTAPH

SEQ ID NO: 214935 - protein, 59 aa, Zea mays
  Clone ID: MRT4577_12761C.1.pep
MIYRSWSLLSSTVVIWGGVATAGLAGTFLLGGKEKFSQYLCREGERLRQQDRATIGMQN

SEQ ID NO: 214936 - protein, 75 aa, Zea mays
  Clone ID: MRT4577_127620C.1.pep
HHRLTARMQTNRLEHSSLASAYASDVAVHQILDVGQIIVPWRAHQHPTTFLGVGQPHHPSCVGHAHRQTGPHYRL

SEQ ID NO: 214937 - protein, 175 aa, Zea mays
  Clone ID: MRT4577_127621C.1.pep
GPPTRAKKMTHNKDSKLPFGHSHEKRGMFEGRAENVLLLIKHRFPGIAQSALDISKIQCNKDVGLAILESYSRTLESLAFTVMSRIEDVLSADLAARDLRNTESMRIAASLTSDDTDKVVSDAKAEVEKTGRMEPVSPALSDLVGPKLTKISPVATKRFSYLENLGGTRSPIARH

SEQ ID NO: 214938 - protein, 168 aa, Zea mays
  unsure (1)..(168): unsure at all Xaa locations
  Clone ID: MRT4577_127622C.1.pep
GRVPPPHARGSQTHARLAPKPTRVRVPRRPPSAPPXRPPPSMLPXPTAIAPSTLPTVRRKPWSLRLIPPXKPPPPRPXPPHPPXKPWSLRPXPVVPAXPPPRRARPTDRRRPASGRRGRSRRQPDPVSASXPCPCTPSPTSRESPLPSSACRRPPPTSAAQPPRREPS

SEQ ID NO: 214939 - protein, 62 aa, Zea mays
  Clone ID: MRT4577_127623C.1.pep
YTRAYVDQTALLYRLCWSLCGALKGVIQWGNHALYNSVHDAVLAIVDFIKRVGPIGWDYLWS

SEQ ID NO: 214940 - protein, 65 aa, Zea mays
  Clone ID: MRT4577_127624C.1.pep
IPAMIGSFATKQLPYPYLSFDMVHCAKCNIEWYKNGMCESLLSHALALIDDYNVIQQCLKLALHM

SEQ ID NO: 214941 - protein, 377 aa, Zea mays
  Clone ID: MRT4577_127625C.1.pep
MADGEDIQPLVCDNGTGMVKAGFAGDDAPRAVFPSIVGRPRHTGVMVGMGQKDAYVGDEAQSKRGILTLKYPIEHGIVSNWDDMEKIWHHTFYNELRVAPEEHPVLLTEAPLNPKANREKMTQIMFETFNVPAMYVAIQAVLSLYASGRTTGIVLDSGDGVSHTVPIYEGYALPHAILRLDLAGRDLTDSLMKILTERGYSFTTSAEREIVRDIKEKLAYIALDYEQELETAKNSSSVEKSYELPDGQVITIGAERFRCPEVLFQPSMIGMEAAGIHETTYNSIMKCDVDIRKDLYGNIVLSGGSTMFPGIADRMSKEITSLAPSSMKIKVVAPPERKYSVWIGGSILASLSTFQQMWISKEEYDESGPAIVHRKCF

SEQ ID NO: 214942 - protein, 213 aa, Zea mays
  unsure (1)..(213): unsure at all Xaa locations
  Clone ID: MRT4577_127626C.1.pep
MADGEDIQPLVCDNGTGMVKAGFAGDDAPRAVFPSIVGRPRHTGVMVGMGQKDAYVGDEAQSKRGILTLKYPIEHGIVSNWDDMEKIWHHTFYNELRVAPEEKMTQIMFETFNVPAMYVVIQAVLSLYASGRTTGIVLDSGDGVSHTVPIYEGYALPHXAILCLDLAGRDLTDLLMKILTEXRGFSFTTSAEREIGRDIKEXKLAYIALDYEQ

SEQ ID NO: 214943 - protein, 57 aa, Zea mays
  Clone ID: MRT4577_127627C.1.pep
MADGEDIQPLVCDNGTGMVKAGFAGDDAPRAVFPSIVGRPRHTGVMVGMGLYCCICF

SEQ ID NO: 214944 - protein, 377 aa, Zea mays; identical to SEQ ID NO: 214941
  Clone ID: MRT4577_127628C.1.pep

SEQ ID NO: 214945 - protein, 377 aa, Zea mays; identical to SEQ ID NO: 214941
  Clone ID: MRT4577_127629C.1.pep

SEQ ID NO: 214946 - protein, 109 aa, Zea mays
  Clone ID: MRT4577_12762C.1.pep
HCRKLAPILEEVAVSLQDDEDVVIAKMDGTANDIPTDFTVEGYPTIYFYSTTGELYSYNGGRTAEDIISFIKKNKGPRAGAVDEQTGDASAAEEAVTPPSSSELLKNKL

SEQ ID NO: 214947 - protein, 102 aa, Zea mays
  Clone ID: MRT4577_127630C.1.pep
RRRVVLGPANQRKKPAKSYGDETTLVIQCSCVQIRLWETDLNRVEMMGWDLYEDFPSKEWFEQCCDYARDNGYLLWEDPKRMRLIVRGELHPEMREFLRRQI

SEQ ID NO: 214948 - protein, 429 aa, Zea mays
  Clone ID: MRT4577_127631C.1.pep
MITCVAFRPLDFLVLCLSVCRSRSQTTGPPPLGAEALVGLFGGDEHPPDATCSSSVEMADGEDIQPLVCDNGTGMVKAGFAGDDAPRAVFPSIVGRPRHTGVMVGMGQKDAYVGDEAQSKRGILTLKYPIEHGIVSNWDDMEKIWHHTFYNELRVAPEEHPVLLTEAPLNPKANREKMTQIMFETFNVPAMYVAIQAVLSLYASGRTTGIVLDSGDGVSHTVPIYEGYALPHAILRLDLAGRDLTDSLMKILTERGYSFTTSAEREIVRDIKEKLAYIALDYEQELETAKNSSSVEKSYELPDGQVITIGAERFRCPEVLFQPSMIGMEAAGIHETTYNSIMKCDVDIRKDLYGNIVLSGGSTMFPGIADRMSKEITSLAPSSMKIKVVAPPERKYSVWIGGSILASLSTFQQVCCIVYITFSCCILFL

SEQ ID NO: 214949 - protein, 378 aa, Zea mays
  unsure (1)..(378): unsure at all Xaa locations
  Clone ID: MRT4577_127632C.1.pep
MADGEDIQPLVCDNGTGMVKAGFAGDDAPRAVFPSIVGRPRHTGVMVGMGQKDAYVGDEAQSKRGILTLKYPIEHGIVSNWDDMEKIWHHTFYNELRVAPEEHPVLLTEAPLNPKANREKMTQIMFETFNVPAMYVAIQAVLSLYASGRTTGIVLDSGDGXVSHTVPIYEGYALPHAILRLDLAGRDLTDSLMKILTERGYSFTTSAEREIVRDIKEKLAYIALDYEQELETAKNSSSVEKSYELPDGQVITIGAERFRCPEVLFQPSMIGMEAAGIHETTYNSIMKCDVDIRKDLYGNIVLSGGSTMFPGIADRMSKEITSLAPSSMKIKVVAPPDRKYSVWIGGSILASLSTFQQMWISKEEYDESGPAIVHRKCF

SEQ ID NO: 214950 - protein, 377 aa, Zea mays; identical to SEQ ID NO: 214941
  Clone ID: MRT4577_127633C.1.pep

SEQ ID NO: 214951 - protein, 305 aa, Zea mays
  unsure (1)..(305): unsure at all Xaa locations
  Clone ID: MRT4577_127634C.1.pep
MADGEDIQPLVCDNGTGMVKAGFAGDDAPRAVFPSIVGRPRHTGVMVGMGQKDAYVGDEAQSKRGILTLKYPIEHGIVSNWDDMEKIWHHTFYNELRVAPEEHPVLLTEAPLNPKANREKMTQIMFETFNVPAMYVAIQAVLSLYASGRTTGIVLDSGDGVSHTVPIYEGYALPHAILRLDLAGRDLTDSLMKILTERGYSFTTSAEREIVRDIKEKLAYIALDYEQELETAKNSSSVEKSYELPDGQVITIGAERFRCPEVLFQPSMIGMEAAGIHETTYNSIMKCDVDIRNDLYGNIVXLSGG

SEQ ID NO: 214952 - protein, 103 aa, Zea mays
  unsure (1)..(103): unsure at all Xaa locations
  Clone ID: MRT4577_127635C.1.pep
XTPSVFLAPSCGGGGGYTFLCLRWPHLHCRGPEAPNASRLMTNPPPPRPVPFQPGSTFLWLSLGGGLCAXILVSSMRGCPASTEWSHPPFVRGLTLSQTPLAP

SEQ ID NO: 214953 - protein, 122 aa, Zea mays
  unsure (1)..(122): unsure at all Xaa locations
  Clone ID: MRT4577_127636C.1.pep
AYESMDTDLHQMIRTNQALXDEHCQHFLYQIVNRLDXLHCRKGLHRDLKPSSVFXNANWDIKICXDYELALTIHXTEITTEYVATIWYTPPELLLNXSEYTAAIDVISXVGYIFMELMDHQL

SEQ ID NO: 214954 - protein, 80 aa, Zea mays
  Clone ID: MRT4577_127637C.1.pep
NTRSISRAPRHDPLILSCYSTAGGIAFLRTGNCHRRRPEFVLPTWAASRKEQFLQKKLPPCLMKQSRMGPFVQTGAFYFT

SEQ ID NO: 214955 - protein, 150 aa, Zea mays
  Clone ID: MRT4577_127638C.1.pep
RWSARTWCAAPTSTRPRPSPPRNLKQTRSENTVGRPRSCKQELDQRTRGIWEPDARRGSAFDPSPPALRPRSACCSIAVDSGAPFHQIQPPIASSSSALARTVCRGDRRGASTPPSPWSLRVRGRRASPSVLARRSSVSGVALVWMWPGR

SEQ ID NO: 214956 - protein, 69 aa, Zea mays
  Clone ID: MRT4577_127639C.1.pep
ITGLAVIYKTMYAGGGTYVIHSNLSCWLLRGTAKIASIKKVYSKAEKVCRSKPLFATSNTMGRNQNRMD

SEQ ID NO: 214957 - protein, 187 aa, Zea mays
  unsure (1)..(187): unsure at all Xaa locations
  Clone ID: MRT4577_12763C.1.pep
MRECISIHVGQAGVQIGNACWELYCLEHGIQPDGQMPSDKTIGGGDDSFNTFFSETGAGKHVPRAVFVDLEPTVVDEVRTGTYRQLFHPEQLITGKEDAANNYARGHYTIGKEIVDLVLDRIRKLADLCTGLQGFLIFHSFGGGTGSGFASLLMERLSVDYGKKSKLEFAIYPAPQVSTAVXVEPYN

SEQ ID NO: 214958 - protein, 234 aa, Zea mays
  Clone ID: MRT4577_127640C.1.pep
YKSHLSWPPIFASSWDESVSLRWGDLGLSVSHIFRPVPGCCTMLGPMNIEVKQRKVVAVGRKRTARPTENTCPEELAESSEEVKTDTDRNVLVMFDILRRKKSAKLENLVLNRLSFAQTVENVFALSFLVKDGRVEITVDDSGHIVRPRNAPAASAIASGEVSYSHFVFRFDLKDWKLMKEVVTEGEELLPHAPAQSNLCNEENDQPNLEVRAQIMPIRKKSSCLSELPVVPAE

SEQ ID NO: 214959 - protein, 69 aa, Zea mays
  Clone ID: MRT4577_127641C.1.pep
GVHEDHGQPPHHTVAGSACQQRSNERVYLHHLPQCSCLRASHRQLECHDQVSTARSPRVVAHERAGHGG

SEQ ID NO: 214960 - protein, 93 aa, Zea mays
  Clone ID: MRT4577_127642C.1.pep
FCTFFLVKNGRVEITVDDSGHIVRPRNAPAASAIASGEVSYSHFVFRFDLKDWKLMKKVVTKGEKLVPHLGTRLELCNEENDQPNLEGNMEGS

SEQ ID NO: 214961 - protein, 150 aa, Zea mays
  Clone ID: MRT4577_127643C.1.pep
KCQRITFGHRNRKKSAKLENLVLNRLSFAQTVENVFALSFLVKDGRVEITVDDSGHIVRPRNAPAASAIASGEVSYSHFVFRFDLKDWKLMKEVVTEGEELLPHRTSQSNLCNEENDQPNPEVWQRKFQAPLQLGVVLYSLMTSSLRCFH

SEQ ID NO: 214962 - protein, 71 aa, Zea mays
  Clone ID: MRT4577_127644C.1.pep
PKACCTCHANQHAMVLVGDEGAEVALKAGPVVCEWGPERSPQRRPMPPARALADHALGALQMADEERCDIV

SEQ ID NO: 214963 - protein, 74 aa, Zea mays
  Clone ID: MRT4577_127645C.1.pep
RSHLPVLQGKGFWSSWGQRAIYSKSASCNLNWCCCSTINLYSTSYESISTTYYVCFNSLLVEETGLFKSYISGY

SEQ ID NO: 214964 - protein, 79 aa, Zea mays
  Clone ID: MRT4577_127646C.1.pep
LRPEFCGARTRNEPAEARRDRPSPCPCSWMRMAEPLLNCKRGLHGRKKWTERPTQLTRPCPQSLGVRACRFYAFCTGDR

SEQ ID NO: 214965 - protein, 69 aa, Zea mays
  Clone ID: MRT4577_127647C.1.pep
LPYSLGGNMLFHRGYPASPEYAIRSIRVAKPAVHRQQLCADVLMILHQPLIFSQQASAVFVYSKYLAYA

SEQ ID NO: 214966 - protein, 37 aa, Zea mays
  Clone ID: MRT4577_127648C.1.pep
ISDVRTHYLTKPHSNATSLKPIFRNHIPYLSLHLQHI

SEQ ID NO: 214967 - protein, 76 aa, Zea mays
  Clone ID: MRT4577_127649C.1.pep
FLRFLCTNLSTMVSRFCLLESWEPFSVELVILCRPMLSGVTLDSSHFDYRKFQKIHVMSNVLVCIMGSPNSLKLIS

SEQ ID NO: 214968 - protein, 117 aa, Zea mays
  Clone ID: MRT4577_12764C.1.pep
NNPGCGPPRTAKNPEQADPLGKRPHLAKRPKNRKEKKTPGARQPPQRPKTPGEQERPVKKGAHPRPGRNRAPGEKGNPRATKKAGVGKQEGCQGGGGPRGNYPHGPGGGKTPPREKT

SEQ ID NO: 214969 - protein, 297 aa, Zea mays
  Clone ID: MRT4577_127650C.1.pep
MSTSPAAADVSPLPPTAAADEAARATETVVVDERVASHVDPFLVEALDNPRHRLMVLRMELDIQNFMQNPQLQEFEFQNFPTSYLRCAAHRVAQHYGLETIVADSLVEGSVSRIVARKTAESRPKAFQNGSADSRNKSGVPKTVDERIEEYNKARARIFNGSISADSDAASIMGTLSTGKDEPVNVDPSVDEIKVSTMNSRSRVAVFKDTEKDRSDPDYDRNYKSLCSMALVMCNLLACPQTSILCTLATRPDLTIGSSGAAVYRHWPTPTMMYPHCYDNVSPMMSQVPLYQSFNHD

SEQ ID NO: 214970 - protein, 78 aa, Zea mays
  Clone ID: MRT4577_127651C.1.pep
NLLLAFTCSLPSPSHPQILCSGAPMAAPSCHLDASCRHSLHGEPQYGSVSSLSSPVPPQSTTPTLTPSRHLLHRTIDT

SEQ ID NO: 214971 - protein, 208 aa, Zea mays
  Clone ID: MRT4577_127652C.1.pep
MSTSPAAADVSPLPPTAAADEAARATETVVVDERVASHVDPFLVEALDNPRHRLMDSDAASIMGTLSTGKDEPVNVDPSVDETKVSTMNSRSRVAVFKDTEKDRSDPDYDRNYKRYVRSSVPGFNLSPGVFNFLVPQFMQYDIGYVQSPGMSTNQHTMYFGQPDLTIGSSGAAVYRHWPTPTMMYPHCYDNVSPMMSQVPLYQSFNHD

SEQ ID NO: 214972 - protein, 139 aa, Zea mays
  unsure (1)..(139): unsure at all Xaa locations
  Clone ID: MRT4577_127653C.1.pep
SFWSSHLPRTPYDISLDDETQNRNDQVNTLCKSCYVIVVPFVSIAEQIXLMQGFEKMVSGIYLGEIARLVLHRMALESDFFGDAADNLCTPFTLSTPLLAAIRKDDSPDLSEVRKILQEHLKVSFPDLHEVKHVFSSNL

SEQ ID NO: 214973 - protein, 52 aa, Zea mays
  unsure (1)..(52): unsure at all Xaa locations
  Clone ID: MRT4577_127654C.1.pep
PPMRKWGHLGTAPLFFFFGLYFYYFFFFFFFXSKSVLYIYSITEPIVTGTQV

SEQ ID NO: 214974 - protein, 349 aa, Zea mays
  Clone ID: MRT4577_127655C.1.pep
MSTSPAASAAASPPPPIASAAEASRATETVVVDERVASHVDPFLVEALDNPRHRLMVLRMELDIRNFMQNPQLQEFEFQNFPTSYLRCAAHRVAQHYGLETIVADSLVEGSVSRIVARKTPESRCPAISLAEVPSKQARNDHEAAEKLKFVIYQRPKAFQNGSTDLGNKNGAPKTVEERIEEYNKARARIFNGSVSADSDAASVLGTLCTGRDESVNVEPSVDEIKVSTMNNRSRVAVFKDTQKDRSDPDYDRNYKRYVRSPVPDFNLSPGAFNFVPQFMQYGVGYVQSPGMSTNQPAVYFGQPDLTMGSSGAAVYPHWPTPAMMYPHCYDNVGSMISQVPLYQSFNHG

SEQ ID NO: 214975 - protein, 481 aa, Zea mays
  unsure (1)..(481): unsure at all Xaa locations
  Clone ID: MRT4577_127656C.1.pep
CAIAAALVARRASARARWRRAVALLREFEDGCATPPPRLRQVVDAMVVEMHAGLASDGGSKLKMLLTFVDALPAGNEEGTYYSIDLGGTNFRVLRVEVGAGSVVTRRKVELPIPEELTKGTIEELFNFVAMTLKEFVETEDGNDEQRALGFTFSFPVRQTSVSSGSLIRWNKGFLIEDAVGKDVAQCLNEALARNGLNVRVTALVNDTVGTLALGHYHDEDTVAAVIIGAGTNACYIERTDAIIKCQGLLTNSGGMVVNMEWGNFWSSHLPRTPYDISLDDETQNRNDQGFEKMISGIYLGXIARLVLHRMALESDVFGDAADNLCTPFTLSTPLLAAIRKDDSPDLSEVRKILQEHLKIPDTPLKTRRLVVKVCDIVTRRAARLAAAGIVGILKKLGRDGSGVASSGRTGGQMRRTVVAIEGGLYEGYPVFREYLDEALVEILGEEVARTVALRVTVDGSGAGAALLAAVHSSNRQQGSI

SEQ ID NO: 214976 - protein, 192 aa, Zea mays
  Clone ID: MRT4577_127657C.1.pep
NSARGAGPSLNMSPAPRDSIPAWSHHSSSRPHRWRSSSQPGLLPRRHLPIDPTPRLSVAAVVVGLPVQERRRLNLGYHQAVSIPANDRLSTHEKETDSWLNIMGCGSDFMGCSTASDAQSERRVLPPPTMTRGQDPVRARFFVFLSLEPVRWIMSEVVAELARHSLRGVCRGHRRAEQLSTRRLRPVSSTTM

SEQ ID NO: 214977 - protein, 120 aa, Zea mays
  Clone ID: MRT4577_127658C.1.pep
MSTSPASASAAAAAAASPPAAAAADEAARATETVVVDERVASHVDPFLVEALDNPRHRLMVLRMELDIQNFMQNPQLQEFEFQNYPTSYLRCAAHRVAQHYGLETIVADSLVEGSVSRIV

SEQ ID NO: 214978 - protein, 360 aa, Zea mays
  unsure (1)..(360): unsure at all Xaa locations
  Clone ID: MRT4577_127659C.1.pep
MSTSPAASAAASPPPPIASAAEASRATEMVVVDERVASHVDPFLVEALDNPRHRLMVFHCDIIIPVLFYXVLRMELDMRNFMQNPQLQEFEFQNFPTSYLRCAAHRVAQHYGLETIVADSLVEGSVSRIVARKTPESRCPAISLAEVPSKQARNDHEAAEKLKFVIYQRPXKHSKMEAXDLGNKNGAPKTVEERIEEYNKARARIFNGSVSADSDAASVLGTLSTGKDESVNVDPSVDETKVSTMNSRSRVAVFKDTEKDRSDPDYDRNYKRYVRSSVPGFNLSPGVFNFVVPQFMQYDIGYVQSPGMSTNQHTMYFGQPDLTIGSSGAAVYRHWPTPTMMYPHCYDNVSPMMSQVSIII

SEQ ID NO: 214979 - protein, 51 aa, Zea mays
  Clone ID: MRT4577_12765C.1.pep
IVRLWMDSEEAMFGAFCGYLKRTHALLYLVIIMYILVFVYCCSCSGGVCAV

SEQ ID NO: 214980 - protein, 81 aa, Zea mays
  Clone ID: MRT4577_127660C.1.pep
VPTRRNSGVTSVQGQQQPERQKPVPQHSSHTGQHSAPATGMEASASSNGDAYSNNSLERAPCTSAPSSSSVGGLLQGSLSY

SEQ ID NO: 214981 - protein, 344 aa, Zea mays
  Clone ID: MRT4577_127661C.1.pep
MSTSPAAAAASPPPPIASAAEASRATETLVVVERVASHVDPFLVEALDNPRHRLMVLRMELDIRNFMQNPQLQEFEFQNFPTSYLRCAAHRVAQHYGLETIVADSLVEGSVSRIVARKTAESRYPAIFLSEVPSNQARNDHETAEKLKFVIYQRPKAFQNGSADSRNKSGVPKTVDERIEEYNKARARIFNGSISADSDAASIMGTLSTGKDEPVNVDPSVDETKVSTMNSRSRVAVFKDTEKDRSDPDYDRNYKRYVRSSVPGFNLSPGVFNFVVPQFMQYDIGYVQSPGMSTNQHTMYFGQPDLTIGSSGAAVYRHWPTPTMMYPHCYDNVSPMMSQVSIII

SEQ ID NO: 214982 - protein, 42 aa, Zea mays
  Clone ID: MRT4577_127662C.1.pep
TCNIESGLHKLPKSNNAGGHVGPFLCSLLFLHVLRHATIIPK

SEQ ID NO: 214983 - protein, 349 aa, Zea mays
  Clone ID: MRT4577_127663C.1.pep
MSTSPAASAAASPPPPIASAAEASRATETLVVDERVASHVDPFLVEALDNPRHRLMVLRMELDIRNFMQNPQLQEFEFQNFPTSYLRCAAHRVAQHYGLETIVADSLVEGSVSRIVARKTPESRCPAISLAEVPSKQARNDHEAAEKLKFVIYQRPKAFQNGSTDLGNKNGAPKTVEERIEEYNKARARIFNGSVSADSDAASGLGTLCTGRDESVNVEPSVDEIKVSTMNNRSRVAVFKDTQKDRSDPDYDRNSGRDVRSPVPDFNLSPGAFNFVPQFMQYGVGYVQSPGMSTNQPAVYFGQPGLTMGSSGAAVYPHWPTPAMMYPHCYDNVGSMISQVPLYQSFNHG

SEQ ID NO: 214984 - protein, 130 aa, Zea mays
  Clone ID: MRT4577_127664C.1.pep
QCYPRIAGAPSIRSRPIEIICHGPRRLAAPLTPPSHGSMSASVRRVTDTLVPPGHSAWVPLWVQAVSRYGVGWSGAVGTEIRRAHTLVADGGFGVGAEVKCRHGPCTAVFLACWDHRFCIFFILFKFLLS

SEQ ID NO: 214985 - protein, 97 aa, Zea mays
  Clone ID: MRT4577_127665C.1.pep
MVELVGTKAVDGEAPPRILHLNPRIRGDYSRKPVVEMNSCYRMQWGQSQRCEGFASRPADDTGELSSTSPATSGFVGFILICYFDYYFDSSINRPMF

SEQ ID NO: 214986 - protein, 122 aa, Zea mays
  unsure (1)..(122): unsure at all Xaa locations
  Clone ID: MRT4577_127666C.1.pep
HGRPLQRYLRQNMRSLRRARMXVLKNLAGXSKKQQTYAFELLCVSNTAYDGHQXQLPLSQLPAAYPQQFLAFNQLAALNSPAYLQKQQLLPFRQLAGVSPATFLIQPQLVPFYQHAEPNAGT

SEQ ID NO: 214987 - protein, 37 aa, Zea mays
  unsure (1)..(37): unsure at all Xaa locations
  Clone ID: MRT4577_127667C.1.pep
PNTGGSLFTRFDRIHMYIXNGTVSYISFFLLKAFVGP

SEQ ID NO: 214988 - protein, 85 aa, Zea mays
  Clone ID: MRT4577_127668C.1.pep
TNMFEHKYKYPTLKNISLKYLTKHYQHQTSSDRVISQSINNTNKDNISSRWAAGLVRQWVGQSMRVVGCCPRLSLHREEIAVLNQ

SEQ ID NO: 214989 - protein, 108 aa, Zea mays
  unsure (1)..(108): unsure at all Xaa locations
  Clone ID: MRT4577_127669C.1.pep
THARCDLHHDAPLCCALRTLVYCARLRRTEAPLAARTALPHWCRAIERVTQVANGASVKSIGDRSQCPRRDPGRSLSAGEEPRTARPWWTGGRRRHFAALEGXWLGVG

SEQ ID NO: 214990 - protein, 82 aa, Zea mays
  unsure (1)..(82): unsure at all Xaa locations
  Clone ID: MRT4577_12766C.1.pep
YGLVRVCMSILLLVPLKFRVISIFEIFIVGGVVFLNHSWMIRASVLVFWNFYVLGSVSFVLLGEIYVVFFFIXXLIFPSNKT

SEQ ID NO: 214991 - protein, 38 aa, Zea mays
  Clone ID: MRT4577_127670C.1.pep
PNCIQVTAFLQLRIWKTPDGTRLNLLATHSPLSTWRLI

SEQ ID NO: 214992 - protein, 97 aa, Zea mays
  unsure (1)..(97): unsure at all Xaa locations
  Clone ID: MRT4577_127671C.1.pep
SFPVVLVFRPCAFCPFLGLRXFWPPPPFXLALSARAXVFFLGPPALRPAVPFFAFLLAPLALLAAVPLVLRLGGPRRRPRARCLLAWPLGFFXWVFF

SEQ ID NO: 214993 - protein, 115 aa, Zea mays
  Clone ID: MRT4577_127672C.1.pep
ICPFPYRSAACNASADRLVRRGETRTRSSRCLSFPLPRCLNAFCSTLSCLLASTFSPLQLRGVVAAAAILPISAGLLSWPRVLARFPQPGIAYARLIASAAGIFHLPRVLGIRWC

SEQ ID NO: 214994 - protein, 43 aa, Zea mays
  Clone ID: MRT4577_127673C.1.pep
LQVYSYNNRTGGRPRHHLEKIALLLHCNNFIYRRCGLIIDTYK

SEQ ID NO: 214995 - protein, 92 aa, Zea mays
  Clone ID: MRT4577_127674C.1.pep
TELKKLKLSWLRDQTGLVSQEPVLFNNTIRTNIAYGKQGEVREDEIVAAAKAANAHEFISSLPQGYSTIVGETGTQLSGGQKQRVAIARAIL

SEQ ID NO: 214996 - protein, 86 aa, Zea mays
  unsure (1)..(86): unsure at all Xaa locations
  Clone ID: MRT4577_127675C.1.pep
THRLTRGQQLVLANLDAYYGRQXTLLFNQLAAXNYAAYLLQHLLFSQLAADYTQQSLXFNQLTXLNSYDYLQQRQLLPFRLLAGVS

SEQ ID NO: 214997 - protein, 47 aa, Zea mays
  Clone ID: MRT4577_127676C.1.pep
MAGNALANYVQVYVMLPVSCLRIMCGCSIISILLPVCITNKKKERST

SEQ ID NO: 214998 - protein, 65 aa, Zea mays
  Clone ID: MRT4577_127677C.1.pep
RSRVSVRSDPRSKLTIYRIIIDLVPSHDETRRRSMVLLQESSSRPSLKRFIPYHQSIMVMKEIQR

SEQ ID NO: 214999 - protein, 85 aa, Zea mays
  Clone ID: MRT4577_127678C.1.pep
MLSGWASAWRAHRAITERTQMHYGTTIIPTMNARCLQAPTHTTHAPISIRSRCTLAYCFHLGHAREVVYRRHAGERLPSLCLGHA

SEQ ID NO: 215000 - protein, 45 aa, Zea mays
  Clone ID: MRT4577_127679C.1.pep
LIVSRLRGIRNGPYDRQLVVCQRVLDLSYHLVETLEVDIETSNAW

SEQ ID NO: 215001 - protein, 112 aa, Zea mays
  unsure (1)..(112): unsure at all Xaa locations
  Clone ID: MRT4577_12767C.1.pep
HRRGIPGAPPRALLESDPARQVSGDFXKSLRPGKPWTRYKNRLAVRQVRETRSRHGLAALELCTRRSPCPDTSGKATEVVPSLKDGGRSAGHPGDQKSEKMLNDRYLIKKFE

SEQ ID NO: 215002 - protein, 65 aa, Zea mays
  Clone ID: MRT4577_127680C.1.pep
MVMATVPGDLIWQVVRKNNSFLVKHFVNGNAKVHFTKDPNILYIIHSFKHSCFANKKTLTIQSAA

SEQ ID NO: 215003 - protein, 219 aa, Zea mays
  Clone ID: MRT4577_127681C.1.pep
MGRRPARCYRQIKNKPYPKSRYCRGVPDPKIRIYDVGMKKKGVDEFSHCVHLVSWEKENVSSEALEAARIACNKYMTKHAGKDAFHLRVRVHPFHVLRINKMLSCAGADRLQTGMRGAFGKPQGVCARVAIGQVLLSVRCKPNNAIHATEALRRAKFKFPGRQKIIESRKWGFTKFNRNDYLKFKSEGRILPDGVNAKLLGCHGRLANRAPGQAFLSAA

SEQ ID NO: 215004 - protein, 52 aa, Zea mays
  Clone ID: MRT4577_127682C.1.pep
VAAATAFKGHMSPSRQWLMKVARTVRLSVVPLSRSKSPLDEVLCCVKKKEGL

SEQ ID NO: 215005 - protein, 79 aa, Zea mays
  Clone ID: MRT4577_127683C.1.pep
GVYPTPSQFQGGEGENGPLRSTKKPLPLLKKTPALIICAPFLFDPYVPIAGEPPLLLKNVYFPFPGLFGDPDLFFCTLG

SEQ ID NO: 215006 - protein, 240 aa, Zea mays
  unsure (1)..(240): unsure at all Xaa locations
  Clone ID: MRT4577_127684C.1.pep
MYRAAASLASKARQAGSSARQVGSRLAWSRNYAAKDIRFGVEARASMLRGVEELADAVKVTMGPKGRTVIIEQSFGAPKVTKDGVTVAKSIEFKDRVKNVGASLVKQVANATNDTAGDGTTCATVLTKAIFTEGCKSVAAGMNAMDLRRGISMAVDDVVTNLKGMARMISTSEEIAQVGTISANGEREIGELIAKAMEKVXKEGVITIADGNTLYNELGGVEGMKLDRGYISPYFITTKD

SEQ ID NO: 215007 - protein, 102 aa, Zea mays
  unsure (1)..(102): unsure at all Xaa locations
  Clone ID: MRT4577_127685C.1.pep
GGDDKXGXAXPSPGGKDGRXTXGSGGQGEHTXXGXGEHXEXSPXTGGRATXPXGHENRRXNRXXGAXXNXAXXAXARTKRRAGPPRRQEGAQGGDEATSTTP

SEQ ID NO: 215008 - protein, 35 aa, Zea mays
  Clone ID: MRT4577_127686C.1.pep
MAHRRTPPPTTTTTYDRAVDAAVDAQDPLIRQWFR

SEQ ID NO: 215009 - protein, 66 aa, Zea mays
  Clone ID: MRT4577_127687C.1.pep
GLKGATYTEAPPCGGDSGLLLAPARRPALGGQLGRDLVVSSGSLLFSDLNFLCVIKVWCHIGQYAW

SEQ ID NO: 215010 - protein, 53 aa, Zea mays
  Clone ID: MRT4577_127688C.1.pep
CSQCHSRFECRCYVRTYRRRLGLCLLFACLISSLISCTTATSSRRFIYIFISK

SEQ ID NO: 215011 - protein, 97 aa, Zea mays
  Clone ID: MRT4577_127689C.1.pep
QYEAHPVRALADLPAPGHNWATDKIMWTYTLRAGGQSSSVHRSVRRSQCVRPRRPSPRLERHDVPDNELCLPKSVAVRSGWGLASRSRRTESRSHVN

SEQ ID NO: 215012 - protein, 69 aa, Zea mays
  Clone ID: MRT4577_12768C.1.pep
MASFAAQLRDKFLGVIDNITGWTSSGVAKDTPPEESTKLQSRTVQQPVEVRSRGDEEPIVQKGDEAGAN

SEQ ID NO: 215013 - protein, 116 aa, Zea mays
  unsure (1)..(116): unsure at all Xaa locations
  Clone ID: MRT4577_127690C.1.pep
GGFPVRDVALSPAAPIGALAFALANANPDHQKTILGETLSPLVGPLEPNPPAKVPGMLLEMGPPGVPPPLGSPDAPKSKVFXAMDVFPNVAPQQNANPPPRQLFAFSLTEGLFSFL

SEQ ID NO: 215014 - protein, 385 aa, Zea mays
  Clone ID: MRT4577_127691C.1.pep
MDASTEVTDAIGAVGFDNGAAGKLPPSDSVEGHAEEHDVLADGAHSGESEVINPSEEVEMEATSQSQDIKPRVPEGVQGHSMKVGTKSQRQSPRGGDKSQTRKSSFNPSYPKAPIARVSDPDLVDCSLSNGDAGSSKKKAEKSSFRPVAKETPSLEDSNEKKKTQKASNQHSVKKDIEEESNESVKPQRVGSTPSYGFSFKCDERAEKRREFYSKLEEKIHAQELEKSNLQAKSKETEEAELKMLRKSLNFKATPMPSFYKEPPPPKVELKKIPTTRARSPKLGRSKNTSSGGTEGNPNPPARSARLSLDERVSQNGVKKAPVANAVKKPQRKSLPKLPSEQTTKVDIAPSVPSAEELENKSPTKGLDREPIRAQITPDEPGLTA

SEQ ID NO: 215015 - protein, 46 aa, Zea mays
  Clone ID: MRT4577_127692C.1.pep
IYVAVIVKAQGKRLPHLYDTFIRTLAPDITTLPSCHASLIHWLSLH

SEQ ID NO: 215016 - protein, 385 aa, Zea mays
  unsure (1)..(385): unsure at all Xaa locations
  Clone ID: MRT4577_127693C.1.pep
MDASTEVTDAIGAVGFDNGAAGKLPPSDSVEGHAEEHDVLADGAHSGESEVINPSEEVEMEATSQSQDIKPRVPEGVQGHSMKVGTKSQRQSPRGGDKSQTRKSSFSPSYPKAPIARVSDPDLVDCSLSNGDAGSSKKKAEKSSFRPVAKETPSLEDSNEKKKTQKASNQHSVKKDIEEESNESVKPQRVGSTPSYGFSFKCDERAEKRREFYSKLEEKIHAQEXQKSNLQAKSKETEEAELKMLRKSLNFKATPMPSFYKEPXPPKVELKKIPTTRARSPKLGRSKNTSSGGTEGNPNPPARSGRLSLDERVSQNGVKKAPAANAVKKPQRKSLPKLPSEQTTKVDIAPSVPSAEELENKSPTKGLDREPIRAQITPDEPGLTA

SEQ ID NO: 215017 - protein, 81 aa, Zea mays
  Clone ID: MRT4577_127694C.1.pep
IWLPIKAAGSFTIFWLESGFFINWPGFLFFLCFGFFRFGGYWPLGVFYPYFMLVSGFVFKIVSVLSCFFFWGWFLNLNGCF

SEQ ID NO: 215018 - protein, 52 aa, Zea mays
  Clone ID: MRT4577_127695C.1.pep
GPILAGGSVTDAGANGNKRAKHGQTQLEPCDIHIYCCVTQAGTIHEKQGENP

SEQ ID NO: 215019 - protein, 89 aa, Zea mays
  Clone ID: MRT4577_127696C.1.pep
LAQQIQRLSWFASAFASLSSQSIHQPSAMQFNIDPDIVPNLKLGLHSFQIIISLVAWCLQIGVLNAKDAEVTGKNGWTFGVCFLSVPAW

SEQ ID NO: 215020 - protein, 62 aa, Zea mays
  unsure (1)..(62): unsure at all Xaa locations
  Clone ID: MRT4577_127697C.1.pep
DAAEPARNTRGDDPRAGNPRTNAPPXRGVKHALRLLFTREKGRNQQNRNNEPKCQKTEETTT

SEQ ID NO: 215021 - protein, 67 aa, Zea mays
  Clone ID: MRT4577_127698C.1.pep
KGRPFFFFFFFEFSFVIVMVFPFLYVLFFFFFFFFFFFFFFFFFLNHNNYVIGYLDRNEANNWNKQY

SEQ ID NO: 215022 - protein, 136 aa, Zea mays
  unsure (1)..(136): unsure at all Xaa locations
  Clone ID: MRT4577_127699C.1.pep
APGRALWLVLDRQGYSSCLDGSVSRSLCGLASGHPSFSARHLCAXCLWSHTPPLPPSPSLVASKQLAVRCNAELYGISFAQHSTQPGTKACKHRTMLVGSYTTYAIFERILMRHVAPIDSQDSTSGRDNRKELVCG

SEQ ID NO: 215023 - protein, 102 aa, Zea mays
  Clone ID: MRT4577_12769C.1.pep
FLYAFLCHGPSSRPNQSGPLTYPVSPAPNWSFVSRPRFLQTFPFLVAQLFIHPTLVPPPTVECGLSGSPYILWGLQKPPLIVVYPHWAFFVFKALEWGWAGF

SEQ ID NO: 215024 - protein, 49 aa, Zea mays
  unsure (1)..(49): unsure at all Xaa locations
  Clone ID: MRT4577_1276C.1.pep
PTIQLPAFAEIKRTRPGLKTXGLNKEYEGNVKATFYDLGLKQFFFFYLT

SEQ ID NO: 215025 - protein, 344 aa, Zea mays
  unsure (1)..(344): unsure at all Xaa locations
  Clone ID: MRT4577_127700C.1.pep
AFVLPSRDSLSLGERTMAXXPRCADGDTEVRKVAIQIIALFFDISLSLPKQKAYPNDIDLESSYSALSSLEELVSIVRRETSVDQTELFQRVVSSVCILLSKDELVVFLHSCTLATCDKIKQSADASIQAIIMFIIRRGKELREADVSRTTQSLLSSAISLTDTHSRQEVLNAISCLAENTNHVVVFDEVLSVAGKDICTKDIPRIRGGWAIQDVFYAFSQHKELALLFLEYTLSILHKEPVIINSSEKGESTSESLADDCILQATMFALNAFMRGGGKIGKQAVEKSYPSVLSGLILKLGSLNGVAELGRNELLRSLLIAFQSFCECVGDVEMGKLLARDGEQ

SEQ ID NO: 215026 - protein, 203 aa, Zea mays
  Clone ID: MRT4577_127701C.1.pep
MASVGRAGRGGKGDGGKGEGSLARRAWRQYLLQLQQHPLRTKMITAGCLAGVSDSVAQKLSGFQKIEKRRLLLKMLFGFAYGGPFGHFLHKILDYIFQGKKDTKTIAKKVLLEQVTSSPWNNILFLFYYGYVVERRPLKEVTTRVKKQYPSVQLSAWMFWPIVGWINHQYMPLQFRVIFHSFVACCWGIFLNLRARAMSLKQA

SEQ ID NO: 215027 - protein, 121 aa, Zea mays
  unsure (1)..(121): unsure at all Xaa locations
  Clone ID: MRT4577_127702C.1.pep
AHXHTHARXTLGAEIRRDHGSVPLTCVRNMGESSSLAKCMAAAAVSPPPTSPSAGTPRSSASSLFAAGTAARREAAGEGRRCGASGLVAAGRRREWWRSGRVVGTVNVAAGRGITIDSCPV

SEQ ID NO: 215028 - protein, 78 aa, Zea mays
  Clone ID: MRT4577_127703C.1.pep
PFKLGMFFCVYRTQGRFVQTRKWQKLLPGGGLSYSWGHLRGWVKIGWKNRLIGSPRKFFRHLGPPKCFVARHHDQTGP

SEQ ID NO: 215029 - protein, 71 aa, Zea mays
  Clone ID: MRT4577_127704C.1.pep
TGRRPPPPRAEPHSTALRPCRRRPSPLGSYAAPLPPLPLLSPLLPAADSFPRRPFPYSDVSLRTPHRRRGP

SEQ ID NO: 215030 - protein, 142 aa, Zea mays
  Clone ID: MRT4577_127705C.1.pep
LLRAIGFLEAGRDTPSTRRLITPRPTPDKPIYWRERLRACAEHAHASLSLLLTESQARPQDTMKMTVTITARTCAPNHRKFSPLSSCRHTEWPAPSRHRLRWYPAELRCDLSTLSVNPKGVNGTEQLSPAMESTRYMNCSYF

SEQ ID NO: 215031 - protein, 46 aa, Zea mays
  Clone ID: MRT4577_127706C.1.pep
GVFVYVLGLSVYMQVGGCEIIQFRLGWVGDMELLGIIRYFGVLIVW

SEQ ID NO: 215032 - protein, 128 aa, Zea mays
  Clone ID: MRT4577_127707C.1.pep
LHAYGHASAHAFALRVVTGRFTIICTEHDVPVVVFTFKAKDETQLAYTLSVDLGRFGWIVSQYTMAANLEHMAVLLVAGREDLRRPLVERFLSHDRMALEELDHAGKGGPVPRMRLTIELGPSVRGSR

SEQ ID NO: 215033 - protein, 104 aa, Zea mays
  Clone ID: MRT4577_127708C.1.pep
SLVRPRVRRKTDTWGHGGSRGVPVENGHRHANRRGTPCDPKETKISASVPDGKNSKRGSASYGAHEVRLFCNFLFFQLVKGMGAHCTLRPPFESSLRRIWVHIS

SEQ ID NO: 215034 - protein, 99 aa, Zea mays
  Clone ID: MRT4577_127709C.1.pep
SGPLPIITWSGYIRGGPKRGGGGENTFPSHRPFGFLSGGHSEAPGVNPPQKLLFAPRGGAFDGVLFFTSKTLRQGGGEPPPWRTPKPHNQKYLWVLNTI

SEQ ID NO: 215035 - protein, 51 aa, Zea mays
  Clone ID: MRT4577_12770C.1.pep
GLGLSRPAGFRTYDQMKRILNLTYSTPVCRPSRECDNVREYWKRVTPLKII

SEQ ID NO: 215036 - protein, 93 aa, Zea mays
  Clone ID: MRT4577_127710C.1.pep
NDGSVLVGDHFVRCGSHIIMGLWLAMYVTGRGAEGRKGGGGGRGRGRRQSAAGGDRGLDRPIHYNTASDCCWVKKNVHVHSEVVDPDSGRSAG

SEQ ID NO: 215037 - protein, 136 aa, Zea mays
  Clone ID: MRT4577_127711C.1.pep
ADAWARHHHHLLASMSTRIHPSSSDAAGRARLRAAEERERERRPAVYTVWKRSSMGFQGTDGFCVYDDAGGLAFRVDNYSRRRKLCAGELLLMDGTGTPLLSLRPQLLSLHDRWNCYTATEDAAVDKKATSPAQQQ

SEQ ID NO: 215038 - protein, 328 aa, Zea mays
  Clone ID: MRT4577_127712C.1.pep
MAALLRTAAALVPPPSSPPSAREPRGRCLRLACSRRAPVRQLRAWPLPTPHVFGRSGGRFRRLSVTEAEEAAQTATQEDPETEVTGESAADDSAGSTDETPSIIVTTLQSYREALINDDEAKAAEIESFLLSIEDEKNSLLNKITALDAELATQRERILRISADFDNFRKRTENEKLNMMENVQGELIESFLPVLDNFERAKVQIKVETEGEEKINNSYQSIYKQFIEILNSLGVEDVETVGKPFDPMLHEAIMREESSEFEEGIILQEFRKGFKLGERLLRPAMVKVSAGPGPEKFGDDDPTAVEGSVAPQKVDEVEDDGFGAGDAE

SEQ ID NO: 215039 - protein, 82 aa, Zea mays
  Clone ID: MRT4577_127713C.1.pep
WGATQRVVDLAPLGGAKWPGEAGAGNGDPLEGFCKDTPQTLECKVGKAKGQGSFPGKTYSTGGGVFSLENNIQIFCRKRGML

SEQ ID NO: 215040 - protein, 50 aa, Zea mays
  unsure (1)..(50): unsure at all Xaa locations
  Clone ID: MRT4577_127714C.1.pep
ILTTSTLFRGSITLTXQPYVDKFKPLITSSYKFKSNREHKPDRGFQKTFY

SEQ ID NO: 215041 - protein, 150 aa, Zea mays
  Clone ID: MRT4577_127715C.1.pep
LIQGTRRLIANNYGILLAILGPQGDAVNAKLRSLFTHKISRDREQMGRAWRPRFPDEIPRSRRRPELEAEKRTSAVTNVAAAAAGATGRSARRKEGVEAAALGWEEGGRGGGIKWGQEPSGSRVGIGILQGRSDGEAAAFLYNFFSFTFR

SEQ ID NO: 215042 - protein, 226 aa, Zea mays
  Clone ID: MRT4577_127716C.1.pep
VGSYLSRARFISADTVVTILKKLVDWCVDYCDHQSKREATPIPNHQLFYATCQAVMYVLCFRLRSIMDYPNLKSDLFHMPFGFLFRHRLEPLKVCLPSIVNEFLRQAKVAGLVAAFVDPAAEDAIESDLSRTFGGINRLDMFFPFDPYLLKESDRYIRPNFEFWSMVKTTYSDDTDDDDDELEDLDAPEMNVGSLDDHVEIDINSDEDDLEYSMNKMSITPHHSFL

SEQ ID NO: 215043 - protein, 160 aa, Zea mays
  Clone ID: MRT4577_127717C.1.pep
PPPPAIETFSCAVAAAAAFIVGLRWRVGRMGRALAASSVAPIASCGFSCSSCCIRVLVTAPRPEALRDPFSSASAAAAAAFIVLRWRVAKLDTTSTATSPASALLAAPLLLVAGAFEGEGARRSAPTAGASPVSSSGFGSSFFSMLLSSSLISSVDLALT

SEQ ID NO: 215044 - protein, 94 aa, Zea mays
  unsure (1)..(94): unsure at all Xaa locations
  Clone ID: MRT4577_127718C.1.pep
QIKKKGEHKGLSAPVQDPHLPERVLGDLSPFGPPPGSWCNLHSHQSGFMSDLDIQIXLPSIPSLRQXLGTLCGTGVKDYVSAHQQRNVAELTTS

SEQ ID NO: 215045 - protein, 42 aa, Zea mays
  Clone ID: MRT4577_127719C.1.pep
SSIEWFKGWHSLGYFRSVHSHSMSSRGPAKSALYFVFGECTP

SEQ ID NO: 215046 - protein, 324 aa, Zea mays
  Clone ID: MRT4577_12771C.1.pep
MASFRTSWHCLLAACLFLLASAAHGQQLSSSFYAATCPTLELIVRTTMLTALLAERRMGASLVRLFFHDCFVQGCDGSILLDDVGSFVGEKGAGPNVNSLRGFDVIDQIKANVELICPGVVSCADIVALAARDGTFLLGGPSWAVPLGRRDSTTASLALANSDLPSPVSGLAALLAAFGNKGLGPGDLTALSGAHTIGFSQCQNFRAHIYNDTDIDPAFASLRQRTCPAAPGTGDSSLAPLDVQTQLVFDNAYYRNLLAKRGLLRSDQALFNGGSQDALVRQYSANPALFASDFANAMIKMGNISPLTGTAGQIRANCRVVNSS

SEQ ID NO: 215047 - protein, 62 aa, Zea mays
  Clone ID: MRT4577_127720C.1.pep
IKAINCFNHNIDAYDYDKVSSILSIMQDDLFKAVIFRQVSTPETFLMSPSGNNIRRGREHIA

SEQ ID NO: 215048 - protein, 68 aa, Zea mays
  unsure (1)..(68): unsure at all Xaa locations
  Clone ID: MRT4577_127721C.1.pep
HASDHAYVQYQAPPDFSTLKSXYTIAMAVTSTAVVVLCPPSVSGLLLAPASRQARVSFHSAPSTARLS

SEQ ID NO: 215049 - protein, 51 aa, Zea mays
  Clone ID: MRT4577_127722C.1.pep
ARILYSGRPPRVLLDILYPTLPVVDLHRHHAPSNAIARAPYSACHICTTAG

SEQ ID NO: 215050 - protein, 104 aa, Zea mays
  Clone ID: MRT4577_127723C.1.pep
PFSLARGQPQKRRQTRTGKGRRSGCSRADDVLRQQLGVPADLLDPGPDLGSVSPCSAHLVGAVICIIRLAISGIWPCCLCVTALLKASAYIIKAPFHFMTSITY

SEQ ID NO: 215051 - protein, 90 aa, Zea mays
  Clone ID: MRT4577_127725C.1.pep
PKDGQNPRAVFLGSSPPTLKTSSFGLKTFKTIKNLQTLPFDLLKFSLTPLNLLIFPVKFLLNLLCPKFSPLTIIFYWEKKIFHFQILFLT

SEQ ID NO: 215052 - protein, 82 aa, Zea mays
  unsure (1)..(82): unsure at all Xaa locations
  Clone ID: MRT4577_127726C.1.pep
ASQLEILIDELEGRMEEVLRRGIRFDGHVMLLECVCRRFAARVHLWSSCSLVDXVRECVRIDIVMSEPLRDERVLEQAGTLE

SEQ ID NO: 215053 - protein, 75 aa, Zea mays
  Clone ID: MRT4577_127727C.1.pep
KTKCAVQISITIRNVSLLCPKYCYRKNLWGVFAPPLDLVAPGVFAWAHKKKSLSNCLTLLALKKKLFKKLFARTI

SEQ ID NO: 215054 - protein, 186 aa, Zea mays
  unsure (1)..(186): unsure at all Xaa locations
  Clone ID: MRT4577_127728C.1.pep
SKTYRRISSHYYSSRPTTIRSASSQPLQGMSAKXLGDPPQCDMLANNALGAPTSSSPIHHCRTITDDTLIRASRPTIKFLLKKACSVILDRLVYRMIADTPKNSLNTLVPRVPDVPXLKTQMIDVCFVDDAEXIGCSLCRDGXLLRENGTFYKDCEDNLADTDPILASDGDLYVADDIGTGHPAHA

SEQ ID NO: 215055 - protein, 89 aa, Zea mays
  Clone ID: MRT4577_127729C.1.pep
LPRAQQGIAKGACHSGHPGHYTKTHPPQPSPWRNLGTPCQSYSGVRSQGRLGSVLVAERFLFPFGPRTLVVIQHQSGAPPPLRLLGRHL

SEQ ID NO: 215056 - protein, 182 aa, Zea mays
  Clone ID: MRT4577_12772C.1.pep
MRKLKFHEQKLLKRHNFLEYKREGGHREALVTQRYRLVERDDYKKYNGICLMVQKLVNIIKQMDPRDPFRIQMTDLILDKLYNMGVISTKESLLKCEKLSVSAFCRRRLATVMVKLKFAEHLKEAVTYIEQGHVRVGPDAVTDPAFLVTRNMEDFITWVDSSKIKRKVMEYNDALDDYDAMF

SEQ ID NO: 215057 - protein, 56 aa, Zea mays
  Clone ID: MRT4577_127730C.1.pep
THDVRPRVRKKKKKKKKKKKKKKKKKKRKKKKKEKKKNKKKKKKKKKGGRPQRFNP

SEQ ID NO: 215058 - protein, 68 aa, Zea mays
  Clone ID: MRT4577_127731C.1.pep
NIKKHFRTARLKGPWVYALAVQSCLNLLNDMAKTIFTSTTDIVVESRLLIGGSTGTMLESFHDERDEN

SEQ ID NO: 215059 - protein, 62 aa, Zea mays
  unsure (1)..(62): unsure at all Xaa locations
  Clone ID: MRT4577_127732C.1.pep
MLPFKERPQSMNIISVDELKTKAEHVNRRMLLXKIFNKSKTVTIATLLDLPRYSICIILSAG

SEQ ID NO: 215060 - protein, 45 aa, Zea mays
  Clone ID: MRT4577_127733C.1.pep
IESVLDGARQMCAHEIVSRRAIRSLGFVRSLSNQLLRASRSCPGR

SEQ ID NO: 215061 - protein, 68 aa, Zea mays
  Clone ID: MRT4577_127734C.1.pep
LWGVRHLYRAIGARGEIRGGPLNTRLTTDSQMAGLMMKFGACRRMDVALVAFAADAEGGAPAPAFDAA

SEQ ID NO: 215062 - protein, 43 aa, Zea mays
  Clone ID: MRT4577_127735C.1.pep
CDHQDFGSRHLMAQFRIWSWVHPPSRLIKPPHWVPIRGGKIHR

SEQ ID NO: 215063 - protein, 89 aa, Zea mays
  unsure (1)..(89): unsure at all Xaa locations
  Clone ID: MRT4577_127736C.1.pep
GGGCLPKEPLKATTQQVXIQSKKIYCINKAIPTLSNNLXNSALNEANFXESLTCXEKLVRVCQNTRFNYKAIYLPTPLNQAIFPIQCQI

SEQ ID NO: 215064 - protein, 94 aa, Zea mays
  Clone ID: MRT4577_127737C.1.pep
PPRARAAPSPQASTHASTPPRATCTSASLSTSRLPPRPVISRHPTVDDVITNSEAGDMDARMAMVKTHGYKIYKFTPTRMVAPKVVKPKPIPKD

SEQ ID NO: 215065 - protein, 329 aa, Zea mays
  Clone ID: MRT4577_127738C.1.pep
MANADAGDGDEVILDAPGFIRVYRSGRVERFLPVDFAPPSTDAATGVSSKDVAILPDACLLVRIYLPAPPSSGSYSGKLPVLVFFHGGGFCLGSAFDAAVHSHANRLAAAAGAIIVSVEYRLAPEHPVPALYGDAWTALQWVAAHSVGRGQEPWLTAHADLGRVHVGGESAGANIAHHAAMRAGREELGHGVKLSSLVMIHPYFLGGESSETDDMGVALLRELVRLWPVVCPGTSGCDDDPLINPMAEGAPNLASLGCRRVLVCVGGKDPMRGRGRLYCEKLKRSGWRGEVDDWEADGQGHGFHLSCPMSAEAEAQVRVIAEFLTYGYG

SEQ ID NO: 215066 - protein, 98 aa, Zea mays
  unsure (1)..(98): unsure at all Xaa locations
  Clone ID: MRT4577_127739C.1.pep
PKKAGRYKTQGPPKKMANPPKPGXGGGKTTPPNKKNPPXGTKKKPSKTPEGPTXESPGFPGTPPXRRGPSPPEGPQGGPPTRPRKRRAGPLGRAAPPP

SEQ ID NO: 215067 - protein, 154 aa, Zea mays
  unsure (1)..(154): unsure at all Xaa locations
  Clone ID: MRT4577_12773C.1.pep
NPSDTDYXGDLDRRRSLSGYVFTVGDCAVSWKARLQDTVALSTTEAEYMAIAEVTKEALWLKDQMITEKSKHIDIRYHFVRDINEKGLVKPLVSVGASKMMMYLFKVEFAIMILQGICIKVEFVEFVIQIMKKAAKLASEAEPPLRYGSFPYSF

SEQ ID NO: 215068 - protein, 118 aa, Zea mays
  Clone ID: MRT4577_127740C.1.pep
PKVPPLFQCLYLENCVYFLSLCFQFSSFCVDKKFPCYQSVAWCFPGPRGLSCHEKFLQNEILFMECNCVSCTFPGPLLHVNKRGPPVHFGPIWPAWPGLDPRCIAKGKREDFYGPFMP

SEQ ID NO: 215069 - protein, 60 aa, Zea mays
  Clone ID: MRT4577_127741C.1.pep
NMVPSGLSYSVPACHHLQEWTTLLITASGCGITHFAVNEVEHDRCRSTTIMRSRPLKRVE

SEQ ID NO: 215070 - protein, 80 aa, Zea mays
  Clone ID: MRT4577_127742C.1.pep
CMACGAPVAGSMASSYGSVGSPFMIRFMGLLSSSRCSVTVGFLWIFSRAQRCALSVTLGCLPSANMAHWSVRKDVFLLEK

SEQ ID NO: 215071 - protein, 40 aa, Zea mays
  Clone ID: MRT4577_127743C.1.pep
LDADTNLDTGSSVDRSIMARFVDPLMVMRVIGEVLEYMVP

SEQ ID NO: 215072 - protein, 259 aa, Zea mays
  Clone ID: MRT4577_127744C.1.pep
MVSIVNHVVNALVWIYSNLIITMDTVGDVDLSLGFGDGGDISPSPMADVPPPPPTQMSASYLFTRIRTDKGMLINILAVVSALLIGVQALLGSRRRRFGRKEFVRLPLWGIYTISLPVVSYTIGLVQSVESRGMPDSQLLWAVGLLLLLGSVNGMSAFSRRDIEQSTETLVKHVFQTLLVLWLLYSRSDVSDGKWLLLPYFLLCWVYSIFRMAQTMKALRMASLAHGLVRGATVVADYMKDIVVKEQQHDPKDMDECKY

SEQ ID NO: 215073 - protein, 94 aa, Zea mays
  unsure (1)..(94): unsure at all Xaa locations
  Clone ID: MRT4577_127745C.1.pep
RAGHGGVGMMMNFGAVPRAFXGGNQQMFHSSQSQAMQSMLATHQLQQLQLHSQPQQQQQLQAQHLQQVARDLKMKGHLGAQGQWGGAKSGSSGS

SEQ ID NO: 215074 - protein, 499 aa, Zea mays
  unsure (1)..(499): unsure at all Xaa locations
  Clone ID: MRT4577_127746C.1.pep
MGESLLTALSMDTATAHHPHQGPSTFLSMDTASHDDFDLFLQPQGPFRRCLHAAAVAPPDINLPLAADPSPPPLASLDANVDMLDVGLGGSQHYDSDSPAAAGPVSAPAAAATTMVAVSHTKGSGSSAARKCVKRNVSIWGAWFFFTHYFKPVMSADKAGKAKAATTTGGNGNSATLDAFLVQHDMENIYMWVFKERPENALGKMQLRSFMNGHSRLGEPQFPFSADKGFVRSHRMQRKHYRGLSNPQCLHGIEIVRAPNLAGVPEADLKRWMELTGRDANFSVPTEASDFESWRNLPSTDFELERPATAAPAKSSSHGHHKKLLNGSGLNLSTQPSNHSSGDGMEITATCNKRRKDSSPTAMEEDCSNSNSDKAQDMDASHSFEPSWMNDFSXKVKVSWKNALTNGIVKVSCIIVGRMPLLKRHDRTFKLADPSPEHCPPGEFVREIPLPTRIPEDATLEAYRDETGTGLEIIVPKYRVGPEEHEVHVSMRPPSSWCQ

SEQ ID NO: 215075 - protein, 61 aa, Zea mays
  Clone ID: MRT4577_127747C.1.pep
KKPNLFGFTRGKFLKKVSQNSNYVFFGQKHFFIMGPKGTKTNVPFLKIYMARKFFRVCTGF

SEQ ID NO: 215076 - protein, 103 aa, Zea mays
  unsure (1)..(103): unsure at all Xaa locations
  Clone ID: MRT4577_127748C.1.pep
RHASGPVTAAKTIYEDSKGYLIIVSLPFADFXRRLADPAPEHCPPGEFVREIPLPTRIPEDATLEAYCDETGTGLEIIVPKFRVGPEEHEVHVSMRPPSSWCQ

SEQ ID NO: 215077 - protein, 145 aa, Zea mays
  Clone ID: MRT4577_127749C.1.pep
MNDFTGVMRHASGPVTAAKTIYEDSKGYLIIVSLPFSDFQKVKVSWKNTLTNGIVKVSCISVGRMPLLKRHDRAFKLADPSPEHCPPGEFVREIPLPTRIPEDATLEAYRDETGTGLEIIVPKFRVGPEEHEVHVSMRPPSSWCQ

SEQ ID NO: 215078 - protein, 157 aa, Zea mays
  Clone ID: MRT4577_12774C.1.pep
MRKLKFHEQKLLKRHNFLEYKREGGHREALVTQRYRLVERDDYKKYNGICLMVQKLVNIIKQMDPRDPFRIQMTDLILDKLRRLATVMVKLKFAEHLKEAVTYIEQGHVRVGPDAVTDPAFLVTRNMEDFITWVDSSKIKRKVMEYNDALDDYDAMF

SEQ ID NO: 215079 - protein, 39 aa, Zea mays
  unsure (1)..(39): unsure at all Xaa locations
  Clone ID: MRT4577_127750C.1.pep
FKKKKKKKKKKKKKKKKTXKKKKKKKKKKKKKKKGGRRF

SEQ ID NO: 215080 - protein, 451 aa, Zea mays
  Clone ID: MRT4577_127751C.1.pep
MLDVGLGGSGHYDSDSPAAAGPVSAPAAAATTMVAVSYTKGSGSSAARKCVKRNVSIWGAWFFFTHYFKPVMSADKAGKAKAATTTGGNGNSATLDAFLVQHDMENIYMWVFKERPENALGKMQLRSFMNGHSRLGEPQFPFSADKGFVRSHRMQRKHYRGLSNPQCLHGIEIVRAPNLAGVPEADLKRWMELTGRDANFSVPTEASDFESWRNLPSTDFELERPATAAPAKSSSHGHHKKLLNGSGLNLSTQPSNHSSGDGMEITATCNKRRKDSSPTAMEEDCSNSNSDKAQDMDVSHTFEPSWMNDFSGVMRHASGPVTAAKTIYEDSKGYLIIVSLPFADFQKVKVSWKNTLTNGIVKVSCTSVGRMPLLKRHDRTFRLVDPAPEHCPPGEFVREIPLPTRIPEDATLEAYCDETGTGLEIIVPKFRVGPEEHEVHVSMRPPSSWCQ

SEQ ID NO: 215081 - protein, 63 aa, Zea mays
  Clone ID: MRT4577_127752C.1.pep
KIPEMAPMMHPAIPLHFPDSCESSPQFPPVNGDSFYHSYSVFRHQFARVNRRPPTNKLVYPPI

SEQ ID NO: 215082 - protein, 65 aa, Zea mays
  Clone ID: MRT4577_127753C.1.pep
GGKKVEAQEPLPQRGNRGGQNCKEQLGQQGFNQIGKKGGFNTTEESGGERPPKEGVNNEESKFTK

SEQ ID NO: 215083 - protein, 62 aa, Zea mays
  unsure (1)..(62): unsure at all Xaa locations
  Clone ID: MRT4577_127754C.1.pep
HPLAIVRMHSRSXGISCSALLLXRTPPSXLKISTQDVVDNICKLAKKGSTPSQIGVTLRDSH

SEQ ID NO: 215084 - protein, 95 aa, Zea mays
  Clone ID: MRT4577_127755C.1.pep
NLLSHSKLLLIKSYTIMQSFHLSRYAILITNPKPLCKLSYAPQNPSIPSPSNNLIIFNLFTLSHLLNCIHNLPPLCNPSINTLLIFLHPTNSSFP

SEQ ID NO: 215085 - protein, 150 aa, Zea mays
  unsure (1)..(150): unsure at all Xaa locations
  Clone ID: MRT4577_127756C.1.pep
RVWSPEDEVTILSALIEFRAKKGRLPASIQDTSKVHSQIIHQLTANASTAQLSDKVRRLKHKYKLLLTRSKNGRDPDLPTKHDRDVYQLSKKVWGLKSLLLVRGSRVSHEDTEDAEESNEEQEIEESDEXYRKWMGTPWSHRQETKGIDI

SEQ ID NO: 215086 - protein, 88 aa, Zea mays
  Clone ID: MRT4577_127757C.1.pep
VLHRRSCGGLPDIPRAIRGGTPTRHRAYRPVPTLQALGLHQHVKGRLLLHGKIWSGLVRGGEQPQFFFHGHKTTHVPVQRPGVHWHRA

SEQ ID NO: 215087 - protein, 70 aa, Zea mays
  unsure (1)..(70): unsure at all Xaa locations
  Clone ID: MRT4577_127758C.1.pep
KRAPPMMGSCYNSAXFGGGSXFNSINCYTSNRLPSLSSSYRYNCNNSYYVKNATRLTPASSLNDISYLLL

SEQ ID NO: 215088 - protein, 96 aa, Zea mays
  Clone ID: MRT4577_127759C.1.pep
PITFSQLLDRTLPTVCPSKLSYLAEHTLSEQIKELSAYISVPEYRYACGGGLQSLNAWFAPEGTVSPLHHDPDYNILAHGLGRKCIRLYPAFIAED

SEQ ID NO: 215089 - protein, 167 aa, Zea mays
  unsure (1)..(167): unsure at all Xaa locations
  Clone ID: MRT4577_12775C.1.pep
MVHSNALLWKKGPVHTVWKASFCKESELSRDKVAGTDIVASVGXLCWMSAAXGLHLAVLAKLLFGIVRIFSKKMEFLLHDFNELSRSFRLSQLAEPTLPSGRLTPGVLKQANKDVRVGRLVVGQQNTCKVQKTVHAVRTTEVSSAISSEGHSVRVETEVTLGISVVI

SEQ ID NO: 215090 - protein, 61 aa, Zea mays
  Clone ID: MRT4577_127760C.1.pep
AHASAQVSVFFFVTHSSNCTEVFWIYGPNLAQLESITFLLQCDDIPRNVFSPEAQDTLSIV

SEQ ID NO: 215091 - protein, 270 aa, Zea mays
  Clone ID: MRT4577_127761C.1.pep
MATAPAAPPPASADDEIIYESMPCIRVYKDRVERYFGTEFVAASTNDSTGVASRDVVISPNVSARLYLPRLDDGNAKLPIFVYYHGGGFCIGSAFNPIFHDYFNCLVALADILVVSVEYRLAPEHPVPAAYADSWEALAWVVSHLGPAGDGDGGRDPWIAGHADFSRLFLGGESAGSNIAHHMAMRAAAEGLAHGARIRGLVMIHPYFLGTDKVPSDDLSPEVRESLGSLWRFMCPTTTGEDDPLINPFVDGAPPLASLPWRRHRKIRTR

SEQ ID NO: 215092 - protein, 58 aa, Zea mays
  unsure (1)..(58): unsure at all Xaa locations
  Clone ID: MRT4577_127762C.1.pep
MSFLWKSGNDGTTEKTLTLEEQQEKINEVRKQLEEPSSXQLQGFLSYASILKFLQAKK

SEQ ID NO: 215093 - protein, 106 aa, Zea mays
  Clone ID: MRT4577_127763C.1.pep
MSFLWKSSNGGTTEKTLTLEEQQEKINEVRKQLEEPSSLAIQGFLSDASILRFLRARNWNVQKSSKMLKSAVKWRAAYKPEMISWEEIAHEAETGKIYRADYKDTL

SEQ ID NO: 215094 - protein, 86 aa, Zea mays
  Clone ID: MRT4577_127764C.1.pep
LNPRRGEPAPYKWGLAPGPKKIGIRETPWGFNKNPRGAQGEKNKYYRCFGGGKEWIPFIPIIRSPLFLWGGGVSRGGARQKKRRGG

SEQ ID NO: 215095 - protein, 88 aa, Zea mays
  unsure (1)..(88): unsure at all Xaa locations
  Clone ID: MRT4577_127765C.1.pep
TRGSGSNACIIPQGSIAYSSMIHQALPPITRMGFEHPAIQAYRLQQAIAGSVLQQPRAQLQQQXLRHVTTRTIGAQQHHQCLPALRHL

SEQ ID NO: 215096 - protein, 100 aa, Zea mays
  Clone ID: MRT4577_127766C.1.pep
LIPFNTLTKRKALFKARFEQALESQKLNIKKIETQLRRKGINPEDPVAMASIQRVASTFFRAIDEQQGTPYIFRGDTQPSAGTSEIKEPRDEPSEDSDQE

SEQ ID NO: 215097 - protein, 106 aa, Zea mays
  Clone ID: MRT4577_127767C.1.pep
NYRARAPHNFGFCGNTESKNSKLILGGGANFFLKSPAVIILPNNFQLLKIFRGGRVPEKTFPPLNIFFFLKKIFFLDSKREIKFLTLQKIKTPPFQKFVFFFGKKE

SEQ ID NO: 215098 - protein, 120 aa, Zea mays
  unsure (1)..(120): unsure at all Xaa locations
  Clone ID: MRT4577_127768C.1.pep
LFSLFFVCLFLPLRXLRLLXLSPCGGFSLLRSPRLFXVLLLSFLRPPGPPPRVGSPCSSVAPSSASGXSPGXAPPSSRGPAVAPWRWSSLFSFPGVFAPAVGARLVVAVCHKAXGAXLGR

SEQ ID NO: 215099 - protein, 88 aa, Zea mays
  Clone ID: MRT4577_127769C.1.pep
EKYKKRVRPFFKNPIAKNAFLLNVQAPFQKLLLPGVCEFSNVSSPPPTSVKKNGGPWKAPPLKKRQGPGVPFKIPLVTFFKIKKNGSQ

SEQ ID NO: 215100 - protein, 1455 aa, Zea mays
  Clone ID: MRT4577_12776C.1.pep
MKYDLPLLDLDTRFSLWQVKMRAILSQSDRDLDDALDGFGNKDARTWTDEERRKDRKALAHIHLHLSNNILQEVLAEKTAAALWLKLESICMSKDLTSKMHVKMKLFSHKLQEGGSVLTHISVFKEIVADLTSMEVKFDDEDLALLLLCSLPASFSNFRDTILYSRDTLTVAEVYEALTAKEKMRQMVNSEDATGSSGEALYVRGRTDQKKSNSGGKGKGKNQRGRSKSRGPSDELFCKYCKKTNHVIENCYKLQNKEKRNKEKGKTGGTVSVASENNSDNGDVLIAFAGCAADDAQWILDSACSYHVCTKKSLFSTYEAVQNGGTLRMGDNSPCTVVGMGTVQIKMFDGIVRTLTEVRHVPSMSRNLISLSTLDTKGYKYTAGDGVMKVTKGSLVVIKGDLKAENLYVLRGSSGSANAVVTSDSETTKIWHMRLGHMSAPGLAELSKRGLLDGCHADTLDFCEHCVFGKHKRVKFSSAIHNTENILDYVHADLWGPSRIPSHGGARYMLTIIDDNSRRVWPYFLKQKSDAFESFKVWKTMVEKQTERKLKVLRTDNGMEFCSGDFNSFCRKEGIVRHHTIPYTPQQNGVAERMNRTIISKARCMLSNSGLSRKFWAEAASTACHLINCSPSAAIDKKTPIEVWSGSPYDYSQLRVFGCTAYAHVDNGKLEPRAIKCVFLGYGSGVKAYKLWNPDTQKAFFSRNVVFNESAMFPSVVSTSATNQNSESISVQVEHEGDVDDHAPPSAEPAENSVSEISSPVVESHPQSLAEGRTRRQIVRPQRLIQECNVAFALAVAEEVDNVQEPLNYSEAILCTDSEKWMGAMHEEMESLDKNGTWELARLPSGKKAIKCKWIFKRKEGMTPKEPPRFKARLVAKGFSQIPGIDYSDVYSPVVKHSSIRTFLSLVAVHDYELEQLDVKTAFLHGDLEEDIYMDQPEGFIVPGKEDYVCRLKKSLYGLKQSPRQWYKRFDSFMLSKGFQRSQYDSCVYLKFVNGSPTYLLLYVDDMLIAAKSMKEITALKAQLSSEFDMKDLGAAKKILGIEIVRDRKSGLLYLSQKNYIEKVLRRFNMQNTKPVSTPLAPHFKLSAKQCAETDAELEYMSKVPYSSAVGSLMYAMVCSRPDLSHAMSVVARYMSNPGKEHWKAVQWIFRYLRGSSSACLCFGKSGDGLIGYVDSDYGGDLDRRRSLSGYVFTIGDCAVSWKARLQDTVALSTTEAEYMAIAEVTKEALWLKGIYSELCGIKSCITIYCDSQSAIHLTKDQMITEKSKHIDIRYHFIRDIIDKGLVKPLVAVGAGKMMMHLFKVEVAIMMLQGICLKVEFVEFVIQILKKAAKLASEAEHAVTSWADDGEWDVPSAAEDEAGGAAGTSGWEWDKDRAAAEVTIRIPRRQLQELMEKRAPAAGGLLRGLASRGAAAQAQLLLADVMNAGHVYLHRCRAAHWKPALQSIPEAAVES

SEQ ID NO: 215101 - protein, 99 aa, Zea mays
  Clone ID: MRT4577_127770C.1.pep
EEKDGGGGRPRPAFLGLGGGGASRRRGNKYFMAGAGAVALVGPAFPIIFSGKDTCPEWDGAGFIRKGGATLGANPARKDEAQIFCPKCNGLGKLGQIDK

SEQ ID NO: 215102 - protein, 110 aa, Zea mays
  Clone ID: MRT4577_127771C.1.pep
HPGQALVRLLVRTSFSCWAAALKHLIQLADRSYARPHGYCKGLRARRPSTASAMCNQGVITVRAMLRTHRGGRGLKVPLPSLDRPTSFTASDGLTRCMVDVGFDYSIMVP

SEQ ID NO: 215103 - protein, 69 aa, Zea mays
  Clone ID: MRT4577_127772C.1.pep
SHNLLLFFFATTVHSCHTKTTQPGLNTYYYTGPNICNTIQQCDNDRSRFSQCDLIHHTGHAWRADEATH

SEQ ID NO: 215104 - protein, 52 aa, Zea mays
  Clone ID: MRT4577_127773C.1.pep
RAAVYVFLCQQDIVIGLCSLVGESQTNWHCSAELPCLVFIVHLPVLQNYIML

SEQ ID NO: 215105 - protein, 84 aa, Zea mays
  unsure (1)..(84): unsure at all Xaa locations
  Clone ID: MRT4577_127774C.1.pep
GRDFPPKAWGPAPPLREGGXPPGGGCCCPPGSPGAGGSFTSACPPPVPPRFSPKGPPPPPPPAPPPPLSLSAPPPPPGWGRGAP

SEQ ID NO: 215106 - protein, 107 aa, Zea mays
  Clone ID: MRT4577_127775C.1.pep
MAMDMCAWLSECLGIFESTIDSRELRHHGQQFASSSSQQLAQKAVVSMPTYGMPPPHLVLPPPMLSPPPPPQFHVGFETPPASFAAPRDGTSQDDASTSWVNNLFNT

SEQ ID NO: 215107 - protein, 297 aa, Zea mays
  Clone ID: MRT4577_127776C.1.pep
RTYWLDPRVRPISTIPSDLAKNVKILNLDLGNNFIERSSDLKVLSELRYLRNLNLQGNPVSKKDSLVKKVKKSVPTLRILNAKPLEATSKSDTRSTKENPPSKDEDPIGIDAKKDKRKGSKQEVKGLEELEVQSVSTGITTSNPGKLEVPDGKEKKKVKEAKTKKSEEPYHANNSSLKNKEVQSFVYDTSTKDKKEAKRKKFVDEEDVDAEGIDNTEISFADLMFSNVGNPETKLKNISTLEAAPDGKSVGGLVIDHTKKRKKPKGVVTITDSSALKMFSSMPEVGAGGLGLSGWDE

SEQ ID NO: 215108 - protein, 34 aa, Zea mays
  Clone ID: MRT4577_127777C.1.pep
IKLASPGFVQRNINFHAGAFWPVLSQLAKKNFEF

SEQ ID NO: 215109 - protein, 82 aa, Zea mays
  Clone ID: MRT4577_127778C.1.pep
GGKPNTALLILGRSLPQLQLKALLAIFTYPDSRIFGNKICNFTLKASMGLGFLALVSRRRQGLIQTTFWGISKKVRNNRSPG

SEQ ID NO: 215110 - protein, 212 aa, Zea mays
  unsure (1)..(212): unsure at all Xaa locations
  Clone ID: MRT4577_127779C.1.pep
RPGNEHPIEEVRNTVPTTDDPSEPCLTFRTWVLGMSSCVLLSFVNEFFNYRSSQLSIGTVLVQIASLPIGRLMASTLPGRPVRVPLIAWSFSLNPGPFSLKEHCLITIFAGAGCSGVYALNIVAIVKVFYRRQINPYAAMLLAQTTQLLXYGWAGLFRKFLVDSAYMWWXINLVQVTLLRDSVTAQQIGSGPAGPRHRLLRPGLEHGGPASS

SEQ ID NO: 215111 - protein, 90 aa, Zea mays
  Clone ID: MRT4577_12777C.1.pep
HVQFHLPCLLNSCRRRLATVMVKLKFAEHLKEAVTYIEQGHVRVGPDAVTDPAFLVTRNMEDFITWVDSSKIKRKVMEYNDALDDYDAMF

SEQ ID NO: 215112 - protein, 130 aa, Zea mays
  unsure (1)..(130): unsure at all Xaa locations
  Clone ID: MRT4577_127780C.1.pep
ITPWIREAPRHWILRGXCGSLADCXLRLAAGVGFSXLVIYLELRAYKWAFYLHDVQMGSIELSDTGIYLELQETIASRNDNDGVGEYYKTLDAVATXPDQAPTAPLSMAVIYQAHKDVXQWTPVMSGDAV

SEQ ID NO: 215113 - protein, 63 aa, Zea mays
  Clone ID: MRT4577_127781C.1.pep
VSSEFGSSNQIGMFAYTGLKPEQMEALAKEHSVYATKDGRISVAGITTGNVKRLAESIFKVTG

SEQ ID NO: 215114 - protein, 66 aa, Zea mays
  Clone ID: MRT4577_127782C.1.pep
PCLMALSILEHLRNYICEEHPKSSQSYFSAMKKHMSPMGILRRSVISEGLLFIHKGLIGSKGNGED

SEQ ID NO: 215115 - protein, 99 aa, Zea mays
  Clone ID: MRT4577_127783C.1.pep
RLNINRAPAEIWGGGGGGLPYRQANHKFWGPTTYDIRKLALPLDTNESARQPTYHSLLAPLTSSLVTGRWGFAQQGFSVNECLVPVICPNSPTTVLTYE

SEQ ID NO: 215116 - protein, 38 aa, Zea mays
  Clone ID: MRT4577_127784C.1.pep
SNFSNYNKQTNINIIPVYSYKYHNFTLYKLDSIITKKL

SEQ ID NO: 215117 - protein, 126 aa, Zea mays
  Clone ID: MRT4577_127785C.1.pep
MEAQDDCKWRQVPAFGDWNLWDDMPVTQYFQAGTFFFAAPTAEKDDDDDEDLFKVPQFPATPYSYKKCVVRVKGEKGTAVPPAARKGGRRRRVNEQQKWKPKGAVDEDLYKISPQLLCKVKKARIL

SEQ ID NO: 215118 - protein, 37 aa, Zea mays
  Clone ID: MRT4577_127786C.1.pep
QLFMMPKPFPVGVIYTATGDTHYIMASDFKLFGYDPH

SEQ ID NO: 215119 - protein, 138 aa, Zea mays
  Clone ID: MRT4577_127787C.1.pep
MEAQDDCKWRQIPAFGDWNVWDGDMPVTQYFQAGAFFFAAPAEKGDDADLFKVPQFPATPYSYKKCVVRVKGEKGAAVPPAARKGGRRRRVNEQQKWKPKGAVDEDLYKISPQLLCKVKKKKLLRNLLGGCLGLSCIA

SEQ ID NO: 215120 - protein, 138 aa, Zea mays
  Clone ID: MRT4577_127788C.1.pep
MEAQDDCKWRQVPAFGDWNLWDDMPVTQYFQAGTFFFAAPTAEKDDDEDLFKVPQFPATPYSYKKCVVRVKGEKGTAVPPAARKGGRRRRVNEQQKWKPKGAVDEDLYKISPQLLCKVKKKKLLRNLLGGCLGLGCIA

SEQ ID NO: 215121 - protein, 90 aa, Zea mays
  Clone ID: MRT4577_127789C.1.pep
QAQDDCKWRQVPAFGDWNLWDDMPVTQYFQAGTFFFAAPTTEKDDDEDLFKVPQFPATPYSYKKVKQNTTLHLISFTNHPRKKVFFFHQL

SEQ ID NO: 215122 - protein, 55 aa, Zea mays
  Clone ID: MRT4577_12778C.1.pep
SVKRVHRLGRKPSGASGSPAATHRAASLGPMTVVETCNHTLSPLDAMVLLAAASI

SEQ ID NO: 215123 - protein, 99 aa, Zea mays
  Clone ID: MRT4577_127790C.1.pep
MSDSMRKGLGEQASEKLQPDSTKSNTEKASETLSGAGDRIAGAVQPEGQKSAGQKLGDATRSGHDDASNKSEGVMKQAQDSLSNAGQAISDTLSGGQKK

SEQ ID NO: 215124 - protein, 43 aa, Zea mays
  Clone ID: MRT4577_127791C.1.pep
SCFDIGIYYHVTRGIWLSPNPNRIGAIERLSNGCNEISRSRSF

SEQ ID NO: 215125 - protein, 84 aa, Zea mays
  unsure (1)..(84): unsure at all Xaa locations
  Clone ID: MRT4577_127792C.1.pep
SRFVILDYGYLKHFFLILFIVFCFIFFFIFIIVLLXINFFFLFYFIFFFFFFFFFFFFFFFFFFFFFSFFFFFFFDYRSAQFAI

SEQ ID NO: 215126 - protein, 70 aa, Zea mays
  unsure (1)..(70): unsure at all Xaa locations
  Clone ID: MRT4577_127793C.1.pep
XXSVGFXPIWGLAAGWGTCPRTRIPKVLLPLAYDSATARIDKPSRPGLPTPSFVDIFSGEQRPPDPAPAM

SEQ ID NO: 215127 - protein, 38 aa, Zea mays
  Clone ID: MRT4577_127794C.1.pep
SLAAADSLLNASACHATCQFSRRLYATLLRASLLDVAG

SEQ ID NO: 215128 - protein, 89 aa, Zea mays
  Clone ID: MRT4577_127795C.1.pep
FWKVYPFVNQNITNASVSFFADKTIMNCLHPLTNPPKWGKGRYKHSYQSRFWKKSLNTCSFSRESVPWIQKMKCIFHGVRGENRPKLSS

SEQ ID NO: 215129 - protein, 98 aa, Zea mays
  Clone ID: MRT4577_127796C.1.pep
AGLVTLPTAAADGDGGAGAGAPWRAGTCHARGRARASAGAGAGRHRPWRQERLRRSLDTTHSCRGGHDGPSWTVTAPMASLRLPSTRGGRHRTNCRGL

SEQ ID NO: 215130 - protein, 107 aa, Zea mays
  unsure (1)..(107): unsure at all Xaa locations
  Clone ID: MRT4577_127797C.1.pep
TPYTHFXTLLNSIDQLNSLSRSSSPRLSLSLTTGLATESISSCRTACAGSVTNADGRKAASFVELIRSTYADNVSQTPTKPISNRTASIADNVAQQPFRPNRRDSRA

SEQ ID NO: 215131 - protein, 223 aa, Zea mays
  Clone ID: MRT4577_127798C.1.pep
MNKTVIVLFAILALAASEGILSGITDVANKISSLGPTLQMFKRDSTSKMGEIKSQTGFNSLESYTDYATGSVKQIKLPDLFKIWVNTFPIKGPAKSKLLKFMGEAEFQKFIEPNQKTVQDFKFTDAKGKLYYLKVVLQQHPTMADVIQWEKVMWTANFQVAAPFMVVSKSKCNFFGCKNKDEVQYLQATLLPETLTLLRVSPFPSAPSPTLLDKLFTKPSKHK

SEQ ID NO: 215132 - protein, 251 aa, Zea mays
  unsure (1)..(251): unsure at all Xaa locations
  Clone ID: MRT4577_127799C.1.pep
MFVDVLAQLWSDWGLRFSVISSLVTIVVLSLLSWTRRRSTSGRWRSILLWFVTRVVWLAYQGAEIAATGALGSLSLSGSDGSAEEQQVIAFWAPFLLLHLGGPDTMAAYALEDSALSVRKFLEMVFQVGGAFYAQYKYIYRARTWTPLATASAIMLPIGIVRYVEKWYALWKSKSXDGGGGGGGGRXRRRRSRARDRDDXSATSSNDALCLAQDLFHVCRRALSDSSVLPGTEKQRASEEIFLLGWERMCK

SEQ ID NO: 215133 - protein, 182 aa, Zea mays; identical to SEQ ID NO: 215056
  Clone ID: MRT4577_12779C.1.pep

SEQ ID NO: 215134 - protein, 88 aa, Zea mays
  Clone ID: MRT4577_1277C.1.pep
ELTSLRPPFVFFFFLPEHWLYCLIVGTAFKLDISGVLIIRLCAQGETHTAYTTVLHCMPSDASVLTQSTTHKRLARGIVATETLHGRT

SEQ ID NO: 215135 - protein, 69 aa, Zea mays
  Clone ID: MRT4577_127800C.1.pep
MGMCDTALPTGHNLLPKVSLPLLSSHMRAGALLLLARRRLPLALARIRSSDAAEDKSIDDEEDNVVQPD

SEQ ID NO: 215136 - protein, 60 aa, Zea mays
  unsure (1)..(60): unsure at all Xaa locations
  Clone ID: MRT4577_127801C.1.pep
LKYTTDASFVKHIEQSGEIVDSMVMXDMHTFHPLGFGFITYSDPAIVDKVIYDNHXVING

SEQ ID NO: 215137 - protein, 80 aa, Zea mays
  Clone ID: MRT4577_127802C.1.pep
AKFHYHVVCVCMCVAPPPPPPPPTPPTLIINYYTLTSYPHPLCHRVSHVTPQSSTSQVVFTRAIIPWAGGILLTPDLPRT

SEQ ID NO: 215138 - protein, 79 aa, Zea mays
  Clone ID: MRT4577_127803C.1.pep
KQPPKESDTPSPGSRAPALEIEPVPWRISPEFVYSANAACTVGSNIDAIISGKPGPGHHRIVQVPPPPSRFVKVRSSYV

SEQ ID NO: 215139 - protein, 74 aa, Zea mays
  Clone ID: MRT4577_127804C.1.pep
QAKEEAEREIAEYRAQMEAEFQRKVAESSGDSGANVKRLEEETAAKIEQLSQQAASISPDVIQMLLRHVTTVKN

SEQ ID NO: 215140 - protein, 64 aa, Zea mays
  Clone ID: MRT4577_127805C.1.pep
CGALRSRPTDRDRGCPTLNLGWIHLLSSQGRGQALPATLPHVLPTPLGSLLSQACQQPVGPWFT

SEQ ID NO: 215141 - protein, 69 aa, Zea mays
  unsure (1)..(69): unsure at all Xaa locations
  Clone ID: MRT4577_127806C.1.pep
KNNAGSHTPKXKXGPSEGGAAGRKRPXNGQPARXAQXPQPDKQTASXGGRERAREDGPATRAEKANTHR

SEQ ID NO: 215142 - protein, 109 aa, Zea mays
  Clone ID: MRT4577_127807C.1.pep
PIAWILTRNKTFFYKKKKKKFIFFFLFFFFFFYYLIKFFFFAAPPPRAIWGGGPPPGGGLGPLLGGPIGPLGGRFTIHWPCFYTPLACKNPGVPHLTLFVSHPLFAVGG

SEQ ID NO: 215143 - protein, 74 aa, Zea mays
  Clone ID: MRT4577_127808C.1.pep
HGYYHEATHCEHGLITHVTKNLYIIYTKGIKARLNTLTSACTKNIVIDTEHKRKALTLKMNVNSSHITKQFKPL

SEQ ID NO: 215144 - protein, 44 aa, Zea mays
  Clone ID: MRT4577_127809C.1.pep
YGVNKIKYHGNICFIHRRNIFKVFISAKLRFAGSANRIKGPVFV

SEQ ID NO: 215145 - protein, 91 aa, Zea mays
  unsure (1)..(91): unsure at all Xaa locations
  Clone ID: MRT4577_12780C.1.pep
RSKRLVADMLPLLSYSAPFAIYHQHLEPLAKXXXXXXXXXXXXGLQLSXPWLRXYQVLPSRTHPHMQMNAFGGYILNGIRIHNPDRVVANK

SEQ ID NO: 215146 - protein, 118 aa, Zea mays
  Clone ID: MRT4577_127810C.1.pep
KAATGVGTGRPGEGRCICMGNQRCGKGAIFVKSDIRWEKGRVFTGIKVGKRRAVKGKTGAKKGDSGPPKGKLEGAPGPGNAQKIAPSKGTDRVKNKPLFFVLFFLGLSFFFFFFFFFF

SEQ ID NO: 215147 - protein, 59 aa, Zea mays
  Clone ID: MRT4577_127811C.1.pep
LVLRIPADTQRPHEVMKDLVPESSFTRSSGTRLELSSRTPARDQRHRPAPRITDRKHTS

SEQ ID NO: 215148 - protein, 100 aa, Zea mays
  unsure (1)..(100): unsure at all Xaa locations
  Clone ID: MRT4577_127812C.1.pep
MEQIQYSEKYFDDTYEYRHVVLPPEVAKLLPRNILLSEKQWRLVGVQQSRGWVHYAIHRPEPHIMLFRRPINYQQQQEEAAAAXAAQVKPLLATRNVKNP

SEQ ID NO: 215149 - protein, 95 aa, Zea mays
  unsure (1)..(95): unsure at all Xaa locations
  Clone ID: MRT4577_127813C.1.pep
MGISRXNWHKRRKTGGKSKPXTSKRKYXLGRPAANTKIXGPRRIHTVRVRGGNKKYRALRLDVGNFSWGSECCTRKTRIIDVXYNASNNELXRTK

SEQ ID NO: 215150 - protein, 127 aa, Zea mays
  unsure (1)..(127): unsure at all Xaa locations
  Clone ID: MRT4577_127814C.1.pep
NRAQSLRMVPPAGRMETVRXSLXLNXKQFLRWWQFLIFVSGASQDCXRKSNFGACIYXLMNGKILDSASGPNRECLVHIPPSFNKEPSVSVYWTPGTVDADERAVXQQRQEAATQEQQPNERKEILF

SEQ ID NO: 215151 - protein, 119 aa, Zea mays
  unsure (1)..(119): unsure at all Xaa locations
  Clone ID: MRT4577_127815C.1.pep
MNTGRCETLAFTIFTLPHLFRHRWLAKPYRDPLYPRRHVVLPPEVAKLLPRNILLSEKQWRLVGVQQSRGWVHYAIHRPEPHIMLFRRPINYQQQEEEAAAAXAAQVKPLLATRNVKNP

SEQ ID NO: 215152 - protein, 105 aa, Zea mays
  unsure (1)..(105): unsure at all Xaa locations
  Clone ID: MRT4577_127816C.1.pep
MATKILPLLMLLALSTCVANATIFPQCSQAPIASLLSAYLPSIIASVCENPAVQPYRLXQAIVARYIPLSPLLSQQSPALSLVQSLLLTIMAQQLQDLELPVINQ

SEQ ID NO: 215153 - protein, 93 aa, Zea mays
  unsure (1)..(93): unsure at all Xaa locations
  Clone ID: MRT4577_127817C.1.pep
QINRHVTFDKLRNRLLNKAYELSQLXEHEFTLIIFFNRARLYXLCNCQSITKTLARSEXNQYGXPDAAAQNMEHDVVQRRLNEYLKLEVRVDA

SEQ ID NO: 215154 - protein, 73 aa, Zea mays
  unsure (1)..(73): unsure at all Xaa locations
  Clone ID: MRT4577_127818C.1.pep
KQKKKKXKQXTTNLIFTXKTNPSTLFIIXIPPLTQLITYKNHSQNHKTHLNLQQYYSKTFHFPQLNKNPIHPH

SEQ ID NO: 215155 - protein, 30 aa, Zea mays
  Clone ID: MRT4577_127819C.1.pep
QLNHTCSEQGDMTGRKHNRGASTYMPCEHH

SEQ ID NO: 215156 - protein, 44 aa, Zea mays
  Clone ID: MRT4577_12781C.1.pep
HTYLHTAPNVGTLLQLQQLLPFDQLALTNPAVFYQQPIIGGALF

SEQ ID NO: 215157 - protein, 71 aa, Zea mays
  Clone ID: MRT4577_127820C.1.pep
NRCAPAFVPVDVIGSAWSPEKYWIPHPKTGVFGPAAVDPKLAAGGAPDAGSDAARGTVLDLKVWLRPFEDV

SEQ ID NO: 215158 - protein, 156 aa, Zea mays
  unsure (1)..(156): unsure at all Xaa locations
  Clone ID: MRT4577_127821C.1.pep
KKKPPPRPALPFTARPWRPGGRHQKSAFNAPXWTTNSGAHGGNNDSSLTGGARGPILLEDYHLGEKLPNWERDRIPYRVVHPRGPSAKGFFQGTHDITHLTCADFLRAPGVQTPVIVRFWRGIHERRIPQTLRDPRGFTTKFYTRHGNCDLTTNNF

SEQ ID NO: 215159 - protein, 78 aa, Zea mays
  unsure (1)..(78): unsure at all Xaa locations
  Clone ID: MRT4577_127822C.1.pep
MEHMGSDSGHPHDQCAHRHPSGDLPGLWIDQEASLRTGAXPMNCISCPPTSIPRPAPGAEPCISPLSSHAPLQWHSIQ

SEQ ID NO: 215160 - protein, 69 aa, Zea mays
  unsure (1)..(69): unsure at all Xaa locations
  Clone ID: MRT4577_127823C.1.pep
MAASALHQTTSFLGQALVARAAGVDAGVRITMRRTVKSVPQMIXYXPDRPKYLGPFSQYTPSYLSGRVP

SEQ ID NO: 215161 - protein, 144 aa, Zea mays
  unsure (1)..(144): unsure at all Xaa locations
  Clone ID: MRT4577_127824C.1.pep
MGRSALAVRLASLLAFGLVLVSVEASLGDVDPRYRTCVRECQATGIIGENVISHCQFKENYTSVGVSWYNQEQIYIQWKELNCRTDCRYFCMMQREGERQSLGLSPVXYHGXWPFLRGSVFQEPLSTALSAVNLLMHFTGWLSF

SEQ ID NO: 215162 - protein, 346 aa, Zea mays
  unsure (1)..(346): unsure at all Xaa locations
  Clone ID: MRT4577_127825C.1.pep
MGRSVWAVPLASLLAFGLVLGSVEASLGDVDPRYRTCVRECQTTGIIGENVISHCQFKEDNTSVGGSWYNQEQIYIQWKELNCMTDCRYFCMTRREGERQALGLSPVKYHGKWPFPRVSVFQEPLSAALSAVNLLMHFTGWLSFFLLVNYQLPLRXRAKRTYYEYTSLWHIYAILSMNAWFWSSIFHTRDIDLTEKLDYSSAVALLGYSLILSLLRAFNVKDEASRVMFAAPILAFVTTHILYLNFYELDYGWNMKVCVVMAAVQLLTWAVWAGVSRHPSRLKVWTVVFGGALAMLLELYDFPPYMGYADAHSLWHASTIPLTCLLWSFIKDDAKFRTATLVKKAK

SEQ ID NO: 215163 - protein, 289 aa, Zea mays
  Clone ID: MRT4577_127826C.1.pep
MARAEKIRAGSTASETASTETPGRSTDHRRALYFAAFLVLADAALVALIVAFVPYTKSDWDAYMSQVDAFLEGERDYTKIEGDTGPLVYPAGFLYVYSAVKFLTGGRVFPAQILFGVLYIVNLSLTLLLYVKTEVLPWWALGLLCLSKRVHSIFVLRLFNDCFAMTLLHAAMVLIIYRKWYLGLVVFSGAVSIKMNVLLFAPSLLLLMVKAMSIKGVFFALLGAAVVQVLLGMPFLLSHPVEYISRAFNLGRVFIHFWSVNFKFVPEKVIVSKELAIALMILPLNTIMI

SEQ ID NO: 215164 - protein, 346 aa, Zea mays
  Clone ID: MRT4577_127827C.1.pep
MGRSALAVRLASLLAFGLVLVSVEASLGDVDPRYRTCVRECQATGIVGENVISHCQSKENYTSVGVSWYNQEQIYIQWKELNCRTDCRYFCMMQREGERQSLGLSPVKYHGKWPFLRVSVFQEPLSTALSAVNLLMHFTGWLSFFLLVNYKLPLRPQTKRTYYEYTSLWHIYAILSMNAWFWSSIFHTRDIELTEKLDYSSAVALLGYSLILSLLRAFNVKDEASRVMFAAPILAFVTTHILYLNFYELDYGWNMKVCVVMAAVQLLTWAVWAGVSRHPSRLKLWTVVFGGALVMLLELYDFPPYMGFADAHSLWHASTIPLTYLWWSFIKDDAKFRTSTLSKKAK

SEQ ID NO: 215165 - protein, 97 aa, Zea mays
  unsure (1)..(97): unsure at all Xaa locations
  Clone ID: MRT4577_127828C.1.pep
WARLCRRSCPVPPWIWGLCFLGAPPDSGGXXLNAGRGGALLVPSFFVGXWXXXXLNTSVCPAPPLAGALGXAFCLAFXCSXSPVCXSPLLAFXGLGA

SEQ ID NO: 215166 - protein, 102 aa, Zea mays
  unsure (1)..(102): unsure at all Xaa locations
  Clone ID: MRT4577_127829C.1.pep
VSASYAPIIPHXDLLLAPLLSQLLLPHTLMGYYHTAVQAYWLQLALSTIALLHPIAHLHLHCLLHLTLQTIASLHLPHQPLSSLIHISMVNHVYYLKQLAAC

SEQ ID NO: 215167 - protein, 1193 aa, Zea mays
  unsure (1)..(1193): unsure at all Xaa locations
  Clone ID: MRT4577_12782C.1.pep
SCRTYWCIVANLRSIEVKFGDEDPALVPLCCLPASFSSFRDTILYRVHTLTVAEVYEALTDKEKMRQMVNSEDAAGSSGEALYVRGRTDQKKSNSGGKGKGKNQRGRSKSRGPSDELFCKYCKKTNHVIENCYKLQNKEKRNKEKGKTGGTVSVASENNSDNGDVLIAFAGCAADDAQWILDSACSYHVCTKKSLFSTYEAVQNGGTLRMGDNSPCTVVGMGTVQIKMFDGIVRTLTEVRHVPSMSRNLISLSTLDTKGYKYTAGDGVMKVTKGSLVVIKGDLKAENLYVLRGSSGSANAVVASDSETTKIWHMRLGHMSAPGLAELSKRGLLDGCHADTLDFCEHCVFGKHKRVKFSSAVHNTENILDYVHADLWGPSRIPSHGGARYMLTIIDDNSRRVWPYFLKKKSDAFESFKVWKTMVEKQTERKLKVLRTDNGMEFCSGDFNSFCRKEGIVRHHTIPYTPQQNGVAERMNRTIISKARCMLSNSGLSRKFWAEAASTACHLINCSPSTAIDKKTPIEVWSGSPYDYSQLRVFGCTAYAHVDNGKLEPRAIKCVFLGYGSGVKAYKLWNPDTQKAFFSRNVVFNESAMFPSVVSTSATNQNSESISVQVEHGGDVDDHAPPSAEPAENSVSEISSPVVESHPQSLAEGRTRRQIVRPQRLIQECNAAFALAVAEEVDNVQEPLNYSEAILCTDSEKWMGAMHEEMESLDKNGTWELARLPSGKKAIKCKWIFKRKEGMTQKRPXRFKARLVAKGFSQIPXIDYSDVYSPVVKHSSIRTFLSLVAVHDYELEQLDVKTAFLHGDLEEDIYMDQPEGFIVPGKEDYVCRLKKSLYGLKQSLRQWYKRFDSFXMLSKGFQRSQYDSCVYLKFVNGSPTYLLLYVDDMLIAAKSMKEITALKAQLSSEFDMKDLGAAKKILGIEIVRDRKSGLLYLSQKNYIEKVLRRFNMQNTKPVSTPLAPHFKLSAKQCAETDAELEYMSKVPYSSAVGSLMYAMVCSRPDLSHAMSVVARYMSNPGKEHWKAVQWIFRYLRGSSSACLCFGKSGDGLIGYVDSDYGGDLDRRRSLSGYVFTIGDCAVSWKARLQDTVALSTTEAEYMAIAEVTKEALWLKGIYSELCGIKSCITIYCDSQSAIHLTKDQMITEKSKHIDIRYHFIRDIIEKGLVKSLLADMMTMHVFKVELALRWSIL

SEQ ID NO: 215168 - protein, 114 aa, Zea mays
  Clone ID: MRT4577_127830C.1.pep
GVHLHLYKVNISGVKPRCAGQRTTRTHTLFFSSQQENTERDATGITPTGRARDAYTTLAHTKPKNTYRRDYSMGCAVRPGVMHVEGPLTGAPLGGTGAFSCAGPTREECSTSGP

SEQ ID NO: 215169 - protein, 58 aa, Zea mays
  Clone ID: MRT4577_127831C.1.pep
RALEGMMHHSWLVAGASYPLMDRGLVAYTHPNLMGTQYAFHQKVAKLQRLEAEAFPRL

SEQ ID NO: 215170 - protein, 64 aa, Zea mays
  Clone ID: MRT4577_127832C.1.pep
QERELGFRLTIPSSGQGTSEAVVMSADYLTPVDGELLSANDVCVHSARHRHMFIDWSCNLWNFN

SEQ ID NO: 215171 - protein, 89 aa, Zea mays
  Clone ID: MRT4577_127833C.1.pep
IYSASRAPVYGLTFYNVMSSKYTFRLDLDNGGLTHAWNAVVIYSRLSHIDSMLDYILLCCPSTLVSFHSLSNQSSTTQLNHSSSRCCVH

SEQ ID NO: 215172 - protein, 144 aa, Zea mays
  unsure (1)..(144): unsure at all Xaa locations
  Clone ID: MRT4577_127834C.1.pep
LSSDHQPXXXXXXXXPHLIGAEVHGTVDGAFDSGYLVTAVVNGQLFRGVLFAPGPGVTAPRPAVHHQILTSSAVPPQQRPLLAHAIPVHARPVPLPQATGFVLPDCAHHARQGFPAKAVKSEPERGSSDLHDVVLTLGGPGGGK

SEQ ID NO: 215173 - protein, 72 aa, Zea mays
  Clone ID: MRT4577_127835C.1.pep
SCTDLGFPMGTPYCHSVLTLKCCQWANRPAQTERFENIDSSNQTYFYMERAKTYGFYFTELCQYKRPNCQEN

SEQ ID NO: 215174 - protein, 109 aa, Zea mays
  Clone ID: MRT4577_127836C.1.pep
MPATTKPILLPRAWAAAPLLLLLLLVLHGRGGHCVGMEAAELEMDSEAHRRLLWEATTGRRYISYDALRGDVVPCSRTGVPYYNCRISTTANPYTRGCESITRCRDADP

SEQ ID NO: 215175 - protein, 62 aa, Zea mays
  Clone ID: MRT4577_127837C.1.pep
HQLNCTRYSSLHFSSSCRLHALLPLCTLIEEKGTMSQKTMEPGLREELLRLGLASLGESSRG

SEQ ID NO: 215176 - protein, 151 aa, Zea mays
  Clone ID: MRT4577_127838C.1.pep
ILVQCFPVPSIKKQQRSSAERQKRHGTLNKKRKERARERSHSASLSQHNTGNHQADLAPKGVGSSATPAAAARPARERRPRRRDGGGGAGDGLGGAPTAAVGGDHGAEVHQLRRPAGRRGAVLQDRVVAMQRRRSRAHGPLRQTSRRAAAT

SEQ ID NO: 215177 - protein, 109 aa, Zea mays
  Clone ID: MRT4577_127839C.1.pep
MPATTKPILLPRAWAAAPLLLLLLLVLHGRGGHCVGMEAAELEMDSEAHRRLLWEASTGRRYISYDALRGDVVPCSRTGVPYYNCRISTTANPYTRGCESITRCRDADP

SEQ ID NO: 215178 - protein, 499 aa, Zea mays
  unsure (1)..(499): unsure at all Xaa locations
  Clone ID: MRT4577_12783C.1.pep
LGTSRPAGSQLHSRFTPTPIVDPQPPPICREAWEGCSVLLDINDGDRLAFFRLTPGATVKIGNKTCSLKPLVGRPFGSLFRLGAGGLVPCAAADATSRDHNTPDDANGQTQDETRDNRSLVDNNTAQNLSSDDIEAMKRDGATGDEIVEALIANSSTFGNKTVFSQEKYKLKKQKKYAPKVLLRRPSARSICETYFKKTPARIGFMRVDTLSLLLSMANIGAYSDVLVVDMVGXGLVXVGAVAERLGGTGYVCSTYLGSAPSSIDIIRMYNLSSDMVSRIVQAPISALCSMQSSGNTPSVVNSSAEGEMIEPAVDEDAQSSLAQQVDTAVPDEKAQLSTDQPSDMEVSEPSLDEHLVQDENSSLGGKDSDGTLNASKPPKPGKAPSPEKMKYWKEHGFSSLIIAAPGHEVERLVADMLPLLSYSAPFAIYHQHLEPLAKCMHSLQLSKMAIGLQLSEPWLREYQVLPSRTHPHMQMNAFGGYILNGIRIHNPDRVVANK

SEQ ID NO: 215179 - protein, 74 aa, Zea mays
  Clone ID: MRT4577_127840C.1.pep
IYIKLVYSRITLGLIQSTRFRFLGHHTESQRLSLGFCLPWPVWVSVSPKVRYTRNLVLCIKLSVIREFTLNWYI

SEQ ID NO: 215180 - protein, 88 aa, Zea mays
  unsure (1)..(88): unsure at all Xaa locations
  Clone ID: MRT4577_127841C.1.pep
SSYIVTHRFTLKEHFTMLLLXXLLLSVSEDLARFSLNNLPFDHNSRVSAHLSTKDRHLLLLLCSNALSSSSDYYSYVISLNNYMNTQY

SEQ ID NO: 215181 - protein, 557 aa, Zea mays
  Clone ID: MRT4577_127842C.1.pep
MGCVFGRAAASSSAAPKKKWGKGRSSPQPEAGSPSAVAATDGDGRPRRRLGGRRASGPRQGCVPAAAAAEQLAAGWPPWLVAVAGEALRGWAPRRADTFEKLNKIGSGTYSNVYRARDTVSGRIVALKKVRFDNLEPESVKFMAREILILRRLDHPNIIKLEGLVTSRMSCSLYLVFEYMEHDLAGLAASCDVKFTLPQIKCYIQQLLSGLEHCHDNNVLHRDIKGSNLLLDNNGILKIADFGLATFFDPRHKRPMTSRVVTLWYRPPELLLGATEYSVGVDLWSAGCILAELLYGKPIMPGRTEVEQLHKIFKLCGSPSEEYWKKSKLPHATIFKPQQPYKRCIRETFKDFPTSALPLVETLLAIDPAERQTASAALHSDFFSTEPYACNPSSLPTYPPSKEMDAKLRDEEARRLRAAAKAKGEQKRTRPRDRSRRAGPAPEANAEIQANLDQRRRMITHANAKSKSEKFPPPHQDGGTGNPLGSYHHMEPMFEHQDASFSTVVPIEKGTSQTWSGPLFDPAALGQSRRKKQTTLDAKAAAYSKQLQKEKGGIRAR

SEQ ID NO: 215182 - protein, 52 aa, Zea mays
  Clone ID: MRT4577_127843C.1.pep
RHAGSGLTSGTRRSARASGSAPSTRRPYLGPLLQREHSDRAPAYHQDQLSRA

SEQ ID NO: 215183 - protein, 58 aa, Zea mays
  Clone ID: MRT4577_127844C.1.pep
GYSDMACSSWSNDKRPRAVSRREQPLVTLELFRRRQATTDDVRTRTCMRLLPAVVAPC

SEQ ID NO: 215184 - protein, 130 aa, Zea mays
  Clone ID: MRT4577_127845C.1.pep
MLVYQDLISNDELLSDSFPYTEIENGMLWEVEGKWVVQGALNVDIGANPSAEGGEDDEGVDDQAVKVVDIVDTFRLQEQPAFDKKQFMAYMKRYVKHLTPKLDAEQQVLFKKHIEGAIKFLLSKLSDLQF

SEQ ID NO: 215185 - protein, 60 aa, Zea mays
  Clone ID: MRT4577_127846C.1.pep
GWGLFRTEQRLVSHPPLKQRLSFLRQISKSWFVHQPFVSPIPTVRPILPKGPRFQAPFIL

SEQ ID NO: 215186 - protein, 36 aa, Zea mays
  Clone ID: MRT4577_127847C.1.pep
AVILLWDRLFSDGVVIRLGYRLALGERANHLHGRYE

SEQ ID NO: 215187 - protein, 99 aa, Zea mays
  Clone ID: MRT4577_127848C.1.pep
GAGPQKVPRPRRLPPQELNGATTGEGPDQTSSSPFINGSQFIRARPWFGGGRGPPGSLICWQASKDPGSVSLFWANVCGPGPWGTRQGVVALRPGPPSQ

SEQ ID NO: 215188 - protein, 233 aa, Zea mays
  Clone ID: MRT4577_127849C.1.pep
MAAAAAAAATALLLLLCAASFASAAPAEGWWAFTNNHSHPDPPLHISISPARPRASTTPSIAMAAAAALLLLLCAASLASAAADDGLTTFKVYFHDVVAGTNPTAVRIAQAASSNTSSTNFGAVVAIDDPLTTGPTRAAGTEVGRAQGTYTFADQQTFGLLMVMNFVFTAGEHNGSTLSILGRNEVLSDVREMSIVGGSGKFRMARGYVQAHTIDSGATSGTTVVQYTVNVKA

SEQ ID NO: 215189 - protein, 1466 aa, Zea mays
  Clone ID: MRT4577_12784C.1.pep
MSTTMKYDLPLLDLDTRFSLWQVKMRAILSQSDRDLDDALDGFGNKDARTWTDEERRKDRKALAHIHLHLSNNILQEVLAEKTAAALWLKLESICMSKDLTSKMHVKMKLFSHKLQEGGSVLTHISVFKEIVADLTSMEVKFDDEDLALLLLCSLPASFSNFRDTILYSRDTLTVAEVYEALTAKEKMRQMVNSEDAAGSSGEALYVRGRTDQKKSNSGGKGKGKNQRGHSKSRGPSDELFCKYCKKTNHVIENCYKLQNKEKRNKEKGKTGGTVSVASENNSDNGDVLIAFAGCAADDAQWILDSACSYHVCTKKSLFSTYEAVQNGGTLRMGDNSPCTVVGMGTVQIKMFDGIVRTLTEVRHVPSMSRNLISLSTLDTKGYKYTAGDGVMKVTKGSLVVIKGDLKAENLYVLRGSSGSANAVVASDSETTKIWHMRLGHMSAPGLAELSKRGLLDGCHADTLDFCEHCVFGKHKRVKFSSAVHNTENILDYVHADLWGPSHIPSHGGARYMLTIIDDNSRRVWPYFLKQKSDAFESFKVWKTMVEKQTERKLKVLRTDNGMEFCSGDFNSFCRKEGIVRHHTIPYTPQQNGVAERMNRTIISKARCMLSNSGLSRKFWAEAASTACHLINCSPSTAIDKKTPIEVWSGSPYDYSQLRVFGCTAYAHVDNGKLEPRAIKCVFLGYGSGVKAYKLWNPDTQKAFFSRNVVFNESAMFPSVVSTSATNQNSESISVQVEHGGDVDDHAPPSAEPAENSVSEISSPVVESHPQSLAEGRTRRQIVRPQRLIQECNVAFALAVAEEVDNVQEPLNYSEAILCTDSEKWMGAMHEEMESLDKNGTWELARLPSGKKAIKCKWIFKRKEGMTPNEPPRFKARLVAKGFSQIPGIDYSDVYSPVVKHSSIRTFLSLVAVHDYELEQLDVKTAFLHGDLEEDIYMDQPEGFIVPGKEDYVCRLKKSLYGLKQSPRQWYKRFDSFMLSKGFQRSQYDSCVYLKFVNGSPTYLLLYVDDMLIAAKSMKEITALKAHLSSEFDMKDLGAAKKILGIEIVRDRKSGLLYLSQKNYIEKVLRRFNMQNTKPVSTPLAPHFKLSAKQCAETDAELEYMSKVPYSSAVGSLMYAMVCSRPDLSHAMSVVARYMSNPGKEHWKAVQWIFIYLRGSSSACLCFGKSGDGLIGYVDSDYGGDLDRRRSLSGYVFTIGDCAVSWKARLQDTVALSTTEAEYMAIAEVTKEALWLKGIYSELCGIKSCITIYCDSQSAIHLTKDQMITEKSKHIDIRYHFIRDIIEKGLVKVCKISTDNNPADMMTKHVSVAKFELCSNLVEINDGNWIRSLRGKITSTVQIEEFVSLWFRLHDFHLQPQVPDSITWKWNPDGVFTILVWEGLSLLAQADPTHFSSIKDWWEATSSPLPKNQKRDFNGLMIYTLWNIWKERNRRIFENSALTPIQLALKIKEDVCTFKRAMFLQY

SEQ ID NO: 215190 - protein, 40 aa, Zea mays
  Clone ID: MRT4577_127850C.1.pep
TPIFSHKTLHSSHRTLQFNSSVFKLIPHLALASGICVHTA

SEQ ID NO: 215191 - protein, 50 aa, Zea mays
  Clone ID: MRT4577_127851C.1.pep
QLLIAPYAPDVNRSYSILLSQGLSVTSACPASSLLFRIPQVPTRKCSPSP

SEQ ID NO: 215192 - protein, 176 aa, Zea mays
  Clone ID: MRT4577_127852C.1.pep
MAAAAAAAATALLLLLCAASFASAAADDGLTTFKVYFHDVVAGTNPTAVRIAQAASSNTSSTNFGAVVAIDDPLTTGPTRAAGTEVGRAQGTYTFADQQTFGLLMVMNFVFTAGEHNGSTLSILGRNEVLSDVREMSIVGGSGKFRMARGYVQAHTIDSGATSGTTVVQYTVNVKA

SEQ ID NO: 215193 - protein, 174 aa, Zea mays
  unsure (1)..(174): unsure at all Xaa locations
  Clone ID: MRT4577_127853C.1.pep
MAAAAAATALLLLLCAASLASAAADDGLTTFKVYFHDVVAGTNPTAVRIAQAASSNTSSTSFGAVVAIDDPLTTGPTRAXAREVGRAQGTYTFADQQTFGLLMVMNFVFTAGEHNGSTLSILGRNEVLSDVREMSIVGGSGKFRMARGYVQAHTIDSGATSGTTVVQYTVNVKA

SEQ ID NO: 215194 - protein, 115 aa, Zea mays
  Clone ID: MRT4577_127854C.1.pep
KKKSLHHAIDDPLTTGPTRAAGTEVGRAQGTYTFADQQTFGLLMVMNFVFTAGEHNGSTLSILGRNEVLSDVREMSIVGGSGKFRMARGYVQAHTIDSGATSGTTVVQYTVNAKA

SEQ ID NO: 215195 - protein, 63 aa, Zea mays
  Clone ID: MRT4577_127855C.1.pep
MGIQKAKKTFPKSGPHDSYPPLSASWGPLFGKVYFAFWVIFHLYPFLKGLIGRHGRTPTIVIL

SEQ ID NO: 215196 - protein, 79 aa, Zea mays
  Clone ID: MRT4577_127856C.1.pep
RTEARNSARGPNQLPFFGPRPWPITVCGMYNRWASLPRRKPNQGLQQAILRVVTSHTVSNGAGRSGCFCSVAAQTLKDA

SEQ ID NO: 215197 - protein, 51 aa, Zea mays
  Clone ID: MRT4577_127857C.1.pep
GKVAFLVSFSLLLFSALKHLVSFDGLYKPSFVCAGARVEPCTQRHPTVAGC

SEQ ID NO: 215198 - protein, 90 aa, Zea mays
  Clone ID: MRT4577_127858C.1.pep
WAAPRSSAVSCYFPSQQVSYSRLHYLTDQYGISVYVTLIDFVGPSAGSDSHRVSLARDFATISTCLRASCDRATQLAYQKNLSFVLPRAE

SEQ ID NO: 215199 - protein, 124 aa, Zea mays
  unsure (1)..(124): unsure at all Xaa locations
  Clone ID: MRT4577_127859C.1.pep
KMVGYPSQPADILPKEGLSPEVLNLRSISPLDRAPINASVRKPHRLVPVEEGSPPHGIGAEIRMSVVEHTFEYLDAPLDRIPGADVPTPYAPPLERMGVPQVDDIVPGTQXACHRAAAPMAAPP

SEQ ID NO: 215200 - protein, 149 aa, Zea mays
  Clone ID: MRT4577_12785C.1.pep
MADQLTDDQIAEFKEAFSLFDKDGDGCITTKELGTVMRSLGQNPTEAELQDMINEVDADGNGTIDFPEFLNLMARKMKDTDSEEELKEAFRVFDKDQNGFISAAELRHVMTNLGEKLTDEEVDEMIREADVDGDGQINYEEFVKVMMAK

SEQ ID NO: 215201 - protein, 91 aa, Zea mays
  Clone ID: MRT4577_127860C.1.pep
HSLPSLSECRSEKRGSQSSVQAAGRPDQHHPDSPFPRLTGPTSNSALPTVPRTFTSLVVAAMESVGDGDYQLHRLKFGKMIYFEDSGGSSS

SEQ ID NO: 215202 - protein, 45 aa, Zea mays
  Clone ID: MRT4577_127861C.1.pep
ELSFFCRFMHPLSQVGFSFSLSLSTLLNRLGYHSFTPFIFAFMLR

SEQ ID NO: 215203 - protein, 91 aa, Zea mays
  Clone ID: MRT4577_127862C.1.pep
MSSSSSSSSAATVFPPSPQLPPPLLVENLPPLHQLTPPVAAAAAPASEQLCYVHCHFCDTVLVVSVPTSSLFKTVTGRCGHCSSLLTVNMR

SEQ ID NO: 215204 - protein, 85 aa, Zea mays
  Clone ID: MRT4577_127863C.1.pep
KKKKKKKKKKKKKKKKKKKKKKKKKKKKKKKKKKKKKSFFLCRGGPLKRAIFCKISIKLRGRLNFLLKGQIPLIGSFFKINWPGF

SEQ ID NO: 215205 - protein, 70 aa, Zea mays
  Clone ID: MRT4577_127864C.1.pep
HPGWAFHPQSTEGGKNPFVFSPSYINPCREPGGGTRNHPKWGQETKKNSWVGKTRVGGHPHFVTHPPPMS

SEQ ID NO: 215206 - protein, 465 aa, Zea mays
  Clone ID: MRT4577_127865C.1.pep
IGRDALVPVLGYLYTGRLKPPAQDATVCMDDACGHGTCRPAIDFVVESMYAASGFQISELASLFQRRLSDFVCEALDEDVVPIIHVASTCDLQDLLNLCIQRVAVSALDSRYLDKELPADIYNKIKEIRRQPENAIILDPEHDKRVRNILKALDSDDVDLVGLLLKESTVTLDDAFAIHYAAAYCEPKVFAELLKLDSANVNLKNSGGYTPLHIACMRREPDIILSLVERGACVLERTLDGRDALTICKRLTREKDCNRKLDKYEEKSKAYLCIDILEQELKRKSFVLDPISISIEESIATPLLVDNFHMRLINLENRVAFARIFFPSEAKLVMRIAQADSTQEFAGITNFSRLKEVDLNETPTMQNRRLRERLDALTKTVELGRRYFPHCSDVLDKFLNEESTDPIFLETGTPEDQQVKRMRFSELREDVRKAFTKDKAAVAAIASSASSSSSPRCRRPNRKSR

SEQ ID NO: 215207 - protein, 58 aa, Zea mays
  Clone ID: MRT4577_127866C.1.pep
ACASLTNLTPLGSGQQIVHIIMQNTVYAIYIMKFKIESWIGGYIKKKGCYRLAYKWKG

SEQ ID NO: 215208 - protein, 65 aa, Zea mays
  Clone ID: MRT4577_127867C.1.pep
ERWSNQAYTLKKKRIRIEHDCFSRSTSDSLLICPKTPVRTRHYIQVLNYAALKLNQISRKQLDPF

SEQ ID NO: 215209 - protein, 43 aa, Zea mays
  unsure (1)..(43): unsure at all Xaa locations
  Clone ID: MRT4577_127868C.1.pep
PFVRKVMQDLKPGFXHXKAXXXWGGEFKFNFAHKTLFPTECCH

SEQ ID NO: 215210 - protein, 85 aa, Zea mays
  unsure (1)..(85): unsure at all Xaa locations
  Clone ID: MRT4577_127869C.1.pep
KLKGVWGGGAMIKWPPFSKKFFKKRVVVDGLKNGGGGGVKRGAQWGDEQKEVSVSKDYLEAPVFRFMDXRXASKEIRIKAKKFGV

SEQ ID NO: 215211 - protein, 39 aa, Zea mays
  Clone ID: MRT4577_12786C.1.pep
HFKNQPNHIVPSIWSSLNNLNVCYFFMIIIVKASSVLYA

SEQ ID NO: 215212 - protein, 672 aa, Zea mays
  Clone ID: MRT4577_127870C.1.pep
TSLAEVTIASIVRPCGFCLAGTVMDPEKQNEMSLIDKRELVYEVARWPQGAMEILRCWTRRELLELICVELGKERKYTNVPKAKMIAYLLKLVSRNSGKNGQLKNDNPNVMLLGQDNKDEIQMKESDEQSRPLKTANSDSSISREACAGSSVVCSNVACQATPNAGDKYCKRCSCCICNKYDDNKDPSLWLVCSSDNPYSGCSCGVSCHLNCALKNKRAGIVKNGCNKLDCSFYCVSCGKINWLMRCLQKQLAIAREARRVDVLCERLSLSHKIIQGSERYKEIASIISSAVKTLEIEVGSALDQVSVITGRGIVNRLTCGAEVQKLCSSTLEIVDSKVDNILEFESNNSPKLLGPQPQILFHEITPFSVVIVLNYQHDIGKEQIDGSKIWHRSARVCNYSSEPTCHILRPNTRSLVSGLSPSTEYFFKVLPFSSTHGFTEWETKCSTRSLDHGSSQCSTQNSESMCLKDDSMQHHKKDLNVQNHQRTIQYDSPKGSTNSSENNLSCDRYSKRAKVARLDGASDNDESQLPPTSEVLPFASSNSSPSEAPSKPDLLIGTPDSASKNYVEQQYEYCVRVVRWLEHEGHMDNDFRVKFLTWFSLKATTQDRRIVGAFVDVLIGDPASLVGQLVDAFKDAICIKEKPSQAQQKDACCKVASELCRDRHWALEINF

SEQ ID NO: 215213 - protein, 119 aa, Zea mays
  Clone ID: MRT4577_127871C.1.pep
GGKCPLPFHCLSLNIFLPREDLHFYYFHNRNTLLFNKGYQPSNQKTSNKILQLKARSLPQGESIPRFRREPTHGAKGPQVQRAKPTTRTTYQSNYPKAHAGIKGKQSLREQTWAGDNSQ

SEQ ID NO: 215214 - protein, 124 aa, Zea mays
  Clone ID: MRT4577_127872C.1.pep
RTTTGHGNTASSPNSRGGTITAAEHARRLPFLLPPVPQLSIPARLIATWSGRGINVARRKSGKLRPDFQLSPPSSSIGVEKLNQTPHTHPPKKVALPRTRSPQSVLIVADRLIASLAFRSLLGC

SEQ ID NO: 215215 - protein, 72 aa, Zea mays
  unsure (1)..(72): unsure at all Xaa locations
  Clone ID: MRT4577_127873C.1.pep
HMDNDFRVKFLTWFSXKATTQDRRIVGAFVDVLIGDPASLVGQLVDAFKDAICIKEKPSQAQQKDACCKVWH

SEQ ID NO: 215216 - protein, 63 aa, Zea mays
  Clone ID: MRT4577_127874C.1.pep
EHIGAFWKTDRRTRGACDLRAPLAPLILAYLDLKRTLLTSFASYMIESCPRLMLAKALSIENR

SEQ ID NO: 215217 - protein, 204 aa, Zea mays
  Clone ID: MRT4577_127875C.1.pep
MENDRRQLGQIDPRRARFPCCIVWTPIPFITWLVPFIGHIGICREDGVILDFSGPHFVSVDNFAFGAVARYIQVNCDECYKLIEPEGDATWDGALKKGTQEFQNRNYNLFTCNCHSFVANNLNRLFYSGHDEWNVVSLAAVMFLRGRWVSTASVVKTLLPFAVVLSIGTFLGGTTFLTGLLAFAAAMTVWFLVGTYCIKGLIEL

SEQ ID NO: 215218 - protein, 732 aa, Zea mays
  unsure (1)..(732): unsure at all Xaa locations
  Clone ID: MRT4577_127876C.1.pep
PCPRPLVPVSVSKASHTSAPPPRATAPSPDSRGDHHRRLPFLLPPAPPPPIPARPTAIVRPRNGVTRRRSGKPTLAEVTSGSIVQPCGFCLAGIVMDPEKQNEMSLMDKRQLVYEVARWPQGAVEILKCWTRRELLELICVELGKERKYTNVPKAKMIAYLLKLVSRKSGKNGQLKDDNANVMLLEQDNKDETQMKESEEQEQSRPLKTANSDSSIRREAHACCSVVCSNVACQATRNAGDNYCKRCSCCICNKYDDNKDPSLWLVCSSDNPYSGCSCGVSCHLNCALKNKKAGIVNNGCNKLDCSFYCVSCGKINWLMRSLQKQLAIAREARRVDVLCERLSLSHKMVKGSERYKEITSIISSAAKTLEKEVGGALDQVSAITGRGIVNRLTCGAEVQKLCSSALEIVDSTVDSILEFESNNSPKLLGPQPQILFDEITPFSVVIVLNYQDSIGKEQVDGSKVWHRSAKVCNYSSEPTCHILRPNTRSLVSGLSPSTEYFFKVLPFSSVQGFTEWEAKCSTRSLDHGSSQCSTQNSESMXPQSGSNAASEKGFECAESSENYSIXSPKGSTNSSENNLLCDRYSKRAKVARLDGASDNDESQLPPTSEVLPFASSNYSPSEAPSKPDLLIGTPDSASKNYVEQQYEYCVKVVRWLEHEGHMDNDFRVKFLTWFSLKATAQDRRIVGALVDVLIGDPASLVAQLVDAFKDIIYTKEKPFQTQQKDARCKIWH

SEQ ID NO: 215219 - protein, 101 aa, Zea mays
  unsure (1)..(101): unsure at all Xaa locations
  Clone ID: MRT4577_127877C.1.pep
LPFSQRAKANTQQQQLLPKNQLAAINPAADXQQQKXRPFSKQAAARRASFLTQQQMMPFXKQFAANPATLLQPQQMLPFGQPALTNPAASNPPHPNGGALF

SEQ ID NO: 215220 - protein, 87 aa, Zea mays
  unsure (1)..(87): unsure at all Xaa locations
  Clone ID: MRT4577_127878C.1.pep
KASRFSFPRKKKFPXNEILARRNWFFKNPCQCLPRKKNGDPDLHLVEAVALKPPEVSSKVGIQKMHEDXLVERPAQPIPDENDVVCE

SEQ ID NO: 215221 - protein, 81 aa, Zea mays
  unsure (1)..(81): unsure at all Xaa locations
  Clone ID: MRT4577_127879C.1.pep
KDFXLRQAVEVTTADAHRPKFNEGLVEFTSHGDLKNAIEKLSGKEINGRKMKLIEGSXRHSRSRCRSRSRTRRSSRSHSRS

SEQ ID NO: 215222 - protein, 61 aa, Zea mays
  Clone ID: MRT4577_12787C.1.pep
ATDNTIDSLYLCPVYCNTPLIFDHERNECYADLCTHSVTSCLEWLKEERAAAFLTMRTPQA

SEQ ID NO: 215223 - protein, 85 aa, Zea mays
  Clone ID: MRT4577_127880C.1.pep
IQFITSTILQLYYMGPPLLITQLNSPFPLLLLIPFFPTPKIILLPCPFPPSSPLKTLIFPTFIPFHNIPFFPFLLTPKTLYFIPF

SEQ ID NO: 215224 - protein, 55 aa, Zea mays
  Clone ID: MRT4577_127881C.1.pep
SSRSRAGALVYVILKVSLKGPVRHPVGLDWGLITRGKGVTCEPIAEDFQDLLILL

SEQ ID NO: 215225 - protein, 100 aa, Zea mays
  Clone ID: MRT4577_127882C.1.pep
NGIRGFKGRYPAAATAGGCFHDRNREKMCGPVWRDGVRQELGWGPHQQPQWKAGENQEQYQLQDRHGAHHRFRLLRRCRRPFRPHRHPCRVPSLGRVGGP

SEQ ID NO: 215226 - protein, 331 aa, Zea mays
  Clone ID: MRT4577_127883C.1.pep
ADAAAEQPFASPAADAAAEQPWRLRRSTCPSSSPFCSSPPPPPTPSISTSSLPLLQPQAEVVGSSESEPAAPPSVVDEQYRDEASPSPPPPAVYEPYRDAASAPPSVVDEPYSDAASPPPPPSVVYEPYRDTPSPTPPVVYEPYLDAASPPPPPPVVYELYRGVASPPPPSPVVYEPYRAASPQSPVHDYAAGVVYSGSGDDLGLQQIAKVLASLGYNEMASSATLLAGSASVATWPGPVTVFAAPDVFLQADSCPECSRRHLLLDHMALGYFPYAELAAAPTTKLPSASVGFCLDVAAQPQRGPFSVHHASLYVDGVMVSEPELYDDYVH

SEQ ID NO: 215227 - protein, 145 aa, Zea mays
  Clone ID: MRT4577_127884C.1.pep
GGSDNDKIWKNDVTCVNMIRLSRASFFRFCKLIRDRGLLQDTTHMCVEQQVAMFLHTIGHNVRNRVVATNFGRSGETVSRYFNKVLHAIGELRTDFIKPPSSTTPSKIQGNPRWDPYFKVVFGLFAQIILIIGRLLRPYILSSWF

SEQ ID NO: 215228 - protein, 91 aa, Zea mays
  unsure (1)..(91): unsure at all Xaa locations
  Clone ID: MRT4577_127885C.1.pep
CRPPSRCCSHKLRWWSFESEPAAPPSVVDEQYRDEASPSPPPPAVYEPYRDAASAPPSVXDEPYSDAASPPXPPFVVYEPYRDTXSPTPPV

SEQ ID NO: 215229 - protein, 153 aa, Zea mays
  Clone ID: MRT4577_127886C.1.pep
LGPRAGQDQPDSRRCFFIFLAAPALLLPLPLRFALGTQATAAALVLGLSATAGSPRLGVGVSGPPSACHQSPRALASGPPHTDRRPACTPPAPLLPPVDRRRRSDPEAALRAACDRRAAGASSRAALAVTHWYLKTIAGCNTLLYLKTSGGLT

SEQ ID NO: 215230 - protein, 259 aa, Zea mays
  Clone ID: MRT4577_127887C.1.pep
MGFQTIPVVPDLVVDKSEVETSQVAGSDSIVIERVETNLSKEPFLLVPLENKEEKESLGIICYLENNKVDVPEAFSPRRDILELSISSKSTDDSLSLGCETPRESIFDPFAPGPEEAACAPKKKVTRGAQVPPRRKLNFDSGDYPVKRLSFDCSDSEEEDQYIEVIHKMILDLLILDVPLGGQKETGKNATDLGLHGSCKTPDSKPLLTGIASTCPDAPLRPSLKALKLSPGICRKIDFDFDAVSGSGSLSSSMDKESN

SEQ ID NO: 215231 - protein, 217 aa, Zea mays
  unsure (1)..(217): unsure at all Xaa locations
  Clone ID: MRT4577_127888C.1.pep
SARPSLDKNPNPAMVLISCAQMPARSALLSIFQPCLRALSLSPAHLPPSAHGALLLLGHLCPALLSFPWRLSPSSPSSTRPFLLLGPSVLGQRTLFFQHTQMNFPRRELPCARHGGFHCRQLTSLVPRPLLLPALALCCAPAPTPSAEQRILLPMRSSSSELSLVAPGISLLGFSSVRESPACSSASSAESLCHVRWPCSTXRIAALQLQPSRLARL

SEQ ID NO: 215232 - protein, 70 aa, Zea mays
  Clone ID: MRT4577_127889C.1.pep
YFMIFCYASPLVKIFPYLVFWAYKVVSSSVRSGFGCISKVLVLWLFKDFIFYDFGVKYPPRNLGINLRIL

SEQ ID NO: 215233 - protein, 142 aa, Zea mays
  unsure (1)..(142): unsure at all Xaa locations
  Clone ID: MRT4577_12788C.1.pep
RLQQLSVRSNPSLAGELPPQLGGIRSLRVLTVSQNALVRGXFPEGIDDLAGLVHLDLSYNSLTGPIPARLGGLRGLVGLDLSCNSFSGPIPGRLGDLAQLQKLDLSSNNLTDGVPAAITRLRALKFPALGIXGLGGQLLVSK

SEQ ID NO: 215234 - protein, 109 aa, Zea mays
  Clone ID: MRT4577_127890C.1.pep
RPFWRVARGNGFPLALPQFILVLPPEGHFWQALPVFVEKKLVFSFQKERETRGFFIGPELGFPPLANPPGKGLRPQTRGVFFPAGPPPGPGRVFLFSPFLVFPRRVCVF

SEQ ID NO: 215235 - protein, 75 aa, Zea mays
  unsure (1)..(75): unsure at all Xaa locations
  Clone ID: MRT4577_127891C.1.pep
GKRINRGRIGRYXXRNLSKKKKKKKGRVLIKKSGRKQKQGAAAKKEPSQRPPATKDRTLQEGHQXKNHGPTXDNT

SEQ ID NO: 215236 - protein, 46 aa, Zea mays
  Clone ID: MRT4577_127892C.1.pep
LSSSSCVTLGEFLNVSEPQFLHLCSQYNHSSCFTLLELKMTMNVKC

SEQ ID NO: 215237 - protein, 157 aa, Zea mays
  Clone ID: MRT4577_127893C.1.pep
DVSKDHAPVGKLVVESPRHRRRYSYGMVLHICQRRLAKVHLGHASVDESVKRPHGIIRDSRLHDNTAVVQALWALSKAVLRSVRAPATLERRARAAMESAIAKYSASNQIEWPQSECWDLNLPRTTPAKARAKGAWLLVPASSVWVGFPTRPLPARR

SEQ ID NO: 215238 - protein, 86 aa, Zea mays
  Clone ID: MRT4577_127894C.1.pep
SDALVKHVCQNVTVKCTQSFVVFPTVTASLLCHLVARPFLHVGPSDLHSVQPRYECPFPVISGATFAFCSEGGSSSLQRCYRGGQC

SEQ ID NO: 215239 - protein, 70 aa, Zea mays
  Clone ID: MRT4577_127895C.1.pep
GALPPKKPLNKGVGVPLLFPSATWERVWIWGQTGLVGKGKKFVPGGVGYFPNHGEGHFRPPCSGGRFCSG

SEQ ID NO: 215240 - protein, 141 aa, Zea mays
  Clone ID: MRT4577_127896C.1.pep
PTRTERLFTFKPTPAAKPQGGTKLQRTRHEHQAGGPVTGPNKNQASHRRTTTWSPPLTPDRTQKRAGKRPRHRSCPPKQKPNPNSPRNWLSQPPPQKKTTTNPQTIQPPTKNRTPTPRTESDRTGHPKNEKRGAKPGLQPT

SEQ ID NO: 215241 - protein, 114 aa, Zea mays
  unsure (1)..(114): unsure at all Xaa locations
  Clone ID: MRT4577_127897C.1.pep
SLVAKMLRCFLXWPSGTLTFRLEXXIPGLGVARYSHEKIISFPEGPSPGRLSGLFLXXSPSWPATVPAXXEILXXRFPFRVNXXVIALSCRVFPRSLRESALPMLQVAVHMGTF

SEQ ID NO: 215242 - protein, 466 aa, Zea mays
  Clone ID: MRT4577_127898C.1.pep
MASAAAGAPKRCYYEVLGLSRDCSPTDIKLAFRRLALSLHPDKQPPGSDLALATAAFQELQHAHSVLSDPQERAYYDSHRSQIIFSHPASAGAKSASTVPDLFAFFSSSAFSGFSDTGRGFYKVYGDVFDRVFAQELAYARRMGVPEPAAPPVIGNLDSPYAQVTAFYSYWLGFGSGMDFGWAAAWDAARGESRRVRRLMEEDNKKAMRKARREYNDAVRGLAAFCKKRDKRVVDMVLKKKLEEEKRKAEEKERRKEEDKRKKERAMAYQEHEWARAEEGLYDEDEEEEMRAKKELLYCVACNKKFKSDKQWKNHEQSKKHRDKVSELRMTFREEESLKEAEEGEGDWNEVDVGFDFKPTQESDDESAFSDAAEELAEEFESNYAGNGHHGKCEVQPEGSVHVNDVDDIMEGPSSSNVNNGAVIMVLQLPSPLPVLCCSRRNKLFSHLEETGHAMLKSLVGSAWFS

SEQ ID NO: 215243 - protein, 382 aa, Zea mays
  Clone ID: MRT4577_127899C.1.pep
FRRTSNPSGDGVRGGGHTEALLLRGPGPISRLLPDGHQACFPPPRALAPPRQAAPRLRPRRRHRRLPEEEMRAKKEELYCVACNKKFKSDKQWKNHEQSKKHRDKVSELRMAFREEESLKEAEEGEGDWNEVDVGFDFKPTQESDDESAFSDAAEELAEEFEEGLEVHDKENGDKDFDSAEQEVGSYDEASVLEAMLSSCKNRKGGYVAPPEEALSGTAEDDDHHRSSEVNNAKRKGRRRRAAKKEQDESNYAGNEHHGKCEVQPEGSVHGNDVDDIMEGPSSSNVNNGSVSKGDKQNGENTNPKKNKKGTKKKPTVSTDQKSMSKADQKSTSKGKKQKEVSKAPSNDCDTCGGTFESRNKLFSHLEETGHAMLKTRQKNRR

SEQ ID NO: 215244 - protein, 62 aa, Zea mays
  Clone ID: MRT4577_12789C.1.pep
SSWGSGSRCMSAMNSSVLAETRTVERATVALGVCPVQKAGPDSIKDVAESGEVTHARPCGRT

SEQ ID NO: 215245 - protein, 256 aa, Zea mays
  unsure (1)..(256): unsure at all Xaa locations
  Clone ID: MRT4577_1278C.1.pep
MAAAAGATSPKRLRVYSSAAGDADSSNGAGNGRRVGTHNGSFHCDEALGCFLIRLTSQFAGADVVRTRDSQILDSLEAVLDVGGVYDPSRHRYDHHQKGFNEVXGHGFNTKLSSAGLVYKHFGKEIIAKELQLNEEHEDVHRVYLAIYKSFVEALDAIDNGINQYDTEQTPKYVNNTHLSSRVGRLNPDWTDPDQSPEKENAAFQQAMALAGSEFMESVRFHVKSWLPARSIXVWECLLSRGNVDPSGEIMVLDRS

SEQ ID NO: 215246 - protein, 126 aa, Zea mays
  Clone ID: MRT4577_127900C.1.pep
MASAAAGTPKRCYYEVLGLSRDCSPTDIKLAFRRLALSLHPDKQPPGSDLAAATAAFQELYCVACNKKFKSDKQWKNHEQSKKHRDKVSELRMAFREEESLKEAEEGEGDWNEVDVGFDKPTQESD

SEQ ID NO: 215247 - protein, 127 aa, Zea mays
  Clone ID: MRT4577_127901C.1.pep
LTRRGTTFRFGERTIRRATFPSFVRPKNETMTRLPIGTNKEDMAELIHQSPSTTMCFNRTRKALPEPAPSTQTERVCPACSLHLDMVRRPCPLQQVPMGNYLPPHNRGAPCSLQCPATRGYHVSCQL

SEQ ID NO: 215248 - protein, 51 aa, Zea mays
  Clone ID: MRT4577_127902C.1.pep
EIHSDCYVITVTNYVQHLIFGSIHSFSLSKDLLLFTRSTLPPINYSDLGSL

SEQ ID NO: 215249 - protein, 179 aa, Zea mays
  Clone ID: MRT4577_127903C.1.pep
TNFHSLVSRTSSSPIPTHLSLSRSPGTSSVVRETASSPARVLLRRYGGLLLHRRGGLLLPGPQGLQRTRRGGLPSGRIRGLADLRLLEDLRTRRGALPSGWIRRRTDLRRGALLLHQRHDLILRWDGGLPIFSRCAHAEACRSSPGWWMFTAHRVQEEKRADFLRRIFRDVKCGTGSTL

SEQ ID NO: 215250 - protein, 170 aa, Zea mays
  unsure (1)..(170): unsure at all Xaa locations
  Clone ID: MRT4577_127904C.1.pep
VGLSRLLWASCSRAFVGWFFACCLSWVGGGVCASPAFPPCWLLRAVAGRGVPWSPLXLLSPGLSWVLGLALAMLAHPLLHLVRRVVNXVALVAPLLPAVLRQHLLLLSXLCALNPAGYLPRLLXPFSQLAAAYFLQQQLLACNQLVALNLAAYLLQGFLLPFSLLAATSR

SEQ ID NO: 215251 - protein, 85 aa, Zea mays
  Clone ID: MRT4577_127905C.1.pep
CSKHSFLYILIICRWIGRLLANRERDNTEMPEDQARLGDDRGAEDVREAVYYQPPTAYSALPTGARRPLSSEYDISCLIYLAARS

SEQ ID NO: 215252 - protein, 81 aa, Zea mays
  Clone ID: MRT4577_127906C.1.pep
QSPRATSRNQGCVRKMNGSGDLAEPGIEKSDPVKHVDGWLGKENRRRLPWAHHRPGGRRHGLEPLLTPPANSYRSTNNLGS

SEQ ID NO: 215253 - protein, 64 aa, Zea mays
  Clone ID: MRT4577_127907C.1.pep
KTCFLCGVMVIFIYVCELDSSAVKYRVSWSCRWRIVRSSLLFVLLNYAVILADVSAETLLYAGV

SEQ ID NO: 215254 - protein, 75 aa, Zea mays
  Clone ID: MRT4577_127908C.1.pep
SWGKKIIIIFAWDKGNPFKTKVLGKFPPPRGLEFRAPPPFFNLWPFWGFNPPVWGFQKKVSLFGGPKIFQKNRVV

SEQ ID NO: 215255 - protein, 232 aa, Zea mays
  Clone ID: MRT4577_127909C.1.pep
MSSLRNAIPRRAHKERAQPEARKKFGLLEKHKDYVVRARAYHIKEATIAKLKEKAAFRNPDEFYFKMINSRTVGGIHRPKPEDNKYTEEELLLLKNKDMGYILQSVQSEKKKIEKLSSTLHELDNKPQNKHVYFAEDREEAKEIQSRIGQSSNMPDLDNIPSRIKKKIASSYRELEERKQRLQKLEKLYADMALQKELKKPGRKRKLKLHEDEETDNQTSRPVYKWRAQRKR

SEQ ID NO: 215256 - protein, 69 aa, Zea mays
  unsure (1)..(69): unsure at all Xaa locations
  Clone ID: MRT4577_12790C.1.pep
XFLARVPPVLSSPPSVFPGNVMSNLAQSPLKNAATVVVARRRGSSGGREAREDETSVAGAGAAVTXXVY

SEQ ID NO: 215257 - protein, 481 aa, Zea mays
  unsure (1)..(481): unsure at all Xaa locations
  Clone ID: MRT4577_127910C.1.pep
MAAAEGQVRRDMWGQEYRTSSADCAAALDAYYAAFMSFGRGRVAAVLRAAAADPTCALAAAHAAQSVAPRDPAGAAAFLNAAADNLGKATEYERAVFGTLSVLVGEKRDEEVAIERHFELLEQFPRDLLSLKRAQLICFYMGKPDLSLKFVQQVLPKNQDQNFIYGMLAFPLLELGRMDEAERAARRGLAINKNDFWSQHNLCHVFQQECRFREATEFMESCSPSWEACTSFLLTHNWWHVAVCYLEAESPLCKVLEIYDHNIMKELEKSDCETAEVYLNGLGLLLRLFIRGHIDSAKERLTTLLDALKNEVLTPRNIXSTWHVEWLLDLLILWALSSMGELKSAHNMLESLKSRVRLMDRNRQQAMQKAIKLAEAAYEYGKGDHMKVYDTLGSXFDALGYKMIGASDEQVDVFNEVWYTVLINAGETSKAIEILGKQIRKREGAPFLWRLLEKSYSLAGRSADASVASKKANALQSSYFH

SEQ ID NO: 215258 - protein, 137 aa, Zea mays
  unsure (1)..(137): unsure at all Xaa locations
  Clone ID: MRT4577_127911C.1.pep
MSSLRNAIPRRAHKERAQPEARKKFGLLEKHKDYVVRARAYHIKEATIAKLKEKAAFRNPDEFYFKMINSRTVGGIHRPKYVQCSPSAPINSSIVRFGLPCVLVLTVSCIXPEDNKYTEEELLLLKNKDMGYILQSV

SEQ ID NO: 215259 - protein, 172 aa, Zea mays
  Clone ID: MRT4577_127912C.1.pep
NNSVNDDKLKAADLVFLGKKLTAIKSRPKVVKLDAEDFLSSMMPSANVPKEDPLSGVLRDVLFGSDAKALSSQRTSDINLEGMLNKTSSNESSSQQIENLGSHPASCSRTSKEQNNDKVKGTNPPESDGKEPRKHRSSGRSGHRQGKHKHREKSSTQPDAIPQAPVIQDFLL

SEQ ID NO: 215260 - protein, 88 aa, Zea mays
  Clone ID: MRT4577_127913C.1.pep
DGHLEESVVGHHSHQALQLIRRQVSALFVEVYGALLSTHVSGPWDLTPSERRLCAIGFYPPHTLCGKTQACYIMRVFSAAHHHIPHEG

SEQ ID NO: 215261 - protein, 47 aa, Zea mays
  Clone ID: MRT4577_127914C.1.pep
PRFLGVLSRKSWRLLLKTTGKSGSPPHMPSNGILLVNNSHKTKPQAR

SEQ ID NO: 215262 - protein, 190 aa, Zea mays
  unsure (1)..(190): unsure at all Xaa locations
  Clone ID: MRT4577_127915C.1.pep
MQHRSPEAASASASPTAAAVEAMAPGVGGVEPAVTLDQVPRWSDPDQRISLLSPTAAGSETPASSFLSFSDPLTGDDAAAGAGGRGASRFPVDYEINSKIYLWRGHPWNLEVDAVVNSTNENLDEAHSSPGLHAAAGSGLAEECATLGDCRTGMAKXTNAYDLPARKVIHTVGPKYAXRXHTANENQLSY

SEQ ID NO: 215263 - protein, 88 aa, Zea mays
  unsure (1)..(88): unsure at all Xaa locations
  Clone ID: MRT4577_127916C.1.pep
IERELESSAKTKASTPLHQITILCRRFEPLSNFGIIFTHILFATGGESGYKGLYFTQVSVFGDSCQSGEKVLAQNKRTAPPPXFKNLS

SEQ ID NO: 215264 - protein, 122 aa, Zea mays
  unsure (1)..(122): unsure at all Xaa locations
  Clone ID: MRT4577_127917C.1.pep
FNQLFSLNPAAYLRQQLFPFSQVGFAYFYQQQLFPFYXLAALNPPAFLQQQIFFPFCQLGAASRASFFTQQQLLPFFQQFGGNPPTLFQLQQLLPFVPLAFANPAASFPQPIIGGAPFLIAF

SEQ ID NO: 215265 - protein, 121 aa, Zea mays
  Clone ID: MRT4577_127918C.1.pep
FPPLRPRGLGLTFCSPFPFWGFLKNWAKICPPAFRARNPINGKNGVLKGFPPPFFFPPAGPKAWGFKGFYPVQVFPPNLFSFFQGTWGGAFFFQSCPRFFFLFFKPLLKFCPLWGGFLFLL

SEQ ID NO: 215266 - protein, 271 aa, Zea mays
  unsure (1)..(271): unsure at all Xaa locations
  Clone ID: MRT4577_127919C.1.pep
VPGARGLLINTYEWLEARAVGALRDGVCVPGRPTPPVYPIGPIIVMGQEAAEKGERHACLSWLDAQPERSVVFLCFGSLGAVSAAQVKEIARGLESSGHRFLWVVRSPPEDPTKFFLARPEPDLDSLLPEGFLERTSDRGMVVKXWAPQVEVLRHAATGAFMTHCGWNSVLEAASAGVPMLCXPMYAEQRVNKVFVVDEIKAGVVMDGYDEELVSAAEVEKKVRLVMESEEGEKLRERLALAKEKAAEALADGGPSRMAFEEFLKDIMLAK

SEQ ID NO: 215267 - protein, 66 aa, Zea mays
  Clone ID: MRT4577_12791C.1.pep
GYPPRSRPKKKKKKKKKKKKKKKKKKKKKKKKKKKKKKKKKKKRGGGALTFPWFPLEISFWSPAGG

SEQ ID NO: 215268 - protein, 82 aa, Zea mays
  unsure (1)..(82): unsure at all Xaa locations
  Clone ID: MRT4577_127920C.1.pep
VRRHPPAARLTAAIRDAIPRAAYASAAGLTLMQSEKAKGAECXDESLPGHHLHRGFRSGADSGLANLEGEGWGNERSSCVFR

SEQ ID NO: 215269 - protein, 57 aa, Zea mays
  Clone ID: MRT4577_127921C.1.pep
RGGGNPFFKLYAQDLPFGAHTHLIYKAYGHSFAKGGKSGNRNNYGGTYIGKILLKVA

SEQ ID NO: 215270 - protein, 35 aa, Zea mays
  Clone ID: MRT4577_127922C.1.pep
QKVCTACSATQTTCNVTNHEIKSRYEQSSFMLLNF

SEQ ID NO: 215271 - protein, 81 aa, Zea mays
  Clone ID: MRT4577_127923C.1.pep
RTVMLTLVPEGLSSLVMFVLAHLCFECRARYVSPVPPLFIWCCSRPMHLTSMSCGSMHSVTPARICLTLTLKEKMVLLGPA

SEQ ID NO: 215272 - protein, 76 aa, Zea mays
  Clone ID: MRT4577_127924C.1.pep
EIHLCDSLNEQCQPSCSRSQVRSEVPAIDLARVLDLGPITRRGAQSPGVMNGTPSTAGFLVAWPMVLLTVLLAWLF

SEQ ID NO: 215273 - protein, 159 aa, Zea mays
  unsure (1)..(159): unsure at all Xaa locations
  Clone ID: MRT4577_127925C.1.pep
MGEWCFKKRAALVIIVAIISSLQLLLITAQEAGGDHEVWSSSSSPAGGRXWRRRRRXSCSGEEAVVVYQSSANPLPSGIPAYTVQIINVCGGGCTVYDVHVSCGDFASTELVDPAKFQRVAFDDCVVKGGAALEPSETVSFQYSNSFSYQLSVASVACH

SEQ ID NO: 215274 - protein, 169 aa, Zea mays
  unsure (1)..(169): unsure at all Xaa locations
  Clone ID: MRT4577_127926C.1.pep
MGEWCFKKRAALVIIVAIISSLQLLLITAQEAGGDHEVWSSSSSPAGGRXWRRRRRPDXRMGPDGSSSCSGEEAVVVYQSSANPLPSGIPAYTVQIINVCGGGCTVYDVHVSCGDFASTELVDPAKFQRVAFDDCVVKGGAALEPSETVSFQYSNSFSYQLSVASVACH

SEQ ID NO: 215275 - protein, 30 aa, Zea mays
  Clone ID: MRT4577_127927C.1.pep
IYLGTCRSCGLAAFFIMDDLVFDLWAVCVA

SEQ ID NO: 215276 - protein, 110 aa, Zea mays
  unsure (1)..(110): unsure at all Xaa locations
  Clone ID: MRT4577_127928C.1.pep
MAANIFSILMLLALSACVANATIXPQYSQAPIAALLPPYLPSMTASICENPALQPFRLQHAFVTSNLPLSLLFFXNXPGVSLLHSLVQTIQATQLHLLELXVISQVILPH

SEQ ID NO: 215277 - protein, 87 aa, Zea mays
  Clone ID: MRT4577_127929C.1.pep
GAGGPSTERELTSQPMVPGGGATVGTPTRAEPRGSLLGLGLGAAGGQVAVDQGHCHGPRGRPGRRRNPGQKERQERKDHLHNDKRNR

SEQ ID NO: 215278 - protein, 109 aa, Zea mays
  Clone ID: MRT4577_12792C.1.pep
EETRRPTKKRQSHTMNIYNLLRSSLTIIGQRYQKQLQCCDCRKTLYEPYQSASIFLEPLLSTSWIGKEKNIVEIVDTLTDALTITRRSSNEYYCLEAQRNRKDQNSQRC

SEQ ID NO: 215279 - protein, 82 aa, Zea mays
  Clone ID: MRT4577_127930C.1.pep
MGGGRAQVNKAHKSRFASKASRHTHKIDKVRSGKSETSHRAAVKGARAARIQQSKAIRDKKRAALLKEKRSSTGPSSAPRVI

SEQ ID NO: 215280 - protein, 153 aa, Zea mays
  Clone ID: MRT4577_127931C.1.pep
MQIFVLTLTGKTITLDVESSDTIDNVKAKIQDKEGISPDQQRLIFAGKQLEDGRTLADYNIQKESTLPLVLRLKGGTMIKVKTLTGKEIEINIEPNDTIDRIKEHVEEREGIPPVQQRLIYAGKQLADDKTAKDYNIEGGSVLHLVLALRGGC

SEQ ID NO: 215281 - protein, 56 aa, Zea mays [sequence omitted]

SEQ ID NO: 215282 - protein, 512 aa, Zea mays
  Clone ID: MRT4577_127933C.1.pep
MLTCGRFISSSAATSTASFFPFRTLTRSLVRRPAPHLLSSASAAAATAVELDTNGDGSAGGGAGVVRPQWKAAIDFKWIRDNRDAVADNIRTRNSTANLDLVFELYDQYLTLQKEVERLRAERNAVANKMKGKLDPSVRQALVEEGKNLKEGLIALEEDLVQLTDKLQLEAQSIPNTTHPDVPVGGEESSVLRKEVGSQRSFNFAIKDHLQLGKELDLFDFDAAAEVSGSKFYYLKNEAVLLEMALVNWAISEVSKKGFTPLITPEIVRSSVVEKCGFQPRAKNTQVYSIEDSDQCLIGTAEIPVGGIHMDSILAESALPLKYVAYSHCFRTEAGAAGAATRGLYRVHQFSKVEMFIFCRPEESGKWHEELITIEEDLYASLGLHFKTLDMATGDLGAPAYRKFDIEAWMPGLERYGEISSASNCTDYQSRRLGIRYRPSPSEPPSTSTKKGKGAASGPTQFVHTLNATAVAVPRLIVCILENFQQGDGSIVVPEPLRPYMGGLELLSPKFK

SEQ ID NO: 215283 - protein, 81 aa, Zea mays
  Clone ID: MRT4577_127934C.1.pep
LKKQKRAPKIPKDQLSKGAPPVQKTTVPKPAQNSLGPKKKKPPALTSPGKIPPPPKFVPRTSSIFKKGAKVKFGPQVLTQV

SEQ ID NO: 215284 - protein, 282 aa, Zea mays
  Clone ID: MRT4577_127935C.1.pep
MAASSRPRPPPAAILAVAAPHHGCHTLLRGCPFPPQARLRYQSSAAGASFHHLGINSKTAFHGVSLVVDRRWAAGHRRGSGRRRLLQVNARTAAKNIEVEVEKPLGLALGQKPGGGVVITSVESGGNAARAGLKTGDQVLYTSSFFGDELWPADKLGFTKTAIQAKSDSVYFVVSRGAEVDVKRLPKRPAPPRFGRKLTDSQKERATHVCLDCGYIYFLPKPFDEQPDDYGCPQCNAPKKRFARYDAATGKAIGGALPPIAVIVSLVIGIAGVGALLVYGLQ

SEQ ID NO: 215285 - protein, 79 aa, Zea mays
  unsure (1)..(79): unsure at all Xaa locations
  Clone ID: MRT4577_127936C.1.pep
AQQXDSRRYANYCPNRAAYTTPAPMKQGQASAGKNQPLFVNRGQVNHAEVESEPCEPENQEEVLVEGEEVGEKGNEQQD

SEQ ID NO: 215286 - protein, 97 aa, Zea mays
  unsure (1)..(97): unsure at all Xaa locations
  Clone ID: MRT4577_127937C.1.pep
MEGKIVYMLMLLAHSGRVAHATHCSSIXQARIDVLLARYLPSMTAAVCEKPVLQQYKLQHAIAPSXLTLXSPHDFQQSSRLSLVLSCVQTITAQQLE

SEQ ID NO: 215287 - protein, 149 aa, Zea mays
  Clone ID: MRT4577_127938C.1.pep
YAFWASFESCCWCGTVEVGCGLQGWLVYSLLALTVYLSFFSHLVACIIKLLSFLYIVMNVAMPFISNADAIYEFLSLYVCIDIVMNAANVFYFECLCNLLSCMCEKKKKKRVCRHVSSGSYHFLYMCKDIVMNVDNAFYFECLCNLQVS

SEQ ID NO: 215288 - protein, 92 aa, Zea mays
  Clone ID: MRT4577_127939C.1.pep
PAGPGLFSSIFPESSQGTHPRPHRVEHFHAKARGGRRVRLARRWLRDTLTATPATIDHPLFISIPFGGQFSLRSNMHFGLLLSHVVGVEPWK

SEQ ID NO: 215289 - protein, 205 aa, Zea mays
  Clone ID: MRT4577_12793C.1.pep
MLGDLLSRILLLLFGYAMPAFECFKTVEARPNDARMLRFWCQYWIIVAMVIAVESVISWMPMYSEMKLAFFVYLWYPKTKGSDVVYDTFLRPIVMQYEPNIEQRLLHLRAKSGQLISFYMKNFADKGTAFFMDVLRYVVSEKPEGSNAEQRSKKSGWSPFATKRRPPSPPPEPLFDSNPDAAVLAEALRGAIGAKPRRAPNDKHY

SEQ ID NO: 215290 - protein, 147 aa, Zea mays
  Clone ID: MRT4577_127940C.1.pep
PAGFPGLFSSIFPESSQGTHPRPHRVEHFHAKARGGRRVRLARRWLRDTLTATPATIDHPLFISIPFGGQFSLREKAGAGWRWEERERRCCCAFDWIGLALERVLPPHVFAVPALILWCTTVLCAAPALEDLANCSDLFSLCFISEH

SEQ ID NO: 215291 - protein, 65 aa, Zea mays
  Clone ID: MRT4577_127941C.1.pep
GPCCFSSSSRKYFHIGHPGVFNLARWSFLILGGFDVLPCYSGQMRKLLMLSRTGIYPSRGWHSDA

SEQ ID NO: 215292 - protein, 63 aa, Zea mays
  Clone ID: MRT4577_127942C.1.pep
NPHINQVYPFFRLYTTKGENKRECTMYLKTLFISVSVKELHKCILITEYKIGSSNFKDTVGLF

SEQ ID NO: 215293 - protein, 78 aa, Zea mays
  Clone ID: MRT4577_127943C.1.pep
YLTMGRSSSVMEACRSICIRCLRLDDLGDALAASVLSSSCDVHCGARVRVGLPASRSCKPCLSGSEGQAARVGGRVGV

SEQ ID NO: 215294 - protein, 60 aa, Zea mays
  Clone ID: MRT4577_127944C.1.pep
LLPLAVSDPSWSIRTLSPSSFALDKLDPNPFFLLGARLHFVYMHFTVSTSLRTWSLLPYF

SEQ ID NO: 215295 - protein, 124 aa, Zea mays
  unsure (1)..(124): unsure at all Xaa locations
  Clone ID: MRT4577_127945C.1.pep
FPGPPPRCRSCVPFAXGWGXXFRAXXXXWLXXXXXXPPCAVPLXWFPGXPAWLVRGAVXXCSPPXFCVPLXFXWAFPGLVPPRRFXXPPRLXXXLSLXVFFFGLPXPPLXGXFXFWGFGAVLLL

SEQ ID NO: 215296 - protein, 94 aa, Zea mays
  unsure (1)..(94): unsure at all Xaa locations
  Clone ID: MRT4577_127946C.1.pep
MRSVRTAKRCPAIIDHVMYHEIRVKYLRYKTIFQLNAGGRFVMDGPHGDATLAGHVIMIDTXYGGCGAHGGGTFSGQDTTMADRSGVYVGRRGV

SEQ ID NO: 215297 - protein, 159 aa, Zea mays
  unsure (1)..(159): unsure at all Xaa locations
  Clone ID: MRT4577_127947C.1.pep
MKRKPRVTRSRRKCRKAHYXTDPSSEHRVIMYAALLTELRHKYNALSIPIRKDDQVQAQRLTYKGRESKSMYWYRRCWGIYVXWITREKVNGSTVNVGIQPSTCHVXTKLNVDKDRKALIERKVRCRTVYKAMGKLNADDTTTDAVGACDTGMSLHQIN

SEQ ID NO: 215298 - protein, 131 aa, Zea mays
  Clone ID: MRT4577_127948C.1.pep
ATRTRKATRNLQHTAEARATGAVTARRGVGGRGGFYPDPRTPGSGAAASRRRGGARGRGRAGTWRARTGARSRGRLSRGSGMLEIPIAVGGLDLGIVWPVVDWVVNFRFFGDGRREWSRTHASRTVTHTHT

SEQ ID NO: 215299 - protein, 44 aa, Zea mays
  Clone ID: MRT4577_12794C.1.pep
TDAFHFSSNRMKTIYIMKPLIDISLKITNANCLTFHFQITNLNS

SEQ ID NO: 215300 - protein, 88 aa, Zea mays
  Clone ID: MRT4577_127950C.1.pep
LLFSSSAAARSPAARASCPPLSSPGSSTPAPQHARPLAHGPRGRASSPASEEDDEEAVAVAVPLELARSLLLLARSLYKQCTTDVVVP

SEQ ID NO: 215301 - protein, 148 aa, Zea mays
  unsure (1)..(148): unsure at all Xaa locations
  Clone ID: MRT4577_127951C.1.pep
MGISSMPEPRDSLLGYLVYNTVISIAALAGLVRAALVFLDLQAALPPGDDGGDRLAASAPGLAERFLRAFRPALYEVLASTAAXDDCSVCLAGFGARAVVNRLPCGHLFHRACLETWLRYERATCPLCRAHVPLPADETPVLRYPELE

SEQ ID NO: 215302 - protein, 63 aa, Zea mays
  Clone ID: MRT4577_127952C.1.pep
FCFNSWPPSGGYLRFLSLPQIFLGQSVRRKGLIVFRPAYAGLIRSGCTLGVLKTIHKTWATCV

SEQ ID NO: 215303 - protein, 782 aa, Zea mays
  unsure (1)..(782): unsure at all Xaa locations
  Clone ID: MRT4577_127953C.1.pep
MATPTANRRWGEGDTEAGNGSRSGGRWGEETNKAARCAGRHVDAMRGRGVDVVTTRHPPLLPARTAMAPPPPQCASKRPSAPAPALQVGDMAEEASPSPSPPKLLYIAIADGGVRRAFRYTRPVLQSTLHLMGCKPRHAFKISKRVFNVMKSEFLATSKSDGATKQENYPAFGLGDGTDTPKMLERSNSSVPFELYKNQTTVVVSREEFVSVVCDALSLYKYVGPNQKADLLLACRIKERKESVAILLCGTSGCGKSTLSSLLGSRLGITTVVSTDSIRHMMRSFADEKQSPLLYASTYHAGEYLDPIAVAQAKAKRNANKPTVVSHPNTSGDKDVTSGDKSQHGSSELPPRAELIGNKQMAVEGYKAQSEMVIDSLDRLITSWEEQKESVIVEGVHLSLNFVVRISQETVXMGLMKKHPSIIPFMVYITNEDKHMERFAVRAKYMTLDPAKNRYIKYIRNIRAIQEYLCNRADKHLVPKINNTNVDQSVAAIHATVFSCLRRRAAGEQLYDLNTNTVAVVDEEYRNQRAANTLGSKGMFQLIQRKGSSRNLMALLNTDGSVTKAWHVSASDGNGNLNGITNNKKSPENPMLDPSQIGKAEAVNLQFGPFGISAWMSDTGGTSHTGSVEDLRPDSVETGGRNYSSCCSSPKMSDSTSKELMEDYSVYGSDEEADDPRDAETDDDLTDEERDMHEIDAGSVDEHSTKSDEEYEDLAMRDVMENGDWSDDDQAVGKTKNSPAQESIHGSGAAEDDGIKGRYHHNLDLFLKMSKEVAGTRMPCAS

SEQ ID NO: 215304 - protein, 129 aa, Zea mays
  Clone ID: MRT4577_127954C.1.pep
ARKKCYTISHGHGSTLHSASAAKCEPEYLHATGYSTERKQQREWEGGGIQEAKGESKRQQPCTTTTAPTPFFSSSLVCYAYTEGHTERAAHSRGATRPGWVFTGSLELRVAEQRRLVGGEGHVGAAARP

SEQ ID NO: 215305 - protein, 85 aa, Zea mays
  Clone ID: MRT4577_127955C.1.pep
SDMCTFYKRRLTKADKKIVPTSPHPRCVPSPPSLCLRAIATVAAKLGLWNANFIFLDGVIPGFRRQTECKPCTCQDQKFTYTSIT

SEQ ID NO: 215306 - protein, 98 aa, Zea mays
  unsure (1)..(98): unsure at all Xaa locations
  Clone ID: MRT4577_127958C.1.pep
MRFFDTTLCDGKXLPSATMTSTEKLIHARQLARLGVDVIEVGFSVSSSNELDTVCSIFIEVGNXGGNSTHVPVICDLSRCNRRDTEDAWEAGRPDALQ

SEQ ID NO: 215307 - protein, 66 aa, Zea mays
  unsure (1)..(66): unsure at all Xaa locations
  Clone ID: MRT4577_127959C.1.pep
FDRAPGFYGPKITSGVIKPRLGVLFFPLVFQKFGDPPQGXKALVGKFKKLFFAPPPGFPNFENKAR

SEQ ID NO: 215308 - protein, 133 aa, Zea mays
  unsure (1)..(133): unsure at all Xaa locations
  Clone ID: MRT4577_12795C.1.pep
GXWREENSIXXPXXXVRRXXXXPAYXXXPSGXLXWKKFVXXXXHXVGXEXLCPXXGKNPXTXFXXVNXPRMXXVXRXVIXXXARGXXPCXXPXSCSXRXRPXTFXRDLRGCRDHPESRRVPXEXRXLFPXXXQ

SEQ ID NO: 215309 - protein, 217 aa, Zea mays
  unsure (1)..(217): unsure at all Xaa locations
  Clone ID: MRT4577_127960C.1.pep
MASLLCSQIKLNKVYVRRQVHENRLTRLPNSLHCSPLQLGHFKNTALRCTENLPWEASLPYASAEDDASIIMGTNIVEAIDTEEAPEIPILQSDQDVVDVKNEPSKQLATFKLPMWLLGPSVLLVTGIVPTLWLPLPSVFLGPNIAGLLSLVXLDCIFNMGAMLFFLMADACGRPENNSFDLTRQIPTSYRMWNLIASVLGFXAPLXLPFASHQGAL

SEQ ID NO: 215310 - protein, 95 aa, Zea mays
  Clone ID: MRT4577_127961C.1.pep
DVRMISDRDSRRSKGIAYVEFVDVSSVPLAIGLTGQRVLGVPIIVQASQAEKNRAAAMANNLQKGSAGPMRLYVGSLHFNITEDMHRGIFEPLRD

SEQ ID NO: 215311 - protein, 34 aa, Zea mays
  Clone ID: MRT4577_127962C.1.pep
RVDTNLTQSSRTFSGRLTCQVTQQPPFSGRPGVR

SEQ ID NO: 215312 - protein, 80 aa, Zea mays
  Clone ID: MRT4577_127963C.1.pep
EALDALINGTPFQPIGRPTWKAHNIHRHALPKKSKPCFFYTGAWRIIYWARHVTQPKGRNGAPLKSPFNAVTSGSPGGQG

SEQ ID NO: 215313 - protein, 51 aa, Zea mays
  Clone ID: MRT4577_127964C.1.pep
LHLKGITSFSLSPTTKMFGNFVFTFKDHLLLFQGKKVLSKQLFTYIIYAFF

SEQ ID NO: 215314 - protein, 67 aa, Zea mays
  Clone ID: MRT4577_127965C.1.pep
LLPDCSPRQSDMVLIAHCTFSICFLIRKHHLYMHSLDYKRYRCTLKLIWSGMVYMNHIAFHQRMMNE

SEQ ID NO: 215315 - protein, 300 aa, Zea mays
  Clone ID: MRT4577_127966C.1.pep
MITSLVVGRSKPGYSLCPALSFKDVHHPGWGGGRAGLGPASRVGRWPASSSSIRGRRASSSPAEETSSSYAGEGELLLPGQGVAVHPPPERRSCRAQVAAVAGAEVVAAAGRENRRGRCRRLSLGTIVTPRFETALDEAVKNCKALAEAAGQKEAERVAMSEAISALEAERVAMSEAISAFCQAFGLEGVPSGSSPQSHLRALGDHVCNRLRGALHHDVRRAFAVLASHYDMDLERVSEGYCLSDEEEAALAEVQSLDAAVEGSSAALASSFEVEVHPPVSPSEAVPDPAEGAAPPPADV

SEQ ID NO: 215316 - protein, 223 aa, Zea mays
  Clone ID: MRT4577_127967C.1.pep
MRGEGELLLPGQGAAVRPPSGRRSCRAQAAAVTGAEAAAVAGQDNRRGRYRRLSLGTIVTPRFEKALDEAIKNCKALAEAAEQKEAERVAMSEAISAFCQAFGLDGVPSGSSPQSQLRALGDHVRNRLHGALHHDIRRAFAVLASHNDVDLERVSEGYCLPDEEEAALAEVQRLDAAVEGPSAALASSFEVEVLPPVSPPRAVPDSAEGGNDAEGAAPPPATV

SEQ ID NO: 215317 - protein, 85 aa, Zea mays
  Clone ID: MRT4577_127968C.1.pep
IPGGGALLGLVGTTPRRLLGCRCQLYGHNVYARPVMSHNQKTACHSIPGYTRNQRTCHHGQGHGSVSSSGCPALRENTGALWGHA

SEQ ID NO: 215318 - protein, 115 aa, Zea mays
  unsure (1)..(115): unsure at all Xaa locations
  Clone ID: MRT4577_127969C.1.pep
AEKLQIGGEEEKKEXPPKEVEKISTEKAAXSEEGEAVEEKVKGGGGMVGRIKGWFGGGATDEVKPESPHSVEEAPKSSGWFGGGATEEVKPKSPHSVEESPQSLGSTVVPVQKEL

SEQ ID NO: 215319 - protein, 52 aa, Zea mays
  Clone ID: MRT4577_12796C.1.pep
IPCRPTRPTTLLTTHTHHSYKKIYLKSKREFLKIACLSHNYFIHNIIPSTYF

SEQ ID NO: 215320 - protein, 65 aa, Zea mays
  Clone ID: MRT4577_127970C.1.pep
SVSRKTSSMVAAPSVVVALLLAFAYYALEAITCGQVGTELCPCIHSTTARASSLPSSCCKRMRSL

SEQ ID NO: 215321 - protein, 54 aa, Zea mays
  Clone ID: MRT4577_127971C.1.pep
VVVYGTVCFRATLSNLSLCSLQNHLGLANVISFYNVRIPLVVSASGYIPIVRGK

SEQ ID NO: 215322 - protein, 93 aa, Zea mays
  unsure (1)..(93): unsure at all Xaa locations
  Clone ID: MRT4577_127972C.1.pep
LQRGELAPLLAAAMQHAAPHPGPTSHPQRPNHESFPRHHLPTSSPQSTKRKSNLTFTTRXATAATQNGAQMXTPSHNPQTHSLPPDSTLPAAT

SEQ ID NO: 215323 - protein, 93 aa, Zea mays
  Clone ID: MRT4577_127973C.1.pep
VNTGIGQCLRAHKRSKGGKQSSQKTDTTRGREPAHPIPEFNKHIHLMRCSNEMPAEGPNQVAKEMWLRKKTMALGHPWDHYLLPEHAQVGGHP

SEQ ID NO: 215324 - protein, 53 aa, Zea mays
  Clone ID: MRT4577_127974C.1.pep
HPYMGGGATNKPNIPKVWDHISTFYDITTILTNAIIFVTQFYFKKRPRGNGFF

SEQ ID NO: 215325 - protein, 116 aa, Zea mays
  unsure (1)..(116): unsure at all Xaa locations
  Clone ID: MRT4577_127975C.1.pep
TPQGDAAPQPRTKPRPRHQRQXRQEXPRPAGDQHRRAGHQPEGGGRPLKTPRPTSLHRGGEPPDRPGRHPGGNRNSHPGTRGSQRPPTRHGRTTYQAEGGGKKRLTEAGRATQHQH

SEQ ID NO: 215326 - protein, 141 aa, Zea mays
  Clone ID: MRT4577_127976C.1.pep
PIYSAAFQPPPCFVRRTKQLGEKNVRPSVRVSCRLQLPLASLSQGVCALQLARQGSCRIIRRQQPSLSREDEDRSKQSELKGSFRFSQRTRRALCVLPQARTGAPTGCSRGSAAPAGPAGVRRRFRSSSTTRGRRVKRARA

SEQ ID NO: 215327 - protein, 75 aa, Zea mays
  Clone ID: MRT4577_127977C.1.pep
GACGPARLSPGLPRLRRVRVDQFRRGGADRGGGLLAAIVLVDGVPVRVLEHAGPLRGCRGSHPDPVDASGADGWL

SEQ ID NO: 215328 - protein, 144 aa, Zea mays
  Clone ID: MRT4577_127978C.1.pep
ACSRAQQRPPGTARPARAAAGRQRNCLMTGYRRTGRGKGAPSKLVSMYSGRCPCQGWCPARRGTVVSRGLCGTQGGLGSMKTTTHLTSCWMNRWRKAQSTTRKAQGSMCKYNNAPGAVALEKHGMADDGDIQHSLEHQGHLRGV

SEQ ID NO: 215329 - protein, 61 aa, Zea mays
  Clone ID: MRT4577_127979C.1.pep
TLQVLLVLLNLENNLLAPQFEPVVRHRALRPVSGWSCCAPVPREQPAGAPLRAPEKAAVDV

SEQ ID NO: 215330 - protein, 115 aa, Zea mays
  unsure (1)..(115): unsure at all Xaa locations
  Clone ID: MRT4577_12797C.1.pep
NTPPPPPPXPKKKTPTNYPPXTQKQNKNLLLLLXXQTSLFPQXXXXILINLLXXXXTKIXXHHXXXXXXHQSSLPPRXRXXXXLKXITPRAWRQEKVEGGKSXXXFLAGEPNXLS

SEQ ID NO: 215331 - protein, 86 aa, Zea mays
  Clone ID: MRT4577_127980C.1.pep
DFSRNVTFLPAFAHANATRETGCSAERGILHYSVLPINNSFYQTIYLLQKLVCNLSIKLKVVNTGNSFYGRIVSRFCNVLIRIFFK

SEQ ID NO: 215332 - protein, 127 aa, Zea mays
  unsure (1)..(127): unsure at all Xaa locations
  Clone ID: MRT4577_127981C.1.pep
ITCNWLPYFKNDINRRGCIXTFVCAAXATDALPSPVRGDLFALEEAAXXWTIALLWRTFFTTSSVAGVFMGLIEFCLKAKCGLFEQGGLIMYDLSKTXAVYTTTDLIATIVLGIXGGIFGGLFNYLL

SEQ ID NO: 215333 - protein, 67 aa, Zea mays
  Clone ID: MRT4577_127982C.1.pep
LYIRTPILDEPLTELLALLQVTIHAFIARARSVGINMDWTASDGAVHGCVLRRRGLGMHLLHQRWPQ

SEQ ID NO: 215334 - protein, 245 aa, Zea mays
  Clone ID: MRT4577_127983C.1.pep
AGLGAVDPVRERGEEARRHGMWLHVDAAYAGSAAICPEFQGTLDGAELADSVSMNPHKWFLTNADCCCLWVASPGALTSALSTDPEYLKNVGTDGTGKPAAIDYKDWQISLSRRFRAIKLWVVLRRYGAVGLRAHIRRHVTTAKWFERTVAADERFEVVVPRKFSLVCFRLRERFAGDDAADELNRELLTAVNASGRAFVTHFVVDGKFVIRLAVGGAMTEMRHVMDVWELLQASADHVLRRYSY

SEQ ID NO: 215335 - protein, 289 aa, Zea mays
  Clone ID: MRT4577_127984C.1.pep
MASSLPAPPASPSSSWRGLTPRCPPPRCGPLLARAAARSYRYRFRTDDDGVVDVAVAGKDGDAGYVVAIEAPTHGQRGGLVLRPAGSGEGVPLAPAAPGGALVAELSYDVARAPFHVSFTLADAMGAEIRTHRGTSFRVPVGVGRGCPSPLGLSQSKDGAANFAVYSKIAKGMVLCLFGGGGGDGPALEIELDPYVHRTGDVWHVSMESVEGYARYGFRSGLFAMFGIDRPLLDPYAKVIGDFVAGDSVDEDGLAVPSIRCLASLKNAPNYDWGRDKHPCLPLQKLVVY

SEQ ID NO: 215336 - protein, 84 aa, Zea mays
  Clone ID: MRT4577_127985C.1.pep
VRRECGAADWRVLRALEPVSMGAGVIPAASCGGGEGDVMYMRARFERVVGSRDSEAFYMMNPDGSGGGAHGHGGPELSVYLLRV

SEQ ID NO: 215337 - protein, 88 aa, Zea mays
  Clone ID: MRT4577_127986C.1.pep
LTPPGASTRRARLAPPWRPWSLVSPTADADWSRQPAPKEETQTRDLTRTRNAHGDGTGDRRADARADPGPRTGTCRPPVSAQRLAPEL

SEQ ID NO: 215338 - protein, 111 aa, Zea mays
  Clone ID: MRT4577_127987C.1.pep
PKPNQKNLVFSFTRGKKRRESFANPSPIPLPLFGPPLATLLRPIQNLWPAGTPQKNKGGTKSLPRFQGKGQGGGLQKKKKAMEGPRDLGGYIGPSPRNPTSENQGGVANLT

SEQ ID NO: 215339 - protein, 227 aa, Zea mays
  Clone ID: MRT4577_127988C.1.pep
PRLCPSRRCRAAAAAASSSPNNSASSFPTDFSAHGQVAPGADRACSRASDEDDGGSARKKLRLSKEQSAFLEDSFKEHATLNPKQKLALAKQLNLRPRQVEVWFQNRRARTKLKQTEVDCEYLKRCCETLTEENRRLQKELSELRALKTVHPFYMHLPATTLSMCPSCERVASNSAPAPASSPSPATGIAAPAPEQRPSSFAALFSSPLNRPLAAQAQPQPQAPANS

SEQ ID NO: 215340 - protein, 70 aa, Zea mays
  unsure (1)..(70): unsure at all Xaa locations
  Clone ID: MRT4577_127989C.1.pep
CAYSHNYIYENVILCVDDDPLNEMVPMHHHVIPVFPLRTREIALMPMIDLGENDDKIISRCDDDPXYRHY

SEQ ID NO: 215341 - protein, 76 aa, Zea mays
  Clone ID: MRT4577_12798C.1.pep
HRAPPRAPPPPPLAALTSHSSRAGKTRTRRKDSTAPHTPTSHSPPHTRSDGTHITHSTTQAKPNGGDTSRTSRRTP

SEQ ID NO: 215342 - protein, 55 aa, Zea mays
  unsure (1)..(55): unsure at all Xaa locations
  Clone ID: MRT4577_127990C.1.pep
ITTRGGGHAVTHVXTSXLQNPXRPLXSSLSPPTANPNPLANLLFPSAHGFAPYPQ

SEQ ID NO: 215343 - protein, 91 aa, Zea mays
  Clone ID: MRT4577_127991C.1.pep
TRKKKKIGSTRHEQHKTQTGCPSQTHILFTDRHPEPWQDSYQFGPQRQSGPTVYLLLFFGPPVAPCFLAVVACGGRHLEMGTSLALGDWNL

SEQ ID NO: 215344 - protein, 117 aa, Zea mays
  Clone ID: MRT4577_127992C.1.pep
KMFHKMFLKKEVPMALKTFPPPQKQIFFFKFWVQEGWIKTLQEIGNIIGVNKEKIPPIKFWAFPEIKNKKKVKAFKDFFGPISKLLTLFFQKLFSLWVPLFFFLGIWAWSLFRGASC

SEQ ID NO: 215345 - protein, 66 aa, Zea mays
  Clone ID: MRT4577_127993C.1.pep
NQENPCRSIDFIPLHDHACHHSSTHTTSDRESTGRIRGKESRNAIRHLITAPNGIKQKKNPLLLFL

SEQ ID NO: 215346 - protein, 97 aa, Zea mays
  unsure (1)..(97): unsure at all Xaa locations
  Clone ID: MRT4577_127994C.1.pep
IRVAYIFSVLVPRSFTSACLHTRVHTIDYFFFFIXAFFGGGHTFSSHNTAGARCECDTRAWRTGRDDDPGGSVCRRSGAWLSPAGCLVSLWGLLFSW

SEQ ID NO: 215347 - protein, 77 aa, Zea mays
  Clone ID: MRT4577_127995C.1.pep
QRLTLTKEEQPSEPKSLRGNSNGEFVVRCSMPLFGSPRAMRHQPLPQIPHLVRLSDPDTPPLLMQTLQLQLQLQLQP

SEQ ID NO: 215348 - protein, 114 aa, Zea mays
  unsure (1)..(114): unsure at all Xaa locations
  Clone ID: MRT4577_127996C.1.pep
PRGRKAKANEPQTKRGAARAGRRARGELPTRGAGAHQGRGNDQNANKTRERNXEKNKGAKGSQXETNKKAKSTQXKXRXQTLXXXTTEAKXREHAEAKXPKTDGXQXXPXXKKK

SEQ ID NO: 215349 - protein, 84 aa, Zea mays
  unsure (1)..(84): unsure at all Xaa locations
  Clone ID: MRT4577_127997C.1.pep
KTKGPKLPYPXLKXNPPKSKSKLTTGACXPPFPQPTLGRSPPKGPSHWLNLLAQPPVTDXLKPPPPTGGGLNPLQTPPPPPGHC

SEQ ID NO: 215350 - protein, 163 aa, Zea mays
  unsure (1)..(163): unsure at all Xaa locations
  Clone ID: MRT4577_127998C.1.pep
CESNARFVNXKDGTMQLLIGNEVLDISVHEAHHDQSHLFLRHGKXLSLLYNISSTTAFPNHQSSFFXHYXIEFYXGILQSQGRLLHKMRFMPSSLSSKSHRLLTALVDSQNKKTVKMQKWFETKDPEKAKMEKERVSKSLLLHYLVYVTQDACLAFVQYSCLN

SEQ ID NO: 215351 - protein, 88 aa, Zea mays
  Clone ID: MRT4577_127999C.1.pep
GKKVNQTGPITVYMVGDFFSIRHIEAFPKKKCLWENDFGGGFNVFFQWGERGTWDPGFPFFLYKNTPPKTGVLFRGGLSFFFLGGSTS

SEQ ID NO: 215352 - protein, 218 aa, Zea mays
  unsure (1)..(218): unsure at all Xaa locations
  Clone ID: MRT4577_12799C.1.pep
MAQPLVVKKDDDLDEEEYYSPFLGIEKGAVLQEARVFHDPQLDARRCCQVITKLLYLLNQGDTFTKVEATEVFFATTKLFQSKDAGLRRMVYLMIKELSPSADEVIIVTSSLMKDMNSKTDMYRANAIRVLCRIIDSTLLTQIERYLKQAIVDKNPVVASAALVSGIYLLQTSPEVVKRWSNEVQEAVQSRAALVQFHALALLHQIXRQMDRLAVSKL

SEQ ID NO: 215353 - protein, 87 aa, Zea mays
  Clone ID: MRT4577_1279C.1.pep
YPPWVIMLWPGQSPLSFTRAELWALGFFLMSHSACFLWAPLYIGASLVHSPCWFFKTPPFFPPPRLSGVLPVFGPPLPPFVRGFRFF

SEQ ID NO: 215354 - protein, 270 aa, Zea mays
  Clone ID: MRT4577_127C.1.pep
DPRGRPGKIATVGLSNFYLDVAKDRLYVGGRVSFTRKSCQTVLMAHLLYLVRAISPIMPHLAEDVWQNLPFQYTLQDGSLANFVFDLKWPEKNEEWLSAPKDDVDFLGVILELRSEVNKILENARTGKLIGSSLDAKVYLHTESSDTVLKLKELSSASNDADALHRLFITSQVDILPILNEEITSSVPYTGKFSNPRTGVIWIGVTRADGAKCERCWNYTQDVGSFHDHPTLCVRCYGVIELQTQPAAADGCQVDPTRKTLHIDFNCFVV

SEQ ID NO: 215355 - protein, 75 aa, Zea mays
  Clone ID: MRT4577_128000C.1.pep
APPEPPERGGFFGGATTPRPEVAGPSAPAPQKAILSDQPDADIAVLAVGSVVTADYRPNRARPFADIGAQTPHPG

SEQ ID NO: 215356 - protein, 45 aa, Zea mays
  Clone ID: MRT4577_128001C.1.pep
EEDQRKHDGAAAATSTAHPLTRHIYAALNQHDELRKEGKCSSEGE

SEQ ID NO: 215357 - protein, 109 aa, Zea mays
  Clone ID: MRT4577_128002C.1.pep
KKKKKKKKKGGPRWALWPFFLRHGGAREGVALARPPRTPGGATTGIGYGNSPGGGPPLVFLAGVVLVQSPSLLVGGGTCGGEVPPSPRIFFFFFFFLFFCFGGLNCAPP

SEQ ID NO: 215358 - protein, 94 aa, Zea mays
  Clone ID: MRT4577_128003C.1.pep
GSSKITLHILPPIFTKFYFFFYIEKMLGQHCLVIPGRDPRQQSFWEVPEKIYLAAKLGIYIYIYIYIYISKERHISPIVLSFQQKPNKKHIKQY

SEQ ID NO: 215359 - protein, 201 aa, Zea mays
  unsure (1)..(201): unsure at all Xaa locations
  Clone ID: MRT4577_128004C.1.pep
RYYLKDAVLDGGVPFNKAYGMTAFEYHGTDARFNRVFNEGMKNHSVIITKKLLDFYTGFEGVSTLVDVGGXGVGATLHAITSRHPHISGVNFDLPHVISEAPPFPGVRHVGGDMFASVPAGDAILMKWILHDWSDAHCATLLKNCYDALPENGKVIVVECVLPVNTEATPQAQGVFHVDMIMLAHNPGRQERYEREFRELA

SEQ ID NO: 215360 - protein, 239 aa, Zea mays
  Clone ID: MRT4577_128005C.1.pep
MYGTDALRSSDKTIVLPMPEAVKAKVKGDISKEAQPGRGAQSTLRKEILELEKHFREQQIVSGALENALGPNAGTVNFSPENPMPKAANELIREIATLELEVKNMEQYLLTLYRKAFEQQAPALSPPDCREASKPSVSSCSGQLRETPVAAKSCKSGGDVALRSSYPPPAHKKLNDPLADCCTSARSADRAVDSGVLRCQSALSYSYRGVCSSRVLPSEEDDSLARALRSCHSQPFSFA

SEQ ID NO: 215361 - protein, 124 aa, Zea mays
  unsure (1)..(124): unsure at all Xaa locations
  Clone ID: MRT4577_128006C.1.pep
PWAPPPAMVDRMLRLLASYDVVRCQMEDRDGRYERRYSAAPVCKWLTPNEDGVSMAALALMNQDKVLMESWYYLKDAVLDGGIPFNKAYGMTAFEYPGTDARFNRVFNEGMKNPSXVVITKEAA

SEQ ID NO: 215362 - protein, 161 aa, Zea mays
  unsure (1)..(161): unsure at all Xaa locations
  Clone ID: MRT4577_128007C.1.pep
ITGYGLGGXAMALFGRXVSGGIYTKAGDVGXDARXMVARNILEDDPRNPRXIADTRGXDNRGTTIGRXGGREPVAAYYXEATCAVXLVVVHASLVGAXDHNSAXVGYPAASSAAGCXVLAVTTLFTTDLMKVNTVRGVLPMLKLQHMICTVLKTVTALDMH

SEQ ID NO: 215363 - protein, 91 aa, Zea mays
  Clone ID: MRT4577_128008C.1.pep
DAHCATLLKNCYDALPENGKVIVVECVLPVNTEATPKAQGVFHVDMIMLAHNPGGKERYEREFRELAKGAGFSGFKATYIYANAWAIEFIK

SEQ ID NO: 215364 - protein, 58 aa, Zea mays
  Clone ID: MRT4577_128009C.1.pep
MNITNGLSDHANKSNWNQQPVSNRKAKQDLSLQDLQMKGFVDNIGSPEVSVSKHYSTS

SEQ ID NO: 215365 - protein, 62 aa, Zea mays
  Clone ID: MRT4577_12800C.1.pep
KKKKKKKGHGPIHKITLTTKTNLRCKNILYITTCPLKTPLLKYKKRLPKKKIQTNNTRASYL

SEQ ID NO: 215366 - protein, 234 aa, Zea mays
  unsure (1)..(234): unsure at all Xaa locations
  Clone ID: MRT4577_128010C.1.pep
SDSDHCHSARYYLKDAVLDGGIPFNKAYGMTAFEYHGTDSRFNRVFNEGMKNHSVIITKKLLDFYTGFEGVSTLVDVGGGXVGATLHAITSRHPHISGVNFDLPHVISEAPPFPGVRHVGGDMFASVPAGDAILMKWILHDWSDAHCATLLKNCYDALPENGKVIVVECVLPVNTEATPKAQGVFHVDMIMLAHNPGGKERYEREFRELAKGAGFSGFKATYIYANAWAIEFIK

SEQ ID NO: 215367 - protein, 69 aa, Zea mays
  Clone ID: MRT4577_128011C.1.pep
SVSVFALSNLDVLYDTQKEFAESRNSDRHWCSSLLCREFTIYSLYMNSHVPYGKRLILCTPSVPKYLSF

SEQ ID NO: 215368 - protein, 364 aa, Zea mays
  Clone ID: MRT4577_128012C.1.pep
MGSTAGDVAAVVDEEACMYAMQLASSSILPMTLKNAIELGLLEVLQKEAGGGKAALAPEEVVARMPAAPSDPAAAAAMVDRMLRLLASYDVVRCQMEDRDGRYERRYSAAPVCKWLTPNEDGVSMAALALMNQDKVLMESWYYLKDAVLDGGIPFNKAYGMTAFEYHGTDPRFNRVFNEGMKNHSVIITKKLLDFYTGFEGVSTLVDVGGGVGATLHAITSRHPHISGVNFDLPHVISEAPPFPGVRHVGGDMFASVPAGDAILMKWILHDWSDAHCATLLKNCYDALPENGKVIVVECVLPVNTEATPKAQGVFHVDMIMLAHNPGGKERYEREFRELAKGAGFSGFKATYIYANAWAIEFIK

SEQ ID NO: 215369 - protein, 135 aa, Zea mays
  unsure (1)..(135): unsure at all Xaa locations
  Clone ID: MRT4577_128013C.1.pep
FDLPXVISEAPPFPGVQHVGGDMFKSVPAGDAILMKWILHDWSDAHCATLLKNCYDALPEKGGKVIVVECVLPVSTEAVPKAQGVFHVDMIMLAHNPGGRERYEREFRDLAKAAGFSGFKATYIYANAWAIEFIK

SEQ ID NO: 215370 - protein, 364 aa, Zea mays; identical to SEQ ID NO: 215368
  Clone ID: MRT4577_128014C.1.pep

SEQ ID NO: 215371 - protein, 95 aa, Zea mays
  Clone ID: MRT4577_128015C.1.pep
KFPDSNFYGNRISDGPIVRQEDYAKSYLPGPIYGAYSFIHIDNDMEMLDSLGQSSKNMAEVAVAANIVERLAKECTEKRQRTRVGIISPYTAQVI

SEQ ID NO: 215372 - protein, 364 aa, Zea mays
  Clone ID: MRT4577_128016C.1.pep
MGSTAGDVAAVVDEEACMYAMQLASSSILPMTLKNAIELGLLEVLQKEAGGGKAALAPEEVVARMPAAPGDPAAAAAMVDRMLRLLASYDVVRCQMEDRDGRYERRYSAAPVCKWLTPNEDGVSMAALALMNQDKVLMESWYYLKDAVLDGGIPFNKAYGMTAFEYHGTDARFNRVFNEGMKNHSVIITKKLLDFYTGFEGVSTLVDVGGGVGATLHAITSRHPHISGVNFDLPHVISEAPPFPGVRHVGGDMFASVPAGDAILMKWILHDWSDAHCATLLKNCYDALPENGKVIVVECVLPVNTEATPKAQGVFHVDMIMLAHNPGGKERYEREFRELAKGAGFSGFKATYIYANAWAIEFIK

SEQ ID NO: 215373 - protein, 120 aa, Zea mays
  unsure (1)..(120): unsure at all Xaa locations
  Clone ID: MRT4577_128017C.1.pep
MRSKFKDEHPFEKRKAEAERIRQKYNDRIPVICEKVEKSDIATIDKKKYLVPADLTVGQFVYVIRKRIKLSPEKAIFIFVDEVLPPTAALMSSIYEEXXKDEDGFLYITYSGENTFGEAL

SEQ ID NO: 215374 - protein, 71 aa, Zea mays
  Clone ID: MRT4577_128018C.1.pep
LYASASYAVRHCDRISYSLRNCAKIDNYSPAQQCMPPLKGNESVVLHVPRVLIVFVFFLIFFFFFFFFFFF

SEQ ID NO: 215375 - protein, 365 aa, Zea mays
  unsure (1)..(365): unsure at all Xaa locations
  Clone ID: MRT4577_128019C.1.pep
MGSTAGDVAAVVDEEACMYAMQLASSSILPMTLKNAIELGLLEVLQKEAGGGKAALAPEEVVARMPAAPSDPAAAAXAMVDRMLRLLASYDVVRCQMEDRDGRYERRYSAAPVCKWLTPNEDGVSMAALALMNQDKVLMESWYYLKDAVLDGGIPFNKAYGMTAFEYHGTDSRFNRVFNEGMKNHSVIITKKLLDFYTGFEGVSTLVDVGGGVGATLHAITSRHPHISGVNFDLPHVISEAPPFPGVRHVGGDMFASVPAGDAILMKWILHDWSDAHCATLLKNCYDALPENGKVIVVECVLPVNTEATPKAQGVFHVDMIMLAHNPGGKERYEREFRELAKGAGFSGFKATYIYANAWAIEFIK

SEQ ID NO: 215376 - protein, 107 aa, Zea mays
  unsure (1)..(107): unsure at all Xaa locations
  Clone ID: MRT4577_12801C.1.pep
MESKLAXXXRVXTPTRGMTIAVRAGRSSPQXDQWQRRPGGTPSRLVARAVDGGXXSXLSXXXRVGDAXVPEGAAPRRXPLXXPXXXSXGXGRPPXAQAPHAPARXAX

SEQ ID NO: 215377 - protein, 57 aa, Zea mays
  unsure (1)..(57): unsure at all Xaa locations
  Clone ID: MRT4577_128020C.1.pep
TELCISLLLLLNEVIGSSCHAMKQLNQKKGCVLLYHPPHYLGHIWIPWANCYXTNFL

SEQ ID NO: 215378 - protein, 100 aa, Zea mays
  Clone ID: MRT4577_128021C.1.pep
GSYKWPAGLPPDDARLLSDRNSLQHAAEGDAALIIVYPRHGATEDRLLAAACTDHVRVATSMAAASASLTRPAALVSSWEEDRICSLLQHRAIDGARWFS

SEQ ID NO: 215379 - protein, 68 aa, Zea mays
  Clone ID: MRT4577_128022C.1.pep
GKKKVFKKFQFHYTGKKTGGGFPGVFKRGNGKKGFIPFRGFPPFKQKNPDSWPLKTQLEKQFCFENPP

SEQ ID NO: 215380 - protein, 46 aa, Zea mays
  Clone ID: MRT4577_128023C.1.pep
VNFLFNFPRLYFLFLRPVCSLLLPAFKYFSQRKTCPSLGPALKFPG

SEQ ID NO: 215381 - protein, 247 aa, Zea mays
  unsure (1)..(247): unsure at all Xaa locations
  Clone ID: MRT4577_128024C.1.pep
TRPNRISEEASEIKXFTEILQRLPKSKGLDLFQKEYIRAVIAGVGLMALQQLGGVNGVLFYASEVFVSAGFSSGNTGTVAMAVVQVPMVGLGVLLMDKAGRRPLLMISAAGTCVGCLLVGLSFLSKEQHWERDLNVLALAGLLVFIGSFSLGMGGIPWVIMSEIFPINMKGSAGSLVTLVSWLGSWIVSYAFNFLLIXSSYGTFFIFAAICGLTVVFVHRLVPETKGRTLEEIQASMNSSLTPFHKY

SEQ ID NO: 215382 - protein, 92 aa, Zea mays
  Clone ID: MRT4577_128025C.1.pep
CWGGLHYLIIGAPPNFKATWSASAVHAYYGEFADTLMFHNASYHGRFLGACRGRQYSLSPPLPLPPYMTKWRLLPHASLGLELVLPFIRSLL

SEQ ID NO: 215383 - protein, 74 aa, Zea mays
  Clone ID: MRT4577_128026C.1.pep
KFLVGRQGNSPFFALPRVLFRRGGYPKFLGGPPEFFPLSQKGKMFSPFQGPGVGGSHFCFRGSPGKKGPFFFPL

SEQ ID NO: 215384 - protein, 121 aa, Zea mays
  unsure (1)..(121): unsure at all Xaa locations
  Clone ID: MRT4577_128027C.1.pep
PLPNRNLLFPKIAKVTGPLKRWGTSPPPWRHAALCFPALVARAVCQGXVERHTLTDLQCLQEVQESPLDTCLHVLNRQLTGSCLCRPFRVNTRLPILCCQHLHNLRPDCPCSNIRYMVTTY

SEQ ID NO: 215385 - protein, 73 aa, Zea mays
  Clone ID: MRT4577_128028C.1.pep
DAWGCLHALGGKERERARERERYSREASRWSSNGDICGVQRAGGGRAGGLVAAGTGRRAQDEASQLVGRFLAA

SEQ ID NO: 215386 - protein, 191 aa, Zea mays
  Clone ID: MRT4577_128029C.1.pep
PFDCRTAQCQAPPTSGTPGSGPGGPSQPLSPPGSSNTPSHPSPPGSSNTPSYPSPPGSSNTPAYPSPPGSSTTPSHPSPPGSSTTPSPPGTSTTPSYPSPPGSSTTPSPPGSSTTPSPPGSSTTPSHPSPPGSSTTPSPPGSSTTPSHPSPPGSSTTPSPPGSSTTPSYPSPSGSSTTPSHPSPPGSSTTP

SEQ ID NO: 215387 - protein, 79 aa, Zea mays
  Clone ID: MRT4577_12802C.1.pep
MVEKGHGSRGRMTVTRSAITKRGRWRQSGQGTGKGDTPKGIVLREGSGPRALLLIRGSKAGPSEGFDSRLGALGPHAYY

SEQ ID NO: 215388 - protein, 124 aa, Zea mays
  unsure (1)..(124): unsure at all Xaa locations
  Clone ID: MRT4577_128030C.1.pep
FFVFSLRPLSGSLSFLFFARAXLVVSGSWVVVLXVLXVFRVFASGFVLGCRVGVACCXVVLSGSCPLRRLLRWGVVGCLCGWVXSPCWGWRPAALGVAPLFRWWVAVSVGASFVCLSFPPGGCA

SEQ ID NO: 215389 - protein, 437 aa, Zea mays
  Clone ID: MRT4577_128031C.1.pep
PFDCRTAQCQPPPTSGPPGSGPGGPSQPLSPPGSSNTPSHPSPPGSSNTPSYPSPPGSSNTPAYPSPPGSSTTPSHPSPPGSSTTPSPPGSSTTPSHPSPPGSSTTPSPPGSSTTPSHPSPPGSSNTPSYPSPPGSSNTPAYPSPPGSSTTPSHPSPPGSSTTPSPPGSSTTPSHPSPPGSSTTPSHPSPPGSSTTPSYPSPPADGNSPKPSMPPSSHGGSAPPSGYQPPPWSQWAPSGQPVGVPPPTEHPGGVWPPHTPTAPGTPGSPSTPTTPGTPGSTFPPTTPGAPGSLPYTPTTPGTPGSTFPPTTPGAPGSLPPTPMTPGSTFPPTTPGAPGSLPPTPTTPGYHPPSPGDHGGSQGHTPPSAPGSSGGVLPFPRADGVAYSSPPPPPFDPAARNPPSFPPVHGVSYSSPPPPLPPVYPVSYASPPPPYKSN

SEQ ID NO: 215390 - protein, 137 aa, Zea mays
  unsure (1)..(137): unsure at all Xaa locations
  Clone ID: MRT4577_128032C.1.pep
GGPAFSVCXLRSXAWGVRSPSALLPHPSLVGVCLQKVAAQQLXPRLLPPVGQVGXAXLAAYLRXRXFLPLGQXAGGGPAXCLRAPRALPCNQLGGGPAAFLLRRRVLPFRLRGGXXFAAFLPPPPGLPFSPPGWGGR

SEQ ID NO: 215391 - protein, 67 aa, Zea mays
  Clone ID: MRT4577_128033C.1.pep
GGGGGEARRPKGNKAVSTGDSQPCSTVSVACASRAKGPMLESLQPVSSYRWRSHVQYLLERPCLPRL

SEQ ID NO: 215392 - protein, 119 aa, Zea mays
  unsure (1)..(119): unsure at all Xaa locations
  Clone ID: MRT4577_128034C.1.pep
TPLRVLLVAIALLDLAASATFTHTSGXCGCQPPTPVYLXPSVHLPLQVKLPCSEHLSPSVHLQAEGQMPPAEHVPPAGHMPPTPCHYTSRPDWHKPHSQSQPCACQQPXPKHCHLQGTC

SEQ ID NO: 215393 - protein, 95 aa, Zea mays
  Clone ID: MRT4577_128035C.1.pep
LSCILEDYGPASVPISQGWLALVLSEILGDNKAQGSKGTTQPEPEKVKNPVDYHNASTATQVLNQLGSAVVKLASTQSNCEPGSDDKDKGPLSDF

SEQ ID NO: 215394 - protein, 54 aa, Zea mays
  Clone ID: MRT4577_128036C.1.pep
MGSLSNNIMVKNGRLKKIGGGTNYRPPKVPPRPNITTNYNCKWLTTRATFYCQT

SEQ ID NO: 215395 - protein, 46 aa, Zea mays
  Clone ID: MRT4577_128037C.1.pep
NVYSPKCANYSSYILMDLFLLVDFIRVVLAACLCSFSGVLLLLTCC

SEQ ID NO: 215396 - protein, 77 aa, Zea mays
  unsure (1)..(77): unsure at all Xaa locations
  Clone ID: MRT4577_128038C.1.pep
VFQNFKKIGAPRPFCTPGGPSPSFKLGPSVCFLSRALRVYTFKRPPLPQIKNEKKINQHKKKKKKKKKKYMKKKKXX

SEQ ID NO: 215397 - protein, 75 aa, Zea mays
  Clone ID: MRT4577_128039C.1.pep
RPNKEKPDMTTVFRGDTKKFNFAWKTRKGGKARCSKDEETRVDKKPIRKPHSERGDFVYSKSNKKKSAGRKSQKR

SEQ ID NO: 215398 - protein, 73 aa, Zea mays
  Clone ID: MRT4577_12803C.1.pep
PGPQSYNLASFREFINNIDDAKWSYTIRLLTYYMYRQGTKAYVIHVQVENHEKMKFVYLATYQALKLSFPKVE

SEQ ID NO: 215399 - protein, 93 aa, Zea mays
  Clone ID: MRT4577_128040C.1.pep
RRRLRHHWIKRRYPPPGMRHDDTADPGRRHKLPRRADEGALIPLQMHRVGTFEGPCRDGTRSRPTPTSYTSRCAISSAMNATLKGAKRHCRHI

SEQ ID NO: 215400 - protein, 468 aa, Zea mays
  Clone ID: MRT4577_128041C.1.pep
SRTVYSDRFIPSRAGSNLALFDLGPSPSPAAAAASSSSSHEAGPAASSGSAPAAASPYCALLRAALFGPDTPDRVASSAAACSSSSSSPGLSPVGTPATGNIFRFKTEVRRNAKRALFSGGEEEEDALFPGIFTTRGAGPRKVPRSPYKVLDAPALQDDFYLNLVDWSSHNVLAVGLGNCVYLWNACSSKVTKLCDLGVDDNVCSVGWAQRGTHLAVGTNQGKVQIWDATRCKRIRTMESHRMRVGALAWSSSLLSSGSRDKSILHHDIRAQEDHVSKLTGHKSEVCGLKWSYDNRQLASGGNDNRLFVWNPHSVQPVLKYTEHTAAVKAIAWSPHLHGLLASGGGTADRCIRFWNTTTNAHLSCVDTGSQVCNLAWSKNVNELVSTHGYSQNQIIVWRYPTMSKLATLTGHTYRVLYLAISPDGQTIVTGAGDETLRFWNVFPSPKSQSSDSLSCVGGTSFVRSYIR

SEQ ID NO: 215401 - protein, 109 aa, Zea mays
  Clone ID: MRT4577_128042C.1.pep
NAHLSCVDTGSQVCNLAWSKNVNELVSTHGYSQNQIIVWRYPTMSKLATLTGHTYRVLYLAISPDGQTIVTGAGDETLRFWNVFPSPKSQSSDSLSCVGGTSFVRSYIR

SEQ ID NO: 215402 - protein, 96 aa, Zea mays
  Clone ID: MRT4577_128043C.1.pep
NKLQRGNTPIKVTIHGQDTHTNMGPSCAPPKILKPEMPGGGTPGHTGRLLLLEHTTTSHIIGGPCALSGLGHLQQRVHWTNIMVLLVKKFDQLLGG

SEQ ID NO: 215403 - protein, 130 aa, Zea mays
  unsure (1)..(130): unsure at all Xaa locations
  Clone ID: MRT4577_128044C.1.pep
RDGPGKGAGAAEXXEPXHNATXXXSNXPXXRHTKXRVRGGGSSRRERSRRSGHGVGAGEAGREQGQGQEEQRGEAXDXAAAAAALRRCCAITAPVRSGAEGLRVPSPCSPHLFSSRSRGEAVTVARAAFP

SEQ ID NO: 215404 - protein, 99 aa, Zea mays
  Clone ID: MRT4577_128045C.1.pep
AHRTVAAHVDDHQHQSICNNHATRPSTIKGSPLFEIARCSLVNRLANPGMALFAGSVHIYQSSGLYRSGHRGGGLQASALSQLIRIRPFVCLLILRVKH

SEQ ID NO: 215405 - protein, 51 aa, Zea mays; identical to SEQ ID NO: 190028
  Clone ID: MRT4577_128046C.1.pep

SEQ ID NO: 215406 - protein, 92 aa, Zea mays
  Clone ID: MRT4577_128047C.1.pep
LVLLKAHSPTAAAVCSSSSQRRRSFFRSLSDSRSARRRRRRRSCLGLSATAGSPRLGVGISGPPTACYQSSGALAFGPTYTNRRPEWTPAAP

SEQ ID NO: 215407 - protein, 319 aa, Zea mays
  Clone ID: MRT4577_128048C.1.pep
VLDAPALQDDFYLNLVDWSSHNVLAVGLGNCVYLWNACSSKVTKLCDLGVDDNVCSVGWAQRGTHLAVGTMLSKVQIWDATRCKRIRTMESHRMRVGALAWSSSLLSSGSRDKSILHHDIRAQEDYVSKLTGHKSEVCGLKWSYDNRQLASGGNDNGLFVWNPHSVQPVLKYTEHTAAVKAIAWSPHLHGLLASGGGTADRCIRFWNTTTNTHLSCVDTGSQVCNLAWSKNVNELVSTHGYSQNQIIVWRYPTMSKLATLTGHTYRVLYLAISPDGQTIVTGAGDETLRFWNVFPSPKSQSSDSLSCIGGTSFVRSYIR

SEQ ID NO: 215408 - protein, 71 aa, Zea mays
  Clone ID: MRT4577_128049C.1.pep
SCCTSSILRLFVPSLRCVPAQPSHKTFRIKKKLAKKMRQNRPIPYWIRMRTDNTIRYNAKRRHWRRTKLGF

SEQ ID NO: 215409 - protein, 95 aa, Zea mays
  Clone ID: MRT4577_12804C.1.pep
ANMTEVFSGADLQALLSDAQLAAVHDVLDSVDASRPEKAPVITDALLKFTASKDRPSVSEQEKSSLGNIYHQFLDSKRSVAAQSRDTKGKRATLA

SEQ ID NO: 215410 - protein, 86 aa, Zea mays
  Clone ID: MRT4577_128050C.1.pep
MAAANGGGAALFSDEELRDVSGLRLREGFVEMMCGCTSRRYGDAVGRLLIYPSGELEISCDCTPGCREEKLTPSAFEKHSGRETAG

SEQ ID NO: 215411 - protein, 140 aa, Zea mays
  unsure (1)..(140): unsure at all Xaa locations
  Clone ID: MRT4577_128051C.1.pep
PRETPHPPPQKPPPEPQPQGPTPKKXPPPPKPPPKGPPKKPPKDTGKTPGPXKPKGPXPXGAPPLPPQSPPPAXXPGLGPPRPGKNPXGAPKAPPTPPQKPRTSLPEGGAPSPXNAPGSPFLKQWGPSPPKFLDFLSGGP

SEQ ID NO: 215412 - protein, 87 aa, Zea mays
  Clone ID: MRT4577_128052C.1.pep
IRTMERHRMRVGALAWSSLLSSRSRDRSILHHDIRAQEDYVSKLTVHKSDDYGSSQCMSAIAGSYGYIASGMHIPLRSMRRARLHLG

SEQ ID NO: 215413 - protein, 120 aa, Zea mays
  Clone ID: MRT4577_128053C.1.pep
MKNVAKCDTWCELQNPANHRVFERKLRPKPSGGGHVCLGVTRVSISPIRVSPPPPPPPPPLPSSPPAEAMPSHKTFRIKKKLAKKMRQNRPIPYWIRMRTDNTIRYNAKRRHWRRTKLGF

SEQ ID NO: 215414 - protein, 61 aa, Zea mays
  Clone ID: MRT4577_128054C.1.pep
NTGSTHRPSGQSEYAPSTSKPASGPTADLRGQQAPTIYHLTSISSIPPGSHCFVPASPEPN

SEQ ID NO: 215415 - protein, 113 aa, Zea mays
  Clone ID: MRT4577_128055C.1.pep
FALATGFVLTPLLNISRNPAPAPKARNCQKSPGDFERKTTSTQAKRILIDLGNKQVMGKTTRPPMPLEMGTGPIPIPRWNHSTRGCFTICLLLRESGAHPQYHTTFSTTTLPG

SEQ ID NO: 215416 - protein, 82 aa, Zea mays
  Clone ID: MRT4577_128056C.1.pep
KKNLQLRFTLLHCVPTGPIPQNNSLKTAVAATALNSGELGRLQHKRLMALPARKQNLYSAKSIRISQYRTSQLDFHSRNQDA

SEQ ID NO: 215417 - protein, 40 aa, Zea mays
  Clone ID: MRT4577_128057C.1.pep
IGLNALFCASHTGGVSSCMRVQSQQPGWFLISLTSKEDYL

SEQ ID NO: 215418 - protein, 33 aa, Zea mays
  Clone ID: MRT4577_128058C.1.pep
GLPRSPITPSDGSPSDEMIALSSFFYMLTRLLV

SEQ ID NO: 215419 - protein, 72 aa, Zea mays
  Clone ID: MRT4577_128059C.1.pep
ISQNTPGSHIFVVGGPYRSAPPYTWGLQTKNHASGTKTSRPRASNKKGWPGPTLSWHIPTGGGGTPIFPART

SEQ ID NO: 215420 - protein, 276 aa, Zea mays
  unsure (1)..(276): unsure at all Xaa locations
  Clone ID: MRT4577_12805C.1.pep
MAASTVSSWFPRSLPESAAPIGLVLLDRCCHIADLTNNTTAESTTSRGLPIKVTFHAAGPPLVSHFCVHCPGLAYRIGGPKIVATDADLALLCVPNNPDCTSXRIGLXDYFVYGPRARWLHRLPNPDPRVLDDPATALISHQDGASYVVAALGVGRPLYHRRALIRYDFDVHMYRSSDSQGWISKRLSVIEFQRDKLIPLPRAVDRLYHETEKTITIGGEHGTVAWVDLWRGIFLWDVLKECPVLPRWPTAXPGRANWKGLLRESNPSFLGDVTIN

SEQ ID NO: 215421 - protein, 223 aa, Zea mays
  Clone ID: MRT4577_128060C.1.pep
TLISLRWPSECLPQRRCSTLSLARQQPFALPPHLPTLAARMSPVPWWPSLAPAPSPSPWTPPTLVLARELPFPVHGTQALLDTPSSARPCSLCRCSPPCRVSSSPAELPQRQPPWQPALHFSLQAPPHWISSICDQRRSLVRLQSQRDTSTSGNSGSPNVSMSRGCSSSSTQVEVLYAAASLGSLRVACVDSICNPVLSICAVPTSSHLASPDLSASLLLVRI

SEQ ID NO: 215422 - protein, 85 aa, Zea mays
  unsure (1)..(85): unsure at all Xaa locations
  Clone ID: MRT4577_128061C.1.pep
PPWMVVGSAAQKWPMEAPAPGVGADDFLFRGTKLRGGGSPFLPFKVFAGEGFFIFFFFLGRLVLPKKKKPXPGKKEREKEEKKRK

SEQ ID NO: 215423 - protein, 123 aa, Zea mays
  unsure (1)..(123): unsure at all Xaa locations
  Clone ID: MRT4577_128062C.1.pep
MMARSPRDGRNGTAVDVAADVGLALPVGVCSVEVGLTITTTPXASSSGGENASSPETTPPLPAAKNSLGGTMGVCGDDDGTAAAVPVCRPKSNAASRCRCSETPPPPGPAILPNIFFSSRFRR

SEQ ID NO: 215424 - protein, 823 aa, Zea mays
  unsure (1)..(823): unsure at all Xaa locations
  Clone ID: MRT4577_128063C.1.pep
MPTAANPAAALPLTLDLEDFKGDFSFDALFGGLVDELLPEYRGEDDAAPAPPPPPPVLGAAPPVFPAVDELLGLFKHSCKELVDLRRQIDKRLQNLKKEVAVQDAKHRKTLGELEKGVDGLFDSFARLDSRISSVGQTAAKIGDHLQSAESQRETASQTIDLIKYLMEFNSTPGXDLMAFXPVRPRYGGHTPHPHTSPLFSDDSRVAEAASIAQKLRSFAEEDVGRHGVSSAVGSANASRGLEVAVANLQEYCNELENRLLARFDAASQRRELSTMAECAKILSQFNRGTSAMQHYVAIRPMFIDVEIMNTDIQVVLGDEGLQADCDSIADGLSTLYKEIADTVRKEAATITAVFPSPNEVMAILVQRVLEQRVTTILDRIIVKPSLASLPPLEGGLLQYLRILAVAYDKTKELAKDLQSIGCGDLDIEGLTESIYVAHKDEYTEFEQASLRQLFQSKMAELRAEAKQQSESTGSIGRAKGASLTTSPQQQISVTVVTEFVRWNEEAITRCTLLFSQPTTVAANVRSIFACLLDQVSQYLTEGLDRARESLNEAAALRDRYVIGTSVSRRVAAAAASAQEVAASAGESSFRSFMIAVQRCTSSVAILQQYFSNTISRLLLPVDGAHPSACEDMGSAVSVVEAAAHKGLLQCIDTVMSEVERLLSSEQKATDYRTPDDGAAPDHRPTNACIRIVAYLSRVLEVAFSALEGLNKQSFLTELGNRLHKGLLNHWQKFTFSPSGGLRLKRDITEYGDFVRSFNAPSIDEKFELLGIVANVFIVAPESLASLFEGTPSIRKDALRFIQLRDDYKTAKIASMLNYIMSE

SEQ ID NO: 215425 - protein, 77 aa, Zea mays
  Clone ID: MRT4577_128064C.1.pep
NYIQVYHDMIFWMHSVHRLLHARDYIFFFFFFLFTGAARTRTPLPQIMTSTLPLGEMVNQRTLQSAMRATDLGHEPS

SEQ ID NO: 215426 - protein, 119 aa, Zea mays
  unsure (1)..(119): unsure at all Xaa locations
  Clone ID: MRT4577_128065C.1.pep
RTRGQISVTVVTEFVRWNEEAITRCTLLFSQXENCASFHLRKKPTTVAANVRSIFACLLDQVSQYLTERLDRARESLNEAAALRDRYVIGTSVSKRVAAAAASAQEVAASAGESSXRSF

SEQ ID NO: 215427 - protein, 218 aa, Zea mays
  unsure (1)..(218): unsure at all Xaa locations
  Clone ID: MRT4577_128066C.1.pep
MPTAANPAAALPLTLDLEDFKGDFSFDALFGGLVDELLPEYRGEDDAAPAPPPPPPVLGAAPPVFPAVDELLGLFKHSCKELVDLRRQIDKRLQNLKKEVAVQDAKHRKTLGELEKGVDGLFDSFARLDSRISSVGQTAAKIGDHLQSAESQRETASQTIDLIKYLMEFNSTPGDLMELSPLFSDDSRVAEAAXIAQKLRSFAXXDXXXHGVSSAVXS

SEQ ID NO: 215428 - protein, 59 aa, Zea mays
  Clone ID: MRT4577_128067C.1.pep
QRVRTGKRSTTSIPSEELLIFGWPAQMLFFATKMAEKAADTACSRLKWGRRLVLLTAHV

SEQ ID NO: 215429 - protein, 186 aa, Zea mays
  Clone ID: MRT4577_128068C.1.pep
PLPWTPVSSASPCRAPLTQPSPMVASRVLGFTASSLPALLWPDSPSSPSRRTASSPTAPCPLFCSAALSARHAPWRLPWPSHRALRYCPCASSSRAEFSPMLTCLCSSLPCHVVIISYRELDPRCHRASRVLVFVVELRLVRCRSSPYRVCSSSPKFGPTSSTRFGGAHRVLHKYFRLATRTSPMS

SEQ ID NO: 215430 - protein, 155 aa, Zea mays
  unsure (1)..(155): unsure at all Xaa locations
  Clone ID: MRT4577_128069C.1.pep
SGRVDGWTRMVYLXXDFASPLAWYIDHWFPCAREGXEVPSNLRIMQWQVCRKKQNKLEFLMPWWDLQLGVSVNQFLPIFASKNSDFRNRALAFLFTHGASEELSSLQVVEAHAFPQHFSEMKTKVGLAPAAIVSSRGSDNSVLMICFRCNARASI

SEQ ID NO: 215431 - protein, 109 aa, Zea mays
  Clone ID: MRT4577_12806C.1.pep
YSTLAALTSKRGMGGRQENELSLLRHAAFRDPICSRPPMPLASLRSPHGTARHGMCGSDGRRRTELACNYLMNRAAPSYSQLTRKCSVCDLKSRQEKTQTPINVTHLFS

SEQ ID NO: 215432 - protein, 73 aa, Zea mays
  Clone ID: MRT4577_128070C.1.pep
FCLSFKETSDTYGQDFIQRNSDKWTKEHNAPHPMTTGRRASFGADSQREGTTGLLSYTRTLQLTAHPFHERTL

SEQ ID NO: 215433 - protein, 56 aa, Zea mays
  Clone ID: MRT4577_128072C.1.pep
INFTIHTTLKTPFLQRTFILLTKNELIYLRQIKIPTQNYAPKLFLTNPIFIKKFLF

SEQ ID NO: 215434 - protein, 138 aa, Zea mays
  Clone ID: MRT4577_128073C.1.pep
IHAVATSVQRSLGVSAEGFDGLGEFVAAESLLALQASRVCAAPHPHPFPPSNASVPIVHHQAGMLRGAIFRLGARHCLHADPCAASSQRVGDVHDFARRDLWPMRSVSLTIVVQCHGSAPVREHVCLCSQLRVRTRVI

SEQ ID NO: 215435 - protein, 219 aa, Zea mays
  unsure (1)..(219): unsure at all Xaa locations
  Clone ID: MRT4577_128074C.1.pep
MSSVTRPQREADFARFPSSTPIVIDNGASTFRIGWAGEAEPRLSFRNVVQRPRHRSTGETVSIVGDTDPSLMKFFDCTRSAVRSPFDDDVVYQFEYMEYILDYGFDRLGVDSEVGHPILMTECECNPSFSRARMSELLFETYGVPSIAFGIDNAFSYKYNQKXLGNCNEDGLAISCEHGXTCHVVPFLKGQPVLRACCRTNIGGFTLLIFLRQLLCLKY

SEQ ID NO: 215436 - protein, 195 aa, Zea mays
  Clone ID: MRT4577_128075C.1.pep
MVKGAHFQDAAVDGGAGGNAEAAMQGGAKRQYKGVRMRSWGSWVSEVRAPSQKTRIWLGSYSTAEAAARAYDAALLCLKGSAAADLNFPVHLPFHVPAAAAMSPKSIQRVAAAAAAASGGATCSPPAPLLRAATATRRRRLALAPRRPAGTLACATARRTTTTWTWTWRATPTRTSPRSRTSRPSSSRLSAWSTP

SEQ ID NO: 215437 - protein, 61 aa, Zea mays
  Clone ID: MRT4577_128076C.1.pep
VVKTPRSPIKGFHVAGDYTKQKYLASMEGAVLSGKLCAQSRVQANTHHGPGCTQSIRLLCC

SEQ ID NO: 215438 - protein, 230 aa, Zea mays
  Clone ID: MRT4577_128077C.1.pep
MQGAGGGAKRQYKGVRMRSWGSWVSEVRAPSQKTRIWLGSYSTAEAAARAYDAALLCLKGSAAADLNFPVHLPFHVPAAAAMSPKSIQRVAAAAAAASGGATCSPPQLQAGAAASAPYSAGGGAGATPPCSYGDASSSSGVSSPETGRNAGLCYGTAHYDDMDMDLAGDADADLAALADIEAFFQSPKCMEYAMMDPCSTFFAPAPVATDAASEWAEEGEIDLWSFSSLN

SEQ ID NO: 215439 - protein, 96 aa, Zea mays
  Clone ID: MRT4577_128078C.1.pep
CWFFDSVFCPDRFCCCFSVFHREITFYSYFRIDAWVTWFVLALAAMILSVFGSMTGFVFLPMCLPVLMDLLLVLLPRRLPSGFIVWVIFVALVYLC

SEQ ID NO: 215440 - protein, 40 aa, Zea mays
  Clone ID: MRT4577_128079C.1.pep
DGQGQRSPPRSPLPKGGLSSCSFAMPTTLADESWSLEYCC

SEQ ID NO: 215441 - protein, 71 aa, Zea mays
  Clone ID: MRT4577_12807C.1.pep
MRRAAAKPGAAKADLQKDPEFSPVLSSRSNIDLKVSSPASSPPLSIYLAATELAVRRARPYGPVWLWSKEA

SEQ ID NO: 215442 - protein, 181 aa, Zea mays
  Clone ID: MRT4577_128080C.1.pep
MGRRMRQAIAALGVACAAAFAVAAADRGLSLPSDRAVVVAPEEISLLNKIANFMWQTDRNSYQHVWPPMEFGWKMVLGSLIGFFGASFGSVGGVGGGGIFVPMLTLIIGFDPKSSTAISKCMITGAAVSTVYYNLKLKHPTLDMPVIDYDLALLIQSMLMLGISIAAGFNGNSPDWVATVL

SEQ ID NO: 215443 - protein, 89 aa, Zea mays
  Clone ID: MRT4577_128081C.1.pep
TKHRYTRESIARRQSKTGLLFIRKGTTWYNCTRWKLFMCAQNSELQLWLNAKPDASCAPKALDDMHGYNRFRFRYSIKLLLQPFLAHLI

SEQ ID NO: 215444 - protein, 43 aa, Zea mays
  unsure (1)..(43): unsure at all Xaa locations
  Clone ID: MRT4577_128082C.1.pep
KKKKKKAXRXKKTIECAKPLFTTNREPLLXRAHPPPLLKPTRF

SEQ ID NO: 215445 - protein, 85 aa, Zea mays
  Clone ID: MRT4577_128083C.1.pep
TCTGEPPENLTHQRLIRPSQANRQKISDELGLRDRHVLMRQIVSHGNDLFRHPESKRTDHAKHIVYLRNHKIIPTPIGNNLNSNL

SEQ ID NO: 215446 - protein, 77 aa, Zea mays
  Clone ID: MRT4577_128084C.1.pep
ALLPTLFPVILLSVCFPEGSDGDGTVYAEGDLISLTFCTTDVTVGLIFVSGLLNLVVAVTSACFLGVFGPLELSTAV

SEQ ID NO: 215447 - protein, 63 aa, Zea mays
  unsure (1)..(63): unsure at all Xaa locations
  Clone ID: MRT4577_128085C.1.pep
XISILRRPAKKPGGLISGMWGTKSPCFTPKIYTGTQRHNKPIDLSAMGDKTCLRYLSPTNKTP

SEQ ID NO: 215448 - protein, 747 aa, Zea mays
  Clone ID: MRT4577_128086C.1.pep
MGSRREEERNEKIIRGLMKLPPNRKCINCNSVGPHREFTHRVKSVSMSKFTTQEVQALEQGGNQRARDIYLKDWDWQRMRLPINTNPDRIREFIRAVYVDKKYAGGSSNKPATESESMKSNDHDMRRPSSYHSYSQSPPYDFQYEDRRYGKQVNTLARRPSDRALFDGKLGNLLFSPGRLRDQMNEDRFANESSGSRFSDFSASSTGDFRNDVLSPSSQETGYSSPSVHHSRNVSADNPQTQKCPNAASQIDFNGVRRPQRTTSSGSFGSFDGSSVSNKSIESGYPPDAPTEKSVHCAVNHQTVPSPEACSTQQYASPSDNHNLIPHKPADLGSQIVATRKPVQHSCAQIENVVPMHAPVQPTTSTPLGLFDQSTVQQPVTSAAPIDLFAGFNEQLPASHNTDGVSSHSVVAKEPAHNVVQKGIMPSAEALATSHAVHQDLFSLSILQEPATPSPSQPIDLFAGFDQHLPHLSTVQKIPSAVPFPANDGWAFFDVQHGLLTSVSNVQGQVPAAFSPSDGIAKGIDQLTLPTSPPNVIGSQNSPAMMDNWSLNAEEVKIPVLNENSQSWNAFGESTQSASNDLFTFNTMSQVEAHQFSMPSGPYVESRIPQDLVRDEPERPTPRDVFSGFNISHVEVVGPSSPSLQPHLGGMVSHPEKSTNPFDMAFESDVDANDMFMDLTSLQETLPDHHTLTDYSGSLTEPWISQNSTMSYIPSGPQGGLSYVAGQDSHMLSSTHQGAFPPRNPFE

SEQ ID NO: 215449 - protein, 36 aa, Zea mays
  Clone ID: MRT4577_128087C.1.pep
MLMRALVFRQVMAILARPDKTSKVRRFWNWYHHNIG

SEQ ID NO: 215450 - protein, 97 aa, Zea mays
  Clone ID: MRT4577_128088C.1.pep
MVSHPEKSTNPFDMAFESDVDANDMFMDLTSLQETLPDHHTLTDYSGSLTEPWISQNSTMSYIPSGPQGGLSYVAGQDSHMLSSIHQGAFPPRNPFE

SEQ ID NO: 215451 - protein, 95 aa, Zea mays
  Clone ID: MRT4577_128089C.1.pep
ALIPKPSIHPRQTCLHPGSCWIPSPTTSLSPSSSSPAYSSATPPPPASLSTNSSNTTSTLNTVDLPRRGTQTPPCRDADPRGRRPLPLRTRRAAT

SEQ ID NO: 215452 - protein, 302 aa, Zea mays
  Clone ID: MRT4577_12808C.1.pep
MADAKQQQAAAPTGVWKTIKPFVNGGASGMLATCVIQPIDMIKVKIQLGEGSAAQVAKTMYANEGFGSFYKGLSAGLLRQATYTTARLGSFRVLTNKAIEANDGKPLPLVQKAFIGLTAGAIGACVGSPADLALIRMQADSTLPAAQRRHYKNAFHALYRITADEGVLALWKGAGPTVVRAMSLNMGMLASYDQSVELFRDKLGAGEIPTVVGASAVSGFFASACSLPFDYVKTQIQKMQPDANGKYPYTGSLDCAVKTFKSGGPFKFYTGFPVYCVRIAPHVMMTWIFLNQIQKFEKKIGI

SEQ ID NO: 215453 - protein, 262 aa, Zea mays
  unsure (1)..(262): unsure at all Xaa locations
  Clone ID: MRT4577_128090C.1.pep
MGSRREEERNEKIIRGLMKLPPNRKCINCNSVGPQYVCTNFWTFICLSCSGIHREFTHRVKSVSMSKFTTQEVQALEQGGNQRARDIYLKDWDWQRMRLPINTNPDRIREFIRAVYVDKKYAGGSSNKPATESESMKSNGHDMRRPSSYHSYSQSPPYDFQYEDRRYGKQVNTLARRPSDRALFDGKLGNLLFSPGRLRDQMNEDRFANESXGSRFSDFSASSTGDFRNDVLSPSSQETGYSSPSVHHSRNVSADNPQPEMS

SEQ ID NO: 215454 - protein, 84 aa, Zea mays
  Clone ID: MRT4577_128091C.1.pep
TQKTGKWCPTNHKPKHPSGIMNFTNYSLSPKKKNQTTQTDRHKCKKKTTTPQTPSQHQGSRHPPSVRPPQGTYAHINRAPRPPF

SEQ ID NO: 215455 - protein, 111 aa, Zea mays
  Clone ID: MRT4577_128092C.1.pep
WNACRPRGVLGSLSVSASLVTEPTPIERRVCVASYTLLWAASVAACLVAAGASGAADAETPPPILEGKEPRREGEGKGEREELARAGAVETVPRSRARAEMVNDDTHAARG

SEQ ID NO: 215456 - protein, 69 aa, Zea mays
  Clone ID: MRT4577_128093C.1.pep
PKSTYPKDGRPRCFYAKHVQPPNYGERHQWEAFVFRGVHITAMILEGTGIPRGTTSKSLGTLAPRNDFL

SEQ ID NO: 215457 - protein, 63 aa, Zea mays
  Clone ID: MRT4577_128094C.1.pep
YNTGVAFRPANPTKHIAKHPKTNHQNKNPPRMASSYQSTTAPRLVRSPSETSSSGAALNLLIA

SEQ ID NO: 215458 - protein, 118 aa, Zea mays
  unsure (1)..(118): unsure at all Xaa locations
  Clone ID: MRT4577_128095C.1.pep
LEPSXARGARNHHFNILCRXEEGGEHGEADHGSGRGPEPTINDRARTGPTAPRGWRHKTKRTAARNWATAIRTWALRPSVQGNPSTTTPVAATRSPVVAAEHISLGDVLPMTMWHPRA

SEQ ID NO: 215459 - protein, 249 aa, Zea mays
  unsure (1)..(249): unsure at all Xaa locations
  Clone ID: MRT4577_128096C.1.pep
MMTAQSVRLVQTPETFPEEEQQQQMKEVNDESTNGLDHLMNPSNPNDLRNHNMDVVSCDSFTENQLLLAEMLLKDPYLLETTKAITGFHVPASTAQVNTGKWLDEGNRVLSDIGREVIRRKGKRMEAMVDVSATRAANLKLRTLDDLVRELDSDIQSLHVPRKIQQRGDDHSTAENLRMVLRYDMEGTHSDANSVWDFGWNRAWDLPVEKNEVVRDLEKNILXGIITDVARELIDVSMRQRHGPWVLCL

SEQ ID NO: 215460 - protein, 102 aa, Zea mays
  unsure (1)..(102): unsure at all Xaa locations
  Clone ID: MRT4577_128097C.1.pep
MEGKEENGRLGANMFSKRQPIXTAAQGTDDKDYKEXPPPAPLFEHGELKXWSFYRACISXYVYTILRLYIXHLSSQCVVLRCTVKQRYRREAGHRLDPSLDM

SEQ ID NO: 215461 - protein, 84 aa, Zea mays
  Clone ID: MRT4577_128098C.1.pep
VTTLGSMDFHRYHRQNPRPSVAPERALALSRPSSYKTLGLATVHSNEQMLRLILLRPTQKTRVETMRNQIGIKSTVIRNLAKNC

SEQ ID NO: 215462 - protein, 109 aa, Zea mays
  Clone ID: MRT4577_12809C.1.pep
FPPLFPPPLMNPMSGGPLLQLKPPRKMLIFSGAPLWGAVLKKIWDQYPVWGPQIFIFILRPKRIKSSSPFGFPPPPLFFGPHCQGLPPKNPPNLGLPLWGNPTPLKGPP

SEQ ID NO: 215463 - protein, 119 aa, Zea mays
  unsure (1)..(119): unsure at all Xaa locations
  Clone ID: MRT4577_1280C.1.pep
ILVFFTXTILSHETTHAXNICPLCKYTXYGPHSPYVKXAHTRLXVNTHHILLFDTISKECFDTTWVHIYGELYITHSKTVHPQSHLYARHLKTYPKDIFVFNIYGTALYNITFYKTHVY

SEQ ID NO: 215464 - protein, 203 aa, Zea mays
  unsure (1)..(203): unsure at all Xaa locations
  Clone ID: MRT4577_128100C.1.pep
PTRPGIPSGGGGGHGAXPVGDGGSAERWRAEASRAFQHYLDRAAPHTAGRWAGTLVAAAVYALRVYYVRGFYVVTYGLGIYLLNLLIGFLSPMVDPELEALEAGPGLPTRGSEEFKPFVRRLPEFKFWYAITKAFCIAFVMTFFSVFDVPVFWPILLCYWIVLFVLTMKRQIMHMVKYKYVPFSFGKQRYGGKKRPGASASKE

SEQ ID NO: 215465 - protein, 152 aa, Zea mays
  unsure (1)..(152): unsure at all Xaa locations
  Clone ID: MRT4577_128101C.1.pep
MHLNSTDNPVLIIKQIHKIAQDTLVLXIPMXRNEFNKVCGLDNTKQIWNTFKISHEGNDATMISKMXLVEDELGRVTMIRGEKPTQTYNRLKTLANKIQSYGSTKWTDHDVVXLMLRSFIVIDPHLVNLIHDHHRYTKMTPKEILGKFMSGC

SEQ ID NO: 215466 - protein, 246 aa, Zea mays
  Clone ID: MRT4577_128102C.1.pep
MAAKRLYNGYEQDGDQPNDKRMRRLPSFSTVIREAMMQKHMQSLFRCLEPLLRRVVKEELHAGLTLMQSPRYIERLPAERAAWRLAFRTPPQLPIFTGSKIEDEAGNPLEVILVDADTGSPAALPQALRVELVPVYGDFPQDGREDWSDDEFQRNVVKERAGKRPLLTGDVSLALRDGRATVGELQFTDNSSWVRCRKFRIAARVVPGAWDGARVQEAMTEAFIVRDHRGELYRRHYPPVLADDVW

SEQ ID NO: 215467 - protein, 106 aa, Zea mays
  Clone ID: MRT4577_128103C.1.pep
NICKSVESLTWGCIMICDQRPMKITMANPCLPDDQPNEIPRSVVHRQLVEIFHGPVLETDTVDDNQGVPQGRLEGNELTDQTCHETAAQSDVSLQNQTSDPGAIYR

SEQ ID NO: 215468 - protein, 59 aa, Zea mays
  Clone ID: MRT4577_128104C.1.pep
QGEGPKRTPPAQRSRGAPRGREALKQNPKVGPEGEPCFGSFQVFTKDKAHTDKATHGNA

SEQ ID NO: 215469 - protein, 53 aa, Zea mays
  Clone ID: MRT4577_128105C.1.pep
VASCSPTNIDRQTSRLQSISRKGSYHLSISESKYNTQRVVHMIHVASCELDHS

SEQ ID NO: 215470 - protein, 156 aa, Zea mays
  Clone ID: MRT4577_128106C.1.pep
MEDVVAVVASLSAPPAPAFSPAAAGLTLIAAAVADPIAAVVVGAMEGVSVPVTVPPVRTASAVDDDALAPGEEGGDASLAGSPCSVVSDCSSVASADFEGVGLCFFGAAAGAEGGPMVLEDSTASAATVEAEARVAAGGRSVFAVDCVPLWGYTSI

SEQ ID NO: 215471 - protein, 135 aa, Zea mays
  unsure (1)..(135): unsure at all Xaa locations
  Clone ID: MRT4577_128107C.1.pep
MKEILHMQGGQCGNQIVAKFCEVVCDEHGIDPTGRYTXGSFDLEVERVNVYYNESCCVRFDTRAAVMDLEPETMDSVRTGPYGQIFRPDNFVLXQYGAXHNWADVQYTEGADLIDSVLYVERNESDNXHCLLGLQ

SEQ ID NO: 215472 - protein, 134 aa, Zea mays
  Clone ID: MRT4577_128108C.1.pep
GKVIQWNGYRVFGVLAMSRSIGDRYLKPWIIPVPEVTIVPRAKDDECLILASDGLWDVISNEKVCEVARKRILLWHKKNGTSSSSAPRVGDSADAAAQAAAECLSKLALQKGSKDNITVVVVDLKAQRKFKSKT

SEQ ID NO: 215473 - protein, 456 aa, Zea mays
  unsure (1)..(456): unsure at all Xaa locations
  Clone ID: MRT4577_128109C.1.pep
FGTRAELTLIAAAVVGAMEGVSVPPVRTASAADDDALAPEGEGGDASLAGSPCSVASDCSSVASADFEGVGMGFFGAAAGAEGGLGPMVFEDSAASAATVEAEARVAAGGRSVFAVDCVPLWGYTTICGRXRPEMEDAVAIVPRFFDLPLWLLTGNAMVDGLDPMTFRLPAHFFGVYDGHGGAQVANYCRERLHVALLEQLSRIEETACAANLGDMEFKKQWEKVFVDSYARVDDEVGGNTMRGGGEEAGTSDAAMTLVPEPVAPETVGSTAVVAVICSSHIIVSNCGDSRAVLCRGKQPVPLSVDHKPNREDEYARIEAEGGKVIQWNGYRVFGVLAMSRSIGDRYLKPWIIPVPEVTIVPRAKDDECLILASDGLWDVMSNEEVCEIARKRILLWHKKNSTSSSSAPRVGDSADSAAQAAAECLSKLALQKGSKDNITVVVVDLKAQRKFKSKT

SEQ ID NO: 215474 - protein, 71 aa, Zea mays
  Clone ID: MRT4577_12810C.1.pep
FYIYIYLYHCHCNICREPARAGGGERHTESQGTCYLNVPFPRLTLPHFTEFRHAVCLASVGSLTKTKGLTA

SEQ ID NO: 215475 - protein, 420 aa, Zea mays
  unsure (1)..(420): unsure at all Xaa locations
  Clone ID: MRT4577_128110C.1.pep
LIITCVIPLVGAQGYAQVKFLKGFSEDAKEMYEDASQVATDAVGSIRTVASFCAEKRVVAAYSDKCEALRKQGIRSGVVGGLGYGFSFLMLFFTYGLCFYVGAQFVRQGKTTFPDVFKVFFALVLAAIGVSQASALASDATKARDSAISIFSVLDRESKIDSSSGDGMTLEVVSGNIDFSNVSFKYPLRPDVQIFSDFTLRIPSGKTVALVGESGSGKSTIIALLERFYDPDSGXISLDGVEIKSLRVSWLRDQMGLVGQEPVLFNDTIRANITYGKHGGATEEEVVAVAKAANAHEFISGLPQGYDTMVGEKGIQLSGGQKQRVAIARAIVKDPRILLLDEATSALDAESERVVQDALDRVMVSRTTLVVAHRLSTIKGANVIAVLREGKIVERGRHEALMRISGGAYASLVELRSKTE

SEQ ID NO: 215476 - protein, 51 aa, Zea mays
  Clone ID: MRT4577_128111C.1.pep
RLELCPDCSSAHHHQPTTPSSHITIHRSAAATQGRPLGSLEHTSSSLASVA

SEQ ID NO: 215477 - protein, 106 aa, Zea mays
  unsure (1)..(106): unsure at all Xaa locations
  Clone ID: MRT4577_128112C.1.pep
AVRGPXPLNLGDAPGLTAGHSWRVIKRVLYSWHATDPTERLRCPYCCLQIPVDEERFVGGLQRRPPHPLRTGSPLVMKYTLTWCDTCCWLSGIMWSLACGRQCVTS

SEQ ID NO: 215478 - protein, 59 aa, Zea mays
  Clone ID: MRT4577_128113C.1.pep
KGGVKRTVQGGAHLAIGMGKCLEKGTGGECSVIGPVAKKRYFAKRLRRGKGRVFLAKRC

SEQ ID NO: 215479 - protein, 82 aa, Zea mays
  Clone ID: MRT4577_128114C.1.pep
SPSECLEMSVFFFDELFMRFDFFPRLNVSSPSVCVIFVISSVPSNISNSGRSLEPLERFKALSCAFAVARSRRSAPASGFFP

SEQ ID NO: 215480 - protein, 57 aa, Zea mays
  unsure (1)..(57): unsure at all Xaa locations
  Clone ID: MRT4577_128115C.1.pep
LKANALTNWRMTMLCMFALFVHAIGSGKGPIENLSKHTGYPVXKNAWSYCRNFVPCE

SEQ ID NO: 215481 - protein, 363 aa, Zea mays
  Clone ID: MRT4577_128116C.1.pep
MHRRQCALLRPARGRPATRQGKGRRSTARAEMSFFFRMASRLRPSTPEEVVRSIKDSFLALHTRTHAKALEEVEKNMSSLRLLIFGDGEVEPNEEQVLQITLEICKEDVISLIVQDLPSLGWGVRKDLAICWCILLRQKVDETYCCVQYLENHLELLDFLVGCYKNLDIALNCGNMLRECIKYPTLAKYILESGSFELFFEYVELPNFDIASDALNTFKDLLTKHEVVVAEFLSSHYEQFFELYSRLLSSTNYVTRRQAIKFLSEFLLETHNSQIMKRYIVEVRFLNIMINLLKDSSKNIRICAFHVFKVFVANPNKPRCIVVALLDNRREVLKLLHNLPSSKGDDELDEEKDLIIQEIQKLA

SEQ ID NO: 215482 - protein, 40 aa, Zea mays
  unsure (1)..(40): unsure at all Xaa locations
  Clone ID: MRT4577_128117C.1.pep
VKILLLLLYVSIIPLCHIAIPTSCLPTLKXPPPPPPXAKK

SEQ ID NO: 215483 - protein, 78 aa, Zea mays
  unsure (1)..(78): unsure at all Xaa locations
  Clone ID: MRT4577_128118C.1.pep
DLSGLLIXHSSLEDAEGINKLTCVAXEQGKNKDTFLKNFMLGKLEECFHLLIESNXRILEAGVMDRDYHTNQDPDIET

SEQ ID NO: 215484 - protein, 94 aa, Zea mays
  unsure (1)..(94): unsure at all Xaa locations
  Clone ID: MRT4577_128119C.1.pep
MANGGGYVWALAAGFNAALAAISAKFFXPLCLKALSSLQATVTNFAANFISSGLAGCFLFDEPLPSKWFAGASLIIFGVFILSKSSIEEKQNSD

SEQ ID NO: 215485 - protein, 157 aa, Zea mays
  unsure (1)..(157): unsure at all Xaa locations
  Clone ID: MRT4577_12811C.1.pep
LRPSXXLFXSRAVLXXRCRWPAXGXRLFXXXXXGAXAGAXXARXGXAXXGGRAAGVGAVXXAAXRRVARXLXXXRLLRAPVGAXXRRGRPPPPARRGXRRXLRRAXLLRRRAARARXRXXRRXGXGXGLRXRPRXWLXLAPRPPSFXRGSLAAPCAR

SEQ ID NO: 215486 - protein, 107 aa, Zea mays
  Clone ID: MRT4577_128120C.1.pep
QRDTRTYGGSEAEAGILSVLPLPGGGVRQKQESWPVVSPRASGVVKIVYLQRNSIQRNSSNTYRLPGYLTNFSKTQTGRTITLTSTKARDPDLNQGMESHATRKRYE

SEQ ID NO: 215487 - protein, 114 aa, Zea mays
  Clone ID: MRT4577_128121C.1.pep
MANGGGYVWALAAGFNAALAAISAKFFSTLLLKYGMVILFNVTMWGCYVNSLKALSSLQATVTNFAANFISSGLAGCFLFDEPLPSKWFAGASLIIFGVFILSKSSIEEKQNSD

SEQ ID NO: 215488 - protein, 37 aa, Zea mays
  Clone ID: MRT4577_128122C.1.pep
QVLEALDAFLSRTICQEKKREMVASAFEEVKSGFQHP

SEQ ID NO: 215489 - protein, 196 aa, Zea mays
  Clone ID: MRT4577_128123C.1.pep
MEASSLALVAAVLLLSSTLAASDFCVCSSDQPTAVLQKAIDFACGPQGGADCTAILQGGGCYSPNTVAAHCSWAANSYYQNNKARGATCDFGGAAAVSTTDPSFSGCTFASSATSAGAGTGTAGTTTGTTTAGGATTGTLSPGVGIGGLNGTGMGGSTGLGPADNTLDAAAPGLLPGAASLAAAAAALSLLALLQH

SEQ ID NO: 215490 - protein, 175 aa, Zea mays
  Clone ID: MRT4577_128124C.1.pep
VRALGIRFDKCNGDLYIADAYFGLSKVGPEGGLATPLATEAEGVRFNFTNDLDLDADGNVYFTDSSVLYQRRHFMQLVFSGDASGRLLKYNPETKETTVLHRNLQFPNGVSLSKDGSFFVFCEGSRGRLSRYWLKGEKAGTVDLFAILPGFPDNVRTNDKGEFWVAIYCRRSAYA

SEQ ID NO: 215491 - protein, 117 aa, Zea mays
  Clone ID: MRT4577_128125C.1.pep
SPPPRPKKKPPRPPFRNPPLPARGAILSISRPARFRFWNEGSALTPMHLSWLPLLPPPPCLFSFSPRILCALGLGLHFHSAQVFAHAFPRPWFTPPYPPPVCLPDPARTSRPGPPPP

SEQ ID NO: 215492 - protein, 87 aa, Zea mays
  unsure (1)..(87): unsure at all Xaa locations
  Clone ID: MRT4577_128126C.1.pep
MRPSLMRSTSQLLHRHYYYSASLQTHLKLAILXHRASIGHPLSLLMKLNPLIYFLSLYYIACTPGVAADVSHINFPSLVKSFMADEQ

SEQ ID NO: 215493 - protein, 56 aa, Zea mays
  Clone ID: MRT4577_128127C.1.pep
IIWLNFKMAAYPIIIIGQEIITQNMMTLIWHKLSQLSSWQILSKAKLVQPIPGCHS

SEQ ID NO: 215494 - protein, 87 aa, Zea mays
  Clone ID: MRT4577_128128C.1.pep
RSPSSSKSHAKSLHCPPIHNGHTGITLERPNLLTLQDITLSTRGSIPDRASLSPSQHCTTLMAFDTHPELEHYARKITLLRILRPLT

SEQ ID NO: 215495 - protein, 186 aa, Zea mays
  unsure (1)..(186): unsure at all Xaa locations
  Clone ID: MRT4577_128129C.1.pep
EAVSLQRGVVTVVEAEVDCELASSRGQMCNIPYGIYDLHGGLAEVLSLETWNSCLTEDDRLRLAAYLPDMEQQDFVTTMKELFRGCXMFFGSPVXKFFSWMSGLYSPXVSQARELLMMFQRRRHYHFLKWYHDDMVAKFASMSNLLRSSDTSATLGEKLPISRRHVYEKRPCVSLSSTIPPVTIKD

SEQ ID NO: 215496 - protein, 204 aa, Zea mays
  Clone ID: MRT4577_128130C.1.pep
MGIVKIGSREPAARSGYSCGGEDLTREDRMLLQSFPDPESLGSDQAEVDCELASSRGQMCNIPYGIYDLHGGLAEVLSLETWNSCLTEDDRLRLAAYLPDMEQQDFVTTMKELFSGDAMFFGSPVKSFFHGLSGGLYSPQVSQARELLMMFQRRRHYHFLKWYHDDMVAKFASMSNLLRSSDTSATLGESFPSRASTYTRSVFH

SEQ ID NO: 215497 - protein, 177 aa, Zea mays
  unsure (1)..(177): unsure at all Xaa locations
  Clone ID: MRT4577_128131C.1.pep
CKPFFXQRLNTQVGTLGLNMGSGIHMTLXAPFQSLTVEIYNTWARASPPCXCLEXQSXXNKRRXVGVXXPRPPRGGEXCAFYGXXGYRGLSSLRPPPLWLSRTQXLXXXSXXXXXPRPPPQPSAGGXPRRKDEREDRGGAEXGEXGXXXXAFXXRGGXXXRGSGSXAXWPMHRGRGR

SEQ ID NO: 215498 - protein, 1448 aa, Zea mays
  Clone ID: MRT4577_128132C.1.pep
MSGEHAKKEIMTGGDKSTSHRKAPSGESGNKMKGSPSHAKSHRSGDKKKKMKKVVYYETDSSSPSTSGSDTPSVTSKRHERKKFREEPQAMYNRIKTLVNQVRNLRSTKWDDHEMVKAILRSLVFCNPTQVQLIRGDPRYKLMCPEEVIGKFVSFELMIKGSKQIVEQGGTSTPEVQPVAFKVTEEKKEESTSSRLPIDASKLDNEEMALIIKSFCQILKQRKGRDYKPRSKKVCYKCGKTGHFIAKCPISSASDRGDDKKVRRKEKKKYYKKKGGDAHVCREWDSDESTTDSSSNEDAANIAVTKGLLFPNVGHKCLMAKDGKKKKVKSRASTKYTTSSDEGSSSEDEDDLLALFANLNMQQKEKLNELIGAIHEKDELLDSQEEFLIKENKKLVKVKNAYAQELEKCEKLISELSICHDTISNLRIENAKLIAKVEKLNVCDDSLVNLKNDNASLIAKIDKLNESISSLKIENDKLISKAKDLNVCNVSISNLRNENAMLHAKIDELNACKPSTSTVDHVSICMRCRDINVDAIYDHLALIKQQNDHITQLTSKINEHEIENEKFKFARSMLYNGRRPGINDGIGFQQGDNVKLNPPKILSNFVKGKDPMAQDNEGNILYPAGYPEHKIRRIHAKKTHSISHHAFMYKSEASSSRHSTHVKMPKKKSLVASNDHNISFKTFDASYVLTNKSGKIVAKYVGDKHKGCKTCVWVPKVYESKGSSWIIDSGCTNHMTGAKRMFSSYEKNEDAQRAITFGDGNQGLEKSQTQETLKGFLRRAQNEFGLRIKKIRSDNGTEFKNSQIEGFLEEEGIKHEFSSPYTPQQNGVVETKNRTLLDMVRTMLDEYKTPDRVFGSKCFILVKRGRKFKFAHKAVEGFLLGYDSNTRAYRVFNKSTGLVEVSCDIVFDETNGSQVEQASPPTQDEDQAQDDENEDQEDEPPQKEDNDQGGDNDDQDKEDGQEVQGQRPRHPRVHQAIQRDHPVNSILGDIHKGVTTRSRVAHFCEHYSFVSSIEPYRVEDTLRDSDWVLAMQEELNNFTRNELYQMDVKSAFLNGPIKEEVYVEQPPGFEDSEYPNHVYKLSKALYGLKQAPRAWYECLRDFLITNGFKVGKADPTLFTKTIANDLFVCQIYVDDIIFGSTNKSTCEEFSRIMIQKFEMSMMGELKYFLGFQVKQLQEGTFISQTKYIQDILTKFGMKDAKPIKTPMGTNVHLDLDTGGKSIDQKVYRSMIGSLLYLCASQPDIMLSVCMCARFQVDPKEVHLRAVKRILRYLVHTPKFGLWYPKGSTFDLIGYSDVDWAGCKIDRKSTSGTCQLLGRSLVSWASKKQNSVALSTVKAEYIAAGHYCAQLLWMRQTLRDYGYKLSKVPLLCDNESAICMVDNLVEHSRTKHIAIRYHFLRDHQQKGDIEIAYVSTKEQLADIFVKPLDEKTFTKLRNELNILDSRNFD

SEQ ID NO: 215499 - protein, 49 aa, Zea mays
  Clone ID: MRT4577_128133C.1.pep
RIRLEVTRSNFMACYSYYASGMSTSAHRRLPLIITRSAFMIAFPYCTSQ

SEQ ID NO: 215500 - protein, 1699 aa, Zea mays
  unsure (1)..(1699): unsure at all Xaa locations
  Clone ID: MRT4577_128134C.1.pep
MSGELAKREMETGDKPATSHGSTSSEESRNKRKEKKNSSNKGKGKEKKSSSHKSDRRGDKHKRMRKVVYYETNSSSPSTSDSDAPSVTSKRQERKKYSKIPLRYPHVSKRTPLLSVPLGKPPVFDGGDYNMWSDKMRHHLTSLHTSIWNVVEFGVQVPSVGDEDHDSDEAAQIHHFNSQATTILLASLSREEYNKVQGLKSVKEIWDVLKTAHEGDEVTKITKRETIEGELGRFMLHQGEDPQAMYNRLKTLVNQVRNLGSEKWDDHEMVKVILRSLVFLNPTQVQLIRDDPRYKLMSPEEVIGKFVSFELMIKGSKKIIEQGTSFTPEAQPVAFKATEEKKEESTSSRQPIDASKLDNEEMALIIKSFRQILKQRRGKDYKPRSKKVCYKCGKPGHFIAKCPISSDSDRGDDKKGKRREKKRYYKKKGGDAHVCREWDSDESSTDSSSDEDTANIAVTKGLLFPNVGHKCLTAKDGKRKKVKSKSSTKYESSSDEEDSLRTLFANLNMEQKEKLNELISIIHEKDDLLDSQEDFLIKENKKHVKVKNAYALEVEKCEKLSSELSTCHETINNLRNENVKLIAKVDSHVCNASTSNPRDDNVDLLARIDELNVSLASLRIENEKLLAKAKDFNVCNITISNLRSENDILHAKVVELKSCKPSTSTVEYTAICTRCRDVDVNAIHDHMALIKQQNDHIAKLDAKIAEHNLENEKFKFARSMLYNGRRPGIKDGIGLQRGDNVKINAPPKRLSNFVKGKAPIPQDNEGYILYPSGYPESKIRRIHSTKSHSGPNHAFMYKGEKSSSRQPTHAKLPKRKTPSASNDHDISFKTFDASYVLTNKSGKVVAKFVGGKYKGSKTCVWVPKVLVSNAKGPKTVWVYASGGSSWIIDSGCTNHMTGEKEMFSSYEKNQDPQRAITFGDGNQCVVKGLGVTVFRRSDDSIAFKGVLEGQLYLVDFDRAELDTCLIAKTNMGWLWHHRLAHAGMKNLHKLLKGEHILGLTNVHFEKDREKSQTQETLKGFLRRAQNEFDLRIKKIRSDNGTEFKNSQIEGFLEEXGIKHEFSSPYTPQQNXFWAEAVNTACYAINRLYLHRILKKTSYELLTGRKSKFAPKTVEGFLLGYDSNTRTYRVFNKSSGQVEVSCDVVFDETNGSQVEQVDLDEIGDEEAPCTALRNMSIGDVCPNESEESPNAQDQPSSSTQASPPTQNEDEGGDANDQDKEDEEQRPPHPRVHQAIQRDHPVDTILGDIHKGVTTRSRVAHFCEHYSFVSSIEPHRVEEALQDSDWVVAMQEELNNFTRNEVWHLVPRPNQNVVGTKWVFRNKKDEHGVVTRNKARLVAKGYSQVEGLDFGETYAPVARLKSIRILLAYATYHGFKLYKMDVKSAFLNGPIKEEVYVEQPPGFEDSEYPNHVYKLSKALYGLKQAPRAWYECLRDFLITNGFKVRKADPTLFTKTLDNDLFVCQIYVDDIIFGSTNESTCEEFSRIMTQKFEMSMMGELKYFLGFQVKQHQEGTFLSQTKYTQDILSKFGMKDAKPIKTPMGTNGHLDLDEGGVKGSHLANKKTKYWVQQKSKGTTEGTSGMAHRTVRCATGQCPVHQRTPSRTRHLRENPEALRYNSPDCPVYTGQCPVLQGRAALELASFGNSQRLVRYNSPDMSGVHRTVRCDIETTDTSAPTATCSALNARQHAQKSDPPMLAHRTL

SEQ ID NO: 215501 - protein, 1402 aa, Zea mays
  Clone ID: MRT4577_128135C.1.pep
MSGDHAKKEMETGEKPTTSHGSVSLEESRTKRKEKKKDSSKRKEKKKDSSKGKEKSSSHKPHRSEDKKKRMRKVVYYETDSSSASTSGSDATSVTSKRQERKKYSKIPLRYPRISKHTPLLSVPLGKPPTFDGEDYARWSDLMRFHLTSLHKSIWDVVEFGAQVPSVGDEDYDEDEVAQIEHFNSQATTILLASLSREEYNKVQGLKSAKEVWDVLKTAHEGDELTKITKRETIEGELGRFRLRKGEEPQNMYNRLKTLVNQVRNLGSKKWDDHKMVKVILRSLIFLNPTQVQLIRGNPRYTLMTPEEVIGNFVSFECMIEGSRKINKLDDPSTSEAQPVAFKATEEKKEESTPSRQPIDASKLDNEEMALVIKSFRQILKQRRGKDYKSRSKEVCYKCGKPGHFIAKCPLSSDSDRDNDKKGKRREKKRYHKKRGGDAHVCREWDSDESSTDSSSDEDAANIAVTKGLLFPNVGHKFLMAKDGKKKKVKSKSSTTYESSSDDNASDEEDNLRTLFANLNMEQKEKLNELISAIHEKDDLLDSQEDFLIKENKKHVKVKNAYALEIEKCEKLSSELSTCHVTIYNLRNENANLLAKVDSHVCNVSITNSRNNDDDLLARIEELNISLASLRIEKEKLLAKAKDFDVCNATISDLRTKNDMLHAKVVELKSCKPSTSIVEHVSICTRSKLDAKIAEHYLENENFKFARSMLYNGRGPGIKDGIGFQRGDNVKLNAPPKRLSNFVKGKAPMPQDNESYILYPAGYPEDKIRRIHSRKSHSGPNHAFMYKGETSSSRQPTRAKLPKKKTPSASNEHSLSFKTFDASYVLTNKSGKVVAKFVGGKHKGSKTCVWVPKVLVSNAKGPKTVWVYASGGSSWIIDSGCTNHMTGEKKMFSSYEKNKDPQRAITFGDGNQDSLDYNLLSVSQLCKMGYNCLFTDIGVTIFRRSDDSIEFKGRKSKFAPKTVEGFLLGYDSNTRAYRVFNKSTGQVEVSCDVVFDETNGSQVEQVDLDEIGIEEAPCIALRNMSIGDVCPKEPEEPSNAQDQPSSSTQASPPTQNEDEAQVDEVEDQANELPQDDGNDQGGDANNQEKEDEEQRPPHPRVHQAIQRDHPVDTILGDIHKGVTTRSRVAHFCEHYSFVSSIEPHRVEEALQDSDWVVAMQEELNNFTRNEVWHLVPRPNQNVVGTKWVFRNKQDEHGVVTRNKARLVAKGYSQVEGLDFGETYAPVARLESIRILLAYATYHGFKLYQMDVKSAFLNGPIKEEVYVEQPPGFEDGEYPNHVYKLSKALYGLKQAPRACRIMTQNFEMSMMGELKYFLGFQVKQLQEGTFISQTKYTQDILNKFGMKDAKPIKTPMGTNEHLDLDTGGKSVDQKPRQGPTRQSNPVARWTAKLCQQPFPPENL

SEQ ID NO: 215502 - protein, 1707 aa, Zea mays
  unsure (1)..(1707): unsure at all Xaa locations
  Clone ID: MRT4577_128136C.1.pep
MSGDHAKKEMETGEKPTTSYGSTSSEESRTKRREKKKSSSNKGKEKKSSSHHKEKKEKSSSHKPHRKGDKHKRMRKVVYYETDTSSTSTSDSDAPSVTSKRQERKKYSKIPLRYPRISKHTPLLSVPLGKPPTFDGEDYARWSDLMQFHLISLHKGIWDVVEFGVQVPSIGDENYDEDEVAQIEHFNSQAATILLASLSKEEYNKVQGLKNAKEIWDVLKTAHEGDELTKITKRETIEGELGRFRLHKGEEPQHMYNRLKTLVNQVRNLGSKKWDDHEVVNVILRSLIFLNPTQVQLIRGNPRYTKMTPEEVIGHFVSFECMIEGSRKINELGDPSEAQPVAFKATEEKKEESTPSRQPIDASKLDNEEMALVIKSFRQILKQRRGKDYKSRSKKVCYKCGKPGHFIAKCPISSDSDRGDDKKGRRKEKKRYYKKKGGDAHVCREWDSDESSSDSSDDEDAANIAVTKGLLFPNVGHKCLMAKDGKKKKVKSNSSTKYESSSDDNASDEEDNLRILFANLNMEQKEKLNELISAIHEKDDLLDSQEDCLIKENKKHVKVKKAYALEVEKCEKLSSELSTCREMIDNLRNENAILNAKVDSHVCNVSIPNLRDDNIDLLAKIDELNASLASLRLENENLIAKAKNFDVCNATISDLRTKNEMLHAKVVELKSCKPSTSNLEHVSICTKCRDIDVNAILDHMALIKQQNDHIAKLDAKIAEHNLENEKFKFARSILYNGRRPGIKDGIGFQRGDNVKLNAPPKNLSNFVKGKAPMPQDNEGYILYPAGYPESKIRKIHSRKSHSGPNHAFMYKGETSSSRQPTRAKLPRKKISNASNEHSIAFKTFDASYVLTNKSGKVVAKFVGNKHKGSKTCVWVPKVLVSNAKGPKTVWVYASGGSSWILDSGCTNHMTGEKRMFSSYEKNQDPQRAITFGDGNQGVTVFRRSDDSIAFKGVLEGQLYLVDFDRAELDTCLIAKTNMGWLWHRRLAHVGMKNLHKLLKGEHILGLTNVHFEKDRICSACQAGKQVGVHHPHKNIMMTDRPLELLHMDLFGPIAYISIGGSKYCLEKSQTQETLKGFLRQAQNEFALRIKKIRSDNGTEFKNSQIESFLEEEGIKHEFSSPYTPQQNGVVERKNRTLLDMARTMLDEYKTPDRFWAEAVNTACYAINRLYLHRILKKTSYELLTGKKPNISYFRVFGSKCFILIKRGRKSKFAPKTVEGFLLGYDSNTRAYRVFNKSTGLVEVSCDVVFDETNGSQVEQVDLDEIGEEQAPCIALRNMSIGDVCPKESEEPPSTQDQPSSSMQASPPTQNEDEAQNDEEQNQEDKPPQDDSNDQGGDTNDQEQEDEEEPRPPHPRVHQAIQRDHPVDTILGDIHKGVTTRSRVAHFCEHYSFVSSIEPHRVEEALQDSDWVVAMQEELNNFTRNEVWHLVPRPNQNVVGTKWVFRNKQDEHGVVTRNKARLVAKGYSQVEGLDFGETYAPVARLESIRILLAYATYHGFKLYQMDVKSAFLNGPIKEEVYVEQPPGFEDSEYPNHVYRLSKALYGLKQAPRAWYECLRDFLIANGFKVGKADPTLFTKTLENDLFVCQIYVDDIIFGSTNESTCEEFSRIMTQKFEMSMMGELKYFLGFQVKQLQEGTFISQTKYTQDILAKFGMKDAKPIKTPMGTNGHLDLDTGGKSVDQKXFKPSHRYIERELESSAKKKASTP

SEQ ID NO: 215503 - protein, 184 aa, Zea mays
  Clone ID: MRT4577_128137C.1.pep
MPPAPPMSSPAPWYILAMMGLQRLSSSFILSSNSSASASWLASSQLMAASMASSIFFLSSAGSLDAIFSSLIVLRKVEAKNSLENYSYNMRNTIKDEKIASKLPADDKKKIEDAIDAAISWLDANQLAEADEFEDKMKELESLCNPIIAKMYQGAGEDMGGAGGMDEDAPAGSGGPGPKIEEVD

SEQ ID NO: 215504 - protein, 1712 aa, Zea mays
  Clone ID: MRT4577_128138C.1.pep
MSGELAKKEMETGDKPATSHGKASSGESHNKEKKKEKKKEKKTSSHKSHQSGDKIKKMRKVVYYETDTSSPSTSGSDAPSITSKRHERKKFSKIPLHYPRTSRHTPLLSVPLGKPPTFDGEDYARWSDLMKFHLTSLHKSIWNVVEFGAQVPSVGDEDYDEDEVAQIEHFNSQATTILLASLSREEYNKVQGLKSAKEVWDVLKTAHEGDELTKITKRETIEGELGRFRLRQGEEPQDMYNRLKTLVNQVRNLGSKKWDDHEVVKVILRSLIFLNPTQVQLIRGNPRYTLMTPKEVIRNFVSFEFMIQGSRKINELDGPSTSEAQPIAFKATEEKKEESTPSRTPIDASKLDNEEMALVIKSFRQILKQRRGKDYKPRSKKVCYKCGKPGHFIAKCPISSDSDRGDDKKGRRKEKKMYYKKKGGDAHVCREWDSDESSSDSSDDEDAANIAITKGLLFPNVGHKRLMAKDGKKKKVKSKSSTRYESSSDENASDEEDNLRTLFANLNMQQKEKLNELISAIHEKDDLLDTQEDFLIKENKKHVKVKNAYALEVEKCEKLSSELSSCHETIDNLRNENTKLLAKVDSNACNVLIPNPRNDNDDLLAMIEELNISLASLRNENEKLIAKAKDFDVCNATISDLRDKNDILHSKIVELNSCKSSTSTVEHTTICTRCRDVNIDAIHDHMALIKQQNDHIAKLDAKIAEHNLENEKFKFARSMLYSGRRPGIKDDIGFQQGGNVKINAPPKKLSNFVKGKAPMPQDNEGHILYPAGYSESKIRRIHSRKSHSGPNHAFMYKGETSSSRQQTHAKLPKKKTPSASNEHNFSFKTFDASYILTNKSGKIVAKYVGGKQKGSKTCVWVPKVLISNAKGPKTIWVYASGGSSWIIDSGCTNHMTGEKKLFSSYEKNQDPQRAITFGDGNQDSLDYNLPSVSQLCQMGYNCLFTDEKSHTQETLKGFLRRAQNEFGLRIKKIRSDNGTEFKNSQIEGFLEEEGIKHEFSSPYMPQQNGVVERKNRTLLDMARTMLDEYKTSDRFWAEAVNTACYAINRLYLHRILKKTLYELLTGKKPNISYFRVFGSKCFILIKRGRKSKFAPKTVEGFLLGYDSNTRAYRVFNKSTGQVEVSCDVVFDETNGSQVEQVDLDEIGDEEAPCIALRNMSIGDVCPKESQEPPNAQDQPSSSTQASPPTQNEDDAQVDEGEDQANKPPQDDDNNQGGDVNEQDKEDEEQRPPHPRVHQAIQRDHPVDTILGDIHKGVTTRSRVAHFCEHYSFVSSIEPHRIEEALQDSDWVVAMQEELNNFTRNEVWHLVPRRNQNVVGTKWVFRNKQDEHGVVTRNKARLVAKGYSQVEGLDFDETYAPVARLESIHILLAYATYHGFKLYQMDVKSAFLNGPIKEEVYVEQPPGFEDSEYPNHVYKLSKALYGLKQAPRAWYECLRDFLITNGFKVGKADPTLFTKTVANDLFVCQIYVDDIIFGSTNKSTCEEFSRIMIQKFEMSMMGELRYFLGFQIKQLQDGTFISQTKYIQDILKKFGMKDAKPIKTPMGTNGHLDLDTGGYSDANWAGCKIDRKSTSRICQFLGRSLGSWASKKQNSVALSTAEAEYIAAGHYCVQLLWMRQTLRDYGYKLSKVPLLCDNESAIRMTENPVEHSRTKHIDIQYHFLRDHQQRGDIKIAYINTKDQLADIFTKPLDEKTFCKLRNELNILDSRNFD

SEQ ID NO: 215505 - protein, 255 aa, Zea mays
  Clone ID: MRT4577_128139C.1.pep
QDLLLLDVTPLSLGLETAGGVMTVLIPRNTTIPTKKEQVFSTYSDNQPGVLIQVYEGERTRTRDNNLLGKFELSGIPPAPRGVPQITVCFDIDANGILNVSAEDKTTGQKNKITITNDKGRLSKEEIEKMVQDAEKYKSEDEEHKKKVEAKNSLENYSYNMRNTIKDEKIASKLPADDKKKIEDAIDAAISWLDANQLAEADEFEDKMKELESLCNPIIAKMYQGAGEDMGGAGGMDEDAPAGSGGPGPKIEEVD

SEQ ID NO: 215506 - protein, 452 aa, Zea mays
  Clone ID: MRT4577_12813C.1.pep
MHGSSMFLQARGDQLAIGKETARRLGMGTNMYPSSALLRQNKDESIASLPIDELIEKADGFAGVFPEHKYEIVKGLQARKHICGMTGDGVNDAPALKKADIGIAVADSTDATRSASDIVLTEPGLSVIISAVLTSRAIFQRMKNYTIYAVSITIRIVLGFMLLALIWKFDFPPFMVLIIAILNDGTIMTISKDRVKPSPQPDSWKLAEIFATGVVLGGYLAMMTVIFFWAAYKTDFFPRLFHVESLEKTAQDDFQKLASAVYLQVSTISQALIFVTRSRSWSFVERPGFLLVFAFLVAQLIATLIAVYANWAFAAIKGIGWGWAGVIWLYNIVFYFPLDIIKFLIRYALSGRAWNLVLEQRIAFTSKKNFGTEERERKWAHAQRTLHGLQPPEASIFENKTTFNELNQLAEEARRRAEMARLREVSTLKGRMESVVKQKGLDIETIQQSYTV

SEQ ID NO: 215507 - protein, 1687 aa, Zea mays
  unsure (1)..(1687): unsure at all Xaa locations
  Clone ID: MRT4577_128140C.1.pep
MSGELAKKEMETGEKPTTSNEKALSGESRNKDKKKEKKTSSHKSHRSGDKIKKMRKVVYYETDTSSPSTSSFDVPSITSKRHERKKFSKIPLHYPRTSRHTPLLSVPLGKPPTFDGEDYARWSDLMNFHLTSLHKSIWNVVEFGAQVPSVGDEDYDEDEVAQIEHFNSQATTILLASLSREEYNKVQGLKRAKEVWDVLKTAHEGDELTKITKRETIEGELGRFRLRQGEEPQDMYNRLKTLVNQVRNLGSKKWDDHEVVKVILRSLIFLNPTQVQLIRGNPRYTLMTPEEVLGNFVSFEFMIKGSRKINELDGPSTSEAQPVAFKATEEKKEESTPSRQPIDASKLDNEEMALVIKSFRQXILKQRRGKDYKPRSKKVCYKCXDSDRGDDKKRRRKEKKRYYKKKGGDAHVCREWDSDESSSDSSSDEDAANIAVTKGLLFPNVGHRCLMAKDDKKKKVKSKSSTRYESSSDENASDEEDNLRTLFANLNMQQKEKLNELISDIHEKDDLLDSQEDFLIKENKKHVKVKNAYALEVEKCEKLSSELSTCHETIDNLRNENANLLAKVDSNVCDISIPNLKNDNDDLLTKIEELNISLASLRIENEKLLAKAKDFDVCNATISDLRTXNDILHAXRCRDVDVNAIHDHMALIKQQNDHIAKLDAKIAEHDLENENFKFARSMLYRGRSPGIKDGIGFQQGGNVKINAPPKKLSNFVKGKALMPQDDEGYILYPAGYPESKIRRIHSRKSHSGPNHAFMYKGETSSSRQPTRAKLPKKKTPSASNEHNFSFKTFDASYVLTNKSGKVVAKCVGGQAQGVYASGGSSWVIDSGCTNHMTGEKKMFSSYEKNQDSQRAITFGDGNQGLVKGVTVFRRSDDSVAFKGVLEGQLYLVDFDRAELDTCLIAKTNMGWLWHRRLAHVGMKNLYKLLKGEHILGLTNVHFEKDKICSACQAGKQVGAHHPHKNIMTTDRPLELLHMDLFGLIAYISIGGSKYYLVIVDDYSRFTWVFFLQEKSHTQETLKGFLRRAQNEFRLRIKKIRSDNGTEFKNSQIEGFLEKEGIKHEFSSPYTPQQNGVVERKNRTLLDMARTMLDEYKTSDRFWAEAVNTACYAINRLYLHRILKKTSYELLTGKKPNISYFRVFGSKCFILVKRGRKSKFAPKTVEGFLLGYDSNTRAYRVFNKSSGQVEVSCDVVFDETNGSQVEQVDLDEIEPPNAQDQPSSSTQASPPTQNEDEAQVDEVEDQANEPPQNDGNDQGGDANDQDKEDEEQRPPHPRVHQAIQRDHPVDTILGDIHKGVTTRSRVAHFCEHYSFVSSIEPHRVEEALQDSDWVVVMQEELNNFTRNEQDEHGVVTRNKARLVAKGYSQVEGLDFGETYAPVARLESIRILLAYATYHGFKLYQMDVKSVFLNGPIKEEVYVEQPPGFEDIGKADPTLFTKTLENDLFVCQIYVDDIIFGSTNESTCEEFSRIMTQKFEMSMMGELKYFLGFQVKQLQEGTFLSQMKYTQDILSKFGMKDAKPIKTPMGTNGHLDLDEGGCKINRKSTSGTCQFLGRSLVSWASKKQNSVALSTAEAEYIAAGHCCAQLLWMRQTLRDYGYKLTKVPLLCDNESAIRMADNPIEHSRTKHIAIWYHFLRDHQQKGDIEISYINTKDQLADIFTKPLDEQTFNKLRHELNILDSRNFFC

SEQ ID NO: 215508 - protein, 175 aa, Zea mays
  unsure (1)..(175): unsure at all Xaa locations
  Clone ID: MRT4577_128141C.1.pep
GVPXXTVCCGRWGANGILNVSAEDKTTGQKNKITITNDKGRLSKEEIEKMVQDAEKYKSEDEEHKKKVESKNSLENYAYNMRNTIKDEKIASKLAADDKKKIEDAIDAAISWLDANQLAEADEFDDKMKELESLCNPIIAKMYQGAGADMGGSGGMDEDAPAGSGGPGPKIEEVD

SEQ ID NO: 215509 - protein, 1927 aa, Zea mays
  Clone ID: MRT4577_128142C.1.pep
MSGDHAKKEMETGEKPTTSYGSTSSEESRTKRREKKKSSSNKGKEKKSSSHHKEKKEKSSSHKPHRKGDKHKRMRKVVYYETDTSSTSTSDSDAPSVTSKRQERKKYSKIPLRYPRISKHTPLLSVPLGKPPTFDGEDYARWSDLMRFHLISLHKSIWDVVEFGAQVPSVGDENYDEDEAAQIEHFNSQATTILLASLSKEEYNKVQGLKNAKEIWDVLKTAHEGDELTKITKRETIEGELGRFRLHKGEEPQHMYNRLKTLVNQVRNLGSKKWDDHEVVNVILRSLIFLNPTQVQLIRGNPRYTKMTPEEVIGHFVSFECMIEGSRKINELGDSSEAQPVAFKATEEKKEEATPSRQPIDASKLDNEEMALVIKSFRQILKQRRGKDYKSRSKKVCYKCGKPGHFIAKCPISSDSDRGDDKKGRRKEKKRYYKKKGGDAHVCREWDSDESSSDSSDDEDAANIAVTKGLLFPNVGHKCLMAKDGKKKKVKSKSSTKYESSSDDNASDEEDNLRSLFANLNIAQKEKLNELVSAIHEKDDLLDSQEDCLIKENKKHVKVKKAYALEVEKCEKLSSELSTCREMIDNLRNENTSLNAKVDSHVCNVSIPNPRDNNDDLLARIEELNISLASLRLENESLIAKAKDFDVCKVTIANLRDKNDILHAKIVELNSCKPSTSIVEHVSICTRCRNVDIDAIHDHMALIKQQNDHIAKLDAKIAEHNLENEKFKFARSMLYNGRRPGIKDGIGFQRGDNVKLNAPPKNLSNFVKGKAPMPQDNEGYILYPASYPESKIRRIHSRKSHSGPNHAFMYKGETSSSRQPTRAKLPKKKIPNASNEHSISFKTFDASYVLTNKSGKVVAKFVGGKHKGSKACVWVPKVLVSNAKGPKTVWVYASGGSSWILDSGCTNHMTGEKRMFSSYEKNKDPQRAITFGDGNQGLVKGVTVFRRSDDSIAFKGVLEGQLYLVDFNRAELDTCLIAKTNMGWLWHRRLAHVGMKNLHKLLKGEHILGLTNVHFEKDRICSACQAGKQVGVHHPHKNIMTTDRPLELLHMDLFGPIAYISIGGSKYCLVIVDDYSRFTWVFFLQEKSQTQETLKGFLRRAQNEFGLRIKKIRSDNGTEFKNSQIEGFLEEEGIKHEFSSPYTPQQNGVVERKNRTLLDMARTMLDEYKTPDRFWAESVNTACYAINRLYLHRILKKTSYELLTGKKPNISYFRVFGSKCFILIKRGRKSKFAPKTVEGFLLGYDSNTRAYRVFNKSTGLVEVSCDVVFDETNGSQVEQVDLDEIGEEQAPCIALRNMSIGDVCPKESEEPPSTQDQPSSSMQASPPTQNEDEAQNDEEQNQEDEPPQDDSNDQGGDTNDQEKEDEEEPRPPHPRVHQAIQRDHPVDTILGDIHKGVTTRSRVAHFCEHYSFVSSIEPHRVEEALQDSDWVVAMQEELNNFTRNEVWHLVPRPNQNVVGTKWVFRNKQDEHGVVTRNKARLVAKGYSQVEGLDFGETYAPVARLESIRILLAYATYHGFKLYQMDVKSAFLNGPIKEEVYVEQPPGFEDSEYPNHVYRLSKALYGLKQAPRAWYECLRDFLIANGFKVGKADPTLFTKTLDNDLFVCQIYVDDIIFGSTNESTCEEFSRIMTQKFEMSMMGELKYFLGFQVKQLQEGTFISQTKYTQDILAKFGMKDARPIKTPMGTNGHLDLDTGGKSVDQKVYRSMIGSLLYLCASRPDIMLSVCMCARFQSDPKESHLTAVKRILRYLAYTPKFGLWYPRGSTFDLIGYSDADWAGCKINRKSTSGTCQFLGRSLVSWASKKQNSVALSTAEAEYIAAGHCCAQLLWMRQTLRDYGYKLTKVPLLCDNESAIKMADNPVEHSRTKHIAIRYHFLRDHQQKGDIEISYINTKDQLADIFTKPLDEQSFTRLRHELNILDSRNFFC

SEQ ID NO: 215510 - protein, 70 aa, Zea mays
  unsure (1)..(70): unsure at all Xaa locations
  Clone ID: MRT4577_128143C.1.pep
VFLKSHIFSYLLIYYFLSFXFYYFFIFYYFYIFEVGVFYIFFFNFIFFFIFIKNFFYIFFNFFIIFFIFI

SEQ ID NO: 215511 - protein, 1412 aa, Zea mays
  unsure (1)..(1412): unsure at all Xaa locations
  Clone ID: MRT4577_128144C.1.pep
MSGDHAKKEMKTGDKPTTSHEKASSEESHNKGKGKEKKASSHKSHQSGDKKKKMRKVVYYETDTSSPSTSGSDAPSITSKSHERKKFSKIPLRYPRISKHTPLLSVPLGKPSTFDGEDYARWSDLMKFHLTSLHKSIWNVVEFGAQVPSVGDEDYDEDEVAQIEHFNSQATTILLASLSREEYNNVQGLKRAKEVWDVLKTAHEGDELTKITKRETIEGELGRFRLHKGEEPQDMYNRLKTLVNQVRNLGSKKWDDHEMVKVILRSLIFLNPTQVQLIRGNPRYILMTLAEVIGNFVSFEYMIKGSKKINELDDPSTSEAQTVAFKATEEKKEESTSSRQPIDASKLDNEEMALVIKSFRQILKQRRGKDYKPRSKKVCYKCGKPGHFIAKCPISSDSDRGDDKKGRRKEKKKYYKKKGGDAHVCREWDSDESSSDSSSDEDAANIAINKGLLFPNVGHKCLMAKDGKKKKVKSKSSTRYESSSDDNASDEEDNLRTLFANLNMQQKEKLNELISAIHEKDDLLDAQEDFLIKENKKHVKVKXNAYALEVEXCEKLSSELSTCHETIDNLRNENANLLAKVDSNVCDVSIPNLRNNNDNLLAKIEELNITLASLRNENKKLLAKAKELDVCNASIFDLRSKNDILHAKVVELKSCKPSTSTTEHVTICTRCRDVDINAIHDHMALIKQQNDHIAKLDAKIAEHELENEKFKFARSMLYRGRRPGIKDGIGFQQGGNVKLNAPPKKLSNFVKGKAPMPQDNEGYILYPVGYPESKIRRIHSRKSHYGPNHAFKYKGETSSSRQPTRAKLPKKKTPSASNEHSISFKTFDASYVLTNKSGKVYASGGSSWIIDSGCTNHMTGEKRMFSSYEKNEDPQRAITFGDEKSQTQETLKGLLRRAQNEFGLRIKKIRSENGMEFNNSQIEGFLEDEGMKHELSSPYTPQQNGVVERKNRNLLDMARTMLDEYKTPDRFWAEAINTACYSINRLYLHQILKKTSYELLTSKKPNVSYFKFFGSKCFILVKRCRKSKFASKTVEGFLLGYDSNTRAYRVFNKSTGLVEVSCDIVFDETNGYQVEQVDLDELDDEEVPCVALRNMSIGDVCPKESEEPTQAQDQPSSSNQASPTEDEDQAQDNEDEHQEDEPPQEEDKDQGGDEVDQDKKDDQEIQGQRSRHPRVHQAIQRDHPINSILGDIHKGXVENALRDSDLVLTMKEELXNFTRNEWVFCNEQDEHGVVTRNKARLVAKGYSQVEGLDFGETYAPVARLESIRILLAYATFHGFKLYQMDVKSVFLNGSIKEEVYVEQPPGFEDSEYPNHVYKLSKTLYGLKQAPRPWYECLRDFLITNGFKVEKADPTLFTKTIAKDLFVCQIYVDDIIFGSTNKSTCEEFSGIMIQKFEMSMMRELKYFLGFQVK

SEQ ID NO: 215512 - protein, 45 aa, Zea mays
  Clone ID: MRT4577_128145C.1.pep
IICILMLIGPVECVRFIHVHGIASVYGIPNYEPSSTERGIKTLGR

SEQ ID NO: 215513 - protein, 219 aa, Zea mays
  Clone ID: MRT4577_128146C.1.pep
TDRLSRGPKNNHHKSTNQPQIKFKRTRDNNLLGKFELSGIPPAPRGVPQITVCFDIDANGILNVSAEDKTTGQKNKITITNDKGRLSKEEIEKMVQDAEKYKSEDEEHKKKVEAKNSLENYSYNMRNTIKDEKIASKLPADDKKKIEDAIDAAISWLDANQLAEADEFEDKMKELESLCNPIIAKMYQGAGEDMGGAGGMDEDAPAGSGGPGPKIEEVD

SEQ ID NO: 215514 - protein, 1190 aa, Zea mays
  unsure (1)..(1190): unsure at all Xaa locations
  Clone ID: MRT4577_128147C.1.pep
MAKDDKKKKVKSRSSTKYATSSDEASSSDDEDDLLTLFANLNMQQKEKLNELISAIHEKDELLDFQEDFLIKENKKHVRVKNAYALEVEKSNVCDDSVDNLRNDNASSIAKIEKLNASLASLRNENEKMIAKAKELDVCNVSISNLRDENDIFHAKIVELNSCKLSTSTVEHVTICTRCRDIKIDAIHDHIAMIKQQNDHIAKLDAKIAEHELENEKFKFARSMLYSGRRPGIKDGIGFKQGGNVKLNAPPKRLSNFVKGKAPMPQDNEGYILYPAGYPEHKIRRIHSRKSHXSSNHAFMYKXVYASGGSSWIIDSGCTNHMTVEKKMFSSYEKNHDPQRAITFEDGNQGLVKGVTVFRRSDDSVAFKGVLEGQLYLVDFDRAELDTCLIAKTNMCWLWHHRLAHVGMKNLHKLLKGEHILGLTNVHFEKDREKSQTQETLKGFLRRAQNEFDLRIKKIRSDNETEFKNSQIESYLEEEGIKHEFSSPYTPQQNGVVEKKNRTLLDMARTMLDEYKTSDRFWAEAVNTACYAINRLYLHRILKKTSYELLTGKKPNVLYFRVFGSKCFILVKRGRKSKFALKAVEGFLLGYDSNTRPYRVFTKSTGLVEVSCDIVFDETNGSQVEQVDLDELDDEEAPCVSLRNMFIGDVCPKESEEPPQAQDQPSSSMQASPPTQDEDQAQDDDDEDQEEPPQEEDNDQGGDVHDQDKEDDEGPRPPHPRVHQAIQRDHPVNTILGDIHKGVTTHSRVAHFCEHYSFVSSIEPHRVEEALQDSDWVLAMQEELNNFTRNEVWHLVPRPNQNVVGTKWVFRNKQDEHGVVTSNKARLVAKGYSQVEGLDFGETYAPVSRLESIRILLAYATYHGFKLYQMDVKSAFLNGPIKEEVYVEQPLGFEDSEYPNHVYKLSKALYGLKQAPRAWYECLRDFLIVNGFKVGKVDPTLFTKTLANDLFVCQIYVDDIIFGSTNESICEEFSRIMTQKFEMSMMGELKYFLGFQLKQLQEGTFISQTKYIQDILTKFGMKDAKPIKTPMGTNGHLDLDTGGCKINRKSTSGTCQFLGRSLVSWASKKQNSVDLSTTEAEYIVSGHCCAQLFWMRKTLRDYGYKLTKVPLLCDNESAIRMADNPVEHSRTKHIVIRYHFLRDHQQKGDIEIAYVNTKEQLADIFTKPLDEQTFTKLRHELNILDSKNFD

SEQ ID NO: 215515 - protein, 74 aa, Zea mays
  Clone ID: MRT4577_128148C.1.pep
PRPPRTRQRQPTNQAHPTPMTDFTLILLTYLADVTGLDHDVTDEPPGTGSAQDPGTGADRPDDHLPGRANGQHT

SEQ ID NO: 215516 - protein, 829 aa, Zea mays
  unsure (1)..(829): unsure at all Xaa locations
  Clone ID: MRT4577_128149C.1.pep
MTIDKTLELLHMDLFGPIAYISIGGSKYCLVIVDDYSRFTWVFFLQDKSQTQETLKGFLRQAQNEFGLRIKKIRSDNGTEFKNSQIEGFLEDQNIKHEFSSPYTPQQNGVVERKNRTLLDTARTMLDEYKTSDRFWAEAINTACYAINCLYLHRILKKTSYELLTDKKPNVSYFRVFGSKCFILVKRGRKSKFAPKAVEGFLLGYDSNTRAYRVFNKSTGLVEPPQTQDQPSSSMQASPPTQDEDQAQDDENEDQEEPPQEEDNDQGGDANDQYKEDDEGPRPPHPRVHQAIQRDHPVNSILGDIHEGVTTLSRVAHFCEHYSFVSSIELYKVEDALRDSDWVLAMQEELNNFMRNEVWHLVPRPNQNVLGTKWVFRNKQDEHGVVTRNKARLVAKGYSQVEGLDFGETYAPVARLESIRILLAYATYHGFKLYQMDVKSAFLNGPIKEEVYVEQPPDFEDSEYPNHVYKLSKALYGLKQAPRAWYECLRDFLITNGFKVGKADPTLFTKTIANDLFVCQIYVDDIIFGSTNKSTCEEFSRIMIQKFEMSMMGELKYFLGFQVKQLQEGTFISQTKYIQDILTKFGMKDAKPIKTPMGTNGHLDLDMGGKSVNQKVYRSMIGSLLYLCASRPDIMLSLCMCARFQADPKEVHLRAVKRILRYLVHTPKFGLWYPKGSTFDLIGYSDADWAGCKIDRKSTSGTCQFLGRSLVSWALKKQNSVALSTVKAEHIAAGHCCAQLLWMKQTLRDYGYKLTKVPLLCDNESAIRMMDNPVEHSRTKHIAIRYHFLRDHQQRGDIEIAYVSTKEQLVDIFTKPVDEKXFTKLRHEL

SEQ ID NO: 215517 - protein, 95 aa, Zea mays
  Clone ID: MRT4577_12814C.1.pep
RQIHSKAIYTTIGVQSPTSARIRRDEADASPAGVIPTTSWTCLLYEDTSIVSVLHIIAMKFAHQLKLILCGENCVLLPCYTSVMHCLWIAQIYMM

SEQ ID NO: 215518 - protein, 85 aa, Zea mays
  Clone ID: MRT4577_128150C.1.pep
YPSVTPMMKSKVPIALIDKGTTIHGTQVEDMCICSKSLDGESKKKEYREIKETEQTGKEGFFLVYLDHLASDFMSFFFWLLTSSD

SEQ ID NO: 215519 - protein, 156 aa, Zea mays
  unsure (1)..(156): unsure at all Xaa locations
  Clone ID: MRT4577_128151C.1.pep
VVVRMWHLWXSSGCVAGHGITYADWLGASFVFVEDVDSLRTVRIRFAMVLDTPGLGYVSTAESVEVVPXLHCMVSSLVPHGKVGLPRSSSFSMVPAPAFPLAVSKGQVVQVPPVPVPAKDRVKHQLLVIQGVGSYPQASNEFVVAINLPAVKAMQV

SEQ ID NO: 215520 - protein, 98 aa, Zea mays
  Clone ID: MRT4577_128152C.1.pep
IWIDLNMSKIKLIYLPAVTPAFHLHSRGFAVSISDEELRAGTYVVRNTDYSDLVNVDVPDHVSLTFAIVLDHSRSTCACISNERHVIYFLCSFLFVVV

SEQ ID NO: 215521 - protein, 1068 aa, Zea mays
  Clone ID: MRT4577_128153C.1.pep
MAGNEWINGYLEAILDSHTSSRGAGGGGGGGDPRSPTKAASPRGAHMNFNPSHYFVEEVVKGVDESDLHRTWIKVVATRNARERSTRLENMCWRIWHLARKKKQLELEGIQRISARRKEQEQVRREATEDLAEDLSEGEKGDTIGELAPVETTKKKFQRNFSDLTVWSDDNKEKKLYIVLISVHGLVRGENMELGRDSDTGGQVKYVVELARAMSMMPGVYRVDLFTRQVSSPDVDWSYGEPTEMLCAGSNDGEGMGESGGAYIVRIPCGPRDKYLKKEALWPYLQEFVDGALAHILNMSKALGEQVGNGRPVLPYVIHGHYADAGDVAALLSGALNVPMVLTGHSLGRNKLEQLLKQGRMSKEEIDSTYKIMRRIEGEELALDASELVITSTRQEIDEQWGLYDGFDVKLEKVLRARARRGVSCHGRYMPRMVVIPPGMDFSNVVVHEDIDGDGDVKDDIVGLEGASPKSMPPIWAEVMRFLTNPHKPMILALSRPDPKKNITTLVKAFGECRPLRELANLTLIMGNRDDIDDMSAGNASVLTTVLKLIDKYDLYGSVAFPKHHNQADVPEIYRLAAKMKGVFINPALVEPFGLTLIEAAAHGLPIVATKNGGPVDITNALNNGLLVDPHDQNAIADALLKLVADKNLWQECRRNGLRNIHLYSWPEHCRTYLTRVAGCRLRNPRWLKDTPADAGADEEEFLEDSMDAQDLSLRLSIDGEKSSLNTNDPLWFDPQDQVQKIMNNIKQSSALPPSMSSVAAEGTGSTMNKYPLLRRRRRLFVIAVDCYQDDGRASKKMLQVIQEVFRAVRSDSQMFKISGFTLSTAMPLSETLQLLQLGKIPATDFDALICGSGSEVYYPGTANCMDAEGKLRPDQDYLMHISHRWSHDGARQTIAKLMGAQDGSGDAVEQDVASSNAHCVAFLIKDPQKVKTVDEMRERLRMRGLRCHIMYCRNSTRLQVVPLLASRSQALRYLSVRWGVSVGNMYLITGEHGDTDLEEMLSGLHKTVIVRGVTEKGSEALVRSPGSYKRDDVVPSETPLAAYTTGELKADEIMRALKQVSKTSSGM

SEQ ID NO: 215522 - protein, 469 aa, Zea mays
  Clone ID: MRT4577_128154C.1.pep
WGTLGFGPSPVDITGAMSNGLLVDPHDQNAIAQALLKLVADKNLWQECRRNGLRNIHLYSWPEHCRTYLTRVAGCRLRNPRWLKDTPADAGADEEEFLEDSMDAQDLSLRLSIDGEKSSLNTNDPLSSDPQDQVQKIMNKINQSSALPPSMSSVADGAKNATEATGSTLNKYPLLRRRRRLFVIAVDCYQDDGRASKKMLQVIQEVFRAVRSDSQMSKISGFALSTAMPLSETLQLLQLGKIPATDFDTLICGSGSEVYYPGTVNCVDAEGKLRPDQDYLMHISHRWSHDGAKQTIAKLMATQDGSGDTVELDPASSNAHCFTFLIKDPKKVKTVDEMRERLRMRGLRCHIMYCRNSTRLSVVPLLASRSQALRYLFVRWGLYVGNMYLITGEHGDTDHEEMLSGLHKTVIVRGVTEKGSEGLLRSPGSYKKDDVVPSETPLAAYTTGELKADEIMRALKQVSKTSSGM

SEQ ID NO: 215523 - protein, 59 aa, Zea mays
  Clone ID: MRT4577_128155C.1.pep
KKHEVTKFWLDVQNPTTTNSNVACNKSILNQDKRSSNELTPLTVLMATNLSKCLSCFSF

SEQ ID NO: 215524 - protein, 52 aa, Zea mays
  Clone ID: MRT4577_128156C.1.pep
STVYSHCSHFPVAGSKQWRGLSMSTITTEFPSHTCFKLLKRHLNHSWRIRPI

SEQ ID NO: 215525 - protein, 149 aa, Zea mays
  Clone ID: MRT4577_128157C.1.pep
DGELLRIPRLVWDVQKGGGAILDSGTSLTVLVSPAYRAVVAALGKKLVGLPRVAMDPFDYCYNWTSPLTGEDLAVAVPALAVHFAGSARLQPPPKSYVIDAAPGVKCIGLQEGDWPGVSVIGNILQQEHLWEFDLKNRRLRFKRSRCMQ

SEQ ID NO: 215526 - protein, 55 aa, Zea mays
  Clone ID: MRT4577_128158C.1.pep
AKIHVNLSAYLFWPLHKLRGRFFQHLADSQHITFHDLYSLYYLNRHIILTILYLF

SEQ ID NO: 215527 - protein, 115 aa, Zea mays
  unsure (1)..(115): unsure at all Xaa locations
  Clone ID: MRT4577_128159C.1.pep
ARDPNRLQQLDVVTXDAFDNVYYKNLNASRGVFTSDMALIRDPTTAPIVRCFAGSKDAFFAQFATSMVKLSKVPRKPPGNVGEIRRRSCFRTNNAKMSILDVDDAVGSLAAASAR

SEQ ID NO: 215528 - protein, 83 aa, Zea mays
  unsure (1)..(83): unsure at all Xaa locations
  Clone ID: MRT4577_12815C.1.pep
IHLDHAQSPAGSKFRRKVPDSARWPVCLSLSVQLHALLIFPSSPQLHSLSPSXAPLSGLXLYQELLILLPLAVPXSCRTRLKV

SEQ ID NO: 215529 - protein, 44 aa, Zea mays
  Clone ID: MRT4577_128160C.1.pep
KKKKKKKKKNKKKKKKKKKKRKKKKEKKKKKKKKKKKKKRKHHI

SEQ ID NO: 215530 - protein, 42 aa, Zea mays
  Clone ID: MRT4577_128161C.1.pep
QVPLTGVAFYSILAFTATFIYDARQLVDFLRTSLNLVLAGRH

SEQ ID NO: 215531 - protein, 398 aa, Zea mays
  unsure (1)..(398): unsure at all Xaa locations
  Clone ID: MRT4577_128162C.1.pep
MGCFLGCFGGAKERRRRRKRSPSQSPNGRARAVPRVTPKKVDVDGEAAASAAAPLLATLLELRDSTDGMCLAVVKKKVTFDPNVTTFEAAPIPEDDGEGADPEDGGGASREKGWMLVPECAKSEAFPLNHRYSNCAGSDTDSDYEDAEEDEFEGDEDDEEEDADGLDECAIDGDEDEVEHGLLGIGRSEEDACESLXASVWQDIQKFLRPGSGARRAPSGXAPAVLGSVENLNLARWKEPKPRAAXRSSPRTXNVTVGQENRMDDLXSPSYHRPRRRRRGRRSQATXSTPSKQEASVDASLSTWLGSSGTPESNSVRSYSPISREDRPTVGALTVEDIKISSASSTPRRSRSPSPSPDDMPILGTVGAYWNCSAKEADPVTRGGFMRTRTRFGQGFAG

SEQ ID NO: 215532 - protein, 224 aa, Zea mays
  unsure (1)..(224): unsure at all Xaa locations
  Clone ID: MRT4577_128164C.1.pep
MEDEENIEGELLLVESQLHDIQEELYERQAQLKALLEASKLTRNTTINTSSVAPEDWSGSFPWDLEADDTRFNIFGISSYRSNQREIINAVMSGRDVLVIMAAGGGKSLCYQLPAVLRDGIALVVSPLLSLIQDQVMGLSALGIPAYMLTSTTNKEVEKFIYKTLXXGEGELKILYVTPXKISKSKRFMSKLEKCHHAGRLSLIAIDEAHCCSQWXXHDFRPDY

SEQ ID NO: 215533 - protein, 35 aa, Zea mays
  Clone ID: MRT4577_128165C.1.pep
ENFAIRFIKELVAFYGLGTKCIKVSKKKLLPRSSI

SEQ ID NO: 215534 - protein, 777 aa, Zea mays
  unsure (1)..(777): unsure at all Xaa locations
  Clone ID: MRT4577_128166C.1.pep
MGRKFVRLRWLACWHWEGPYYSNRGMEDEENIEGELLLVESQLHDIQGQIKTLLDRQEELYERQAQLKALLEASKLTRNTTINTSSVAPEDWSGSFPWDLEADDTRFNIFGISSYRSNQREIINAVMSGRDVLVIMAAGGGKSLCYQLPAVLRDGIALVVSPLLSLIQDQVMGLSALGIPAYMLTSTTNKEVEKFIYKTLDKGEGELKILYVTPEKISKSKRFMSKLEKCHHAGRLSLIAIDEAHCCSQWGHDFRPDYKNLGILKIQFPSVPMIALTATATSKVQMDLMEMLHIPRCIKFVSTVNRPNLFYKVSEKSPVGKVVIDEITKFISESYPNNESGIIYCFSRKECEQVAKELRERGISADYYHADMDIVNREKIHMRWSKGKSQVIVGTVAFGMGINKPDVRFVIHHSLSKSMETYYQESGRAGRDGLPSECILYYRPGDVPRQSSMVFYENCGLQNLYDIVRYCQSKRSCRHGAFFRHFGEVPQDCNGMCDNCASTIEQKDIDVTXYDLFCVSLKITTNDQHLFTLFQGENVFYFMIFSXIFSTSCLDHTKIIVSLLHDMQLNDQRATLLQLVDKFKSKWKGLGSFNEAVDLRKEEVEQLIVNLILDNVLKEEFQHTAYSTNAYVTLGALWKPALQGNRVVKLEIAIASKDRDVRSKGAKRGRMSDLEAKLDELRRDLSSTGSDAIFPHAVLTAQQISLLSSQKPTTPAELEKVIGKVKTRKYGSKIIELMRSHDNSGSGRGKEAGDEHRAKKIKTKDEDVVCVESSEEE

SEQ ID NO: 215535 - protein, 180 aa, Zea mays
  unsure (1)..(180): unsure at all Xaa locations
  Clone ID: MRT4577_128167C.1.pep
IRDEILDHQYIFQDLKLTEAEEKELRYKMKIYDLVKEHVETPDDVGAYKMPEAYDMGENVNQEKRFAVAMQRYKDPKANDKMNPFAEQEAWEEHQIGKSKLQFGSKDKKPSSDEYQYVFEDTIDFVKSSVIEGTQPEDDSDXKTXAKDILKRELQNERKTLSIFTIRDELLKAVEEVQSQ

SEQ ID NO: 215536 - protein, 77 aa, Zea mays
  Clone ID: MRT4577_128168C.1.pep
NFTIWLTHIFHIQAHKINFKTHSLIHTFFFLKPPLPHLFNIPKTNHSHPHSHLLTKTILNAMHSTYNLGNPPLLFFP

SEQ ID NO: 215537 - protein, 66 aa, Zea mays
  unsure (1)..(66): unsure at all Xaa locations
  Clone ID: MRT4577_128169C.1.pep
DGTSXRAGWTSVDVIEIAGRQAHRTPRLLKLLQDTKDAGEANQLQSATLLDDPDKLAIASAAAGRR

SEQ ID NO: 215538 - protein, 103 aa, Zea mays
  unsure (1)..(103): unsure at all Xaa locations
  Clone ID: MRT4577_12816C.1.pep
RVRGSLKNGPRGQGIKRSLKRTFSLLVRTTQGGEEKGGSQVVVLGGGRNASSGLGKNGVNFXAVLHFQVIRGFFAGKPGGIKQEWKGIYVQKVGGEKGVNKVF

SEQ ID NO: 215539 - protein, 96 aa, Zea mays
  unsure (1)..(96): unsure at all Xaa locations
  Clone ID: MRT4577_128170C.1.pep
AAATKRDHKGTPRGGGGNTXEGXNTSRGEKKGEGTAXTDKRNEEPIFFFSPAGWPRPCWNDLITASPGGVIHLPPTYNCCTRKRSEGARPMLMSLG

SEQ ID NO: 215540 - protein, 73 aa, Zea mays
  Clone ID: MRT4577_128171C.1.pep
SKIIFRTPTFLKPSFFSPLVPKNPYKVPFQIMVLIKKSPPFNFLKKKKKKKKKKKKTKKKKKKKKKKGRPLAI

SEQ ID NO: 215541 - protein, 1547 aa, Zea mays
  unsure (1)..(1547): unsure at all Xaa locations
  Clone ID: MRT4577_128172C.1.pep
MSGDDAKKMVIGGEKSATSHGKAPSRESANNKKDGSPSRIRSHKSGEKKKKMKKVVYYETDSSSPSTSGSDAASVTSKRQERKKYSKTPLRYPRIPKDTPLLSVPLGKPPTFDGEDYSRRSDMMRYHLTSLHKSIWDVVEFGVQVPSVGDEDYDEDEVAQIVHFNSQATTILLTSLSREEYNKVQGLKSAKDIWDVLKTAHEGDEVTKITKWETIEGELGRFRLRQGEEPQEMYNRLKTLVNQVRNLGSKKWDDHEMVKVILRSLVFLNPMQVQLIRGDPRYTLMSPKEVIEKFVSFELMIKGSKKIIEQDGPSTPEAQPVAFKAMEEKKEESTSSRLPIDASKLDNEEMALIIKSFRQILKQRRGKDYKSRSKKVCYKCGKPGHFIAKCPLSSDSDRDNDKKGKRREKKKYHKKRGDDAHVCREWDFDESSTDSSSDEDAANITVTKGLLFPNVGHKCLMAKTGKRKKVKSRSSTKYASSSDEDNSSDEEDNLRTLFANLNMQQKEKLNELISAIHEKDELLDSQEDFLIKENKKHVKVDSNVCDVLIPNLRDDNVSLLAKIEELNVSLASLRNENEKLIAKAKDLDVCNVTISNLRSENDILHAKIVELKSCKPSTSTVEHVFICTRCRDINVNAIHDQLALIKKRNDHIAQLNAKINEHDLENENFKFARSMLYSGRRPGIKDGIGFQKGDNVKLNAPPKKLSNFVKGKAPMPQDNEGYILYPAGYPEHKIRRIHSRKSHSGPNHAFMYKGSCQVYASRGSSWIIDSGCTNHMTGEKKMFSSYEKNQDPQRAITFGDGNQGVTVFRRSDDSVAFKGVLEGQLYLVDFGRVELDTCLIAKTNMGWLWHRRLAHVGMKNLHKLLKGEHILGLTNVHFEKDRICSACQAGKQVGVNHPHKNIMTTDRPLELLHMDLFGPIAYISISGNKKRNGTKFKNSQIEGFLEKEGIKHEFSSPYTPQQNGVVERKNRTLLDMARTMLDEYKTSDRFWAEAVNTVCYAINRLYLHRILKKTSYELLTGKKPNVSYFRVFGSKCFILVKRGRKSKFAPKAVEGFLLGYDSNTRAYRVFNKSSGLVEVSCDIVFDETNGSQVEQVDLDELDDEKAPCVALRNMTIGDVCPKEPEEPPQAQDQPSSSMQASPPTQDEDKAQNDEGEDQDVEPPQEECNDQGGDAHDQDEEDEQVPRPPHPRVHQAIXRDHPVDTILGDIHKGXIEEALQDSDWVVAMQEELNNFTRNEVWHLVPRPNQNVVGTKWVFRNKQDEHGVVTRNKARLVAKGYSQVEGLDFGETYAPVARLESIRILLAYATYHGFKLYQIDVKSAFLNGPIKEEVYVEQPPGFEDSEYPNHVYKLSKALYGLKQAPRAWYECLRDFLITNGFKVGKVDPTLFTKTLDNDLFVCQIYVDDIIFGSTNESTCEEFSRIMTQKFEMSMMGELKYFLGFQVKQLQEGTFISQTKYIQDILNKFGMKDAKPIKTPMGTNGHLDLDTGGKSVDQKKEHIGDLPVLGKILGVLGFKEAKFRSSFYRRSRVYCRRSLLRTTTLDEANP

SEQ ID NO: 215542 - protein, 450 aa, Zea mays
  Clone ID: MRT4577_128173C.1.pep
RICSACQAGKQVGAHHPHKNVMTTDRPLELLHMDLFGPIAYISIGGSKYCLVIVDDYSRFTWVFFLQEKSQTQETLKGFLRRAQNEFGLRIKKIRSDNGTEFKNSQIEGFLEEEGIKHEFSSPYTPQQNGVVERKNRTLLDMARTMLDEYKTSDRFWAEAVNTACYAINRLYLHRILKKTSYELLTGKKPNISYFRVFGSKCFILVKRGRKSKFAPKTVEGFLLGYDSNTRAYRVFNKSTGLVEVSCDVVFDETNGSQVEQVDLDEIGDEEAPCIALRNMSIGDVCPKESEEPPRTQDQPSSSTQASPPTQNEDEAQVDEVEDQANEPPQDDGNDQGGDAIEEDKEDEEQRPPHPRVHQAIQRDHPIDTILGDIHKGFRPIHPPSRRLSVAPVEEDFEDDQQVGEGDQEVGDDEDKFGRFHCGGKMKFMGMDKLRKKFKKKSPRQATCVS

SEQ ID NO: 215543 - protein, 87 aa, Zea mays
  Clone ID: MRT4577_128174C.1.pep
GARGSLSSGLDGQRWPLCGSAPLMWRARVEPMLSRHASGCLVGLPSGSQVVRLLRSPPLALMNPPFWFRCGGQQKRGVTFALEPNSE

SEQ ID NO: 215544 - protein, 95 aa, Zea mays
  Clone ID: MRT4577_128175C.1.pep
LCIKNVKNEIWDMGKPPDPLRISLSNFFFCKQGGAVSPKLINGGGFWAPPNKENLFPEKEKQFEKALVFPPPSNRTWGPKNATSPKLPVPQDQAL

SEQ ID NO: 215545 - protein, 1561 aa, Zea mays
  unsure (1)..(1561): unsure at all Xaa locations
  Clone ID: MRT4577_128176C.1.pep
MSGDHAKKEMVTGEKPATSHGKALSGESYNKGKGKEKESPSHNSRRSGDKKKKMRKVVYYETDTSSPSTSGSDTPSVTSKRHERKKFSKIPLRYPRIPKHTPLLSVPLGKPPTFDGEDYARWSDLMRFHLTSLHKSIWDVVEFGVQTAHEGDEVTKITKWETIEGELGRFRLRQGEEPQDMYNRLKTLVNQVRNLGSKKWDNHEMVKVIGNFVSFELLIKGSKKINELDGPSTSEAQPVAFRATEEKKEESTSSRQPIDASKLDNEEMALVIKSFRQILKQRRGKDYKSRSKKVCYKCGKPGHFIAKCPISSDSDRGDDKKGRRKEKKRYYKKKGGDAHVCREWDFDESTTDSSSDEDAANIAINKGLLFPNVGHKCLMAKDGKKKKVKSKSSTKYESSSDDNASDEEDNLRTLFANLNMQQKEKLNELISAIHEKDELLDTQEDFLIKENKKHVNVKNAYALEVEKCEKLTSELSTCHDLIANLRNENANLIAKVDSNDCDVSTPNLRNDNVDLLAKIEELNISLASLRIENEKLLAKAKELDVCNASISDLRSKNDILHAKVVELKSCKPSTSTVEHTSICARCKDINVDAIHDHLALIKKQNYHIAQLNAKISEHDLEDEKFKFARSMLYSGRRPGIKDGIGFQKGDNVKLNAPPKRLSNFVKGKAPMPQDNEGYILYPAGYPESKIRRIHSRKSHSGPNHAFIYKGETSSSRQSTHAKLPKKKTPKASNDSNISFKTFDASYVLTNKSGKVYASGGSSWIIDSGCTNHMSGEKEMFSSYKKNQDPQRAITFGDGNQDVGVTVFRRSDDSIAFKGVLEGQLYLVDFDRAELDTCLIAKTNMGWLWHRRLAHVGMKNLHKLLKGEHILGLTNVHFEKDRICSACQAGKQVGVHHPHKNIMTTDRPLELLHMDLFGPIAYISIGGKTLKGFLRRAQNEFGLRIKKIRSDNRTEFKNSQIEGFLEEEGIKHEFSSPYTPQQNGVVERKNRTLLDMARTMLDEYKTLDRFWAEAVNTACYAINRLYLHRILKKTSYELLTGKKPNISYFRVFGSKCFILVKRGRKSKFAPKTVEGFLLGYDSNTRAYRVFNKSTGQVEVSYDVVFDETNGSQVEQVDLDEIGIEEALCIALRNMSIGDVCPKESEEPPNAQDQPSFSTQASPPTQNEDEAQVDEIEDQANEPPQDDGNDQGGDANDQDKEDEEQRPPHPRVHQAIQRDHPVDTILGDIHKGVTTRSRVAHFCEHYSFVSSIEPHRVEEALQDSDWVVAMQEELNNFTRNEVWHLVPHPNQNVVGTKWVFRNKQDEHGVVTRNKARLVAKGYSQVEGLDFGETYAPVARLESIRILLAYATYHGFKLYQMDVKSAFLNGPIKEEVYVEQPSDFEDSEYPNHVYKVSKALYGLKQAPRAWYECLRDFLITNGFKVGKADPTLFTKTLENDLFVCQIYVDGIIFGSTNESTCEEFSRIMTQKFEMSMMGELKYFLGFQVKQLQEGTFLSQTKYTQDILSKFGMKDAKPIKTPMGTNGHLDLDEGGKSVDQKXFKPSHRCIERKLESSAKTKASTP

SEQ ID NO: 215546 - protein, 55 aa, Zea mays
  unsure (1)..(55): unsure at all Xaa locations
  Clone ID: MRT4577_128177C.1.pep
PKAKKAAKNTAKLGLPPLGKGHWXNQSTCAPTGKGLXKGLDWLSNNIASKALGPP

SEQ ID NO: 215547 - protein, 306 aa, Zea mays
  Clone ID: MRT4577_128178C.1.pep
MSGELAKKEMETGDKPTTSHGKASSEESRNKEKRKEKKKEKKTSSHKPHRSGDEIKKMRKVVYYETDTSSPSTSGSDAPSITSKRHERDEDYDSDEVAQIHHFNSQATIILLASLSREEYNKVQGLKSAKEIWDVLKTAHEGDEVTKITKRETIEGELGRFMLHQGEDPQAMYNRLKTLVNQVRNLGSEKWDDHEMVKVILRSLVFLNPTQVQLIRGSKKIIEQGTSSTPEAQPVTFKATEEKKEESTSSRQPIDASKLDNEEMALVIKSFRQILKQRRGEDYKPRSKKVCYKCGKLRAPRGGVNR

SEQ ID NO: 215548 - protein, 229 aa, Zea mays
  unsure (1)..(229): unsure at all Xaa locations
  Clone ID: MRT4577_128179C.1.pep
MDSGPVPTRPTGGSAAVASSSSSLIFLGTGCSGALPDARCLIQPSEPPCTVCSTALSLPPDRNPNYRCNTSLLVDYCHDDGSHRYILIDVGKTFREQVLRWFVHHEVPSIDSVILTHEHADAVLGLDDLWVALPSCQRNGSAKVPVFLTQFTMDSVAARFPNLVEQKLQGGDDFARPAQLDWTIIXEGDVDKPFVASELQFWPLPVMHGEXYVCLGFLFXRKARVAYLS

SEQ ID NO: 215549 - protein, 68 aa, Zea mays
  Clone ID: MRT4577_12817C.1.pep
GKLVPPPGPARNFRGDPRVPKGKVPGVVFDVPPKFKPLPHYFGKGGPQGYICGLTPPGYPLVPVWGGN

SEQ ID NO: 215550 - protein, 309 aa, Zea mays
  unsure (1)..(309): unsure at all Xaa locations
  Clone ID: MRT4577_128180C.1.pep
MSLEKVIGKFVSFELMIKGSKKIIEQGASSTPKMQPVAFKATEEKKEESTSSRLPIDASKLDNEEMALIIKSFRQILKQRRGKDFKPRSKKVCYKCGKPGHFIAKCPLSSDSGRDNDKRGKKKEKKRYYKKKGGDAHVCQEWDSNESSTDSSSDEDAANITINKGLLFPNVGHKCLMAKDDKGKKVKSRASTKYESSSDDNASDEEDNLRTLFANLNMQQKEKLNELISDIHEKDDLLDTQEDFLIKENKKHVKVKNAYALEVEKCEKLSSELSTCHETIDNLRSENANLLAKVDXSNVCNVSIPNLGN

SEQ ID NO: 215551 - protein, 1583 aa, Zea mays
  Clone ID: MRT4577_128181C.1.pep
MSGDHAKKEMVTGEKLATSHGKAPSREPDNKKKEGSPSRIRTHKSGKKKKKMKKVVYYETNSSSPSTSGSDAASITSKRQERKKYNKIPLHYPHIPKHTPLLSVPLGKPPTDGEDYSRWSDMMRYHLTSLHKSIWDVVEFGVQATTILLTSLSREEYNKVQGLKSAKEIWDVLKTAHEGDEVTKITKRETIEGELGRFMLNQGEDPQAMYNRLKTLVNQVRNLGSSKWDDHEMVKIILRSLVFLNPTQVQLIRGDPRYKLMSPEKVIGKFVSFELMIKGSKKIIEQGTSSTPDVQPIAFKATKEKKEDSTPSRVPIDASKLDNEEMTLILKSFHQILKQRRGKDYKSRSKKVCYKCGKPDHFIAKCHLSSDSDRDNDKRGKKKEKKRYYKKKGGDAHVCREWDSDESSTDSSFDEDAANIAVTKGLLFPNVGLKCLMAKDGKKKKVKSRASTKYATSSDEASSSDDGDDLLTLFANLNMQQKEKLNELISSIHEKDELLDSQEDFLIKENKKHVKVKNAYALEAKELDVCKVSISNLRDENDILHAKIVELNSCKPSTSTVEHVTICTTCRDVNIDAIHDHIAMIKQQNDHIAKLDAKIAEHELENEKFKFAHSMLYSGRRPSIKDGIGFQQGGNVKLNAPPKRLSNFVKSKAPMVQDNEGYIVYPVGYAEHKIRRIHSRKSHSGSHHDFMYKSEVSSSSQSTHAKLPKKKTPIASNDHNISFKTLDASYVLTNKSGKVVAKYVGGKHKGSKTCVWVPKVYASGGSSWIIDNGCTNHMTGEKRMFSSYEKNQDPQRAITFGDGNQGVTVFRRSDDLVAFKRVLEGQLYLVDFNRAKLDTCLIAKTNTGWLWHRRLTHVGMKNLHKLLKGEHILGLTNVHFEKDREKSQTQETLKGFLRRAQNEFGLRIKKIRSDNGTEFKNSQIEGFLEEEGIKHEFSSPYTPQQNGVVERKNRTLLDMARTMIDEYKTSDRVFGSKCFILVKRGRKSKFAPKAVEGFLLGYDSNTRAYRVFNKSTGLVEVSCDIMFDETNGSQVEQVDLDELDDEEAPCVALRNMSIGDVCPKESEEPTQAQDQPSSSMQASSPTQDEDQAQGDEDEDQEDEPPQDDDNDQGGDNDDQDKEDGQEVQGQRPPHPRVHQAIQRDHPVKSILGDIHKGVTTRSRVAHFCEHYSFVSSIEPYRVEDALRDSDWVLAMQEELNNFTRNEVWHLVPRPNQNIVGTKWVFRNKQDEHGVVTRNKARLVAKGYSQVEGLNFGETHAPVARLESIRILLAYATYHGFKLYQMDMKSAFLNGPIKKEVYVEQPPGFEDSEYPNHVYKLSKALYGLKQAPRAWYECLRDFLITNGFKVGKADPTLFTKTIANDLFVCQIYFDDIIFGSTNKSTCEEFSRIMIQKFEMSMMGELKYFLGFQVKQLQEGTFISQTKYIQDILTKFGMKDAKPIKTPLGTNGHLDLDTGGCKIDRKSISGTCQFLGRSMVSWASKKQNSVALSIAEAEYIAAGHCCTQLLWMRQTLRDYGYKLRKVPLLCDNESAIRMADNPVEHSRTKHIAIRYHFLRDHQQKGDIEIAYVNTKEHLADILPNH

SEQ ID NO: 215552 - protein, 91 aa, Zea mays
  Clone ID: MRT4577_128182C.1.pep
MEGESFSGMGNGGGGGGGGHHQVVDGKLIQTFHKSFVQVQSILDQNRMLISEINQNHESRAPDSLTRNVGLIRELNNNIRRVVGLYADLSA

SEQ ID NO: 215553 - protein, 641 aa, Zea mays
  Clone ID: MRT4577_128183C.1.pep
MSGDHTKKEVMTGEKPATSHEKTPSRESGSKVKGESPSHNKSHRSGDKEKKMKKVVYYETDSSSPSTSDSDTSSVTSKRHECKKFSQIPLRYPRFSKHTPLLSVPLGKPPVFRVKVPSLGDEDYDSDEVDQIRHFNSQATTILLASLSREEYNKVQGLKSAKEIWDVLKTAHEGDEVTKITKMETVEGKLGRFMLNQGEEPQAMYNRLKTLVNQVRNLGSTKWDDHEMVKEVIGKFVSFELMIKGSKKIIEQGASSTPEMQLVAFKATEEKKEESTSSRPPIDASKLDNEEMALIIKSFRQTLKQRRGKDYKPHSKKVCYKCGKPSHFIAKCPISSDIDRGDDKKGKRREKKRYYKKKGGDAHLCREWDSDESSTNSSDEDAANIVVNKGLVFPNVGHKCLMAKDGKKKKVKSRSSTKYATSSDEDNSSDDEDNLLTLFANLNMQQKEKLNELISAIHEKDELLDSQEDFLIKENNKHVKVKNAYAQEVERFDDCDNSIVSLRNDNANLIAKIDKLNESLSSLKIENDKLIAKAKELDVCNVSIFYLRNENAILHAKIDDLNACKPSTSSVDHVSICTRCRDINVDAIHDHLAMIKQQNDHIAKLDAKIAEHELENEKFKFARSMLYSGRRPGIKDGIGFQ

SEQ ID NO: 215554 - protein, 1620 aa, Zea mays
  Clone ID: MRT4577_128184C.1.pep
MSGEHTKKEIVTDGDKSRSHGKDPSGESDNKMKGTPSHAKSHWSGDKKKKMRKVVYYETDSSSPSTSGSDTPSVTSKRHERKKFSKIPLHYPRIPKRTPLLFVPLGKPPMFDGEDYNMWSDKMRHHLTSLHTSIWDVVEIGVQVPSPGDEDYDSDEVAQIRHFNSQATTILLASLSREEYNKVQGLKSAKEIWDVLKTAHEGDEVTKITKRETIEGELDRFRLRQGEEPQDMYNCLKTLVNQVRNLGSTKWDDHEMVKVILRSLVFLNPKQVQLICGNPRYTLMSPEEVIGNFVSFELMIKGSKKIIELDGPSTPEAQPVAFKATEEKKEESTPSRQPIDASKLDNEEMALVIKSFRQILKQRRGKDYKSHSKKVCYKCGKPDHFIAKCPMSSDSDRGDDKKGRRKEKKRYHKKRGGDAHVCREWDSDESSSDSSSDEDAANIAFIKGLLFPNVGHKCLMAKDGKKKKVKSKSSTKYETSSDEDNSCDEEDNLRTLFANLNMQQKEKLNELISAIHEKDELLDSQEDFLIKENKKHVKVKNAYALEVEKCEKLSIELSSCHDVITNLRNENASLIAKVDSNVCDASIPNLRDDNVKLLAKIEELNVSLASLKIENEKLIVKAKELDHVTICTRCRDINIDAIHDHMALIKQQNDHIAKLDAKIAEHDLENDNFKFARSMLYNGRRPDIKDGIGFQKGDNVKLNAPPKRLSNFVKGKAPMTQDNEGYILYPTGYPESKIRRIHSRKSHSGPNHAFMYKGETSSSRQSTHARLPKRKTPTTSNDHNFSFKTFDASYVLTNKSGKIVAKYVGDKHKGTKTCVWVPKVLASNAKGPKTVWVYASGGSSWIIDSGCTNHMTGEKKMFSSYEKNQDPQRAITFGDGNQGVTVFRRSDDSITFKGVLEGQLYLVDFDRAELDTCLIAKTNMGWLWHCRLAHVGMKNLHKLLKGEHILGLTNVHFEKDRICSACQAGKQVGIHHPHKNIMTTDRPLELLHMDLFGQIAYISIGGSKYCLVIVDDYSRFTWVLFLQEKSHTQETLKGFLRRAQNEFGLRIKKIRSDNGTEFKNSQIEGFLEEEGIKHEFSSPYTPQQNGVVERKNRTLLDMARTMLDEYKTSDRFWVEAVNTACYAINRLYLHRILKKTSYELLTGKKPNVSYFRVFGSKCFILVKRGRKSKFAPKAVEGFLLGYDSNTRAYRVFNKSSGLVEVSCDIVFDETNGSQVEQVDLDEIGDEEAPCVTLRNMSIGDVCPKESKEPPNAQDQPSSSTQASPPTQNEDEAQDDEGEDQEDEPPQDDGNDQGGDANDQDKEDKEPRLPHPRVHQAIQQEHPVNTILGDIQKGVTTQSRVAHFCEHYSFVSSIEPHRVEEALQDSDWVVAMQEELNNFTRNELYQMDVKSAFLNGPIKEEVYVEQPPGFEDSEYPNYVYKLSKALYGLKQAPRAWYEFLRDFLITNGFKVRKVDPTLFTKTLDNDLFVCQIYVDDIIFGSTNESTCEEFSSIMTPKFEMSMMGELKYFLGFQVKQLQEGTFISQTKYIQDILNKFGMKDAKPIKTHMGTNGHLDLDTGGKSVDQKKEHIRDLPVLGKVSGVLGFKEAKFRSSLYRQSRVYCRRPLLRAIALDEANP

SEQ ID NO: 215555 - protein, 74 aa, Zea mays
  unsure (1)..(74): unsure at all Xaa locations
  Clone ID: MRT4577_128185C.1.pep
MVYVKAQKSKAYFKRYQVKFKRRRXGKTDYRARIRLINQDKNKYNTPKYRFVVRFSNKDIVAQIISASIAGDIV

SEQ ID NO: 215556 - protein, 161 aa, Zea mays
  unsure (1)..(161): unsure at all Xaa locations
  Clone ID: MRT4577_128186C.1.pep
KVKNAYALXIEKCQKLSSELSTCHDTIATLRNENANLLAKVDSIACNVSIPNLRNDNDDLLAKIEELNLSLVSLKNENEKLIAKAKDFDICNATISDLRTKNDILHAKVVELKSCKSSTSTIEHTSICTRCRDIDVNAIHDHMTLIKQQNDHIAILVSSFA

SEQ ID NO: 215557 - protein, 1327 aa, Zea mays
  unsure (1)..(1327): unsure at all Xaa locations
  Clone ID: MRT4577_128187C.1.pep
MAKVSAKEIWDVLKTAPEGGEVTKITKRETIEGELGRFMLHQGEEPQAMYNRLKTLVNQVHNLGSTKRDDHEMVKVILRSLVFLNPTQVQLIRGDPRYKLMSPEEVIGKFVSFELIVKGSKQIIERGATSTPEVQPVAFKATKEKKEESTSSRLPIDASKLDNEEMTLIIKSFRQILKQRRGKDYKPRSKKVFYKCDSDESSTDSYSDEDAANIAVTKGLLFPNVGHKCLMAKDDKKKKVKSRASTKYATSSDEASSSDDEDDLLTLFANLNMQQKEELNELISVIHEKDEILDSQEDFLIKENKKHVKVKNAYAQELEKCEKLTSELSTCHDITSNLRNENTKLIAKVEKLDVCDDSIVSLRNDNDSLITKIDKLNASLSSLKIENEKLIAKAKDLNICNISISNLRNENAILHAKIDELNACKPSTSSVNHVTICTRCRNINVDAIHDHLALIKQQNDHIAQLSAKINEHDLENENFKFARSMLYSGRRPSIKDGIGFQKGDNVKLNAPKKLSSFVKGKAPMVYASGGSSWIIDSGCTNHMTGEKMMFSYEKNHDPQRAITFGDGNQDIGVTVFRRSDDSVAFKGVLEGQLYLVDFNRAELDTCLIAKTNMGWLWHRRLAHVGMKNLHKLLKGEHILGLTNVHFEKDRTLKGFLRRAQNEFSLRIKKIRRDNGTEFKNSQIEGFLEDEGIKHEFSSPYTPQQNGVVERKNRTLLDMARTMLNEYKTSDRFWAEAINTACYAINRLYLHRILKKTSYELLIGRKSKFAPKAVEGFLLGYDSNTRAYRVFNMSTRLVEVSCDIVFDETNGSQVEQVDLDELDDEEAPCVALRNMSIGDVCPKESEEPPHTQDQPSSSNQASPPTQDEDHAQGNENEDQEESPQEEDNDQGGDANDQDKEEDEEPRPPHPRVHQAIQRDHPVNSILGYIHKGVTTRSHVAHFCEHYSFVSSIEPYRVEDALRDSDWXTKWVFRNKQDEHGVVIRNKARLAAKDYSQVEGLDFGETYAPVARLESIRILLAYATYHGFKLYQMDVNSAFLNGPIKEEVYLEQPLGFEDSEYPNHVYKLSKALYGLKQAPRAWYECLRDFLITNGFKVGKADPTLFTKTIAKDLFDHGTKFEMSMMGELKYFLGFQVKQLQEGTFISQTKYIQDILTKFVMKDAKPIKTPMGTNGHLDLDTGGCKFDRKSTSGTCQFLGRSLVSWASKKQNSVALSTAEAEYIAAGHCCAQLLWMRQTLRDYGYKFSKVSLLCDNESVIRMADNPVEHSRTKHIAIRYHFLRDHQQRGDIEIAYINTKEQLADIYTKPLDEKTFTKLRNELNILDSRNFD

SEQ ID NO: 215558 - protein, 213 aa, Zea mays
  Clone ID: MRT4577_128188C.1.pep
MAATAESPSTGGFVLWLHGSGGSGDESRAQVAPYFSDPGVASSVRLSFPTAPTSFIPCYGDVVITAWFGISEVPITAKTVRDEKEVLKAVEYVHELIDKEVAAGTSPSNIFVCGMSQGGALAIASALLYPKTLGGCAVFSGSVPPNKSFADKVSPEARKTPVLWFHGMADGVVLFEAGHAGCAFLEELGMSCEFKLILPLDIPWLTKSFNTFS

SEQ ID NO: 215559 - protein, 80 aa, Zea mays
  Clone ID: MRT4577_128189C.1.pep
PLLQTAVLWVVYNNCVCDTVHTPSAAARTCGMTRWHSDPAQRTLSVSSRCGRTGTGGAGVHVYIYMPLPLCSCSALSQCQ

SEQ ID NO: 215560 - protein, 70 aa, Zea mays
  Clone ID: MRT4577_12818C.1.pep
LEFLFFLGLVKCGTMFSRHAGQQGSLSSQPPDSDNKQLIHLQPFHTYTTVLVFTFNTILNKLHQIFNTLC

SEQ ID NO: 215561 - protein, 108 aa, Zea mays
  Clone ID: MRT4577_128190C.1.pep
SVAASLPHEQSDCLRYTLSVAALFHSLTLLHMTRALPLMATHTILQNAHTLSMLLLPWNRCPPRWLCRWRQPGPLPQAWMPATPRGHRLYPAASCLGASAGLKWTRNI

SEQ ID NO: 215562 - protein, 411 aa, Zea mays
  Clone ID: MRT4577_128191C.1.pep
GAFESMGAGLAMAPGDIAFKSNFATLDENTGVIISRRADRHFEEEGPILCAALDGMKLRSFPEYEVRVRYATEHRCGVVVKGPKLSGNISGTDPLKDNRLHLKAEPLDGSEEAKNTAAVVNELSMEITRILVSHPINAKRAAEGKNIANVVLLRGCGIRIEVPAFETKHGLAPCMVAPTKIIAGLGLSLGIDILEAPGATGDYRTLLTSKAKAIAKALSAPMDTPPRVFVPGEDGYKAGKENGYDFGFLHIKAIDDAGHDKAVKLKVRGLEAVDRAIGQLARLLWEAEKAGHYQYFLCVTGDHSTPVEYGDHSFEPVPFAICRLRDYAGAIGEDNIMNTQLDDFPLPSVKSGEDLLDSIESLEHKPGQLKAFSGDSVCEFNEIAAARGCLGRFPGSEMMGIIKKFIKAKND

SEQ ID NO: 215563 - protein, 72 aa, Zea mays
  Clone ID: MRT4577_128192C.1.pep
FFGPNYAPFFVLRSVFICYGKRAGTFQWIMDGSVKPSKVRLARCINLAYRDARGIRSRVSNYNLARTNLIRA

SEQ ID NO: 215564 - protein, 179 aa, Zea mays
  unsure (1)..(179): unsure at all Xaa locations
  Clone ID: MRT4577_128193C.1.pep
GRTGTRAGTPGATDRARAAXREGXRGGPPRREGRAGQSQRXGXGRERPNEGRGRRRAEKRPGSGGADXEANSQKPAHPRRRARGDPTKREDQEREPTEPPRRGGTXPARRGHQQGKTXPGTRRRKPSGRARRGREQSNTRGSRPTRTGRADTKGPKSNGSKNARRTQASEAGGTRSERP

SEQ ID NO: 215565 - protein, 313 aa, Zea mays
  Clone ID: MRT4577_128194C.1.pep
MGEASPSIAKDVTEVTDGCVGRVAAKLESMEPCSSVKDRIGYSMITDAEEKGLITPGVSVLIEPTSGNTGIGLAFMAAAKGYKLTLTMPASMSMERRIILKAFGAELVLTDPLLGMKGAVKKAEEIQAKTPNSYILQQFENPANPKIHYETTGPEIWKATAGKIAGLVSGIGTGGTITGTGRYLREQNPNVKLYGVEPVESAVLNGGKPGPHKIQGIGAGFIPGVLDVDLLDETLQVSSDEAIETAKALALKEGLLVGISSGAAAAAAVRLAKRPENAGKLFVVVFPSFGERYLSSVLFQSIKKEAESMVVEP

SEQ ID NO: 215566 - protein, 325 aa, Zea mays
  Clone ID: MRT4577_128195C.1.pep
MGEASPSIAKDVTELIGNTPLVYLNKVTDGCVGRVAAKLESMEPCSSVKDRIGYSMITDAEEKGLITPGVSVLIEPTSGNTGIGLAFMAAAKGYKLTLTMPASMSMERRIILKAFGAELVLTDPLLGMKGAVKKAEEIQAKTPNSYILQQFENPANPKIHYETTGPEIWKATAGKIAGLVSGIGTGGTITGTGRYLREQNPNVKLYGVEPVESAVLNGGKPGPHKIQGIGAGFIPGVLDVDLLDETLQVSSDEAIETAKALALKEGLLVGISSGAAAAAAVRLAKRPENAGKLFVVVFPSFGERYLSSVLFQSIKKEAESMVVEP

SEQ ID NO: 215567 - protein, 195 aa, Zea mays
  Clone ID: MRT4577_128196C.1.pep
AVKKAEEIQAKTPNSYILQQFENPANPKIHYETTGPEIWKATAGKIDGLVSGIGTGGTITGTGRYLREQNPNVKLYGVEPVESAVLNGGKPGPHKIQGIGAGFIPGVLDVDLLDETLQVSSDEAIETAKALALKEGLLVGISSGAAAAAAVRLAKRPENAGKLFVVVFPSFGERYLSSVLFQSIKKEAESMVVEP

SEQ ID NO: 215568 - protein, 325 aa, Zea mays
  Clone ID: MRT4577_128197C.1.pep
MGEASPSIAKDVTELIGNTPLVYLNKVTDGCVGRVAAKLESMEPCSSVKDRIGYSMITDAEEKGLITPGVSVLIEPTSGNTGIGLAFMAAAKGYKLTLTMPASMSMERRIILKAFGAELVLTDPLLGMKGAVKKAEEIQAKTPNSYILQQFENPANPKIHYETTGPEIWKATAGKIDGLVSGIGTGGTITGTGRYLREQNPNVKLYGVEPVESAVLNGGKPGPHKIQGIGAGFIPGVLDVDLLDETLQVSSDEAIETAKALALKEGLLVGISSGAAAAAAVRLAKRPENAGKLFVVVFPSFGERYLSSVLFQSIKKEAESMVVEP

SEQ ID NO: 215569 - protein, 146 aa, Zea mays
  Clone ID: MRT4577_128198C.1.pep
EQKEGGFNIEHRPRGGQLITCVIYKPGQLHFWGGGNPPYKIPWDPLFFKRAKRGGKTQTQRSGVNPHPLQKTGMTRWLRANLKRTVFFPQIFRGSLLGGRAWEPPVPKPPKCGFGSKLGPGFKAFFPQFTGHFKGRGVGLNPLGGG

SEQ ID NO: 215570 - protein, 161 aa, Zea mays
  Clone ID: MRT4577_128199C.1.pep
YFTTVLTLVVFLYIASDCEIKAVQCVSCKKKKKKKKKKKKKKKKKKKKKKKKKKKKKKKKKKKKKNKEEGKKKKKKKKKKKGGGLFLKKKNLSPGGLQKLNFFFLGPQKKKKGARFKKRGRGKNPGDPKLKPFKKNPFFRGWVKKKKAPTNPLSKNLPTFN

SEQ ID NO: 215571 - protein, 75 aa, Zea mays
  Clone ID: MRT4577_12819C.1.pep
GLSHDRPPSVKTNYYGNLSPLFRLVKVRGFSSIRAMPPFCVYGSGTDQACFITIFSLTHLSNKSSTSWLPLLGPS

SEQ ID NO: 215572 - protein, 219 aa, Zea mays
  unsure (1)..(219): unsure at all Xaa locations
  Clone ID: MRT4577_1281C.1.pep
MARRASLLLAAALLVAVAAAAVPPTCERIECPAYEVVDSANGFEIRRYTDAMWITTAPIEDISFVAATRTGFLQLFDYIQGKNAYNETIEMTAPVLTRVSPSDGPFCASAFAVSFYVPAKNQADPPPAEGLRVDRWAGARYAAVRRFGXFVADVDVGEQAARLEASLQGTRWAAAVNDARRADPASPYTVAQYNSPFEFTGRVNEIWMLFDADDDASTS

SEQ ID NO: 215573 - protein, 115 aa, Zea mays
  Clone ID: MRT4577_128200C.1.pep
GCHLNNNILLQQYRLCAMILEMSTSLNPSGICKHSIKVLRRISFNGKYRSPSSILSISSPYSVSKASRWLAHTLCSFVVQCVQAVIMFTCLSMFVPVSDHNKYFLVPTTAKWINK

SEQ ID NO: 215574 - protein, 325 aa, Zea mays; identical to SEQ ID NO: 215568
  Clone ID: MRT4577_128201C.1.pep

SEQ ID NO: 215575 - protein, 76 aa, Zea mays
  unsure (1)..(76): unsure at all Xaa locations
  Clone ID: MRT4577_128202C.1.pep
WAHIMGAGSGFCSQVYDLSPVFLVXCWIMXQLDNNVXITAITGSTNGCSLVVMFKGRPYTGYGYEVSESFPRKSIS

SEQ ID NO: 215576 - protein, 102 aa, Zea mays
  unsure (1)..(102): unsure at all Xaa locations
  Clone ID: MRT4577_128203C.1.pep
NTRSRGGGRLNKEEMXKMVQEAEKYKAEDEEVXKKVDAKNALENYAYXLLNTIKGGLMGGXLPAEDMKKIEDAVDGSISWLDSNHLAEVEEFDDTINDLVGI

SEQ ID NO: 215577 - protein, 78 aa, Zea mays
  unsure (1)..(78): unsure at all Xaa locations
  Clone ID: MRT4577_128204C.1.pep
TRPRTLGVTRGSQSQQDGDSRAAAAGFDDFSFHTATTNAVLRAHDDDVLTFLRGAAAASRKIRRPVEQQGEXRTERQH

SEQ ID NO: 215578 - protein, 637 aa, Zea mays
  Clone ID: MRT4577_128205C.1.pep
MSGDHAKKMVIGGEKSATSHGKAPSRESTNKKKDGSPSRIRSHKSGEKKKKMKKVVYYETDSSSPSTSGSDAASVTSKRQERKKYSKIPLRYPRIPKHTPLLSVPLGKPPTFDGEDYSRWSDMMRYHLTSLHKSIWDVVEFGVQVPSVGDEDYDEDEVAQIVHFNSQATTILLTSLSREEYNKVQGLKSAKEIWDVLKTAHEGDEVTKITKRETIEGELGRFRLFQGEEPQEMYNRLKTLVNQVCNLGSKKWDDHEMVKVILRSLVFLNPTQVQLIRGDPRYTLMSPEEVIGKFVSFELMIKGSKKIIEQDGPSTPEAQPVAFKATEEKKEESTSSRLPIDASKLDNEEMALIINSFRQILKQRRGKDYKSRSKKGDDKKGKRREKKRYYKKKGGDANVCREWDSDESSTDSSSDEDAANIAVTKGLLFPNVGHKCLMAKDDKRKKVKSRSSTKYASSSDEDNSSDEEDNLHTLFANLNMQQKEKLNELISAIHEKDELLDTQEDFLIKENKKHVKIKNAYALEVEKCEKLSSELSMCHDIIANLRNENARLNAKADSNVCDDSISNLRDDNGNLLAKIEELNVSLASLRNENENLIAKAKDLDVCNTSISNLRSENDILHAKIVELKSCKPSCRGP

SEQ ID NO: 215579 - protein, 1892 aa, Zea mays
  Clone ID: MRT4577_128206C.1.pep
MSGDHAKKEMETGEKPTTSHGSTSSEESRTKRREKKKSSSIKGKEKKSSSHHKEKKEKSSSHKPHRKGDKHKRMRKVVYYETDTSSTSTSDSDAPSVTSKRQERKKYSKIPLRYPRISKHTPLLSVPLGKPPTFDGEDYARWSDLMRFHLTSLHKSIWDVVEFGAQVPSVGDENYDEDESAKEIWDVLKTAHEGDELTKITKRETIEGELGRFRLRKGEEPQHMYNRLKTLVNQVRNLGSKKWDDHEVVNVILRSLIFLNPTQVQLIRGNPRYTKMTPEEVIGHFVSFECMIEGSRKINELGDPSEAQPVAFKATEEKKEESTPSRQPIDASKLDNEEMALVIKSFCQILKQRRGKDYKSRSKKVCYKCGKPGHFIAKCPISSDSDRGDDKKGRRKEKKRYYKKKGGDAHVCREWDSDESSSDSSDDEDAANIAVTKGLLFPNVGHKCLMAKDDKKKKVKSNSSTKYESSSDDNASDEEDNLRSLFANLNVAQKEKLNELVSAIHEKDDLLDSQEDCLIKENKKHVKVKKAYALEVEKCEKLSSELSTCREMIDNLRNENASLNAKVDSHVCNVSIPNPRDNNDDLLARIEELNISLASLRLENESLIAKAKDFDVCKVTIANLRDKNDILHAKIVELNSCKPSTSIVEHVSICTRCRNVDIDAIHDHMALIKQQNDHIAKLDAKIAEHNLENEKFKFARSMLYNGRRPGIKDGIGFQRGDNVKLNAPPKNLSNFVKGKAPMPQDNEGYILYPAGYPESKIRKIHSRKSHSGPNHAFMYKGETSSSRQPTRAKLPRKKISNASNEHSISFKTFDASYVLTNKTGKVVAKFVGGKHKGSKTCVWVPKVLVSNAKGPKTVWVYASGGSSWILDSGCTNHMTGEKRMFSSYEKNKDPQRAITFGDGNQGVTVFRRSDDSIAFKGVLEGQLYLVDFDRAELDTCLIAKTNMGWLWHRRLAHVGMKNLHKLLKGEHILGLTNVHFEKDRICSACQAGKQVGVHHPHKNIMTTDRPLELLHMDLFGPIAYISIDGSKYCLVIVDDYSRFTWVFFLQEKSQTQETLKGFLRRAQNEFALRIKKIRSDNGTEFKNSQIESFLEEEGIKHEFSSPYTPQQNGVVERKNRTLLDMARTMLDEYKTPDRFWAEAVNTACYAINRLYLHRILKKTSYELLTGKKPNISYFRVFGSKCFILVKRGRKSKFAPKTVEGFLLGYDSNTRAYRVFNKSTGLVEVSCDVVFDETNGSQVEQVDLDEIGEEQAPCIALRNMSIGDVCPRESEEPPNAQDQPSSSKQASPPTQNEDEAQVDEGQNQEDEPPQDDGNDPGGDAIDQEKEDEEEPRPPHPRVHQAIQRDHPVDTILGDIHKGVTTRSRVAHFCEHYSFVSSIEPHRVEEALQDSDWVVAMQEELNNFTRNEVWHLVPRPNQNVVGTKWVFRNKQDEHGVVTRNKARLVAKGYSQVEGLDFGETYAPVARLESIRILLAYATYHGFKLYQMDVKSAFLNGPIKEEVYVEQPPGFEDSEYPNHVYRLSKALYGLKQAPRAWYECLRDFLIANGFKVGKADPTLFTKTLENDLFVCQIYVDDIIFGSTNESTCEEFSRIMTQKFEMSMMGELKYFLGFQVKQLQEGTFICQTKYTQDILTKFGMKDAKPIKTPMGTNGHLDLDTGGKSVDQKVYRSMIGSLLYLCASRPDIMLSVCLCARFQSDPKESHLTAVKRILRYLAYTPKFGLWYPRGSTFDLIGYSDADWAGCKINRKSTSGTCQFLGRSLVSWASKKQNSVALSTAEAEYIAAGHCCAQLLWMRQTLRDYGYKLTKVPLLCDNESAIKMADNPVEHSRTKHIAIRYHFLRDHQQKGDIEISYINTKDQLADIFTKPLDEQSFTRLRHELNILDSRNFFC

SEQ ID NO: 215580 - protein, 159 aa, Zea mays
  Clone ID: MRT4577_128207C.1.pep
HASAPLSIRSAERSPSTAARPTSLLSAPTSWLPRPVSRAPCQPSAESFPIPMAPSLVCVTLLSHMVVTVESSLGSLLHNLLLRALLVLWRSASSFLRADSLFPSCVHYKFLSPIIAQLPRALSMPSLELCPCRVVVRRHVVRHQASLSFLLCLASDVFD

SEQ ID NO: 215581 - protein, 61 aa, Zea mays
  Clone ID: MRT4577_128208C.1.pep
RFLVRLLSFYLCCTLKLLIYEFALYDARCCAVSCNARLKDVKLCFMVFLLPPTLQHVYLVI

SEQ ID NO: 215582 - protein, 983 aa, Zea mays
  Clone ID: MRT4577_128209C.1.pep
MPKLPCAQLRLCSILRFPCASSHCDFDSSPKGPSPKDLRKPKAHNTSSSDDEDDLLTLFANLNMQQKEKLNELISAIHEKDELLDSQEDFLIKKNKKHVKVKNAYAQEIEKCEKLTSELSICHDTISNLRNENVKLIAKVEKLNVCDDSLVKLKNDNASLIAKIDKLNQSFSSLRIENDKLISKAKDLNGCNVSISNLRNENATLHAKIDELNACKPFTSNVNHVTICTRCRDINVDAIHDHLTLIKQQNDHIAQLSAKINEHDLENEKFKFARSMLYSGRRPGIKDGIGFQQGDNVKLNAPKKLSNFVKGKAPMVYASGGSSWIIDSGCTNHMTGEKRMFSCYEKNHDPTELSHSGMEIKVWSKDLEKSQTQETLKGFLRRAQNEFGLRIKKIRSDNGTEFKNSQIEGFLEDEGIKHEFSSPYTPQQNSVVERKNRTLLDMARTMLDEYNTSDQFWAEAINTACYAINWLYLHQILKKTSYELLIGKKPNVSYFRVFGSKCFILVKRGRKSKFAPKVVEGFLLGYDSNTRAYRVFNKSTRLVEVSCDIVFDETNGSQVEQVDLDELDDEEAPCVALRNMSIGDDLAQEDENEDQEDEPPQEEDNDQGGDANGQNKEDDEGPRPPHPRVHQAIQRDHPVNTILGDIHKEVTARSRVAHFCEHYFFVSSIEPYRVEDALRDSDWVLAMQEELNNFTRNEVWHLVPHSNQNVVGTKWVFRNKHDEHGVVTRNKARPVAKGYSQDEEFSRIMIQKFEMSMMGELKYFLGFQVKQLQEGTFISQTKYIQDILTKFGMKDAKPIKTPMGTNGHLDLDTRGCKIDRKSTSGTCQFLGKSLVSWASKKQNSVALSTAEAEYIAAGHCCAQLLWMRQTLRDYGYKLTKVPLLCDNESAIRMADNPVHHSRTKHIAIRYHFLRDHQQSGDIEIAYVSTKEQLADIFTKPLDEKTFTKLRHELNILDSRNFDCYLAHIAHLYTFDHLSFMCYD

SEQ ID NO: 215583 - protein, 365 aa, Zea mays
  unsure (1)..(365): unsure at all Xaa locations
  Clone ID: MRT4577_12820C.1.pep
MADAARGLGSSSLPVANVQALAESCNDNGADAPVPGRYLIKDPSAEEVVAAGDSACAIPVIDFRKLLDPGSSEEECARLGAACHHWGFFQLINHGVPAEVTGNLMKDVAGFFRQPLEAKKECAQQAGSIEGYGQAFVVSEDQKLDWADMLFLIVRPREARDMRFWPTRPESFRDSVDAYSLEASKLAYRLLEFMARGVGADPASLQSMFQGQVQGMRVNYYPPCQQAADQVLGLSPHSDPNGLTLLLQMSHDVHGLQVSKDGRWFPVQALPGAFVVXNVGDALEIVSNGAFRSVEHRAVIHPTKERISAALFHFPDQDRMLGPLPELVKEGDTVRYATTTYQEFMKRFFAAKLDGKKLIERFKLQ

SEQ ID NO: 215584 - protein, 87 aa, Zea mays
  Clone ID: MRT4577_128210C.1.pep
TDWTAAHSFLPSPGRESAVLAGRPVPALQSAGICRHHGAIKEEVPRRQAAPLGLLGLRDQAPAAVRNWWPPMLDLLPSALLASHAAL

SEQ ID NO: 215585 - protein, 1637 aa, Zea mays
  Clone ID: MRT4577_128211C.1.pep
MSEDHAKKEMVTGEKPATSHGKAPSRESGNKKKEGSPSRNRTHKSGEKKKKMKKVVYYETDSSSPSTSGSDAASITSKRQEPKKYSKIPLRYPRIPKHTPILSVPLDKPPTFDGEDYSRWSDMVRYHLTSLHKSIWDVVEFGVQVPSVGDEDYDEDEVAQIEHFNSQATTILLTSLSREEYIKVQGLKSVKEIWDVLKTAHEEDEVTKITKRETIEGELGRFMLNQGEDPQAMYNRLKTLVNQVRNLGSSKWDDHEMVNVILRSLVFLNPTQVQLIRGDPRYKLMSPEEVIGKFVSFELMIKGSKKIIEQGASSTPDVQPVAFKATEEKKEDSTPSRVPIDASKLDNEEMALIIKSIRQILKQRRGKDYKSRSKKVCYKYGKPGHFIAKCPLSSDSDRDNDKKGKRREKKRYYKKKGGDAHVCREWDSDESSTDSSSDDDAANIAVTKGLLFPNVGHKCLMAKDDKRKKVKSRASTKYATSSDEASSSDDEDDLLTLFANLNMQQKEKLNELISAIHEKDEFLDSQEDFLVKENKKHVKVKNAYALEVEKCEKLSSELSTCHDVISNLRNENAKLIAKVEKSNICDDSIDNLRNDNASSIAKIEKLNASLASLRNENEKLIAKAKELDVCNVSIFNLRDENDILHAKIVELNSCRPSTSTVEHVTICTRCRDVNIDAIHDHIAMIKQKNDHIAKLDAKIAEHELENEKFKFARSILYSGRRPGIKDDIGFQKGGNVKLNAPPKRLSNFVKGKAPMPQDNEGYILYPTGYPEHKIRRIHSRKSHSGSNHAFMYKSEASSSRQSTRAKLPKKKTHIASNEHNISFKTFDASYVLTNKSGKVVAKYVGAKHKGSKTCIWVPKVYASGGSSWIIDSGCTNHMTREKKIFSSYEKTMIPKELSHSGMEIKEKSQTQETLKGFLRWAQNEFGLRIKKIRSNNGTEFKNSQIESFLEEEGIKHEFSSPYMPQQNGVVERKNRTLLDMARTMLDEYKTSNRFWAEAVNTACYAINRLYLHRILKKTSYELLTGKKPNVSYFRVFGSKCFILVKRGRKSKFAPKAIEGFLLGYDSNTRTYRVFNKSSGLIEVSCDIVFDETNGSQVEQVDLDELDDEEAPCVALRNMSIGDVCPKESEEPPHAQDQPSSSMQASPPTQDEDQAQDDDDEDQEEPPQEEDNDQGGNDNDQDKEDDEGPRPPHPRVHQAIQRDHPVNTILGDIHKGGSTSRFGLGVGDARELNNFTRNEVWHLVPRPNQNVVGTKWVFRNKQDEHGVVTRNKARLVAKGYSQVKGLDFGETYAPVARLESIRILLAYAIYHGFKLYQMDVKSAFLNGPIKEEVYVEQPPGFEDSEYPNHVYKLSKALYGLKQAPRAWYECLRDFLITNGFKVGKADPTLFTKTLANDLFICQIYVDDIIFGSTNESTCEEFSRIMTQKFKMSMMGELKYFLGFQVKQLQEGTFISQTKYIQDILTKFGMKDAKPIKTPMGTNGHLDLDTGGCKINRKSTLGTFQFLGRSLVSWASKKQNSVALSTAEAEYIAAGHCCAQLLWMRQTLRDYGYKLTKVHLLCDNESAIRMADNPVEHSRTKHIAIRYHFLRDHQQKGDIEISYINTKEQLADIFTKPLDEQTFTKLRHELNILDSRNFD

SEQ ID NO: 215586 - protein, 83 aa, Zea mays
  Clone ID: MRT4577_128212C.1.pep
IFDSLPWGGQQKLLLFLKESPCCCLTCGFTCTVDSICVPPMSKGWYFPLDPMDHRSGESHFKRDKSMCQSSVEKLFFACIGKI

SEQ ID NO: 215587 - protein, 186 aa, Zea mays
  unsure (1)..(186): unsure at all Xaa locations
  Clone ID: MRT4577_128213C.1.pep
LRDDNIDLLAKIEELNISLASLRNENEKLIAKAKELDVCNVSISDLRDKNDILRAKIVELNSCKPSTSTTEHVTICTRCRDVDVNAIHDHLSMIKQQNDHIANLDAKIAEHELENEKFKFVRSMLYNGRRPGIKDGIGFQQGGNVKLNAPPKKLSNFVKGKATCPXDNEGSFCPTGYPRXKIEKIR

SEQ ID NO: 215588 - protein, 176 aa, Zea mays
  Clone ID: MRT4577_128214C.1.pep
FELMIKGSKKIIERGASSTPEAQPVAFKATEEKEEESTPSRTPIDASKLDNEEMALIIKSFRQILKQRRGKDYKPRSKKVCYKCGKPGHFIAKCPLSSDSDRGDDKKGRRKEKKRHYKKKGGDAHVCREWDSDESSIDSSSNEDAANIAVTKGLLFPNVGHKCLMAKEGKKKKVKS

SEQ ID NO: 215589 - protein, 1409 aa, Zea mays
  unsure (1)..(1409): unsure at all Xaa locations
  Clone ID: MRT4577_128215C.1.pep
MSGGSAKREMETTISHGKAPSKEYDAKGREESPPRVKSHRSGDKKKKMKKVVYYETDSSSPSTSGSDAPFVTSKRHERKKFSKIPLHYPRISKXLLYFPSHXQTTVFXTVKIIEYSKVQGLKSAKEIWDVLKTAHEGDEVTKITKWETIKGELGRFILNQGEEPQAMYNRLKTLVNQVRNLGSTKWDDHEMVKVILRSLVFRNPTQVQLIHGDPRYKLMTPEEVIGKFVSFELMIKGSKQIVEQGATSTPEVQPVAFKATEEKKEESTSSRLPIDASKLNNEEMTLIIKSFRQILKQRRGKDYKPRSKKVCYKYGKPGYFIAKCPLSSDSDRGDDKKGRRKEKKKYYKKKGGDAHDAANIAVTKGLLFPNVGHKCLMAKDDKKKKVKSRASTKYTSSDDGSSSDDEDDLLALFANLNMQQKEQLNELIGVIHEKDELLDTQEEFLIKENKKHVKVKNAYAQEIEKCEKLTSELSTCHDTISNLRNENANLLAKDEKSNVCHDSIVNLKYDNASLITKIDKLNESISSLKIENASLISKAKDSNVCNVSISNLRYENDILHAKIDDSKSCKPFTSTVDHKIGKFKFARSMLYNGRHPGIKDGIGFQQGDNVKLNAPKRLSNFVKGKAPMAQDNEGYILYHAGYPEHKIRRIHSRNSHSGSHHAFMYNNETSSFRHSTHVKMPKKKSHVASNEPNVSFKTFDASCVLTNKSGKIVAKYVGGKHKGSKTCVWVPKVLVSNVKGPKTVWVYASGGSSWIIDSGCTNHMTGEKRMFSSYEKNDDPQRAITFKDGNQDSLDYNLLSVSQLCKMGYNYLFTDIGVTVFRRNDDSVAFNGVLEGQLYLVDFNRAKLDTCLIAKTNMGWLWHHRLAHVGMKNLHKLLKGEHILGLTNVHFEKDREKSQTQETLKGFLRQAQNEFGLKIKKIRSDNGMEFKNSQIEGFLEEEGIKHEFSSPYTPQKNGVVERKNRTLLDMARTMLDEYKTPDRFWAEAINTACYSINRLYLHRILNKTSYELLTGKKPNVSYFRVFGSKCFILVKRSRKSKFAPKVVEGFLLGYDSNTRAYRVFNKSIGLVEVSCDIVFDETNGSQVEQVDLDELDDEEVPCVALRNMSIGDXEDQAQDNEEEDXEDEPLQEKDNDQGGDDNDQDKEDDQEVXPYRVEDELRDSDWVLAMQEELNNFTRNELYQMDVKSAFLNGQIKEEVYVEQPPGFEDSEYPNHVYKLSKELYGLKQAPRAWYECLRDFLITNGFKVGFQVKQLREGTFISQTKYIQDILTMFGMKDAKPIKTPMGTNGHLDLDTGGKSIDQKDINARLLWMRQTLRDYGYKLSKVPLLCDNESAIRMADNPVEHSGTKHIAIRYHFLRDHQKRGDIEIAYVSTKEQLADIFTKPLDEKTFTKLRNELNILDSRNFD

SEQ ID NO: 215590 - protein, 160 aa, Zea mays
  unsure (1)..(160): unsure at all Xaa locations
  Clone ID: MRT4577_128216C.1.pep
LVSSSILFXQXLSLHFYLIIYHXKXQTVLVLLITKXYIPSLLCPKFTLLSIIYYHIDCPSKQYILSLLSYLLESSGTEKMIGVLLRNIHVTIYIVCNSSSLCRHCAEAEQFYIYLYSPPTQGRPATKAIRTHTTLNFYSKRNILSCQQISLPYTIIPPTA

SEQ ID NO: 215591 - protein, 83 aa, Zea mays
  Clone ID: MRT4577_128217C.1.pep
STPLKLSLVVLQVFFLAPAGSFFLVPLSAWLVFIAASFSFSIWFATSSCIVFRPSSIQRCVSCWVSCPFILTSPLVPLACPCL

SEQ ID NO: 215592 - protein, 126 aa, Zea mays
  unsure (1)..(126): unsure at all Xaa locations
  Clone ID: MRT4577_128218C.1.pep
MWQYTDEHLLCAESPNPEEWGGAIEFSIISEYYRRXIAGYDIHTTRCGLYGXDKNLSERAVLIYDGXHYDALDMPPXEGXASEEYDQTIFPVNDDRXIGPHXGMPQLEREAHRKRSYTDTAXLTLS

SEQ ID NO: 215593 - protein, 170 aa, Zea mays
  Clone ID: MRT4577_128219C.1.pep
MPPSASMPATHTAVYVAAVPLRAPKGPAQLLMSAGYSLGMWDLQHFMVLLRPDPALAQALVFDFQPRDPEDVLAALAVLSRREIPGVVRRRTLRRVPDRRCWLVGHCCDAVGAATRFSERWTTGLVVGEHDCRDYTDGLVEVLTGEKRVLESLRLRGNGSSTSTSGAAPP

SEQ ID NO: 215594 - protein, 75 aa, Zea mays
  Clone ID: MRT4577_12821C.1.pep
PPRSAEAVLEPEKADEFKKGVEGATKFLLSKLKDLQFFVGESMKDDASVVFAYYKDGATNPTFLYFSHGLKEIKC

SEQ ID NO: 215595 - protein, 61 aa, Zea mays
  Clone ID: MRT4577_128220C.1.pep
IPGVVRRRTLRRVPDGRCWLVGHCCDAVGAATRFSERWTTGLVVGEHDCRDYTNGNLSALS

SEQ ID NO: 215596 - protein, 1889 aa, Zea mays
  Clone ID: MRT4577_128221C.1.pep
MSGDHAKKEMETGEKPTTSHGSTSSEESRTKRREKKKSSSNKGKEKKSSSHHKEKKEKSSSHKPHRKGDKHKRMRKVVYYETDTSSTSTSDSDAPSVTSKRQERKKYSKIPLRYPRISKHTPLLSVPLGKPPTFDGEDYARWSDLMRFHLISLHKSIWDVVEFGAQVPSVGDENYDEDELAQIEHFNSQATTILLASLSKEEYNKVQGLKNAKEVWDVLKTAHEGDELTKITKRETIEGELGRFRLNKGEEPQHMYNRLKTLVNQVRNLGSKKWDDHEVVNVILRSLIFLNLTQVQLIRGNPRYTKMTPEEVIGHFVSFECMIEGSRKINELGDPSEAQPVAFKATEEKKEESTPIRQPIDASKLDNEEMALVIKSFRQILKQRRGKDYKSRSKKVCYKCGKPGHFIAKCPMSSDSDRGDDKKGRRKEKKRYYRKKGGDAHVCREWDSNESSSDSSDDEDAANIAVTKGLLFPNVGHKCLMAKDGKKKKVKSNSSTKYESSSDDNASDEEDNLRILFANLNMEQKEKLNELISAIHEKDDLLDSQEDCLIKENKKHVKVKKAYALEVEKCEKLSSELSTCREMIDNLRNENAILNAKVDSHVCNVSIPNLRDDNIDLLAKIDELNASLARLRLENENLIAKAKDFDVCNATISDLRTKNEMLHAKVVELKSCKPSTSNVEHVSICTRCRDIDVNAILDHMALIKQQNDHIAKLDAKIAEHNLENEKFKFARSMLYNGRRPGIKDGIGFQRGDNVKLNAPPKNLSNFVKGKAPMPQDNEGYILYPAGYPESKIRKIHSRKSHSGPNHAYMYKGETSSSRQPTHAKLPKKKIPNASNDHAISFKTFDASYVLTSKSGKVYASGGSSWILDSGCTNHMTGEKRMFSSYEKNQDPQRAITFGDGNQGVTVFRRSDDSIAFKGVLEGQLYLVDFDRAELDTCLIAKTNMGWFWHRRLAHVGMKNLHKLLKGEHILGLTNVHFEKDRICSACQAGKQVGVHHPHKNIMTTDRPLELLHMDLFGPIAYISIGESKYCLVIVDDYSRFTWVFFLQEKSQTQETLKGFLRRAQNEFGLRIKKIRSDNGTKFKNSQIEGFLEEEGIKHEFSSPYTPQQNGVVERKNRTLLDMARTMLDEYKTPDRFWVEAVNTACYAINRLYLHRILKKTSYELLTGKKPNISYFRVFGSKCFILVKRGRKSKFAPKTVEGFLLGYDSNTRAYRVFNKSTGLVEVSCDVVFDETNGSQVEQVDLDEIGNEEAPCIALRNMSIGDVCPKESEEPPNAQDQPSSSMQASPPTQNEEEAQVDEGQNQEDEPPQDDSNDQGGDAIDQEKEDEDEPRPPHPRVHQAIQRDHPVDTILGDIHKGVTTRSRVAHFCEHYSFVSSIEPHRVEEALQDSDWVVAMQEELNNFTRNEVWHLVPRPNQNVVGTKWVFRNKQDEHGVVTRNKARLVAKGYSQVEGLDFGETYAPVARLESIRILLAYATYHGFKLYQMDVKSAFLNGPIKEEVYVEQPPGFEDSKYPNHVYRLSKALYGLKQAPRAWYECLRDFLIANDFKVGKADPTLFTKTLENDLFVCQIYVDDIIFGSTNESTCEEFSRIMTQKFEMSMMGELKYFLGFQVKQLQEGTFISQTKYTQDILTKFGMKDAKPIKTPMGTNGHLDLDTGGKSVDQKVYRSMIGSLLYLCASRPDIMLSVCMCARFQSDPKESHLTTVKRILRYLAYTPKFGLWYPRGSTFDLIGYSDADWAGCKINRKSTSGTCQFLGRSLVSWASKKQNSVALSTAEAEYIAAGHCCAQLLWMRQTLRDYGYKLTKVPLLCDNESAIKMADNPVEHSRTKHIAIRYHFLRDHQQKGDIEISYINTKDQLADIFTKPLDEQSFTRLRHELNILDSRNFFC

SEQ ID NO: 215597 - protein, 126 aa, Zea mays
  Clone ID: MRT4577_128222C.1.pep
QNAVSLPAHGIRSSGLPCACRADRRRLASSSHAKRATRRLAIGDAERGKERKHPSTEDKVRLRCQRGHIGRRLIQEPIRAKARDWSKHVHAGGGRRRRPPGGLRRRGSGLREHKRSLTIGPHHLRG

SEQ ID NO: 215598 - protein, 74 aa, Zea mays
  Clone ID: MRT4577_128223C.1.pep
ENGGSTIKGHKNYWRGSKILNFNDRRHDTYPSGILWLILDTTVVLSYQSEGPIQKPTTMLPRGMVFPRYQGDDS

SEQ ID NO: 215599 - protein, 669 aa, Zea mays
  unsure (1)..(669): unsure at all Xaa locations
  Clone ID: MRT4577_128224C.1.pep
MSGDHAKKEMETGDKPTTSHGKASSEESRNKGKGKENKSSSHKTHRSGDKKKKMRKVVYYETDTSSPSTSGSDAPSITSKRHERKKFSKIPLRYPRISKHTPLLSVPLGKPSTFDGEDYARWSDLMKFHLTSLHKSIWNVVEFGAQVPSVGDEDYDEDEVAQIEHFNAQATTILLASLSREEYNKVQGLKSAKEVWDVLKTAHEGDELTKITKRETIEGELGRFRLRKGEEPQDMYNRLKTLVNQVRNLGSKKWDDHEMAKVILRSLIFLNPTQVQLIRGNPRYTLMTPEEVIGNFVSFEYMIKGSKKINELDDPSTFEAQPVAFKATEEKEESTSSRQPIDASKLDNEEMTLVIKSFHQILKQRXGKDYKPRSKKVCYKCXGDDKKGRXKEKKKYYKKKGGDAHVCREWDSDESSSDSSSDEDATNITINKGLLFPNVGHKCLMAKDGKKKKVKSKSSTKYESSSDDNASDEEDNLRTLFANLNMQQKEKLNELISAIHEKDDLLDTQEDFLIKENKKHVKVKNAYALEVEKCEKLSSELSTCHETIDNLRNENASLIAKVESNACNVSIPNLRNDNVDLLAKIEELNNSLASLRNENEKLLTKAKELDLCNVTISDLRDKNDILHAKIVELNSCKPSTSTTEHVTICTRCRDVDINAERELGLHLFS

SEQ ID NO: 215600 - protein, 213 aa, Zea mays
  Clone ID: MRT4577_128225C.1.pep
MAPETMLLGVCAVLMVVGVTNAAEGQVASVVVGLARCADSTRKNMKAEAGFKGLQVAIKCKNSNGEYETKAVSEIQSSGAFSVPLAADLHGADCHAQLHSAANNAPCPGQEPSRIAPMSGGTFVAVPGKMHYPSAECASAFLCSPIKKHLLDHFHKAPLPVPEYHPVPDHSKPPVPEYPPVPEHSKPAPEYPPPTPVYGQPKPTPIYHPPAEP

SEQ ID NO: 215601 - protein, 1245 aa, Zea mays
  Clone ID: MRT4577_128226C.1.pep
MYNRLKTLVNQVRNLGSTKWDDHEMVKVILRSLVFLNPTQVQLIRGDPRYKLMSLEKVIGKFVSFELMIKGSKKIIEQGASSTPKMQPVAFKATEEKKEESTSSRLPIDASKLDNEEMALIIKSFRQILKQRRGKDFKPRSKKVCYKCGKPGHFIAKCPLSSDSGRDNDKRGKKKEKKRYYKKKGGDAHVCQEWDSNESSTDSSSDEDAANITINKGLLFPNVGHKCLMAKDDKRKKDDLLTLFANLNMQQKEKLNELISAIHEKDELLDSQEDFLIKENKNHVKVKNAYAQEIEKCEKLTSELSTCHDTISNLRFENDKLIAKVEKVNVGDDYLVNLRNDNANLIAKIDKLNASLSILKIENEKLIAKAKDLNVCNVSISNLRDENAILHAKIVELSTCKPSTSAVEHVTICTRCRDINVDAIHDHLALIKQQNDHIAQLSAKISEHDLENEKFKFARSMLYSGRRPGIKDGISFQKGDNVKLNAPKKLSNFVKGKAPMAQDNEGYILYPAGYLEHKIRRIHSRKSHSGSHHAFMYKSEASSSRQSTHVKLPKKKSPIASNEPNISFKTFDASYVLTNKSGKVVAKYVGGKHKGSKTCVWVPKVYASGGSSWIIDSGCTNHMTGEKRMLSSYEKNHDPQRAITFGDGNQDSLDYNLLSVSQLCKMGYNCLFTDIGVTIFRRSDDSVAFKEKSQTQETLEGFLRRAQNEFGLRIKKIRSDNGMEFKNSQIEGFLEDEGIKHEFSSPYTPQQNGVVERKNRTLLNMARTMLDEYKTLDRFWAEAINTACYAINCLYLHRILKKTSYELLTGKNPNVSYFRVFGSKCFILVKRGRKSKFAPKAVEGFLLGYDSNTRAYRVFNKSTGLAEVSCDIVFDETNGSQVEQVDLDELDDEEAPCVALRNMSIGDVCPKESEEPPQAQDQPSSSMQASPPTQDEDQAQEDENEDQEDEPPQEGDNDQGRDAHDQDKEDDDGPRPPHPRVHRAIQRDHPVNSILGDIHKGVTTRSRVAHFCEHYSFVSSIEPYRVEDALRDSDWVLAIQEELNNFTRNELYQMDMKSAFLNGPIKEEVYVEQPPGFEDSEYPNHVYKLSKALYGLKQAPRAWYECLRDFLIANGFKVGKADPTLFTKTIANDLFVCQIYVDDIIFGSTNKSTCEEFSRIMVQKFEMSMMGELKYFLGFQVKQLQEGTFISQTKYIQDILTKFGMKDAKPIKTPMGTNGHLDLDTGGKSVDQKVCVGINHQKGGD

SEQ ID NO: 215602 - protein, 343 aa, Zea mays
  Clone ID: MRT4577_128227C.1.pep
MAPERMLLGVCAELMVVGVTNAAEGQVASVVVGLARCADSTRKNMKAEAGFKGLQVAIKCKNSNGEYETKAVSEIQSSGAFSVPLAADLHGADCHAQLHSAKNNSHYPTGGLAGGGGTTHKHTMAPETMLLGVCAVLMVVGVTNAAEGQVASVVVGLARCADSTRKNMKAEAGFKGLQVAIKCKNSNGEYETKAVSEIQSSGAFSVPLAADLHGADCHAQLHSAANNAPCPGQEPSRIAPMSGGTFVAVPGKMHYPSAECASAFLCSPIKKHLLDHFHKAPLPVPEYHPVPDHSKPPVPEYHPVPEHSKPAPEYHPPTPEYHPPTPVYGQPKPTPIYHPPAEH

SEQ ID NO: 215603 - protein, 219 aa, Zea mays
  Clone ID: MRT4577_128228C.1.pep
MAAGRMLLGVCAVLMVVTVTNTAEGQVASVVVGLARCADSTRKNMKAEAGFKGLQVAIKCKNSNGEYETKAVSEIQSSGAFSVPLAADLHGADCHAQLHSAANNAPCPGQEPSKIAPMSGGTFVAVPGKMHYPSAECASAFLCSPIKKHLLDHFHKAPLPVPEYHPVPEHSKPVPEYHPVPEHSKPAPEYHPPTPEYHPPTPVYGQPKPTPIYHPPAEH

SEQ ID NO: 215604 - protein, 52 aa, Zea mays
  unsure (1)..(52): unsure at all Xaa locations
  Clone ID: MRT4577_128229C.1.pep
SDMSPPAALVIVCQKYSIDRTAGQLRRVAVRPTSETPSSGRVARIPXRGPGR

SEQ ID NO: 215605 - protein, 77 aa, Zea mays
  unsure (1)..(77): unsure at all Xaa locations
  Clone ID: MRT4577_12822C.1.pep
KKYIKNLXAXVEPKKADEFKKGVEGATKLFLSKLKALQFFVGESMKDDASVVFPYYKDGAPNPTFLYFSHGLKEIKC

SEQ ID NO: 215606 - protein, 135 aa, Zea mays
  Clone ID: MRT4577_128230C.1.pep
GICFDKIHDPSSLNDFVAYGQSKLANILHSNELSRILKEDGVNISANAVHPGVIMTNLFRNRTIVSALLNSIGRIICRTVEQGAATTCYVAMHPQVRGISGKYFTNCDVANPSSQASDAELAKKLWQFSLQIVSS

SEQ ID NO: 215607 - protein, 54 aa, Zea mays
  Clone ID: MRT4577_128231C.1.pep
PRFHSSPVTALQKAAEAYLAGLFEETNLCAIHARRVSIMPKEIQLARRILGEGA

SEQ ID NO: 215608 - protein, 88 aa, Zea mays
  unsure (1)..(88): unsure at all Xaa locations
  Clone ID: MRT4577_128232C.1.pep
PRCPPWDIPRPGPPQGPIPPXPHTGGRSNPPSQGPIPPXGGGLQWPGPAGAPXPGETPGGPRLMGPGGHRPSXRGGXAGRPPRRPPPP

SEQ ID NO: 215609 - protein, 44 aa, Zea mays
  Clone ID: MRT4577_128233C.1.pep
GEKETFPCQSLHFCASSYFFSGPYRLLMTLYSLVRFPLCAVFSK

SEQ ID NO: 215610 - protein, 68 aa, Zea mays
  Clone ID: MRT4577_128234C.1.pep
FSAKFKHRNSLSNKENFLRSFIQSENMRCLHMTGRQSTRSTVSSSPLRGTCLLLTVIYLWRLMIQSKE

SEQ ID NO: 215611 - protein, 94 aa, Zea mays
  Clone ID: MRT4577_128235C.1.pep
DLVDNVIGASEAFCGRNFPREGHNVFSRRNSIAAQNVVEVEEKDENDPHDNAKIIDCGDEPGAINDSEEWEAPNISEEFDDDLKDGRVAITRIY

SEQ ID NO: 215612 - protein, 87 aa, Zea mays
  Clone ID: MRT4577_128236C.1.pep
VTSLISTLHDQLVSLHSGSPCISIHQNSHSPQQQGARPAPSARNKRHNNDGLPARVPSSRDPEQPLPVQSGPADAWVPRLHGCRCHL

SEQ ID NO: 215613 - protein, 76 aa, Zea mays
  Clone ID: MRT4577_128237C.1.pep
YMIHGYHCTLVGHFVYVLAQWRVSFLPPSSSFLCATAASFPAGAPAHVRRHQPLATRVHSYRPAPSGRYILNAGCA

SEQ ID NO: 215614 - protein, 136 aa, Zea mays
  unsure (1)..(136): unsure at all Xaa locations
  Clone ID: MRT4577_128238C.1.pep
SGFPVDPASXLVLDRPPSSPLLPGPFTPPTNPMQAAVTRMPWGMAQTLWVGMGVEVGAGYGGPNYRLTGGGGGASPSTWSNRMDLHVSGXQISSSVNLPXXKIFSSSAGDPSVGSISRSSRSFRAVALGVPRFRSR

SEQ ID NO: 215615 - protein, 40 aa, Zea mays
  Clone ID: MRT4577_128239C.1.pep
ESFARNQEISSNKQKKRIRNVKGLKGECHTKSTYVCATTC

SEQ ID NO: 215616 - protein, 192 aa, Zea mays
  unsure (1)..(192): unsure at all Xaa locations
  Clone ID: MRT4577_12823C.1.pep
LLAAASTTTLSLRAHEQPIIRRTLRCWIITDLLSADELLSHSFTYKELENGVLWEVQGNGPTQGPVDVEIAANPSDEGDEDQRVDDTAVKVADIDDTFRLQEEPPFDKKSFASYIKKYIKNLTAALNSEKADEFRKGVKAATKFLLTKLKDLRFXVGESMKDDAFAVYAYYKDGVTNPTFLYFSHGLKEIKC

SEQ ID NO: 215617 - protein, 60 aa, Zea mays
  unsure (1)..(60): unsure at all Xaa locations
  Clone ID: MRT4577_128240C.1.pep
IDATLSGPECATTAAQGRCAPRITTGTLQQESASSXPFRSTRPPPPXXXSGEHKEKKNPG

SEQ ID NO: 215618 - protein, 47 aa, Zea mays
  Clone ID: MRT4577_128241C.1.pep
MARTQSAVAVAVVAEALLVAAAETSYAAVITCGLVRSDIERCLYYAR

SEQ ID NO: 215619 - protein, 95 aa, Zea mays
  unsure (1)..(95): unsure at all Xaa locations
  Clone ID: MRT4577_128242C.1.pep
PNIFYIYSPDYWARELTFGATEYTTAIDIXTVGSVKADLLIRQPLDPVKRGVXQMAEIIKIFGSSTRXETRXVNPKHFLFKVPYIKTHSLHKLFC

SEQ ID NO: 215620 - protein, 79 aa, Zea mays
  Clone ID: MRT4577_128243C.1.pep
FPQRAVSCTTPVGTFFPCPRKQGARPPRPQVVLSYHYCTLLAFTGDSCGWHRQCNLRSRRRQCTLPLTRVGVNCRGVEA

SEQ ID NO: 215621 - protein, 102 aa, Zea mays
  Clone ID: MRT4577_128244C.1.pep
STSKVIEFNVIRCMCIRLRLVVLHSLLVVSVLEVLKGALLIQSVSQEMLMLLCRNATYSLLGAASYVTPSLTLPCSDVVLSLLLRDHLTHPLQLFKYSCIDS

SEQ ID NO: 215622 - protein, 1028 aa, Zea mays
  Clone ID: MRT4577_128245C.1.pep
MSGDHAKKEMETGDKPATSHGKASSEESRKKEKGKEKKASSHKSHRSGDKKKKMRKVVYYETDSSSPSTSGSDASSVTSKRHERNKYSKPPFFDGEDYCMWSDKMRHHLTSLHASIWDIVEFGAQEYNKVQGLKSAKEIWDVLKTAHEGDEVTKITKRETIEGELGRFILNEGEKPQAMYNRLKTLVNQVRNLRSTKWDDHEMVKVILRSLVFRNPTQVQLIRGDPRYKLMSPEEVIGKFVSFELMIKGFKQIINLEQGGASTLEVQPVAFKATEEKKEESTSSRLPIDASKLDNEEMTLIIKSFCQILKQRRGKDYKPRSKKVCYKCGKPGHFIAKCPLSSDSDRGDDKKGKRREKKRYYKKKGGDAHVCREWDSEESSFDSSSDEDAAHIAVTKGLLFPNVDHKCLMAKDGKRKKVKSRSSTKYASSSDEYHFSDEEDNLCILFANLNMQQKEKLNELISAIHEKDELLDSQEDFLIKENKKHVKVKDAYALEVQKCEKISSELSKCHDIITNLRNENASLIAKVDSNVCDDSISNFRDDNANLLARIEKLNDSLIRLRNENENLIAKAKDLDVCNVTISNLRSENDILHVKIVELKSCKPSTSTVEHVSICTRCRDINVDAIHDHLDLIKKQNDHIAQFNAKINEHDLENEKFKFARSMLYSGRCPGINDDIGFQKGDNVKLNVPPKRLSNFVKGKAPMPQDNEGYILYPVGYPEHNIRRIHSRKSHSGPSHAFMYKGETSSSRQSTRAKLPKKKTPIASNDSNISFKTFDASYVLTNKSAKEKSHTQETLKGFLRRAQNEFGLRIKKIRSDNGTEFKNSQIEGFLEEEGIKHEFSSPYTPQQNGVVERKNRTLLDMARTMLDEYKTSDRFWAEAVNTACYAINRLYLHRILKKTSYELLTGKKPNVSYFRVFGSKCFILVKRGRKSKFAPKAVEDFLLGYDSNTRAYRVFNKSSRLVEVSCDIVFDETNGSQVEQVDVDEIGDEEALCVALRNMSIGDVCPKESEEPPNAQDQPSSSMQESPPT

SEQ ID NO: 215623 - protein, 1658 aa, Zea mays
  Clone ID: MRT4577_128246C.1.pep
MSGDHAKKEMETGEKPTTSHGSTSSEESRTKRKEKKDSSKGKEKKKDSSKGKEKKSSSHKEKKEKSSSHKPQRSGDKKKRMRKVVYYETDSSSASTSGSDAASVTSKRQERKKYSKIPLRYPRISKHTPLLFVPLGKPPTFDGEDYARWSDLMRFHLTSLHKSIWDVVEFGAQVPSVGDEDYDEDEVAQIEHFNSQATTILLASLSREEYNKVQGLKSAKEVWDVLKTAHEGDELTKITKRETIEGELGRFRLRKGEEPQNMYNRLKTLVNQVRNLGSKKWDDHEMVKVILRSLIFLNPTQVQLIRGNPRYTLMTPEEVIGNFVSFECMIEGSRKINELDDPSTSEAQPVAFKATEEKKEESTSSRTPIDASKLDNEEMALVIKSFRQILKQRRGKDYKSRSKKGDDKKGRRKDKKRYYKKKGGDAHVCREWDSDESSSNSSDDEDAANIAVTKGLLFPNIGHKCFMAKDGTRKKVKSKSSTRYESSSDDNASDEEDNLRTLFANLNMEQKEKLNELISAIHEKDDLLDSQEDFLIKENKKHVKVKNAYALEIEKCEKLSSELSTCHETIDNLRNENANLLAKVDSHVCNVSITNSRNNDDDLLARIEELNISLASLRIENEKLLAKAKNFDVCNATISDLRTKNDMLQAKVVELKSCKPSTSIVEHVSICTRCRDVDINAIHDHMALIKQQNDHIAKLDAKISEHNLENEKFKFARSMLYSGRCPGIKDGIGFQRGDNVKLNAPPKRLSNFVKGKAPMPQDNEGYTLYPAGYPEDKIRRIHSRKSHSGPNHAFMYKGETSSSRQPTRAKLPKKKTPSASNEHSLSFKTFDASYVLTNKSGKVVAKYVGGKHKGSKTCVWVPKVLVSNAKGPKTIWVYASEGSSWILDSGCTNHMTREKRMFSSYEKNQDPQRAITFGDGNQGLVKGLGKIAISPNHSISNVFLVDSLDYNLLSVSQLCKMGYNCLFTDIGVTVFRRSDDSIAFKGVLEGQLYLVDFDRAELDTCLIAKTNMGWLWHRRLAHVGMKNLHKLLKGEHILGLTNVHFEKDRICSACQAGKQVGTHHPHKNIMTTDRPLELLHMDLFGPIAYISIGGSKYCLVIVDDYSRFTWVFFLQEKSQTQETLKGFLRRAQNEFGLRIKKIRSDNGTEFKNSQIEGFLEEVGIKHEFSSPYTPQQNGVVERKNRTLLDMARTMLDEYKTSDRLWAEAVNTACYAINRKSKFAPKTVEGFLLGYDSNTRAYRVFNKSSGQVEVSCDVVFDETNGSQVEQVDLDEIGNEEAPCIALRNMSIGDVCPKESEEPPNAQDQPSSSTQASPPTQNEAEAQVDEVEDQANEPPQDEGNDQGGDINDQDKEDEEQRPPHQRVHQAIQRDHPIDTILGDIHKGVTTRSRVAHFCEHYSFVSSIEPHRVEEALQDSNWVVAMQEELNNFTRNELYQMDVKSAFLNGPIKEEVYVEQPPGFEDMKQLQEGTFISQTKYTQDILNKFGMKDAKPIKTPMGTNGHLDLDTGGCKINRKSTSGTCQFLGRSLVSWASKKQNSVALSTAEAEYIAAGHCCAQLLWMRQTLRDYGYKLTKVPLLCDNESAIKMADNPVEHSRTKHIVIRYHFLRDHQQKGDIEISYINTKDQLADIFTKPLDEQTFNKLRHELNILDSRNFFC

SEQ ID NO: 215624 - protein, 840 aa, Zea mays
  Clone ID: MRT4577_128247C.1.pep
MSGDHAKKEMETDDKPATSHGKASSEESRKKEKGKEKKASSHKSHRSGDKKKKMRKVVYYETDTSSPSTSGSDAPSVTSKRHERKKFSKPPTFDGEDYARWSDLMKFHLTSLHKSIWNVVEFGAQVPYVGDEDYDEDEVAQIEHFNSQATTILLASLSREEYNKVQGLKSAKEVWDVLKTAHEGDELTKITKWETIEGELGRFRLRKGEEPQDMYNRLKTLVNQVRNLGSKKWDDHEMVKVILRSLIFLNPTQVQLIRGNPRYTLMTSEEVIGNFVSFEYMIKGSKKINELDDPSTSEAQPVAFKATDEKKEESTSSRQPIDASKLNNEEMTLVIKSFRQILKQRRGKDYKSRSKKGRRQEGEKEKKRYYKKKGGDAHVCREWDSDESSTDSSSDEDAANIAITKGLLFPNVGHKCLMAKDGKKKKVKSKSSTRYESSSDDNASDEEDNLRTLFANLNMQQKEKLNELISDIHEKDDLLDTQEDFLIKENKKHVKVKNAYALEVEKCEKLSSELSTCHETIDNLRSENANLLAKIEELNISLASLRVENEKLIAKAKELDVCNVTISDLRDKNDILRAKIVELNSCKPSTSIIEHTTICTRCRDVNIDVIHDHMALIKQQNDHIEKLDAKIDEHDLENENFKFARSMLYRGRHSGIKDGIGFQQGGNVKLNAPPKKLSNFVKGKAPMPQDNEGYILYPASYPEDKIRRIHSRKSHSGPNHAFMYKGETSSSRQPTPAKLPKKKTPSASNEHSISFKTFDASYVLTNKSGKIVAKYVGGKHKGSKTCVWVPKVLVSNAKGPKTIWVYASGGSSWIIDSGCTNHMTGEKKMFSSYEKNQDPQ

SEQ ID NO: 215625 - protein, 669 aa, Zea mays
  unsure (1)..(669): unsure at all Xaa locations
  Clone ID: MRT4577_128248C.1.pep
DKSQTQETLKGFLRQAQNEFGLRIKKIRSDNGTEFKNSQIEGFLDDEGIKHEFSSPYTPQQNGVVERKNRTLLDMARTMLDEYKTSNRFWAEAINTACYAINRLYLHRILKKTSYELLTGKKPNVSYFRVFGSKCFILVKRGRKSKFAPKAVEGFLLGYDSNTRAYRVFNKSTGLVEVSCDIVFDETNCSQVEQVDLDELDDEEAPCVALRNMSIGDVCPKESEEPPHAQDHPSSSIQTSPPTQDEDQDQEDENEDQENEPPQEXRTMIKGEMPXDQNKEDDEGTKWVFRNKQDEHGVVTRNKARLVANGYSQVKGLDFGETYAPVARLESIRILLAYATYHGFKLYQMDVKSAFLNGPIKEEVYVEQPPGFEESKYPNHVYKLSKALYGLKKAPRAWYECLRDFLITNGFKVEKADPTLFTKTIANDLFVCQIYVDDIIFGSTNKSTCEEFSRIMIQKFEMSMMGELKYFLGFQVKQLQEGTFISQTKYIQDILTKFGMKDAKPIKTPMGTNGHLDLDTGGCKIDRKNTSGTCQFLGRSLVSWASKKQNSVALSTAEAEYIATGHCCVQLLWMRQTLRDYGYKLTKVPLLCDNESAIRMADNPVEHSRTKHIAIRYHFLRDHQQRGDIEIAYVSTKEQLADIFTKPLDEKTFTKLRHELNILDFRNFD

SEQ ID NO: 215626 - protein, 164 aa, Zea mays
  Clone ID: MRT4577_128249C.1.pep
IQLLFITPQRRYKVLEGAHASFMESVPFNTICTFTLFQLIYLLIVFGMTWIPVAGILFPLLFFFLIIIRQHFIPKYFDPSHLRELDAAEYEELKGFTPDPSVCEDESVRSGDAQPGYASEILEEFTTHRGELKRRNSTFRDGRLLQLNSIKMTRELSRAPSRLT

SEQ ID NO: 215627 - protein, 115 aa, Zea mays
  unsure (1)..(115): unsure at all Xaa locations
  Clone ID: MRT4577_12824C.1.pep
PTPPTQTDPRRGREGKHRGRXAAEXXPPSDTEPPKAQADXRRHSHTNHTPQXXRSAXEXGNPTANNRQGGXAXAAEPDTAXXXPXTKQPSHRRQXRQQAAAGGGTXDKQSTEEER

SEQ ID NO: 215628 - protein, 111 aa, Zea mays
  unsure (1)..(111): unsure at all Xaa locations
  Clone ID: MRT4577_128250C.1.pep
MKREAKETKGKAKEQTRGGTNSGXAAGKTGTRKTGRSKRAKEDTRAVESAVDNTGEDGATVGNTDTGDEDAVGDSERGATDGQANDDFESARGKGAGVELEEIKSRNESER

SEQ ID NO: 215629 - protein, 1228 aa, Zea mays
  unsure (1)..(1228): unsure at all Xaa locations
  Clone ID: MRT4577_128251C.1.pep
MSPEEVIGKFVSFELMIKGSNKIIEQDGPSTPEAQPVAFKATEEKKKESTSSRLPINASKLDNEEMALIIKSFRQILKQRRGKDYKSRTKKVCYKCGKPGHFIAKCPLSSDSDRGNDKKGKRREKKRYYKKKGGDAHVCREWDSDESSSDSSSDEDAANIVVTKGLLFPNVGHKCLMAKDDKRKKVKSRSSTKYASSSDEDNSSDEEDNLRTLFANLNMQQKEKLNELISAIHEKDELLDSQEDFLIKENKKHVKVKDAYALEVEKCEKLSSELSKCHDIITNLRNENTSLIAKVDSNLCDDSISNLRDDNANLLAKIEKLNDSLASLRNDNEKLIAKAKDLDVCNVTISNLRSENDILHAKIVELKSCKPSTSTVEHVSINVDAIHDHLALIKKQNDHIAQLNAKINEHDLENEKFKFARSMLYSGRRPGIKDGIGFQKGDNVKLNASPKRLSNFVKGKAPMPQDNEGYILYPAGYPEHKIRRIHSRKSHSGPNHAFMYKGETSSSRQSTRAKLPRKKTSIASNDSNISFKTFDASYVLTNKSGKVYASGVSSWIIDSGCTNHMTWEKKMFSSYEKNQDPQRAITFGDGNQGLEKSHTQETLKGFLRRAQNEFGLRIKKIRSDNGMEFKNSQIEGFLEEEGIKHEFSSPYTPQQNGVVERKNRTLLDMARTMLDXYKTSDRFWAEXRVFGSKCFILVKRGRKSKFAPKAVEGFLLGYDSNTRAYRVFNKSTGLVEVSCDIVFDETNSSQVEQVDLDELDDEEAPCVALRNMSIGDVCPKESEEPPQAQDQPSSYTQASPPTQDEDEAQKDKGEDQEVEPPQEESNDQGGDAHDQVKEDEQVPRPPHPRVHQAIQRDHPVNTILGDIQKGVTTRSRVAHFCEHYSFVSSIEPHRVEEALQDSDWVVAMQEDLNNCTRNEVWHLVPRPNQNVVGTKWVFRNKQDEHGVVTRNKARLVAKGYSQVEGLDFGETYAPVARLESIRILLAYATYHGFKLYQMDVKSAFLNGPIKEEVYVEQPPGFEDSEYPNHVYKLSKALYGLKQAPXAWYECLRDFLITNGFKVEKADPTLFTKTLENDLFVCQIYVDDIIFGSTNESTCEEFSRIMTQKFEMSMMGELKYFLGFQVKQLQAGTFISQTKYIQDILNKFGMKDAKPIKTPMGTNGHLDLDTGGKSVDQKKEHIGDLPVLGKVSGVLGFKEAKFRSSFYHRGRLYCHRPLLHAIALDEANP

SEQ ID NO: 215630 - protein, 145 aa, Zea mays
  unsure (1)..(145): unsure at all Xaa locations
  Clone ID: MRT4577_128252C.1.pep
MATDELAHAVAPAPAGGDHSPAFSFSIWPPTQRTRDAVVRRLVETLAGDTILCKRYGAVPAAXDAEPAARAIEAEAFDAAASTGGAAAASVEEGIEALQFYSKEVSRRLLDFVKSRSADAKAGDTPSEEARAPGAPEAEAAQPAA

SEQ ID NO: 215631 - protein, 71 aa, Zea mays
  Clone ID: MRT4577_128253C.1.pep
RHHPRNKTTPCCVTRAGCFRLPSSDGALRQPLRDLLTEIAPLIGTTIVLYTVNQHCFSYSTSSMQLPGGPL

SEQ ID NO: 215632 - protein, 1703 aa, Zea mays
  Clone ID: MRT4577_128254C.1.pep
MSGDHAKKEMETGEKPTTSYGSTSSEESRTKRREKKKSSSNKGKEKKSSSHHKEKKEKSSSHKPHRKGDKHKRMRKVVYYETDTSSTSTSDSDAPSVTSKRQERKKYSKIPLRYPRISKHTPLLSVPLGKPPTFDGEDYARWSDLMRFHLISLHKSIWDVVEFGAQVPSVGDENYDEDEVAQIEHFNSQATTILLASLSKEEYNKVQGLKNAKEIWDVLKTAHEGDELTKITKRETIEGELGRFRLQKGEEPQHMYNRLKTLVNQVRNLGSKKWDDHEVVNVILRSLIFLNPTQVQLIRGNPRYTKMTPEEVIGHFVSFECMIEGSRKINELGDPSEAQPVAFKATEEKKEEATPSRQPIDASKLDNEEMALVIKSFRQILKQRRGKDYKSRSKKVCYRCGKPGHYIAKCPISSDSDRGDDKKGRRKEKKRYYKKKGGDAHVCREWDSDESSSDSSDDEDAANIAVTKGLLFPNVGHKCLMAKDGKKKVKSKSSTKYESSSDDNASDEEDNLRSLFANLNIAQKEKLNELVSAIHEKDDLLDSQEDCLIKENKKHVKVKKAYALEVEKCEKLSSELSTCREIIDNLRNENAILNAKVDSHACDVSIFTPRDNNDDLITRIEELNISLTSLRIENEKLLAKAKDFDVCNTTISDLRTKNDILHAKVVELKSCKPSTSTIEHVSICTRCRDVDINAIHDHMVLIKQQNDHIAKLDAKIAEHNLENEKFKFARSMLYNGRRPGIKDGIGFQRGDNVKLNAPPKNLSNFVKGKALMPQDNEGYILYPASYPESKIRKIHSRKSHSGPNHAFMYKGETSRSRQPTHAKLPRKKTTNASNDHAISFKTFDASYVLTSKSGKVYASGGSSWILDSGCTNHMTGEKRMFSSYEKNKDPQRAITFGDGNQGLVKGVTVFRRSDDSIAFKGVLEGQLYLVDFDRAELDTCLIAKTNMGWLWHRRLAHVGMKNLHKLLKGEHILGLTNVHFEKDRICSACQAGKQVGTHHPHKNIMTTDRPLELLHMDLFGPIAYISIGGSKYCLVIVDDYSRFTWVFFLQEKSQTQETLKGFLRRAQNEFGLRIKKIRSDNGTEFKNSQIESFLEEEGIKHEFSSPYTPQQNGVVERKNRTLLDMARTMLDEYKTPDRFWAEAVNTACYAINRLYLHRILKKTSYELLTEGFLLGYDSNTRAYRVFNKSTGLVEVSCDVVFDETNGSQVEQVDLDEIGEEQAPCIALRNMSIGDVCPKESEEPPSTQDQPSSSMQASPPTQNEDEAQNDEEQNQEDEPPQDDSNDQGGDTNDQEKEDEEEPRPPHPRVHQAIQRDHPVDTILGDIHKGVTTRSRVAHFCEHYSFVSSIEPHRVEEALQDSDWVVAMQEELNNFTRNEVWHLVPRPNQNVVGTKWVFRNKQDEHGVVTRNKARLVAKGYSQVEGLDFGETYAPVARLESIRILLAYATYHGFKLYQMDVKSAFLNGPIKEEVYVEQPPGFEDSEYPNHVYRLSKALYGLKQAPRAWYECLRDFLIANGFKVGKADPTLFTKTLENDLFVCQIYVDDIIFGSTNESTCEEFSRIMTQKFEMSMMGELKYFLGFQVKQLQEGTFISQTKYTRDILAKFGMKDAKPIKTPMGTNGHLDLDTGGKSVDQKFISNQVIGILKGNWSLRRRQRLPLRNSYFAITPSNSLVFGGEMSIKEKDFILGGESKSSNAKGTSSLV

SEQ ID NO: 215633 - protein, 510 aa, Zea mays
  Clone ID: MRT4577_128255C.1.pep
CSSMTSLGLSSNSLSGPIPADISGRLPFVTNRDLSFNSFSGEIPEALANCSYLNIVNLQNSKLTGTIPVQLAALSRLAQFNVADNQLSGQIPSSLNKFPASDFANQDLCGRPLSNDCTANSSSRTGIIVGSAVGGAVITLIIAAVILFIVLRKMPKKKKLKDVEENKWAKTIKGAKGAKVSLFEKSVSKMNLNDLMKATDDFTKDNIIGTGRSGTMYRATLPDGSFLAIKRLQDTQHSEDQFTSEMSTLGSVRQRNLVPLLGYCIVKNERLLVYKYMPKGSLYDNLHQQNSDKKALEWPLRLKIAIGSARGLAWLHHSCNPRILHRNISSKCILLDDDYEPKISDFGLARLMNPIDTHLSTFVNGEFGDLGYVAPEYTHTLVATPKGDAYSFGVVLLELVTREEPTHVSNAPENFKGSLVDWITYLSNNSILQDAVDKSLIGKDNDAELLQCMKVACSCVLSSPKERPTMFEVYQLLRAVGEKYHFSANDDELTMLPQNANPEDELIVAN

SEQ ID NO: 215634 - protein, 997 aa, Zea mays
  unsure (1)..(997): unsure at all Xaa locations
  Clone ID: MRT4577_128256C.1.pep
MAEGVLLSSIYPREAYSFKQSIQFGIPLFFLIVVLLLYPNPSDGLRNENVKNAYAQEVEKCEKLTNELSICHDTISNLRNENAKLIAKVEKLNVCDDSLVNLKNDNASLISKIEKLNESLSSLKIENDKLIAKAKDLNVCNVSISNLRNENAMLHAKIDELNACKPSTSSVDHVTICTRCRDINVDAIHDHLALIKQQNDHIGQLSAKINEHDLENEKFKFARSMLYSGRRPGIKDGIGFQQGDNVKLNAPKKLSNFVKGKAPMVQDNEGYILYPAGYPEHKIRRIHSRKSHSGSHHAFMYKSEASSSRQSTHVKLPKKKTPTASNEPIVSFKTFDASYVLTNKSGKVVAKYVGAKHKGSKTCVWVPKVYASGGSSWIIDSGCTNHMTKEKRMFSSYEKNNDPQRAITFEDGNQDKSQTQETLKGFLRWAQNEFGLRIKKIRSDNGTEFKNSQIEGFLEDKGIKHEFSSPYTPQQNGVVERKNRTLLDMARTMLDEYKTSDQFWAEAINIACYAINRLYLHRILKKTSYELLTGKKPNVSYFRVFGSKCFILVKRGRKSKFAPKAVEGFLLGYHSNTRAYRVFNKSIGLVEVSCDIVFDETNGSQVEQVDLDELDDEEAPCVALRNMSIGDVCPKESEEPPHAQDQPSSSTQASPPTQDKDQGQDDENEDQEDEPPQEEDNDQGGDANNQDKEYDDGPRPPHPRVHQAIQRDHPVNTILGDIQKGEEVYVEKPPGFEDSEYPNHVYKLSKALYGLKQAPRACRKTDPTLFTKTIAKDLFVCQNYVDDIIFGSTNKSTCEEFSRIMIQKFEMSMMGELKYFLGFQVKQLQEGTFISQMKYIQDILTKFGMKDAKPIKTPMGTNGHLDLDTGGKSVDQKAGCKIDRKSTSGTCQFLGRSLVSWASKKQNSVALSTAEAEYIAAGHCCAQLLWMGQTLRDYGYKLTKVPLLCDNESAIRMADNPVEHSRTKHIAIQYHFLRDHQQXGDIEIAYINTKEQL

SEQ ID NO: 215635 - protein, 50 aa, Zea mays
  Clone ID: MRT4577_128257C.1.pep
EAFYYCFFLSKSFSVLYQRYTVVIFLNILHIFLYSFKLFAIYKRSSLQNA

SEQ ID NO: 215636 - protein, 1411 aa, Zea mays
  Clone ID: MRT4577_128258C.1.pep
MSGEHAKKEMETGKKPTTSHGKASSEESRKKGKGKEKKASSHKSHQSGDKKKKMRKVVYYETDTSSPSTSDSDAPSVTSKRHERKKFSKIPLHYPRTSRHTPLLSIPLGKPPTFDGEDYARWSDLMKFHLTSLHKSIWNVVEFGAQVPSVKDEDYDEDEVAQIEHFNSQATTILLASLSREEYNKVQGLKSAKEVWDVLKTAHEGDELTKITKQETIKGELGRFRLRQGEEPQDMYNRLKTLVNQVRNLGSKKWDDHEMVKVILRSLIFLNPTQVQLIRGNPRYTLMTPEEVIGNFVSFEFMIKGSRKINELDGPSTSEAQPVAFKATEEKKEESTPSRTPIDASKLDNEEMALVIKSFRQILKQRRGKDYKPRFKKVCYKCGKPGHFIAKCPLSSDSDRGDDKKGRRKEKKKYYKKKGGDAHICREWDSDESSYDSSDEDAANIAINKGLLFPNVGHKCLMAKDGKRKKVKSKSSIRYESSSDDNASDEEDNLRTLFANLNMQQKEKLNELISAIHEKDDLLDTQEDFLIKENEKHVKVKNAYALEVEKCEKLSSELSTCHETIDNLRIENANLLAKVDSNVCNVSIPNLRNDNDDLLAKIEELNISLASLGVENEKLLAKAKDFYVCNVTISDLRSKNDILHAKVVELKSCKPSTSTVEHTSICTRCRDVDVNAIHDHMALIKQQNYHIAKLDAKIAEHELENEKFKFARSMLYSGRRPGIKDGIGFQKGDNVKINAPPKKLSNFVKGKATMPQDNEGYILYPVGYPESKIRRIHSRKSHSGPNHAFMYKGETSSSSQPTRAKLPNKKTPSASNDHGISFKTFDASYVLTNKSGKVYASGGSSWIIDSGCTNHTTGEKKMFSSYEKNQDPQRAITFGDGNQGLVKGLDSLDYNLLSVSQLCQMGYNCLFTEEKSHTQETLKGFLRRAQNEFGLRIKKIRSDNGTEFKNSQIEGFLEEEGIKHELSSPYTPQQNGVVERKNRTLLDMARTMLDEYKTSDRFWAEAVNTACYAINRLYLHQILKKSSYELLTEQVDLDEIGDEEAPCIVLRNMSIGDVCPKESEEPPNAQDQPSSSTQASPPTQNEDEAQVDEEEDQTNEPPQDDDNDQGGDANDQEKEDEEPRPPHPRPHKVEEALQDSDWVVVMQEELNNFTRNEVWHLVPRPNQNVVGTKWVFHNKQDEHGVVTRNKARLVAKGYSQVEGLDFGETYAPVARLESIHILLAYATYHGFKLYQMDVKSAFLNGPIKEEVYVEQPPGFEDSEYPNHVYKLSKALYGLKQAPRAWYECLRDFLIDNGFKVGKADPTLFTKTLENDLFVCQIYVDEIIFGSTNESTCEEFSRIMTQKFEMSMMGELKYFLGFQVKQLHEGTFISQTKYTQDILNKFGMKDAKPIKTPMGTNGHLDLDTEGRK

SEQ ID NO: 215637 - protein, 119 aa, Zea mays
  unsure (1)..(119): unsure at all Xaa locations
  Clone ID: MRT4577_128259C.1.pep
LPRPSVGVALLWCCWVVWCVRLRLGPCFVCSFVCPSSSASVVRLASPGWSGVFLLCLGVLAVLLVVGRLVALPGLLSFLGGLSPASFLLAVLWSAGLRRFRLRRXGVSWVLASLVLASA

SEQ ID NO: 215638 - protein, 102 aa, Zea mays
  Clone ID: MRT4577_12825C.1.pep
QGKVIRPKRQGCTLLGPEHSRVQKDSVSPHKQFCRDPPFEFLEQAPSTPCPGLSPFAHLFPLVETTRRYQPAKGMGKKVFISRLSCWPTLLNFAWFPNSINM

SEQ ID NO: 215639 - protein, 1461 aa, Zea mays
  unsure (1)..(1461): unsure at all Xaa locations
  Clone ID: MRT4577_128260C.1.pep
MSGEHAKKEMETGDKPATSHGKASSGESRNKGKGKEKKPSSHKSHRSGDKKKMMRKVVYYETDTSSPSTSGSDAPSITSKRHERKKFSKPPTFDGEDYARCSDLMKFHLTSLHKSIWNVVEFGAXREEYNKVQGLKSAKKVWDVLKTXHEGDELTKITKRETIEGELGRFRLRQEEEPQDMYNRLKTLVNQVRNLGSKKWDDHKVVKVILRSLIFLNPTQVQLIRGNPRYTLMTPEEVIGSFVSFEFMIKGSRKINELDGPSTSEAQPVTFKATEEKKEESTSSRTPIDASKLDNEEMTLVIKSFRQILKQRRGKDYKPRFKKVCYKCGKPGHFIAKCSISSDSDRGDDKKGRRKEKKRYYKKKGGDAHVCREWDSDESSSDSSDDEDVANIAVTKGLLFPNVGHKCLMAKDGKKKNVKSKSSTRYESSSDDNASDEEDNLRTLFANLNMQQKEKLNELISAIHEKDDLLDSQEDFLIKENKKHVKVKNAYALEVEKCEKISSELSTCHETIDNLRNENANLLAKVDSIACNVSIPNLRNDNDDLLARIEELNISLASLRDEDEKLLAKAKDFDVCNATISNLRSKNDILHAKVVELKSCKPSTSTVEHTTICTRCRDVDINAIHDHMALIKQQNDHIAKLDAKIAEHEIENEKFKFARSMLYSGRRPGIKDGIGFQQGGNVKLNAPPKKLSNFVKGKAPMPQDNEGYILYPAGYPESKIRRIHSRKSHSGPNHAFMYKGETSSSRQPTRAKLPKKKTPSASNDHNISFKTFDASYVLTNKSGKVYASGGSSWIIDSGCTNHMTGEKKMFSSYEKNQDPQRAITFGDGNQGVTVFRRSDDSITFKGVLEGQLYLVDFDRAELDTCLIAKTNMGWLWHRRLAHVGMKNLHKLLKGEHILGLTNVHFEKDRICSACQAGKQVGAHHPHKNIMTTDRPLELLHMDLFGPIAYISIGGSKYCLVIVDDYSCFTWVFFLQEKSHTQETLKGFLRRAQNEFGLRIKKIRSDNGTEYKNSQIEGLLEEEGIKHEFSSPYTPQQNGVVERKNRTLLDMARTMLDEYKTSDRGRKSKFAPKTVEGFLLGYDSNTRAYRVFNKSSGQVEVSCDVVFDETNGSQVEQVDLDEICDEEAPCIALRNMSIGDVCPKESEEPPNAQDQPSSSTQASPRTQNEDEAQVDEGEDQASELPQDDDNDQGGDANDQDKEDEERRPPHPRVHQAIQRDHPVDTILGDIHKGVTTRSRVAHFCEHYSFVSSIEPHRVEEALQDSDWVVAMQEELNNFTRNEQDEHGVVTRNKARLVAKGYSQVKGLDFGEIYAPVARLESIRILLAYGTYHGFKLYQMDVKSAFLNGPIKEDVYVEQPPGFEDSEYPNHVYKLLKALYGLKQAPRAWYECLRDFLITNGFKVGKADPTLFTKTLENDLFVCQVYVDDIIFGSTNESTCEEFSRIMTQKFEMSMMGELKYFL

SEQ ID NO: 215640 - protein, 79 aa, Zea mays
  Clone ID: MRT4577_128261C.1.pep
MLAIARQRMLGQSFKKILPAVSVLRSYSSAAKQVGEYQGAYKITKGLLEKYGPERVLDTPITEAGFTGIGVGAAYYGLK

SEQ ID NO: 215641 - protein, 151 aa, Zea mays
  unsure (1)..(151): unsure at all Xaa locations
  Clone ID: MRT4577_128262C.1.pep
RAVLVRLWGGRRDHVQERWRRTCTLVWSARCGCTGPDAVLYLGPTXGEPXSYLTVESPDDYGXDTVGXLDSDPXTLAKNEELEVIHSRCGVLGALGCVLQELIEGIGAKFVQDVLAHARLLDLARGXVDYPREPXIIHAQRILAICGCDGR

SEQ ID NO: 215642 - protein, 66 aa, Zea mays
  Clone ID: MRT4577_128263C.1.pep
TMSLCGSGDMDAVCSFISTQYVLDNLGLPVEASWRPWRIDNEVHGPLKSMENPWRFDSFLDHATPG

SEQ ID NO: 215643 - protein, 114 aa, Zea mays
  Clone ID: MRT4577_128264C.1.pep
ESSLVTAMHFLGFRRSSYIVSSYTDYSYASAYAMAGLSYSGLCRSRSKSDLVCTVRASGVRMCRVPMGALGLVDRRVDGREVRKSSDRARHARRQTFEHDRRIEARDPLHHKLG

SEQ ID NO: 215644 - protein, 46 aa, Zea mays
  Clone ID: MRT4577_128265C.1.pep
FSYVFFYCEQKLWKILTYLGLRLYNSTHSPWIKSIAIHALSQRFRK

SEQ ID NO: 215645 - protein, 87 aa, Zea mays
  Clone ID: MRT4577_128266C.1.pep
FGSSRCKRGQGDIPPWGPGLSRPHMRLCLGRDHNRFRFSQHIASFCTATMLRSWAELPQVLDTPYNATTGSVIVWFLPNNSMYRFEL

SEQ ID NO: 215646 - protein, 68 aa, Zea mays
  Clone ID: MRT4577_128267C.1.pep
NNIPQGKRIWTDVLFKNKKLELLVTSVLLQNESVPCPLMFAMRINAYFTKTKSLENYSSVFLILKRFV

SEQ ID NO: 215647 - protein, 74 aa, Zea mays
  Clone ID: MRT4577_128268C.1.pep
DVSSHSCITQCRYLIHVGNEGSSSTSTYTLTITLPRRSHDLIRNLLSKEVCFLYSRAHWLIQFRSYVYLSLLAD

SEQ ID NO: 215648 - protein, 96 aa, Zea mays
  Clone ID: MRT4577_128269C.1.pep
ARGPPLSLGRPPLSIFFLLKHLQPSPPKTLAAPPFLPLLPRCSPPVWFSVVWLRSQLEFGGRKKEGVREEPKVVDFRIVLRDLPELPVKVLDTCWE

SEQ ID NO: 215649 - protein, 110 aa, Zea mays
  Clone ID: MRT4577_12826C.1.pep
PVETARNLGTPRLFFPGGSHGSQDALYSPQFTCQLCALMNSELIGPCCKIHHPNTRTFWLLHCTNSLPQGACPYCNSHLGGYPSDQRLHRYDPTRGHHCSGCRDLRRLSS

SEQ ID NO: 215650 - protein, 110 aa, Zea mays
  Clone ID: MRT4577_128270C.1.pep
IVLRYCSDGKSSVRSQSLASGKTSGSGWAYTGHEYTSKKASGDLKKKDKMEPYAYWPLDRKLLNRRSDRKASARKGMSSVMKITKKLEGKSASAALSAKRSGKTKHKKNK

SEQ ID NO: 215651 - protein, 92 aa, Zea mays
  unsure (1)..(92): unsure at all Xaa locations
  Clone ID: MRT4577_128271C.1.pep
DDLNDYSSVYAAFSAEYSNKARSVNRIDTLMNVLVRTAEVTGENDESXRIXSALTSDVAEEHAQADAEDDDDDDDLYGEVTGDENKACKKGA

SEQ ID NO: 215652 - protein, 70 aa, Zea mays
  Clone ID: MRT4577_128272C.1.pep
PRQARTIGHGTKVFVSSKVVVRPTSKCPLHSKTCSSSTIRIEKRAISDDQDTATRFHNTATGPLDGSTFT

SEQ ID NO: 215653 - protein, 81 aa, Zea mays
  unsure (1)..(81): unsure at all Xaa locations
  Clone ID: MRT4577_128273C.1.pep
PXXXXPTSLPPTATNXTETHVPFISSPDXPXKXNTPAPFLQHPDPQNPDLTQLNHLPTHPPLPRCHNTQNPHTHRTPQHHP

SEQ ID NO: 215654 - protein, 141 aa, Zea mays
  Clone ID: MRT4577_128274C.1.pep
GSISSIGIKGTIGYIPPEYGGGGHVSTSGDVYSFGIVLLEIFTGKRPTDPMFTGGLDIISFVENSFPDQIFQVIDPHLVEDRQKINQPNEVANNEMYQCLVALLQVALSCTRSLPSERSNMKQVASKLQAIKAARLGGKSK

SEQ ID NO: 215655 - protein, 76 aa, Zea mays
  Clone ID: MRT4577_128275C.1.pep
TIVCSCCTALMQLSYSGMPGSGLKLLHGSPIPVSSSCSRSAVVLSVISCFTKRLYRCRAHVTSRSVVAWIVKLSES

SEQ ID NO: 215656 - protein, 111 aa, Zea mays
  unsure (1)..(111): unsure at all Xaa locations
  Clone ID: MRT4577_128276C.1.pep
IGYLEAGRGPPPLPLLILLFERFFSGKMDRLVHLAGLMLLARPIAVAAAAVAANGSSSLSFAQPTGYSTSSYNASAQPTPFTRTDYSHNALXXGALGSSRTCCHGYGYNDC

SEQ ID NO: 215657 - protein, 85 aa, Zea mays
  Clone ID: MRT4577_128277C.1.pep
SQADKTKAPKNRWGTLAFNAHTYPTSRRQEQQWLNKTSVISSRNSMITPPLQYAHDAFHSPDGTSNTIGKDDRPSGAISASSDAE

SEQ ID NO: 215658 - protein, 88 aa, Zea mays
  Clone ID: MRT4577_128278C.1.pep
IGSDLIPQSLWEKKREGWLNLSIMLLDKEHRHSSFIILLILNAVSRMKRPHYPIEIRVLKYVRLAAESKFLAWQAATGVTSVLNLEHQ

SEQ ID NO: 215659 - protein, 1668 aa, Zea mays
  Clone ID: MRT4577_128279C.1.pep
MSGDHTKREMETGDKPTTSHEKASSEESRNKGKGKEKKSSSHKSYRNGDKKKKMRKVVYYETDTSSPSTSGSNAPSVTSKRHERKKFSKIPLRYPCIPKHTPLLSVPLGKPPTFDGEDYARWSDMMRYHLTSLHKSIWDVVEFGVQVPFVGDDDYDEDEVAQIEHFNSQATTILLASLSKEEYNKVQGLKSAKEIWDVLKTAHEGDELTKITKRETIEGELGRFRLHKGEEPQHMYNRLKTLVNQVRNLGSKKWDDHEVVNVILRSLIFLNPTQVQLIRGNPRYTKMTPEEVIGHFVSFECMIKGSKKINELDGPSTSEAQPIAFKATEEKKEESTSSRQPIDASKLDNEEMALIIKSFRQILKQRRGEDYKPRSKKVCYKCGKPGHFIAKCPLSSDSDRGDDKKGRRKEKKKYYKKKGGDAHVCREWDSDESSTDSSSDEDAANIAVTKGLLFPNVGHKCLMAKDDKRKKVKSRSSTKYETSSDEDNASNEEDNLRILFANLNMQQKEKLNELISAIHEKDDLLDTQEDFLIKENKKHVKVKNAYALEVEKCEKLSNELSTCHETINNLRNENASLIAKVDSNACDVSIPNLRNDNDDLLAKIEELNISLASLRIENEKLLAKAKELDVCNVTISDLRDKNDILRAKIVELNSCKPSTSTTEHVTICTRCRDIDVNAIHDHLSMIKQQNDHIAKLDAKIAEHELENEKFKFARSMLYSGRRPGIKDGIGFQKGDNVKLNAPPKRLSNFVKGKAPMPQDNEGYILYPAGYPESKIRRIHSRKSHSGPNHAFMYKGETSSSRKSTHAKLPKKKTLSASNEPSISFKTFDASYVLTNKSGKVYASGGSSWIIDSGCTNHMTGEKKMFSSYEKNQDPQRAITFGDGNQGVTVFRRSDDSIAFKGVLEGQLYLVDFDRAELDTCLIAKTNMGWLWHRRLAHVGMKNLHKLLKGEHILGLTNVHFEKDRICSACQAGKQVGTHHPHKNIMTSDRPLELLHMDLFGPIAYISIGGSKYCLVIGDDYSRFTWVFFLQEKSHTQETLKGFLRRAQIEFGLRIKKIRSDNGMEFKNSQIEGFLEEEGIKHEFSSPYTPQQNGVVERKNRTLLDMARTMLDEYKTPDRFWAEAVNTACYAINRLYLHRILKKTSYELLTGKKPNISYFRVFGSKCFILVKRGRKSKFAPKTVEGFLLGYDSNTKAYRVFNKSSGLVEVSCDVVFDETNGSQVEQVDLDEIGEEQAPYIALRNMSIGDVCPKESEEPPHAQDQPSSSTQASPPTQNEDEAQVDEGEDQRDEPPQDDDNDQGRDANDQDKEDEQPRPPHPRVHQAIQRDHPVDTILDDIHKGVTTRSRVAHFCEHYSFVSSIEPHRVEEALQDSDWVVAMQEELNNVTRNELYQMDVKSAFLNGPIKEEVYVEQPPGFEDSEYPNHVYRLSKALYGLKQAPRAWYECLRDFLIANGFKVGKADPTLFTKTLDNDLFVCQIYVDDIIFGSTNESTCEEFSRIMTQKFVMSMMGELKYFLGFQVKQLQEGTFISQTKYTQDILTKFGMKDAKPIKTPMGTNGHLDLDTGDASQNLIHLPLTILQKTFEKDLQKNLQKCQRFIYNYTKSTVRNTIDYSGQEKLFGKTGQARTVRALAADRPRHKDDPRTEPMQKSESALWTVRRISVDRLRPL

SEQ ID NO: 215660 - protein, 167 aa, Zea mays
  unsure (1)..(167): unsure at all Xaa locations
  Clone ID: MRT4577_12827C.1.pep
VYQDLLSGDXSCRDSFTYNELENGVLWEVKGKWFTQGPVDVNIDANPSAEGGEDEMVDDTAAKGVDIADTFRLHEQPPFDKKSFVSYIKKYIKNLTAVLKSXKADDFKKGVEVATKFLLTKLNDLQFFGADIMNDQASVVFAYYKDGGTNPTFLYFSHGLKEIKCLD

SEQ ID NO: 215661 - protein, 42 aa, Zea mays
  Clone ID: MRT4577_128280C.1.pep
VNSICLGHECASPTRDVVTINGSALPVYCSRPRVFTMTPKNK

SEQ ID NO: 215662 - protein, 1583 aa, Zea mays
  Clone ID: MRT4577_128281C.1.pep
MAGVGRSTRAGGDARRRRGDRPGHGEIVQSNGSERSTGCQRRYEREELGGDSLDSSVHARRRKTEVRRCRLRSPDEVLSPFVGGDVEVHFPKQLLGGGWRLMQYGSNKGQVIRSPVEILNYHCLSDHGYAISHGLKPLEVRPKCFIAPMPDGFEVPWLRRLVGEELKVGDEAPTEVAPVIDAVSRTPFSSATDEMVAKQNTDPGQKAIWHWKVTAIELAWINNTPPSWCTSCQCLEPDRAPGVTPREVSRGRIGSRMWITFKSNEPPGPESAHSLRRPILPAVLPWPTKGWPRESTGPRPFARPSCLLVDPGDIRPPTVTKITKRETIEGELGRFVLHQGEEPQAIYNWLKALVNQVRNLGSKKWDDHEMVKVILRSLVFCNPTQVQLIRGDPRYKLMSPEEVIGKFVSFELMIKGSKHIVDLEQGGTSTPEVQPIAFKATEEKKEESTSSRQPIDASKLDNEEMALIIKSFRQILKQRRGKDYKPRSKKVCYKCGKPGHFIAKCPLSSDSDRGDDKKGKRTENKRYHKKRGGDAHVCREWDSDESSSDSSSDEDAANIAVTKGLLFPNVGHKCLMAKDGKRKKDELLDTQEDFLIKENKKHVKVKNAYALEVEKCEKLSSELSTCHDTIVNLRNENAKLIAKVDSNVCNDSIPNLSDDNANLLAKIEKLNDSLASLRIENEELIAKAKDLDVCNVTISNLRSENDILHANIVELKSCKPSTSTIEHVSICTRCRYINVDAIHDHLALIKKQNDHIAQLNAKINEHDLENGKFKFARSMLYSGRCPGIKDGIGFQKGDNVKLNAPPKRLSNFVKGKAPMPQDNEGYILYPAGYPESKIRRIHSKKSHSSPNQDFMYKGETSSSRQSTRAKLPKKKTPTASNDHNISFKTFDASYVLTNKSGKVYASGGSSWIIDSGCTNHMTGEKKMFSSYEKNQDPQRAITFGDGNQGLEKSHTQETLKGFLRRAQNEFGLRIKKIRSDNGTEFKNSQIEGFLEEEGIKHEFSSPYTPQQNGVVERKNRTLLDMARTMLDEYKTSDRFWVEAVNTACYAINRLYLHRILKKTSYELLTGKKPNVSYFRVFGSKCFILVKRGRKSKFAPKAVEGFLLGYDSNTRAYRVFNKSSGQVEVSCDIVIDETNGSQVEQVDLDEIGDEEASCVALRNMSIGDVCPKESEEPPHAEDQPSSSMQASPPTQDEDEAQNDEVVDQEVEPPQGESNDQGGDAHDQDEEDEQAPKPPHPRVHQAIQRDHPVNTILGDIQKGVTTRSRVAHFCEHYSFVSSIEPHRVEEALQDSDWVVAMQEELNNFTRNEVWHLVPRPNQNVVGTKWVFRNKQDENGVVTRNKARLVAKGYSQVEGLDFGETYAPIAKLESIRILLAYATYHGFKLYQMDVKSAFLNGPIKEEVYVEQPPSFEDSEYPNYVYKLSKALYGLKQAPRAWYECLRDFLITNGFKVGKADPTLFTKTLENDLFVCQIYVDDIIFGSTNESTCEEFSRIMTQKFEMSMMEELKYFLGFQVKQLQEGTFISQTKYIQDILNKFGMKDAKPIKTPMGTNGHLDLDTGGCKINRKSTSGTCQFLGRSLVS

SEQ ID NO: 215663 - protein, 114 aa, Zea mays
  Clone ID: MRT4577_128282C.1.pep
KKKTNLHETGGFYFWGASGPEKGQHSPSQTPPGARKPKAPEQNCTGACPPPGVLPRDHHPGPPVWGFCLAFNPHPLIFTGRLTICTERQGFAPPPRGVNKGWGFNFPWALGGHP

SEQ ID NO: 215664 - protein, 93 aa, Zea mays
  Clone ID: MRT4577_128283C.1.pep
RPVFYSFPINSTCLDFVTAECVNDLIRGAAITCKNELEKNHDEHLEVVACQLRQAMLEGPSPSKAIDMDCSTRPGNSENFCDEDDIPDQKPLS

SEQ ID NO: 215665 - protein, 126 aa, Zea mays
  Clone ID: MRT4577_128284C.1.pep
FLKPTPQPDPKPGPKPTPQPQPDPKPTPQPGPEPKPKPAPQPEPKPTPQPDPKPEPKPTPQPPFPHPEPQPDPKPQPEPSKPDPKLQPEPSKPDPQPEPKPTPEPLKPKPSSSLPPPFGTVVVEGN

SEQ ID NO: 215666 - protein, 1868 aa, Zea mays
  Clone ID: MRT4577_128285C.1.pep
MSGDHAKKEMETGERPTTSHGSTSSEESRIKRKEKKKSSSNKGKEKKSSSHHKERREKSSSHKPRRSGDKHKRMRKVVYYETDTSSTSTSGSDAASVTSKRQERKKYSKIPLHYLRISKHTPLLSVPLGKPPTFDGEDYARWSDLMRFHLTSLHKSIWDVVEFGAQVPSVGDEGYDEDEVAQIEHFNSQATTILLASLSREEYNKVQGLKNAKEIWDLLKTAHEGDELTKITKRETIEGELGRFRLHKGEEPQHMYNRLKTLVNQVRNLGSVKWDDHEVVKVILRSLIFLNPTQVQLIRGNPRYTKMTPEEVIENFVSFECMIEGSRKINELDDATTSEAQPVAFKATEEKKEESTPSRQPIDASKLDNEEMALVIKSFRQILKQRKGKDYKSRSKKVCYKCGKPGHFIAKCPISSDSDRGDDKKGRRKEKKRYYKKKGGDAHICREWDSDESSSDSSDDEDAANIAVTKGLLFPNVGHKCLMAKDGKRKKVKSNSSTKYESSSDDNASDEEDNLRSLFANLNIAQKEKLNELVSAIHEKDDLLDSQEDCLIKENKKHVKVKKAYALEIEKCEKLSNELSTCREMIDNLRNENASLNTKVDSHVCNIPNPRNNNDDLLARIEELNISLASLKIENEKLLTKAKDLDICNATISDLRTKNDMLQAKVVELKSCKPSTSIVEHVSICTRCRDVNIDAIHDHMALIKQQNDHIAKLDAKIAEHNLENEKFKFARSMLYNGRRPGIKDGIGYQRGDNVKLNAPPKNLSNFVKGKAPMPQDNEGYILYPAGYPESKIRRIHSRKSHSGPNHAFMYKGETSSSRQPTRAKLPKKTPIASNEHNISFKTFDASYVLTNKSGKIVAKYVGGKHKGSKTCVWVPKVLVSNAKGPKTIWVYASGGSSWILDSGCTNHMTGEKKMFSSYEKNQDPQRAITFGDGNQGVTVFRRSDDSIAFKGVLEGQLYLVDFDRAELDTCLIAKTNMGWLWHRRLAHVGMKNLHKLLKGEHILGLTNVHFEKDRICSACQAGKQVGAHHPHKNIMTTDRPLELLHMDLFGPIAYISIGGSKYCLVIVDDYSRFTWVFFLQEKSQTQETLKGFLRRAQNEFGLRIKKIRSDNGTEFKNSQIEGFLEEEGIKHEFSSPYTPQQNGVVERKNRTLLDMARTMLDEYKTPDRFWAEAVNTACYAINRLYLHRILKKTSYELLTGKKPNISYFRVFGSKCFILVKRGRKSKFAPKTVEGFLLGYDSNTRAYRVFNKSTGLVEVSCDVVFDETNGSQVEQVDLDEIGNEEAPCIALRNMSIGDVCPKESEKPPSAQDQPSSSMQASPPTQNEDEAQDVEQEDHEDEPPQHDGNDQGRDTNDQEKEDEEELRLPHPRVHQAIQRDHPVDTILGDIHKGVTTRSRVAHFCEHYSFVSSIEPHRVEEALQDSDWVVAMQEELNNFTRNEVWHIVPRPNQNVVGTKWVFHNKQDEHGVATRNKARLVAKGYSQVEDLDFDETYAPIARLESIHILLSYATYHGFKLYQMDVKSAFLNGPINKEVYVEQPPGFKDNLFVCQIYVDDIIFGSTNKSTCEEFSRIMIQKFEMSMMGELKNFLGFQIKQLQEGTFISQTKYIQDILKKFGMKDGKPIKTPMGTNGHLDLDTGGKSVDQKVYRSMIGSLLYLCASRPDIMLSVCMCARFQADPKEVHLRVVKRIMRYLVYTPKFGLWYPKGSTFDLIGYFDADWTRCKIDRKSTSGTCQFLGRSLVSWASKKQNSIALSTAEAEYIAIGHCCAQLLWMRQTLRDYGYKLRKVPLQCDNESAIRMAYNPVEHSRTKHIYIQHHCLRDHQQNGDIEIAYVSTKEQLTDIFTKPLDEKTFSKLRNELNIHDSWNFD

SEQ ID NO: 215667 - protein, 75 aa, Zea mays
  unsure (1)..(75): unsure at all Xaa locations
  Clone ID: MRT4577_128286C.1.pep
NAHTGRAPVSYAGSRRRCEMHIFLKTLNGKTITLEAESSDTIHNVKAXMHDKECIFTDQQQLMFAAMHTIRRSDT

SEQ ID NO: 215668 - protein, 259 aa, Zea mays
  unsure (1)..(259): unsure at all Xaa locations
  Clone ID: MRT4577_128287C.1.pep
MMRSGLISLCFHLALAITLAASVPGLARSRVIDMEPQLKPTLQLEPKHGVSQPDRNQEPKPTPQPEPKPEPKPEPKPAPQPDPKPAPQPDPKPAPQPDPKPEPKPTPQPDPKPSPQPGPEPKPKPAPQPEPKPEPKPTPQPDPKPGPQPDPKPEPKPTPQPGPEPKPKPAPQPEPKPTLQPDPKPEPKPTPQPPFPQPEPQPDPKPQPEPYKPXPKPQPEPSKPEPQPGSKPTPETKTXPEPSKPSLPPPFGTGVVEGN

SEQ ID NO: 215669 - protein, 1888 aa, Zea mays
  Clone ID: MRT4577_128288C.1.pep
MSGDHAKKEMETGEKPTTSYGSTSSEESRTKRREKKKSSSNKGKEKKSSSHHKEKKEKSSSHKPHRKGDKHKRMRKVVYYETDTSSTSTSDSDAPSVTSKRQERKKYSKIPLRYPRISKHTPLLSVPLGKPPTFDGEDYARWSDLMRFHLISLHKSIWDVVEFGAQVPSVGDENYDEDEVAQIEHFNSQATTILLASLSKEEYNKVQGLKNAKEIWDVLKTAHEGDELTKITKRETIEGELGRFRLQKGEEPQHMYNRLKTLVNQVRNLGSKKWDDHEVVNVILRSLIFLNPTQVQLIRGNPRYTKMTPEEVIGHFVSFECMIEGSRKINELGDSSEAQPVAFKATEEKKEEATPSRQPIDASKLDNEEMALVIKSFRQILKQRRGKDYKSRSKKVCYKCGKPGHFIAKCPISSDSDRGDDKKGRRKEKKRYYKKKGGDAHVCREWDSDESSSDSSDDEDAANIAVTKGLLFPNVGHKCLMAKDGKKKVKSKSSTKYESSSDDNASDEEDNLRSLFANLNIAQKEKLNELVSAIHEKDDLLDSQEDCLIKENKKHVKVKKAYALEVEKCEKLSSELSTCREIIDNLRNENAILNAKVDSHVCDVSISTPRDNNDDLLARIEELNISLASLRVENEKLITKAKELDVCNVTISDLRTKNDMLHAKVVELKSCKPSTSIVEHVSICTRCRNVDIDAIHDHMILIKQQNDHIAKLDAKIAEHNLENEKFKFARSMLYNGRRPGIKDGIGFQRGDNVKLNAPPKNLSNFVKGKAPMPQDNEGYILYPAGYPENKIRKIHSRKSHSSPNHAFMYKGETSSSRQPTHAKLPKKKIPNASNDHAISFKTFDASYVLTNKSGKVYASGGSSWILDSGCTNHMTGEKKMFSSYEKNLDPQRAITFGDGNQGVTVFRRSDDSIAFKGLLEGQLYLVDFNRAELNTCLIAKTNMGWLWHRRLAHVGMKNLHKLLKGEHILGLTNVHFEKDRICSACQAGKQVGVHHPHKNIKTTDRPLELLHMDLFGPIAYISIGGSKYCLVIVDDYSRFTWVFFLQEKSQTQETLKGFLRRAQNEFGLRIKKIRSDNGTEFKNSQIEGFLEEEGIKHEFSSPYTPQQNGVVERKNRTLLDMARTMLDEYKTPDRFWAEAVNTACYAINRLYLHRILKKTSYELLTGKKPNISYFRVFGSKCFILIKRGRKSKFAPKTVEGFLLGYDSNTRAYRVFNKSTGLVEVSCDVVFDETNGSQVEQVDLDEIGEEQAPCIALRNMSIGDVCPKESEEPPSTQDQPSSSMQASPPTQNEDEAQNDEEQNQEDEPPQDDSNDQGGDTNDQEKEDEEEPRPPHPRVHQAIQRDHPVDTILGDIHKGVTTRSRVAHFCEHYSFVSSIEPHRVEEALQDSDWVVAMQEELNNFTRNEVWHLVPRPNQNVVGTKWVFRNKQDEHGVVTRNKARLVAKGYSQVEGLDFGETYAPVARLESIRILLAYATYHGFKLYQMDVKSAFLNGPIKEEVYVEQPPGFEDSEYPNHVYRLSKALYGLKQAPRAWYECLRDFLIANGFKVGKADPTLFTKTLENDLFVCQIYVDDIIFGSTNESTCEEFSRIMTQKFEMSMMGELKYFLGFQVKQLQEGTFISQTKYTQDILTKFGMKDAKPIKTPMGTNGHLDLDTGGKSVDQKVYRSMIGSLLYLCASRPDIMLSVCMCARFQSDPKESHLTVVKRILRYLAYTPKFGLWYPRGSTFDLIGYSDADWAGCKINRKSTSGTCQFLGRSLVSWASKKQNSVALSTAEAEYIAAGHCCAQLLWMRQTLRDYGYKLTKVPLLCDNESAIKMADNPVEHSRTKHIAIRYHFLRDHQQKGDIEISYINTKDQLADIFTKPLDEQSFTRLRHELNILDSRNFFC

SEQ ID NO: 215670 - protein, 223 aa, Zea mays
  Clone ID: MRT4577_128289C.1.pep
MMRSGLLSLCFHLALAITLAASVPGLARSRVIDMEPQLKPTLQLEPKHGVSQPDRNQEPKPTPQPEPKPEPKPEPKPAPQPDPKPEPKPTPQPDPKPAPQPDPKPEPKPTPQPDPKPTPQPGPEPKPKPAPQPEPKPTPQPDPKPEPKPTPQPPFPRPEPQLDPKPQPEPSKPNPKPQPEPSKPDPQPEPKPTPEPKPQPEPSKPEPPSSLLPPFGTGVVEGN

SEQ ID NO: 215671 - protein, 73 aa, Zea mays
  Clone ID: MRT4577_12828C.1.pep
TPRRAQTAARRGRCRRCRKERRTASCLLFRWNYRGETARHAVRRTLDLLTPLGLGKGGTSRSGKPGPAGIEVP

SEQ ID NO: 215672 - protein, 1645 aa, Zea mays
  Clone ID: MRT4577_128290C.1.pep
MSGEHAKKEMETGEKPATSHGKASSEESRNKKKGKDKKASSHKSHRSGDKKKKMRKVVYYETDTSSPSTSGSDAPSITSKRHERKKFSKIPLHYPRTSRHTPLLSVPLGKPPTFDCEDYARWSDLMKFHLTSLHKSIWNVVEFGAQVPSVGDEDYDEDEVAQIEHFNSQATTILLASLSREEYNKVQGLKSAKEVWDVLKTAHEGDELTKITKRETIEGELGRFRLRQGEEPQDMYNRLKTLVNQVRNLGSKKWDDHEVVKVILRSLIFLNPTQVQLIRGNPRYTLMTPEEVIENFVSFEFMIKGSRKINELDGPSTSEAQPVAFKATEEKEEESTLSRTPIDASKLDNEEMALVIKSFRQILKQRRGKDYKPRSKKVCYKCGKPGHFIAKCPISSDSDRGDDKKGRRKEKKRYYKKKGGDAHVCREWDSDESSSDSSDDEDAANIAITKGLLFPNVGHKFLMAKYGKKKKVKSKSSTRYESSSDDNASDEEDNLRTLFANLNMQQKEKLNELISAIHEKDDLLDSQEDFLIKENKKHVKVKNAYALEVEKCEKLSSELSTCHETIDNLRNENANLLAKVDSNICNVSISNLRNDNDDLLAKIEELNMSLASLRMENEKLLAKAKNFDVCNTTISDLRTKNDILHAKVVELKSCKPSTSTAEHTSICTRCRDVDVNAIHDHMALIKQQNDHIAKLDAKIAEHDLENENFKFARSMLYKGRHPGIEDGIGFQQGGNVKINAPPKKLSNFVKGKAPMPQDNEGYILYPAGYPENKIRRIHSRKSHSGPNHAFMYKGETSSSRQPTRAKLPKKKTPNASNDHSISFKTFDASYVLTNKSGKVVAKYVGGKHKGSKTCVWVPKVLVSNAKGPKTIWIYASGGSSWIIDSGCTNHMTGEKKMFSSYEKNQDPQRVITFGDGNQGVTVFRRSDDSIAFKGVLEGQLYLVDFDRAELDTCLIAKTNMGWLWHRRLAHVGMKNLHKLLKGEHILGLTNVHFEKDRICSACQAGKQVGAHHPHKNIMTTDRPLELLHMDLFGPIAYISIDGSKYCLVIVDDYSRFTWVFFLQEKSHTQETLKGFLRQAQNEFGLRIKKIRSDNGAKFKNSQIEGFLEEEGIKHEFSSPYMPQQNGVVERKNRTLLDMARTMLDEYKTSDRFWAEAVNTACYAINRVFGSKCFILIKRGRKSKFAPKTVEGFLLGYDSNTRAYRVFNKSSGLVEVSCDVVFDETNSSQVEQVDLDEIGGEEAPCIALRNMSIEDVCPKESEEPPNAQDQPSSSTQASPPTQNEDEAQVDAVENQANEPPQDDDNDQGGDANDQDKEDEEQRPPHPRVHQAIQRDHPVDTILGDIHKGVTTRSRVAHFFPRPNQNVVGTKWVFRNKQDEHGVVTRNKARLVAKGYSQVEGLDFGETYAPVARLESIRILLAYATYHGFKLYQMDVKSAFLNGPIKEEVYVEQPPGFEDSEYPNHVYKLSKALYGLKQAPRAWYGCLRDFLIDNGFKVGKADPTLFTKTLENDLFVCQIYVDDIIFGSTNESTCEEFSRIMTQKFEMSMMGELKYFLGFQVKQLQEGTFLSQTKYTQDILSKFGMKDAKPIKTPMGTNGLLDLDEGGKSVDQKGERVILRALMTPFLAIHAKGGENISPKQKDRTTT

SEQ ID NO: 215673 - protein, 267 aa, Zea mays
  Clone ID: MRT4577_128291C.1.pep
MMRSGLLSLCFHLALAITLAASVPGLARSRVIDMEPQLKPTLQLEPKHGVSQPDRNQEPKPTPQPEPKPEPKPEPKPAPQPDPKPDPKPAPQPDPKPAPQPDPKPEPKPTPQPDPKPSPQPGPEPKPKPVPQPEPKPEPKPTPQPDPKPGPQPDPKPEPKPTPQPGLEPKPKPAPQPEPKPTPQPDPKPEPKPTPQPPFPQPEPQPDPKPQPEPSKPDPRPDSKPQPEPSKPDLQPGPKPTLEPKPQPEPSKPEPPSSLPPPFGTGV

SEQ ID NO: 215674 - protein, 60 aa, Zea mays
  Clone ID: MRT4577_128292C.1.pep
PKVHFGPSLSNVDWLHGGVKSLLTLPNLFFVLGLRGPLRKLEEKGPTERVFEAFQKKSSV

SEQ ID NO: 215675 - protein, 112 aa, Zea mays
  unsure (1)..(112): unsure at all Xaa locations
  Clone ID: MRT4577_128293C.1.pep
CDLIVKMLLREMDGDPFHPMPSYDFLSGNGYSLKQLVRSNSDIDSSSSKSKESWQDLSDSSLSGQHTPTQSDNNDICGKWDQGMXKSVLSFSSPEDAFFPYKGCASYSADPY

SEQ ID NO: 215676 - protein, 242 aa, Zea mays
  Clone ID: MRT4577_128294C.1.pep
MMRSGLLSLCFHLALAITLAASVPGLARSRVIDIEPQLKPTLQLEPKHGVSQPDRNQEPKPTPQPEPKPEPKPEPKPAPQSDTKSDPKPAPQSDPKPAPQPDLKPEPKPTPQPDPKPSPQPGPEPKPKPAPQPEPKPEPKPTPQPDPKPGPQPDPKPEPKPTPQPGPEPKPKLAPQPEPKPTPQPDPKPEPKPTPQPPFPQPEPQPDPKPQPEPYKPDPRPDPKPQPEPSKPDPQPGPKPTP

SEQ ID NO: 215677 - protein, 1662 aa, Zea mays
  Clone ID: MRT4577_128295C.1.pep
KKEIVTGGDKSTSHGKAPSGESDNKMKGSPSHAKSHRSGDKKKKMKKVVYYETDSSSSSTSGSDTPYVTSKRHERKKFSKPPIFDGEDYYMLSDKMRHHLTSLHASIWNVVKIGVQVPSPGDKDYDSDKVAQIRHFNSQATAIILASLSREEYNKVQGLKSAKEIWDVLKTAHEGDEVTKITKRETIEGELGCFMLNQGEDLQAMYNRLKTLVNQVRNLGSTKWDDHEMFKVILRSLVFLNPTQVQLIRGDPRYKLMSPEEVIGKIVSFELMIKGSKKIIEQGTTSTSEVQPVAFKATEEEKKDSTPSSVPIDASKLDNEEMALIIKSFRQILKQRRGKDYKPRSKKVCYKCGKPGHFIAKCPISSDSDRGDDKRGKKKEKKRYYKKKGGDAHVCREWDSDESSTDSSDDEDAANITINKGLLFPNVGHKCLMAKDDKKKKVKSRSSTKYATSSDEDNSSDDEDNLLTLFANLNMQQKEKLNELISAIHEKDELLDSQEDFLIKENKKYVKRCMGSDQLRGKWVTRLVGKALHFMNSHLWCDKVKNAYAQEVEKCEKLTSELSICHDTISNLRIENANLIAKVEKSNICDDSIINLRNDNASLIAKIDKLNASLASLKIINEQLIAKAKDLNVCNDAITNLRDENAILHARIVELNDCKPSTSMIDHVSICTRYRDVNVDAIHDHLALIKQQNDHIATLTAKINEHDLENEKFKFARSMLYSGRRPDINDGIGFQQGDNVKLNAPPKRLSNFVKGKAPMPQDNEGYILYPAGYPEDKIRRIHAKKTHYVSHHAFIYKNEASSSRRSTHVKMPKMKSPIASNDHNISFKTFDASYVLTNKSGKVYASGGSSWIIDSGCTNHMTGEKRMFSSYEKNQDPQRAITFGDGNQGVTVFRRSDDSVAFKGVLEGQLYLVDFNRAELDTCLIAKTNMGWLWHRRLAHVGMKNLHKLLKGEHILELTNVHFEKDRICSACQAGKQVGVHHPHKNIMTTDRPLELLHMDLFGQIAYISIGGRKSQTQETLKGFLRRAQNEFGLRIKKIRSDNGMEFKNSQIEGFLEEEGINHEFSSPYTPQQNGVVERKNRTLLDMARTMLDEYKTSDRFWVEAVNTACYAINRLYLHRILKKTSYELLTGKKPNVSYFRVFGSKCFILVKRGRKSKFAPKAVEGFLLGYDSNTRAYRVFNKSTGLVEVSFDIVFDETNGSQVGQVDLDELDEEEALCVALTNMSIGDVCPKESEEPPQAQDRPSSSTQASPPTQDEDQAQDDENEDQEDEPSQKESNDQGGDDNDQDKEDEQDPRPPHPRPHRVEDALKDLDWVLAMQEDLNNFTRNELYQMDVKNAFLNGPIKEEVYVEQPPGFEDSEYPNHVYKLSKALYGLKQAPRAWYECLRDFLITNGFKVGKVDPTLFTKTIAKDLFVCQIYVNDNIFGSTNKSTCEEFSRIMVQKFEMSMMGELKYFLGFQVKQLQESTFISQTKYIQDILTKFGMKDAKPIKTPMGTNGHLDLDTGGYSDADWAVCKIDRKSTSGTCQFLGRSLVSWASKKQNSVALSTAEAEYIAAGHCCAQLLWMRQTLRDYGYKFSKVPLLCDNESAIRMADNPVEHSRTKHIAIQYHFLRDHQQRRDIEIAYINTKDQLADIFTKPLDEKTFTKLRNELNILDSRNFD

SEQ ID NO: 215678 - protein, 193 aa, Zea mays
  unsure (1)..(193): unsure at all Xaa locations
  Clone ID: MRT4577_128296C.1.pep
MMRSGLISLCFHLALAITLAASVPGLARSRVIDMEPQLKPTLQLEPKHGVSQPXKPEPKPTPQPDPKPSPQPGPEPKPKPAPQPEPKPEPKPTPQPDPKPGPQPDPKPEPKPTPQPGPEPKPKPAPQPEPKPTLQPDPKPEPKPTPQPPFPQPEPQPDPEPQPEPSKPGPKPQPEPSKLEPQPGSKPTPEPKP

SEQ ID NO: 215679 - protein, 1555 aa, Zea mays
  unsure (1)..(1555): unsure at all Xaa locations
  Clone ID: MRT4577_128297C.1.pep
MSGDHAKKEMETDEKPTTSNENALSGESRNKEKRKEKKKEKKTSSHKSHRSGDKIKKMRKVVYYETDTSSPSTSGSDAPSITSKRHERKKFSKIPLHYPRTSRHTPLLFIPLGKPPVFDGEDYNMWSDKMRHHLTSLHTSIWNVVEFGVQVPSVGDEDYDSDEVAQIHHFNSQATTTLLASLSREEYNKVQGLKSAKEIWDVLKTAHEGDEVTKITKWETIEGELGRFMLHQGEDPQAMYNRLKTLVNQVRNLGSXKWDDHEMVXRYKLMSPEEVIGKFVSFELIIKGSKKIIEQGTSYTPEAQPVAFKATEEKKEESTSSRQPIDASKLDNEEMALIIKSFRQILKQRRGKDYKPRSKKVCYKCGKPGHFIAKCPISSDSDRGDDKKGRRKEKKRYYKKKGGDAHVCREWDSNESSSDSSDDEDATNIAVTKGLLFPNVGHKCLMAKDGKRKKVKSKSSTKYESSSDDNASDEEDNLRTLFANLNMEQKEKLNELISAIHEKDDLLDSQEDFLIKENKKHVKVKNAYALEVEKCEKLSSELSTCHDTIANLRNENAKLITKVDSHVCNVSTFNPRDDNVDLLARIDELNVSLASLRIENEKLLAKAKDFDVCNITISNLRNENDILHAKVVELKSCKPSTSIVEHVSICTRCRDVDIDAIHDHMSLIKQQNDHIAKLDAKIAEHNLENEKFKFARSMLYNGTRPGIKDGIGFHRGDNVKLNAPPKRLSNFVKGKAPMPQDNEGYILYPAGYPESKIRRIHSRKSHSGPNHAFMYKGETSSXRQPTHAKLPKRKTPSASNDXVYASGGSSWIIDSGCTNHMTGEKKMFSSYEKNKDPQRAITFGDGNQGVTVFRRSDDSIAFKGVLEGQLYLVDFDRAELDICLIAKTNMGWLWHRRLAHVGMKNLHKLLKGEHILGLTNVHFEKDREKSQTQETLKGFLRQAQNEFGLRIKKIRSDNGTEFKNSQIEGFLEEEGIKHEFSSPYTPQQNGVVERKNRTLLDMARTMLDEYKTSDRFWAEAVNTACYAINRVFGSKCFILVKRGRKSKFAPKTVEGFLLGYDSNTRAYRVFNKSSGLVEVSCDVVFDETNGSQVEQVDLDEIGDEEAPCIALRNMSIGDDEAQVDEVEDQANEPPQDDDNDQGGDANDQDKEDEEQRPPHPRVHQAIQQDHPVDTILGDIHKGVTTRSRVAHFCEHYSFVSSIEPHRVEEALQDSDWVVAMQEELNNFTRNEWVFRNKQDEHGVVTRNKARLVAKGYSQVEGLDFGETYAPVARLESIRILLAYATYHGFKLYQMDVKSAFLNGPIKEEVYVEQPPDFEDSEYPNHVYKLSKALXYWLKQAPRAWYECLRDFLITNGFKVGKADPTLFTKTIKNDLFVCQIYVDDIIFVSTNKSICEEFSRIMIQKFEMSMMGELKYFLGFQVKQLQEGTFISQTKYIQDILTKFGMKDAKLIKTPMGTNGHLDLDTRVIELKGKWSIRQRRRFHSTPLVFAGAKGSQQTNTKIKERVQNKEQSQTEGNPGLTHRIVRCATGQCPVHQGGFTRTCQPREFGEAAPL

SEQ ID NO: 215680 - protein, 132 aa, Zea mays
  unsure (1)..(132): unsure at all Xaa locations
  Clone ID: MRT4577_128298C.1.pep
MMRSGLLSLCFHLALTITLAASVPGLARITVIDMEPQLKPTLQLEPKHGVSQPDRNQEPKPAPQPEPKPTPQPDPKPEPKPTPQPPFPRPEPQLDPKPQPEPSKPNPKPQPEPSKPDPHAXPKPTPEPKPQP

SEQ ID NO: 215681 - protein, 653 aa, Zea mays
  Clone ID: MRT4577_128299C.1.pep
ASAGEKSQTQETLKGFLRRAQNEFGLRIKKIRSDNGTEFKNSQIEGFLEEEGIKHEFSSPYTPQQNGVVERKNRTLLDMARTMLDEYKTPDRFWAEAVNTACYAINRLYLHRILKKTSYELLTGKKPNISYFRVFGSKCFILVKRGRKSKFAPKTVEGFLLGYDSNTRAYRVFNKSTGLVEVSCDVVFDETNGSQVEQVDLDEIGNEEAPCIALRNMSIGDVCPKESEESSNAQDQPSSSMQASPPTQNEDEAQVDEGQNQEDEPPQDDGNDQGGDANDQEKEDEEEPRPPHPRVHQAIQRDHPVDTILGDIHKGVTTRSRVAHFCEHYSFVSSIEPHRVEEALQDSDWVVAMQEELNNFTRNEVWHLVPRPNQNVVGTKWVFRNKQDEHGVVTRNKARLVAKGYSQVEGLDFGETYAPVARLESIRILLAYATYHGFKLYQMDVKSAFLNGPIKEEVYVEQPPGFEDSEYPNHVYRLSKALYGLKQAPRAWYECLRDFLIANGFKVGKADPTLFTKTLENDLFVCQIYVDDIIFGSTNESTCEEFSRIMTQKFEMSMMGELKYFLGFQVKQLQEGTFISQTKYTQDILTKFGMKDAKPIKTPMGTNGHLDLDTGGEEITSWALMIPFLAIHAKGGESMSPKQKDRTTTNFKT

SEQ ID NO: 215682 - protein, 140 aa, Zea mays
  unsure (1)..(140): unsure at all Xaa locations
  Clone ID: MRT4577_12829C.1.pep
RAGSRGKCFTQGSVDVXIAANPSTEGGEDESVDDSVVKVVDIDDTFRLQEQPPFDKKSFVSYIKXYIKNLTAVLEPEKAAEFKKGVEGATKFLLSKLKDLQFFVGESMNDETYVVFTYYKDGATNPTFLYCSHGLKEIKC

SEQ ID NO: 215683 - protein, 98 aa, Zea mays
  Clone ID: MRT4577_1282C.1.pep
HSYGRLGPSRPAGERRSSTRPHLTPLPPHPAIHQKQCEQAARLEASLQGTRWAAAVNDARRADPASPYTVAQYNSPFEFTGRVNEIWMLFDADDDASM

SEQ ID NO: 215684 - protein, 279 aa, Zea mays
  Clone ID: MRT4577_128300C.1.pep
MMRSGLLSLCFHLALAITLAASVPGLARSRVIDIEPQLKPTLQLEPKHGVSQPDRNQEPKPTPQPEPKPEPKPEPKPAPQSDTKSDPKPAPQSDPKPAPQPDLKPEPKPTPQPDPKPSPQPGPEPKPKPAPQPEPKPEPKPTPQPDPKPGPQPDPKPEPKPTPQPGPEPKPKPAPQPEPKPTPQPDPKPEPKPTPQPDPKPEPKPTPQPPFPQPEPQPDPKPQPEPSKPDPKPQPEPSKPDPQPEPKPTPEPKPQPEPSKPEPPSSLPPPFGTGVVEGN

SEQ ID NO: 215685 - protein, 809 aa, Zea mays
  Clone ID: MRT4577_128301C.1.pep
MAKDGKRKKVKSRSSAKYTSSSDEDHVSDEEDNLRILFANLNMQQKDKLNELISAIHEKDELLDSQEDFLIKENKKHVKVKDAYALEVEKCERLSSELSKCHDIIINLRNENANLIAKVDSNKMKKIKFARSMLYSGRRPGIKDGIGFQKGDNVKLNAPPKRLSNFVKGKGPMPQDNEGYILYPTGYPESKIRRIHSRKSQSGPNHAFMYKGETSSSRQSTRAKLPKKKTPTASNDHNISFKTFDASYVLTNKSGKVYASGGSSWIIDSGCTNHMTGEKKMFSSYEKKQDPQRAITFGDGNQDTGVTVFRRSDDSIAFKGVLEGQLYLVDFDRAELDTCLITKTNIGWLWHRRLAHVGMKNLNKLLKGEHILGLTNVHFEKDMICSACQAGKQVGVHHPHKNIMTTDKPLELLHMDLFGPIAYISIGGSKYCLVIVDDYSCFTWVFFLQEKSHTQETLKGFLRRAQNEFGLRIKKIRSDNGTEFKNSQIEGFLEEEGIKHEFSSPYTPQQNGVMERKNRTLLDMARTMLDEYKTSDRFWAEAVNTACYAINRLYLHRILKKTSYELLTGKKPNVSYFRVFGSKCFILVKRGRKSKFAPKAVEGFLLGYDSNTRAYRVFNKSSGLVEVSCDIVFDETNDSQVEQVDLDEIGDEEALCVALRNMSIGDMCPKESEEPPNAQDQPSSSMQASPPTQDEDEAQNDEGENQEVEPPQEESNDQGGDARDQDKEDEQVPRPPHPRVHQAIQRDHPVNTILGDIQKGVTTRSRVAHFCEHYSFVSSIEPHRVEEALQVSDWVVAMQEELNNFTRNE

SEQ ID NO: 215686 - protein, 690 aa, Zea mays
  unsure (1)..(690): unsure at all Xaa locations
  Clone ID: MRT4577_128302C.1.pep
TLEVEKCEKLSSELSTCHETIDNLRNENANLLAKVDSNACNVPIPNLKNDNDDLLAKIEELNISLASLRNENEKLITKAKDFDVCNATISDLRSKNDILHAKVVELKSCKPSTSTVEHTSICTRCRDVDIYSIHDHMALIKQQNNHIAKLDAKIAEHELENENFKFARSMLYSGRRPGIKDGIGFQKGDNVKLNAPPKKLSNFVKGKATXPQDNKGYILYPAGYPEHKIRRIHSRKSHSGSHHAFMYKSEASSSRQSTHAKLPKKKTPIASNESSISLKTFDASYVLTNKSGKVVAKYVGAKHKGSKTCVWVPKVYASRGSSWIIDSGCTNHMTGEKRMFSSYEKNQDPQRAITFGDGNQDLGVTVFRRSDDSVAFKGVLEGQLYLVDFNRAELDTCLIAKTNMGWLWQRRLSHVGMKNLHKLLKGEHILGLTNVHFEKDREKSQTQETLKGFLRRVQNEFGLRIKKIRSDNGTEFKNSQIEGFLEEEGIKHEFSSPYTPQQNTVVERKNRTLLDMARTMLDEYKTLDRFWAEAVNTACYAINRLYLHQILKKTSYELLTGKKPNVSYFRVFGSKCFILVKRGRKSKFAPKVVEGFLLGYDSNTRAYRVFNKSTGLVEVSCDIVFDETNDSQVEQVDLDELDDEEAPCVALKNMSIGDVCPKESEEPPQAQDQPSSSMQASPPTQDEDQA

SEQ ID NO: 215687 - protein, 57 aa, Zea mays
  Clone ID: MRT4577_128303C.1.pep
GLGVPVSPVHDIRRATRDMYVLLLKTRGSMAPPFTKWMPVSHVTAPSVLISLRCLFG

SEQ ID NO: 215688 - protein, 44 aa, Zea mays
  Clone ID: MRT4577_128304C.1.pep
HFGPPPSRFYFLVWISHVPMGEWPPLPLLMSVPSKNQHIQKAIV

SEQ ID NO: 215689 - protein, 125 aa, Zea mays
  Clone ID: MRT4577_128305C.1.pep
LFERKPSAFKVFPLPRCCFPPPGSRWWAPLPVSPPWRAQFRSPFCVFPGSLLFFFPPIPSVNRGPFGVVGSPTKAPAPPGPRFLCRPSLIFGLKPPFVPVFLGLPFPAPPFVFSPPLCFFWFSPP

SEQ ID NO: 215690 - protein, 55 aa, Zea mays
  unsure (1)..(55): unsure at all Xaa locations
  Clone ID: MRT4577_128307C.1.pep
IAVVLVHSVSVTTXLYVRHKHRHCQCSNRELRPAKSTAYTFRKDNMKIQPDMEDL

SEQ ID NO: 215691 - protein, 68 aa, Zea mays
  Clone ID: MRT4577_128308C.1.pep
CPCSSSMKLSLQLPVRNPPLMTIITWSNKCSMALVDTMGIAFISNPGRTSSCQAYRRTAECPQLQGSW

SEQ ID NO: 215692 - protein, 69 aa, Zea mays
  unsure (1)..(69): unsure at all Xaa locations
  Clone ID: MRT4577_128309C.1.pep
LSPFPIMDCLMAPEXPPFVHGLPQVRAWWKGLPGGPGAKKVGQFIPGGPGAPKEQECRLTDPTPLGCWA

SEQ ID NO: 215693 - protein, 127 aa, Zea mays
  unsure (1)..(127): unsure at all Xaa locations
  Clone ID: MRT4577_12830C.1.pep
LSFFRVLMETMGGTMTSRWEPFPADTYLSTYASELTRISEQIMPYLSTANPRRYVSFLQTSYEFFTRKKLMADVRXYDTFLRTFINAERRLINGXSDSDKNMMIPALFSMQXTEXPELYTETMIMAL

SEQ ID NO: 215694 - protein, 44 aa, Zea mays
  unsure (1)..(44): unsure at all Xaa locations
  Clone ID: MRT4577_128310C.1.pep
LWSDSGSLLFFYTESPIRFFXIIHNIMSFGYFXNIVTIXVYLVF

SEQ ID NO: 215695 - protein, 935 aa, Zea mays
  Clone ID: MRT4577_128311C.1.pep
MSGDHAKKEMENGEKPTTSHGSTSSEESRTKRKEKKDSSKGKEKKKDSSKGKEKKSSSHKEKKEKSSSHKPQRSGDKKKRMRKVVYYETDSSATSTSGSDAASVTSKRQERKKYSKIPLRYPRISKHTPLLSVPLGKPPTFDGEDYARWSDLMRFHLTSLHKSIWDVVEFGAQVPSIGDEDYDEDEVAQIEHFNSQATTILLASLSREEYNKVQVLKSAKEVWDVLKTAHEGDELTKITKWETIEGELGRFRLRKGEEPQNMYNRLKTLVNQVRNLGSKKWDDHEVVKVILRSLIFLNPTQVQLIRGNPRYTLLTPEEVIGNFVSFECMIEGSRKINELDDPSTSEAQPVAFKATEEKKEESTPSRQPIDASKLDNEEMALVIKSFRQILKQRRGKDYKSRSKKVCYKCGKLGHFIAKCPLSSDSDRDNDKKGKRREKRRYHKKRGGDAHVCREWDSDESSTDSSDDEDAANIAVTKGLLFPNVGHKCLMAKDGKKKKVKSKSSTKYESSSDDNASDEEDNLRTLFANLNMEQKEKLNELISAIHEKDDLLDSQEDFLIKENKKHVKVKNAYALEVEKCENLSSDLSTCHETIDNLRNENANLLAKVDSHVCNVSITNSRNNDDDLLARIEELNISLASLRIENEKLLAKAKNFDVCNATISDLRTKNDMLHAKVVELKSCKPSTSIVEHVSICTRCRDVDINAIHDHMALIKQQNDHIAKLDAKIVEHNLENEKFKFARSMLYNGRRPGIKDGIGFQRGDNVKLNAPPKRLSNFVKGKAPMPQDNEGYILYPAGYPGSKIRRIHSRKSHSGPNHAFIYKGETSSSRQPTRAKLPKKKTPSASNDHDISFKTFDASYVLTNKFGKVYASGGSSWILDSGCTNHMTGEKRMFSSYEKNQDPQRAITFGDGNQGVTVFRRSDDSIAFKGVLEGQLYL

SEQ ID NO: 215696 - protein, 417 aa, Zea mays
  unsure (1)..(417): unsure at all Xaa locations
  Clone ID: MRT4577_128312C.1.pep
RICSACQAEKQVGAYHPXHKNIMTTDRPLELLHMDLFGPIAYISIGGSKYCLVIVDDYSRFTWVFFLQEKSHTQETLKVFLRRAQNEFGLRIKKIRSDNGTEFKNSQIEGFLEEEGIKHEFSSSYTPQQNGVVERKNRTLLDMARTMLDEYKSSDRFWAEAVNTACYAINRLYLHXILKKTSYELLTSKKPNISYFRVFGSKCFILIKRGRKSKFAPKTIEGFLLGYDSNTRAYRVFNKSSGQVEVSCDVVFDETNGSQVEHVDLDEIGDEETPCIALRNMSIGDVCPKESEEPPNAQDQPSSSTQASPPTQNEDEAQVDKGEEPNDEPPQDDDNDQGGDANDQAKEDEQPRPPHPRVHQAIQRDHSVDTILDDIHKGVTTRSRVVHFCEHYSFVSSIEPHRVEXAVQNSDWVIVTP

SEQ ID NO: 215697 - protein, 155 aa, Zea mays
  unsure (1)..(155): unsure at all Xaa locations
  Clone ID: MRT4577_128313C.1.pep
PGGRAAGHNRGEPSTSRTRQKDTPAAPRQREKKKKTPGGETPRGKKARGVIVGLRTRKSPLTGGGNARPRGARVGRGKPSPGRPVLFPPRPPQKRAPVKRGRRKSDPPKKKRARWNPVSGKKKKKKKKKKKKKKKKKKNTPQGGRSRGXKLNERV

SEQ ID NO: 215698 - protein, 1689 aa, Zea mays
  unsure (1)..(1689): unsure at all Xaa locations
  Clone ID: MRT4577_128314C.1.pep
MSGDHAKKEMVIGGNKPTSPAKATSHGKAPSKESGNKKKKGSPSRIRTHKSGEKKKMKKVVYYETDSSSPSTSGSDAASITSKRQERKKYSKIPLRYPRIPRHTPLLSVPLGKPPTFDGEDYSRWSDMMRYHLTSLHKSIWDVVEFGVQVPTVGDEDYDEDEVAQIEHFNSQATTILLTSLSREEYNKVQGLKSAKEIWDVLKIVHEGDEVTKITKRETIERELSRFMLHQGEEPQTMYNQLKTLMNQVRNLGSTKWDDHEMVKVILRSLVFLNPTQVQLIRGDPRYKLMSPEEVIGKFVSFELMIKGSKKIIEQGAPSTPEVQPVAFKATEEKKEECTSSRLPIDASKLDNEEMALIIKSFRQILKQRRGKDYKPRSKKVCYKCGKPGHFIAKCPISSDSDRGDDKKGKRREKKKYYKKKGGDAHVCWEWDSDESSIDSSDEDAANIAVNKGLLFPNVGHKCLMAKDGKKKKVKSKSSTKYTTSRDEDNSSDDEDNLLTLFANINMQQKEKLNELISAIHEKDELLDSQEDFLIKENKKHVKTKNAYALEVEKCEKLTSKLSTCHNVISNLRDENAKLIAKVEKLDICDDSIISLRNDNASLITKIDNLNASLSSLKIANEKLIAKAKDLNVCNVSISNLRDENAILHAKIVDLNTCKPSTSIVEHVTICTRCRDINVDTIQDHLALIKKQNDHIAQLSAKIDEHDLENENFKFARSMLYSGRRPGIKDGIGFQQGDNVKLNTPPKRLSNFVRXKAPMAQDNEGYILYPVGYPEHKIRRIHSRKSHSGSHHAFMYKXVYASGGSSWITDSGCTNHMTREKRMFSSYEKNHDLQRAITFGDGNQAHVGMKNLHKLLKGEHILGLTDVHFEKDREKSQTQETLKGFLRRAQNEFGLRIKKIRSDNGTEFKNSQIEGFLEEEGIKHEFSSSYTPQQNGVVERKNRTLLDMARTMLDEYKTSDRFWAEAVNTACYAINRLYLHRILKKTSYELLTGKKPNVSYFRVFGSKCFILVKRGRKSKFAPKVVEGFLLGYDSNTRAYRVFNKSTGLVEVSCDILFDETNGSQVEQVDLDELDDEEASCVALRNMSIGDVCPKESEEPPHAQDQPSSSMQASPPTQDEDQAQDDENGDQEEPPQEEDNDQGGDVDDQDKEDDEGPRPPQPSVHHAIQRDHPVNTILGDIHKGVTTRSRVAHFCEHYSFVSSIEPYRVEDALRDSDWVLAMQEELNNFTRNEVWHLVPHPNQNVVGTKWVFRNKQDEHGVVTRNKARLVAKGYSQVEGLDFGETYAPVARLESIHILLAYATYHGFKLYQMDVKSAFLNGPIKEEVYVEQPPGFEDSEYPNHVYKLSKALYGLKQAPRAWYECLRDFLITNGFKVGKADPTLFTKTIANDLFICQIYVDDIIFGSTNKSTCEEFSRIMIQKFEMSMMGELKYFLGFQVKQLQKGTFISQTKYIQDILTKFGMKDAKPIKPPMGTNGHLDLDTGDIMLSVCMCARFQADPKEVHLRAMKRILRYLVHTPKFGIWYPKGYTFDLIGYSDADWGGCKIDRKSTSGTCQFLGRSLVSWTSKKQNSGALSTAEAEYITAGHCCAQLLWMRQTLRDYGYKLTKVSLLCDNESAIRMADNPVEHSRTKHIAIRYHFLRDHQQRGDIEIAYVSTKEQLADIFTKPLDEKTFIKLRNELNILDSRKFD

SEQ ID NO: 215699 - protein, 109 aa, Zea mays
  Clone ID: MRT4577_128315C.1.pep
TSFLRNSPLAMNASPPHGALQCPGRPWLSLSSSSPPTVRCYTIPPNAGTAPLEADPPWQEAGQGCAPPSVRVHTAKEAAPRVRDACGTTIQGGQADPGSGKLHAPPQHA

SEQ ID NO: 215700 - protein, 1929 aa, Zea mays
  Clone ID: MRT4577_128316C.1.pep
MSGDHAKKEMETGEKPTTSYGSTSSEESRTKRREKKKSSSNKGKEKKSSSHHKEKKEKSSSHKPHRKGDKHKRMRKVVYYETDTSSTSTSDSDAPSVTSKRQERKKYSKIPLRYPRIPKHTPLLSVPLGKPPTFNGEDYAMWSNLMRFHLTSLHKRIWDVVEYGVQVPSIGDEDYDTDEVAQIEHFNSQAATILLASLSKEEYNKVQGLKNAKEIWDLLKTAHEGDELTKITKRETIEGELGRFRLRQGEEPQDMYNRLKTLVNQVRNLGSTKWDDHEVVKVILRALIFLNPTQVQLIRGNPRYPLMTPEEVIGNFVSFECMIKGSKKINELDEPSTSEAQPVAFKATEEKKEESTPSRQPIDASKLDNEEMALIIKSFRQILKQRKGKDYKPRSKKVCYKCGKPGHFIAKCPMSSDSDRGDDKKGRRKEKKKYYKKKGGDAHVCREWDSDESSSDSSDDEDAANIAVTKGLLFPNVGHKCLMAKDGKKKVKSRSSTKYETSSDEDDDKNEEDNLRILFANLNMEQKEKLNELISAIHEKDDLLDSQEDFLIKENKKHVKVKNAYALQVEKCEKLSSELSTCREMIDNLRNENAILNAKVDSHVCNVSIPNLKNDNVDLLAKIDELNASLASLRLENENLIAKAKNFDVCNATISDLRTKNEMLHAKVVELKSCKPSTSNVEHVSICTRCRDINIEAIHDHLALIKKQNDHIAKLDAKIAEHNLENEKFKFARSMLYNGRRPGIKDGIGFQRGDNVKLNAPPKNLSNFVKGKAPMPQDNEGYILYPAGYPESKIRKIHSRKSHSGPNHAFMYKGETSSPRQPTRAKLPKKKIPNASNDHAISFKTFDASYVLTSKSGKVVAKFVGGKHKGSKTCVWVPKVLVSNAKGPKTVWVYASGGSSWILDSGCTNHMTGEKRMFSSYEKNKDPQRAITFGDGNQGLVKGVTVFRRSDDSIAFKGVLEGQLYLVDFDRAELDTCLIAKTNMGWLWHRRLAHVGMKNLHKLLKGEHILGLTNVHFEKDRICSACQAGKQVGTHHPHKNIMTTDRPLELLHMDLFGPIAYISIGGSKYCLVIVDDYSRFTWVFFLQEKSQTQETLKGFLRRAQNEFGLRIKKIRSDNGTEFKNSQIESFLEEEGIKHEFSSPYTPQQNGVVERKNRTLLDMARTMLDEYKTPDRFWAEAVNTACYAINRLYLHRILKKTPYELLTGKKPNISYFRVFGSKCFILIKRGRKSKFAPKTVEGFLLGYDSNTRAYRVFNKSTGLVEVSCDVVFDETNGSQVEQVDLDEIGEEQAPCIALRNMSIGDVCPKESEEPPSTQDQPSSSMQASPPTQNEDEAQNDEEQNQEDEPPQDDSNDQGGDTNDQEKEDEEEPRPPHPRVHQAIQRDHPVDTILGDIHKGVTTRSRVAHFCEHYSFVSSIEPHRIEEALQDSDWVVAMQEELNNFTRNEVWHLVPRPNQNVVGTKWVFRNKQDEHGVVTRNKARLVAKGYSQVEGLDFGETYAPVARLESIRILLAYATYHGFKLYQMDVKSAFLNGPIKEEVYVEQPPGFEDSEYPNHVYRLSKALYGLKQAPRAWYECLRDFLIANGFKVGKADPTLFTKTLENDLFVCQIYVDDIIFGSTNESTCEEFSRIMTQKFEMSMMGELKYFLGFQVKQLQEGTFISQTKYTQDILAKFGMKDAKPIKTPMGTNGHLDLDTGGKSVDQKVYRSMIGSLLYLCASRPDIMLSVCMCARFQADPKESHLTAVKRILRYLAYTPKFGLWYPRGSTFDLIGYSDADWAGCKINRKSTSGTCQFLGRSLVSWASKKQNSVALSTAEAEYIAAGHCCAQLLWMRQTLRDYGYKLTKVPLLCDNESAIKMADNPVEHSRTKHIAIRYHFLRDHQQKGDIEISYINTKDQLADIFTKPLDEQSFTRLRHELNILDSRNFFC

SEQ ID NO: 215701 - protein, 325 aa, Zea mays
  Clone ID: MRT4577_128317C.1.pep
MEALYLLASLAATVVTSAFHSLLLFLRLLLRYPRRAAPTDDGPAAAARLYEGRVRHARRRPAAHTFEYPARYALVDLDRLPLPGHLSADDARRVASTSGPVHLLTVPESVGYEQNPLSIYYCYDSAGQGQDGELRTCIAEVTNTPWAERVMFTFQPGSDLIAKPLHVSPFMDMLSNWSIRADAPGDRLYVGISVQHPTLGDYFTAVLDAKLVEQTSNSLRLATFFWLMPHKVAAWIYWEALKLWLKNVKFLDHPRYLNPRYRDEALARDLELRTSCCHLQRQEQNDRRSRTAEKTAEITDHVDGKGDADIAKRWCVWRDARWPWS

SEQ ID NO: 215702 - protein, 1489 aa, Zea mays
  Clone ID: MRT4577_128318C.1.pep
MSGASAKREIGTGEKPATSNGKAPSGESANKVKGSSSHNKSRQSGDKKKKMKKVVYYDTDSSSPSTSGSNTPSVTSKRHERKKFSKIPLRYPRISIRTPLLSVPLGKPPMFDGEDYNMWSDKMRHHLTSLHTSIWDVVEIGVQVPSPGDEDYDSDEVAQIRHFNSQATTILLASLSREEYNKVQGLKSAKEIWDVLKTAHEGDEVTKITKRETIEGELGSKMIIEQGDSSTPEAQLVAFKATEEKKEDSTPSRIPIDASKLDNKEMALIIKSFRQILKQRKGKDYKPRSRKVCYKCGKPGHFIAKCPLSTDSDKGDDKKGKRGEKKRYYKKKGGDAHVCREWDSDESSTDSSSDEDAANIAVTKGLLFPNVGHKCLMAKDGKRKKVKSKSSTKYETSSDEDNSGVEEDNLRTLFANLNMQQKEKLNELISAIHEKDELLDSQEDFLIKENKKHVKVKNAYALEVEKCEKLSSELSTCHDVISNLRNENAKVIVKVDSNVCDVSIPNLIDDNVSLLAKIEELNVSLASLKIENEKLIAKAKDLDVCNVTISNLRSENDILHAKIVELKSCKPSTSIVEHVSICTRCRDINVDAINDHLALIKKQNDHIAQLNAKINEHDLENENFKFARSMLYSGRRPGIKDGIGFQKGDNVKLNAPPKRLSNFVKGKAPMPQDNEGYILYPVGYPKHKIRRIHSRKSHSGPNHAFMYKGETSSSRQSTRAKLPKKKTPIASNNSNISFKTFNASYVLTNKSGKVYASGGSSWIIDSRCTNHMTGEKKMFSSYEKNQDPQRAITFGDGNQGVTVFRRSDDSVAFKGVLEGQLYLVDFNRAELDTCLIAKTNMGWLWHRRLAHVGIKNLHKLLKGEHILRLTNVHFEKDRICSACQAGKQVGVHHPHKNIMTTDRPLELLHMDLFGPIAYISIGGSKYCLVIVDDYSRFTWVFFLQEKSHTQETLKGFLRHAQNEFSLRIKKIRSDNGTEFKNSQIEGFLEEEGIKHEFSSPYTPQQNGVVERKNRTLLDMARTMLDEYKTSDRVFGSKCFILVKRGRKSKFAPKAVEGFLLVYDSNTRAYRVFNKSSRLVEVSCDIVFDETNGSQVEKVDLDELDDEEALCVALRNMSIGDVCPKESEEPPQAQDQQSSSTQASPPTQDEDEAQNDEREDQEVEPPQEESNDQGGDAHDQDEEDKQVPRPPHPRVHQAIQRDHPMNTILGDIQKGVTTRSRVAHFCEHYSFVSSIEPHKVEEALQDSDWVVAMQEELNNFTRNEVWHLVPRPNQNVVGTKWVFRNKQDEHGVVTRNKARLVAKGYSQVEGLDFGETYAPVARLESIRILLAYATYHGFKLYQIDVKSAFLNGPIKEEVYVEQPPGFEDSEYPNHVYKLSKALYGLKQAPRAWYECLRDFLITNGFKVGKADPTLFTKTLENNLFVCQIYVDDIIFVSTNESTCEEFSRIMTQKFEMSMMGELKYFLGFQVKQLQEGTFISQTKYIQDILT

SEQ ID NO: 215703 - protein, 43 aa, Zea mays
  Clone ID: MRT4577_128319C.1.pep
ATSLQILPNPLIPILLLTIGYRTFGTKETRTHGYETRSMTGLA

SEQ ID NO: 215704 - protein, 91 aa, Zea mays
  unsure (1)..(91): unsure at all Xaa locations
  Clone ID: MRT4577_12831C.1.pep
EQPPFAKKSFVFSFKKSFKNLPAVLEPKKADEFKKGVEGATKFFLSKLKALQFFVGESIKDNGFVVFPYYKDGAPNPPFLYFSXGLKEIKC

SEQ ID NO: 215705 - protein, 1716 aa, Zea mays
  unsure (1)..(1716): unsure at all Xaa locations
  Clone ID: MRT4577_128320C.1.pep
MSGELAKKEMETGDKPATSHGKASSGESHNKEKMKEKKEKKTSSHKSHQSGDKIKKMRKVVYYETDTSSPSTSGSDAPSITSKRHERKKFSKIPLHYPRTSRHTPLLSVPLGKPPTFDGEDYARWSDLMKFHLTSLHKSIWNVVEFGAQVPSVGDEDYDEDEVAQIEHFNSQATTILLASLSREEYNMVQGLKSAKEVWDVLKTTHEGDELTKITKRETIEGKLGRFRLRQGEEPQDMYNRLKTLVNQVXRNLGSKKWDDHEVVKIYTXMTPEEVIGNFVSFEFMIKGSRKNNELDGPSTSEAQPVAFKATEEKKEESTPSRQPIDASKLDNEEMALVIKSFRQILKQRRGKDYKPRSKKVCYKCGKPGHFIAKCPISSDSDRGDDKKGRRKEKKRYYKKRGGDAHVCREWDFDESSSDSSDDEDAANIAVTKGLLFPNVGHKCLMAKDGKKKKVKSKSSTRYESSSDENASDEEDNLCTLFANLNMQQKEKLNELISAIHEKDDLLDTQEDFLIKENKKHVKVKNAYALEVEKCEKLSSELSTCHETIDKLRNENSNLLAKVDSIACNVSIPNLRNDNDDLLARIEELNISLASLRIENEKLLAKAKDFDVCNATISDLRTKNDILHAKVVELKSCKPSTSTVEHTSICTRXMLYSGRRPGIKDGIGFQQGGNVKLNXAPPKKLSNFVKGKAPMPQDNEGYILYPAGYPEDKIRRIHSRKSHSGPNHAFMYKGETSSSRQPTHAKLPKKKTPSASNEHSFSFKTFDASYVLTNKSGKVYASGGSSWIIDSGCTNHMTGEKKMFSSYEKNQDPQRAITFGDGNQGVTVFRRSDDSIAFKGVLEGQLYLVNFDRAELDTFLIAKTNMGWLWHRRLAHVGMKNLHKLLKGEHILGLTNVHFEKDRVCSACQAGKQVGAHHPHKNIMTTDMPLELLHMDLFGPITYISIGGMERKNRTLLDMARTMLDEYKTSDRFWAEAVNTACYAINRLYLHRILKKTSYELLTEQVDLDEIGIEEAPCIALRNMSIGDVCPKESEEPPNAQDQPSFSTQASPPTQNEDEAQVDEIEDQANEPPQDDGNDQRGDANDQDEEDEEQRSPHPRVHQAIQRDHPIDTILGDIQKGVTTRSRVAHFCEHYSFVSSIEPHRIEEALQDSDWVVAMQEELNNFTRNEEEVYVEQPLGFEDSEYPNHVYKLSKALYGLKQAPRAWYECLRDFLITNGFKVGKADPTLFTKTLENDLFVCQIYVDDIIFGSTNESTCEEFSRIMTQKFEMSMMGELKYFLGFQVKQLQEGTFLSQTKYTQDILSKFGMKDAKPIKTPMGTNGHLDLDEGGGESISKGSNDSVFGDSCQRGRKCQRFIYNYTKSTVRNTVDYSGQEKLFGKIGQARTVRALAADRPQHQDDPRTEPMQKSKSTLQTVRRKKQGPSKTSRGPSGLRRGPSGPDVGGGIGFLGQNLVFAELVVTLAVPEAASDNADDAAKAAALAEKAKWDEADEACLSRLVNVLSNRLFDVYSSFTSAKGLWTELENEFSEVDNGNESFTTENYLNYKMVEGRSVMEQLQEIQLLVRDLVQYGCVLPDSFQVNAILAKLPPSWRDFVTSRRHMKKQMTLTELSATINVEERARSSNKPSQQLQAHVVEKGGDRKFQKKKKNSPQKNMNQPKSKKMKKKKEDFICYVCGVSEHTARRCKLRKGKGPPPQRKEGNVVVNSTLGYAPVTP

SEQ ID NO: 215706 - protein, 38 aa, Zea mays
  Clone ID: MRT4577_128321C.1.pep
SAFGPSPGVRSFDLDKKGGPLSVGLRSPCIAPSFNLAV

SEQ ID NO: 215707 - protein, 1337 aa, Zea mays
  unsure (1)..(1337): unsure at all Xaa locations
  Clone ID: MRT4577_128322C.1.pep
MSGDHAKKEMVTGNKPATSHRKAPSGESRNKGKEKESPSHKSHRSGEKKKKMRKVVYYETNSSSPSTSDSDAPSVTSKCHERKKFSKIPLHYPRISKHTPLLSVPLGKPPVFDGEDYNMWSDKMRHHLTSLHTSIWNVVEFGVQVPSVGDEDYDSDEVAQIRYFNSQATTILLASLSREEYNKVQGLKSAKEIWDVLKTAHEGDDVTKITKRETIEGELGRFMLHQGEEPQAMYNRLKILVNQVRNLGSTKWDDHEMVKVILRSLVFLNPTQVQLIRGDPRYKLISPEEVIGKFVSFELMIKGSKKIIEQGASSSVPKAQPVAFKATEEKKEDSTPSRIPIDASKLDNEEMTLIIKSFRQILKQRXGKDYKPRSKKXDSDRDNDKKGKRREKKKYYKKKGGDAHVCREWDSNESSTDSSDDEDTVNIAVNKGLLFLNVGHKCLMAKDGKRKKVKLKSSTKYATSSDEANSSDNEDDLFTLFANLNMQQKEKLNELISAIHDKDELWDSQEDFLIKENKKHVKVKNAYALEVEKCEKLTSELSTCHDIISNLRNENANLIAKVGKLDVCDDSIVSLRNDNANFIAKIDKLNASLASLKNENEKLIVKARELDVCNASISNLRDENDILHAKIVEFNTCKPSTSSIEHVTICTRCRDVNVDAIHDHLALIKQQNDHIATLTAKINEHDLENEKFKFARSMLYSGRRPGIKDDIGFQKGDNVKLNAPPKRLSNFVKGKAPMIQDNEGYILYPAGYPEHKIRRINSRKSHSGPNHAFMYKSEASSSRQSTHAKLPKKKTPKASNDHNVSFKTFDASYVLTNKSGKVYASGGSSWIIDSGCTNHMTREKKMFSSYEKNQDPQRAITFGDGNQGVTVFRRSDDSVAFKGVLEAHVGMKNLHKLLKGEHILGLTNVHFEKDRICNACQAGKQEKAQTQETLKGFLRRAQNEFGLRIKKIRSDNGTEFKNSQIEGFLEEEGIKHEFSSPYMPQQNGVVEMKNRTLLNMARTMLDEYKTSDQFWTEAVNTACYAINRLYLHRILKKTSYELLTGKKPNVSYFRVFGSKCFILVKRGRKSKFAPKAVEGFLLGYDSNTRAYRVFNKSTGLVEVSCDIVFDETNGSQVEQVDLDELDDEEALCVALRNMSIGDVCPKESEEPIQAQDQPSSSMQASPPTQDDDEAQDDEEEDQEDEPPQEDVNDQGGDANDQDKEDEQVPRPPHPRVHQAIQRDHPVNTILRDIQKGVTTRSRVAHFCEHYSFVSSIEPHRVEEALQDSDWVLAMQEELNNFKRNELYQMDVKSAFLNGPITEEVYVEQPPGFEDSEYPNNVYKLSKALYGLKQAPRA

SEQ ID NO: 215708 - protein, 436 aa, Zea mays
  unsure (1)..(436): unsure at all Xaa locations
  Clone ID: MRT4577_128323C.1.pep
PFLLPQEKKDLAGTAKARFSAKDYSDHMALVRAYEGWKDAEREGSAYEYCWRNFLSSQTLQAIHSLRKQFSYILKDSGLIDSDGNTNNSLSHNQSLVRGIICSGLFPGIASVVHRESSMSFKTMDDGQVLLYANSVNAKYQTIPYPWLVFGEKVKVNAVFIRDSTGVSDSILILFGGAVAKGGMAGHLKMLDGYIDFFMDPSLSECYLQLKEELDKLIQQKLEDPNFGDFLSSQTLQAIHSLRKQFSYILKDSGLIDSDGNTNNSLSHNQSLXRIMRSIHKEGKYILFAVQELAAGDLCEGRFVFGRETSRARLRSPEDDAKSNLIKDGMNPKSLLQTLLMRAGHTPPRYKTKHLKTNEFRAVVEFKGMQFVGKPKRNKQLAERDAAIEALGWLTQTSGVKAQDEKDDDSPLDLTDSMLKLLTRPRRHSKNSSRKR

SEQ ID NO: 215709 - protein, 1872 aa, Zea mays
  Clone ID: MRT4577_128324C.1.pep
MSGDHAKKEMETGEKPTTSYGSTSSEESRTKRREKKKSSSNKGKEKKSSSHHKEKKEKSSSHKPHRKGDKHKRMRKVVYYETDTSSTSTSDSDAPSVTSKRQERKKYSKIPLRYPRISKHTPLLSVPLGKPPTFDGEDYARWSDLMRFHLISLHKSIWDVVEFGAQVPSVGDENYDEDEVAQIEHFNSQATTILLASLSKEEYNKVQGLKSAKEIWDVLKTAHEGDELTKITKRETIEGELGRFRLHKGEEPQHMYNRLKTLVNQVRNLGSKKWDDHEVVNVILRSLIFLNPTQVQLIRGNPRYTKMTPEEVIGHFVSFECMIEGSRKINELGDPSEAQPVAFKATEEKKEESTPSRQPIDASKLDNEEMALVIKSFRQILKQRRGRTTSPAPRSDRGDDKKGRRKEKKRYYKKKGGDAHVCREWDSDESSSDSSDDEDAANIAVTKGLLFPNVGHKCLMARDGKKKKVKSNSSTKYESSSDDNASDEEDNLRILFANLNMEQKEKLNELISAIHEKDDLLDSQEDCLIKENKKHVKVKKAYALEVEKCEKLSSELSTCREMIDNLRNENAILNAKVDSHICNVSIPNLRDDNIDLLAKIDELNASLASLRLENENLIAKAKDFDVCNATISDLRTKNEMLHAKVVELKSCKPSTSTIEHVSICTRCRDVDINAIHDHMALIKNQNDHIAILDAKIAEHNLENEKFKFARSMLYNGRRPGIKDGIGFQRGDNVKLNAPPKNLSNFVKGKAPMPQDNEGYILYPAGYPESKIRKIHSRKSHSGPNHAYMYKGETSSSRQPTHAKLPKKKIPNASNDHAISFKTFDASYVLTSKSGKVYASGGSSWILDSGCTNHMTGEKRMFSSYEKNQDPQRAITFGDGNQGLVKGVTVFRRSDDSIAFKGVLEGQLYLVDFNRAELDTCLIAKTNMGWLWHRRLAHVGMKNLHKLLKGEHILGLTNVHFEKDRICSACQAGKQVGVHHPHKNIMTTDRPLELLHMDLFGPIAYISIGGSKYCLVIVDDYSRFTWVFFLQEKSQTQETLKGFLRRAQNEFGLRIKKIRSDNGTEFKNSQIEGFLEEEGIKHEFSSPYTPQQNGVVERKNRTLLDMARTMLDEYKTPDRFWAEAVNTACYAINRLYLHRILKKTSYELLTGKKPNISYFRVFGSKCFILIKRGRKSKFAPKTVEGFLLGYDSNTRAYRVFNKSTGLVEVSCDVVFDETNGSQVEQVDLDEIGEEQAPCIALRNMSIGDVCPKESEEPPSTQDQPSSSMQASPPTQNEDEAQNDEEQNQEDEPPQDDSNDQGGDTNDQEKEDEEEPRPPHPRVHQAIQRDHPVDTILGDIHKGVTTRSRVAHFCEHYSFVSSIEPHRVEEALQDSDWVVAMQEELNNFTRNEVWHLVPRPNQNVVGTKWVFRNKQDEHGVVTRNKARLVAKGYSQVEGLDFGETYAPVARLESIRILLAYATYHGFKLYQMDVKSAFLNGPIKEEVYVEQPPGFEDSEYPNHVYRLSKALYGLKQAPRAWYECLRDFLIANGFKVGKADPTLFTKTLENDLFVCQIYVDDIIFGSTNESTCEEFSRIMTQKFEMSMMGELKYFLGFQVKQLQEGTFISQTKYTQDILAKFGMKDAKPIKTPMGTNGHLDLDTGGKSVDQKVYRSMIGSLLYLCASRPDIMLSVCMCARFQSDPKESHLTAVKRILRYLAYTPKFGLWYPRGSTFDLLGYSDADWAGCKINRKSTSGTCQFLGRSLVSWASKKQNSVALSTVEAEYIAAGHCCAQLLWMRQTLRDYGYKLTKVPLLCDNESAIKMADNPVEHSRTKHIAIRYHFLRDHQQKGDIEISYINTKDQLADIFTKPLDEQSFTRLRHELNILDSRNFFC

SEQ ID NO: 215710 - protein, 34 aa, Zea mays
  Clone ID: MRT4577_128325C.1.pep
INHTLNTSTSASSPYSEVLLFFLIPSSYINIPSL

SEQ ID NO: 215711 - protein, 3007 aa, Zea mays
  Clone ID: MRT4577_128326C.1.pep
MSGEHAKKEMETGKKPTTSHGKASSKESRNKEKKKEKKTSSHKSHRSGDKIKKMRKYTQIILDELSRRFAEHDAKWDRPASEQDSRWEAAFSEFTAGQDRRVGALEHTTGALEDWRMNMEGMVDDLRLEVGKIAKHWKRAVTDKSTTMAGVLAPSPAAVERVPVGVPAASAHGHRIESWPREDGFGSVTTLLHPPAKGTFSSGPRPAVLHSSKVPLHPACPPYGEIQSSGSGGAMRGRLPKFNFPMFDGENPKLWIHRSHDYFDMYEVESHLWIRIVSMHFVGAAARWFSSLDERSQLSSWPVFCQLLLERFGRDEHESFIRQLFRIRQTATVVEYVDQFAALVDKLAAYGRPMDPLYFVQRFVDGLRPDIRATVLLQRPSSLDSACALALLQEEVAVPDKRWEGRRLDVSQAGKAFSKPALPVSFQPRLNTSPAGVEEAKKVEPPRQCTFEDKLAVLRAYRRARGLCQRNFRYAMFHDGPSGRWQPVDLFQAAVGSSLLCANSPMKVHWEHKWMIIPYQRSPVLLYGLSAMIPPGSVVELAMVDTTPIQFEQLDLPSAMKALLSEFSSVFAPPIGMPPSRECDHTIPLVHGATPVKIRPYRYPPAIKDEIERQISEMLQAGIVHHSSSQFSSPVLMVKKKDNSWRFCVDFHHLNALTVKSIFPVPVIEELLDELGQASWFTSLDLTAGCHQIRLLPADAHKTAFQTHSGHYEFRVMAFGLTGAPATFQRAMNTTLSPLLRRCVLVFFDDILIYSASFEEHLQHVRQVLELLVRDKWQVKWSKCSFAQSQLTYLGHVISAAGVATDPAKIEVVAQWVTPKNVKELRSFLGLAGYYRRFVRHFGLLAKPLTTLLKKGNLFIWTPSHEASFVALKEALISAPVLALPNFSLPFSLETDASQLGVGAVLMQAGHPIAYLSKALGPRSQGLSTYEKEFLALLIAVDHWRHYLQLKEFHIHTDHRSLAQLDEQCLHTPWQKKMFTRLLGLKYRIIYKKGVDNDAADALSRHPSLSSSCLAISSCTPKWITEVADSYNQDSQTLAIIAKLAVDTSVVPHFSWKDGLLRYKNRIWIGQSDILQYKLISAFHASAVGGHSGFPVTYARMKQIFAWKGMKSSVHTFVAHCIICQQAKADRTRLPGLLQPLPVPSSLWQIISMDFIEALPRSQSYTCILVIVDTFTKYANFLPLKHLYTALSVARLFHDQVYKHHGLPQSIVSDRDKVFLSNLWKELFRWADVQLQMSSAYHPQSDGQTERVNQCLETFLRCFVHACPTQWSHWLSVAQFWYNSSPHSATGRAPFEVLYGCRPRQFGISDNVVISSTELSAWLQDRQLISDLVKQHLERAKMRMKRQADKQRSEREFTVGDWVFLKLQPYVQSSVAHRANQKLAFKFFGPFQVIQRVGSVAYKLQLPSSSRIHPVFHVSQLKRALGKGLVASPALPSDQYRFSVPVKILQHRSSVRGLNSCPQVLVQWSAMPEELATWENVQDLQQQFPNEAVWGHPAGLAGGNVSITEEKDNDSQQEGDDQWAGPTIVPVGPPYAKRPPSLSSSQYLILPLSSRVLLVGEVNRKVVYYETNTSSPSTSGSDAPSITSKRHERKKFSKIPLHYPRTSRHTPLLSVPLGKPPTFDGEDYARWSDLMKFHLTSLHKSIWNVVEFGAQVPSVGDEDYDEDEVAQIEHFNSQATTILLASLSREEYNKVQGLKSAKEVWDVLKTAHEGDELTKITKRETIEGELGRFRLRQGEEPQDMYNRLKTLVNQVCNLGSKKWDDHEVVKVILRSLIFLNPTQGSRKINELDGPSTSEAQPVAFKATEEKKEESTTSRQPIDASKLDNEEMALVIKSFRQILKQRRGKDYKPRSKKVCYKCGKPGYFIAKCPISSDSDRGDDKKGRRKEKKRYYKKRGGDAHVCREWDSDESSSDSSDDEDAANIAITKGLLFPNIGHKCLMAKDGKKKKVKSKSSTRYESSSDENASDEEDNLRTLFANLNMQQKEKLNELISAIHEKDDLLDTQEDFLIKENKRHVKVKNAYALEVEKCEKLSSELSSCHETIDNLRNENANLLAKVDSNACNVSILNPRNDNDDLLARIEELNISLASLRNENEKLVAKAKDFDVCNATISDLRDKNDILRSKIVELNSCKSSTSTVEHTTICTRCRDVNIDAIHDHMALIKQQNDHIAKLDAKIVEHNLENEKFKFARSMLYSGRRPGIKDGIGFQQGGNVKLSAPPKKLSNFVKGKAPMPQDNEGYILYPAGYTESKIRRIHSRKSHSVPNHAFMYKGETSSSRQPTHAKLPKRKTPSASNEHNFSFKTFDASYVLTNKSGKVYASGGSSWIIDSGCTNHMTGEKKMFSSYEKKTRIPNELSHSGMEIKEKSHTQETLKGFLRRTQNEFGLRIKKIRSDNGTEFKNSQIEGFLEEEGIKHDFSSPYTPQQNGVVERKNRTLLDMARTMLDEYKTSDRFWAEAVNTACYAINRLYLHRILKKTSYELLIGKKPNISYFRVFGSKCFILVKRGRKSKFAPKTVEGFLLGYDSNTRAYRVFNKSSGQVEVSCDVVFDETNVSQVEQVDLDEIGIEEAPCIALRNMSIGDVCPKESEEPPNAQDQPSSSTQASPPTQNEDEAQVDEEDQSNEPPQDDGNDQGEMQITKTRRMKNKGRHTRESTKQSNEITPSTPSSATFIRGIEEALQDSDWVVAMQEELNNFTRNKVWHLVPRPNQNVVGTKWVFRNKQDEHGVVTRNKARLVAKGYSQVEGLDFDETYAPVARLESIRILLAYATYHGFKLYQMDVKSAFLNGPIKEEVYVEQPPGFEDSEYPNHVYKLSKALYGLKQAPRAWYECLRDFLITNGFKVGKADPTLFTKTLENDLFVCQIYVDDIIFGSTNESTCEEFSRIMTQKFEMSMMGELKYFLGFQVKQLQEGTFLSQTKYTQDILSKFGMKDAKPIKTPMGTNGHLDLDEGGKSVDQKKEHIGDLPVLGKILGVLGFKEAKFRSSFYRRSRVHCRRTLLRATTLDEANP

SEQ ID NO: 215712 - protein, 1412 aa, Zea mays
  unsure (1)..(1412): unsure at all Xaa locations
  Clone ID: MRT4577_128327C.1.pep
MVTGEKPATSHGKAPSGESGNKKREESPPHVKSHRSGDKKNKMKKVVYYETDSSWPSTPGSDAPSVTSKRHERKKFSKIPLRYPHISKRTPLLSIPLGKPPVFDGEDYXIWDIVEFGAHVPSMGDEGYDSDEVAQIXEHFNSQATTILLASLSREEYNKVQGLKSAKEIWDVLKTAHEGDEVTKITKRETIEGELGRFMLHQGEDPQAMYNRLXTLVNEVRNLGSTKWDDHEMAKVILRSLIFCNPTQVQLIRGDPRYKLMSPEEVIGKFVSFELMIKGSKQIINLEQGATSTSEVQPVTFKATEEKXXSPSSRLPIDASKLDNEEMALIIKSFRQILKQRRGKDYKPRSKKVCYKCGKPDHFIAKCPLYSDSDRDNDKKGRMKEKKKYYKKKGGDAHVCREWDSDESSTDSSSDEDAANIAINKGLLFPNVGHKCLMAKDDKKKKVKSRASTKYAISSDEENSSDNEDNLLALFANLNMQQKEKLNELISDIHEKDELLDTQEDFLIKENKKHVKVKNAYAQEVEKCENLTSELSTCHDIISNLRNENAKLIAKVEKLDDCDDSLVKLKNDNANLIAKIDKLNESIASLKIENEKLIIKAKNLNVCNDIVSNLRNENVMLHAKIDELNVCKPSTSTVSHVSNCTRCRDVNIDAIHDHIAMIKQQNDHIAKLDAKIAEHELEIEKFKFARSMLYSGRRPGIKDGIGFQKGDNFKLHAPKKLSNFVKGKAPMTQDNKGYILYPVGYPKHKIRRIHSRKSHSGSHHAFMYKSEPSSSRQSTHAKLPKNKTPIASNEPNILFKTFDASYVLTNRSGKVVAKYVGAKHKGSKTCVWVPKVYASGGSSWIIDSGCTNHITGEKRMFSYEKTMIPKELSHLGMEIKEKSQTQETLKGFLRRAQNEFGLRIKKIRSDNGTEFKNSQIEGFLEDEGIKHEFSSPYTPQQNGRKSKFAPKAVEGFLLGYDSNTRAYRVFNKSTGLVEVSCDIVFDETNGSQVEQVDLDELDDEEAPCIALRNMSIGDVCPKESEEPTQAQDQPSSSMQASPPTQDEDQAQNDENEDQEDEPPQEEDNDQWEDRVDQDKEDDQGTKWVFRNKQDEHGVVTRNKARLVAKGYSQVECLDFGETYAPVARLESIRILLAYATYHGFKLYQMDVKSAFLNGPIKEDVYVEQPPGFEDSEYSNHVYKLSKALYGLKQAPRAWYECLRDFLITNDFNVGKANPTLFTKTIANDLFVCQIYVDDIIFGSTNKSTCEEFSRIMIQKFEMSMMGELKYFLGFQVKQLQEGTFISQIEYIQDILTKFGMKDVNLIKTPMGTNGHLDLDTGGCKIDRKSTSGTCQFLGRSLVSWASKKQNSVALSTAEAEYITAGHCCAQLLWMRQTLRDYGYKFGKSLSYVIMGVQSAWRTIPLSTTSLNT

SEQ ID NO: 215713 - protein, 92 aa, Zea mays
  Clone ID: MRT4577_128328C.1.pep
YPIGGHRKKNYLFLHPGLIHPFPILLIKQIWTLIDYFTMILFYSFGMTGGLNTHPPCKEISFRKNTLAFLRRWSLTAPPSYFRRGQTHSPIL

SEQ ID NO: 215714 - protein, 153 aa, Zea mays
  unsure (1)..(153): unsure at all Xaa locations
  Clone ID: MRT4577_128329C.1.pep
RGRPRRHGGAGRGRGRGGEGRGPGGXEERLRRQRRKVSNRLSAQRSRARKQQRLEELREAAARLRAEKQQLEARLQALARHDLAVRCQNARLGAEASALARRSREARRLLALRRLAFAALQPRPGVAPAPAPPAPLLGLASLLTHVAWWGRAA

SEQ ID NO: 215715 - protein, 132 aa, Zea mays
  Clone ID: MRT4577_12832C.1.pep
MDAEWSGDESKAGAAGGVSSADCPGSPPPVSPAPPSTSPAATGAGRRRSANKRVVTVPLADVSGPRPKGVGEGNTPTDAWAWRKYGQKPIKGSPFPRAYYRCSSSKGCPARKQVERSRAEPDKVIVTYSFEH

SEQ ID NO: 215716 - protein, 57 aa, Zea mays
  Clone ID: MRT4577_128330C.1.pep
VDRYKLGYFFHKNQNAHFIFMKPGNGKKRKRKTGRAKPGGGGNFSKEGPTILGLTNS

SEQ ID NO: 215717 - protein, 42 aa, Zea mays
  Clone ID: MRT4577_128331C.1.pep
SGRSGYFTSNKIPLSLVLVYYYSEVVREGKKEGISYSGCREI

SEQ ID NO: 215718 - protein, 73 aa, Zea mays
  Clone ID: MRT4577_128332C.1.pep
PPVQRTRDTDAFDGDIDTLIPLEQEAPSPHQPDVTTVAPRLSTQQAEALPGRRWAASLLRATATGRKPQPTRP

SEQ ID NO: 215719 - protein, 123 aa, Zea mays
  unsure (1)..(123): unsure at all Xaa locations
  Clone ID: MRT4577_128333C.1.pep
GGTRQSTRVFPAPKPHCGAXTVQCFDRGVNDGHIKRIDLDEQGLNGTIDAALLCAAPALRVLNLHNNSLRGGLPAGISACSGLTHLVVSGNRLSGNLPSSLAQSRSLRVIEVSGNNLFGELPG

SEQ ID NO: 215720 - protein, 130 aa, Zea mays
  Clone ID: MRT4577_128334C.1.pep
PTGVAGATLPKVQGRGGISSTPPKVVRVFSPPNTKFALFSPNGGFVLWFLPKGIKKGDFSKAPKDLPPLKKDTKEFPPKGANYSGSKKEKNYFPPKNLFALQPNFWGLKPFFCFLPPPGKVGGFPPTTPF

SEQ ID NO: 215721 - protein, 186 aa, Zea mays
  Clone ID: MRT4577_128335C.1.pep
MSKKRKHLDPANSLKDSEQVVASDFIRGDDLDDLLSKLIRSVEIAKASRGGLPEKIWMKQQFAIGVNDVTRVLERMPHSVTAHPAQMSSGAPTVSGRRQAPLVPLQAVLVAADCNPKWLTKHIPTLASTRQVPVLCVKDNKGGSVRLGHVVNVRTALAIGVKAKDSVLNKTIDEFLKDSKLVANEP

SEQ ID NO: 215722 - protein, 125 aa, Zea mays
  Clone ID: MRT4577_128336C.1.pep
AGVRGAHPLMASNLHRIGTTKATPNAPGACGTDRAMEQAPTTTDGAGPAKQQNRRSTRYNHQLRHQERHPWLRHDSLPSTCPRTRRATLPRRAGPSRLNLARPEHDQKDRSPERRRCPRKLPPGT

SEQ ID NO: 215723 - protein, 186 aa, Zea mays
  Clone ID: MRT4577_128337C.1.pep
MSKKRKHLDPANSLKDSEQVVASDFIRGDDLDDLLSKLIRSVEIAKASRGGLPEKIWMKQQFAIGVNDVTRVLERMPHSVTAHPAQMSSEAPTVSGRRQAPLVPLQAVLVAADCNPKWLTKHIPTLASTRQVPVLCVKDNKGGSVRLGHVVNVRTALAIGVKAKDSVLNKTIDEFLKDSKLVANEP

SEQ ID NO: 215724 - protein, 214 aa, Zea mays
  Clone ID: MRT4577_128338C.1.pep
NRCKPNSLSLGVSLVPEITVQSVPDVTSSPSIDQEVPSVFHPVPFRFSFDPPSDPASVSAFVKAYPNLPRYHMWSSWDRLMAVSTYGPPGSEEEDEPDSGWDFSGLRAPSAMRDFMTACDYCLSDCSDDGHSLDDEGCGPSRECFHVDLGGHDEGNHLGMPEDDDPPGPASRVDILRELAVVPVPMGGQDTQLEQIRGIQAKLDEEAGQLVQLR

SEQ ID NO: 215725 - protein, 84 aa, Zea mays
  Clone ID: MRT4577_128339C.1.pep
LSYTTSYIGNKIPTNTSTKVSNHQKKITDTLLVLKAALAKLNPKFVQPNHFCPLPKVFFFTNPLSQTTPTEKCAHQKIPTKRGP

SEQ ID NO: 215726 - protein, 162 aa, Zea mays
  unsure (1)..(162): unsure at all Xaa locations
  Clone ID: MRT4577_12833C.1.pep
NYHDLLCVDKFLSYYFSYYELENGVLWDIKGKCTTLGTDDEHIAVYXIQRGXGDDESVDRRQMXVVDIVDTFRLQEQPPFDNKSFVSYIEKYIRNLTXAMKPEKAYEFQKGAQGATKFXILSKLKDLQLFVGESMKDDAXVVFAYYKDGATNPTFLYFSHGL

SEQ ID NO: 215727 - protein, 112 aa, Zea mays
  Clone ID: MRT4577_128340C.1.pep
QRSLILGLRQGSLLPPEVRCSNIRLQLDDPNMPLVHHIGASSDELLGGSSKSQDNAIAPSVQALGIKSINRAICAHLDMYYITIMYYQSREQANKKNAAPWSSSSAARSQKR

SEQ ID NO: 215728 - protein, 76 aa, Zea mays
  Clone ID: MRT4577_128342C.1.pep
ARFPPQTADQPRHGRHRSHRIEEPAACCTTAATHENQVRSMVLVNNIFREEYLSARGETYFVTWDRAENLPVLLGV

SEQ ID NO: 215729 - protein, 120 aa, Zea mays
  Clone ID: MRT4577_128343C.1.pep
PGCPLNPNFSPVNPGAPKESPILGNIKALDVIPLLTPGVFDRIEAVVQSKPKRNVGSFRWKFGVHPPGFRPPPRKFTPDPCVFWAWGCFPKPQSFSPGLGNLLSETDFGPIKSRIFLLAG

SEQ ID NO: 215730 - protein, 67 aa, Zea mays
  Clone ID: MRT4577_128344C.1.pep
GGAVWAVCVLCLPLRFFLRPSCLLSSVSSFSLRVVLVASLLFPSWFFFCSLPLVAPVFLCWWGSSLG

SEQ ID NO: 215731 - protein, 313 aa, Zea mays
  Clone ID: MRT4577_128345C.1.pep
MAMAMAAVRREGRRVLLSTPSTAAAMAALSPAASQSQIALLGARSISTQIVRNRMKSVKNIQKITKAMKMVAASKLRAVQTRTENSRGLWQPFTALLGDAPSINVKKNVIVAITSDKGLCGGINSTSVKVSKALQKMTSGPEKESKYIILGEKGKVQLIRDSRKHIEMTVSELQKNPINYTQVAVLADDILKNVEYDAIRVVFNKFQSVISFRPTLATILSPEVMEKESESGGTVGQLDSYEIEGGETKSEILQNLTEFQFSCVMYNAVLENACSELGARMSAMDSSSRNAGEMLDRLTLTYNRTRQASITTE

SEQ ID NO: 215732 - protein, 53 aa, Zea mays
  Clone ID: MRT4577_128346C.1.pep
TGPKGSLFLLHMLPTQPQSSFWDWHNTMSQQKFIYRYNMPVVPRDSLIKARPP

SEQ ID NO: 215733 - protein, 40 aa, Zea mays
  Clone ID: MRT4577_128347C.1.pep
KRFFYPDLTLFKKKATGGAFFPPYQHFKGERDSGLLIKKF

SEQ ID NO: 215734 - protein, 77 aa, Zea mays
  Clone ID: MRT4577_128348C.1.pep
WTGAFITGTGAPFYKLQGEREPFTSRPLKSYIMERVKWPIYKLPDQIKADRSTKNGRNTSKGQNHSIGSIYLGGEPQ

SEQ ID NO: 215735 - protein, 1718 aa, Zea mays
  Clone ID: MRT4577_128349C.1.pep
MSGDHAKKEMETGEKPTISHGSTSSEESRTKRKEKKDSSKGKEKRSSSHHKEKKEKSSSHKPHRSGDKKKRMRKVVYYETDSSSASTSGSDAASVTSKRQERKKYSKIPLRYPRISKHTPLLSVPLGKPPTFDGEDYARWSDLMRFHLTSLHKSIWDVVEFGAQVPSVGDEDYDEDEVAQIEHFNSQATTILLASLSREEYNKVQGLKSAKEIWDLLKTAHEGDELTKITKRETIEGELGRFRLRQGEEPQDMYNWLKTLVNQVRNLGSKKWDDHEVVKVILRSLIFLNPTQVQLIRGNPRYTLMTPEEVIGNFVSFEYMIKGSKKINELDDPSTSAAQPDAFKATEEKDESTSSRQPIDTSKLDNEEMTLVIKSFRQILKQRRGKDYKPQSKKVCYKCGKPDHFIAKCPISSDSDRGDDKKGRRKEKKRYYKKKGGDAHVCREWDSDESSSDSSDDEDAANIAVTKGLLFPNVGHKCLMAKDGKRKKVKSKSSTKYETSSDDNASDEEDNLRTLFANLNMEQKEKLNELISAIHEKDDLLDSQEDFLIKENKKHVKVKNAYALEIEKCEKLSSELSTCHDTIANLRNENAKLIAKVDSHVCNVSTSNPRDDNVDLLARIDELNISLVSLRIENEKLLAKAKDFDVCNVTISNLRSENDILHAKVIELKSCKPSTSIVEHVSICTRCRDVDVNAILDHMALIKQQNDHIAKLDAKIVEHNLENEKFKFARSMLYNGRRPGIKDGIDFQRGDNVKLNAPPKRLSNFVKGKAPMPQDNEGYILYPAGYPESKIRRIHSRKSHSGPNHAFMYKGETSSSRQPTHAKLPKKKTPSASNEHSISFKTFDASYVLTNKSGKIVAKFVGGKHKGSKTCVWVPKVLVSNAKGPKTVWVYASGGSSWILDSGCTNHMTGEKKMFSSYEKNQDPQRAITFGDGNQGVTVFRRSDDSIAFKGVLEGQLYLEKSQTQETLKGFLRRAQNEFGLRIKKIRSDNGTEFKNSQIEGFLEEEGIKHEFSSPYTPQQNGVVERKNRTLLDMARTMLDEYKTSDRFWAEAVNTACYAINRLYLHRILKKTSYELLTGKKPNISYFRVFGSKCFILIKRGRKSKFAPKTVEGFLLGHDSNTRAYRVFNRSTGQVEVSCDVVFDETNGSQIEQVDLDEIGNEEAPCIALRNMSIGDVCPKESEEPPNAQNQPSSSTQASPSTQNEDEAQVDEVEDQANEPPQDDDNDQRGDANDQDKEDEEQRPPHPRVHQAIQRDHPVDTILGDIHKGVTTRSRVAHFCEHYSFVSSIEPHRVEEALQDSDWVVAMQEELNNFTRNEVWHLVPRPNQNVVGTKWVFRNKQDEHGVVTRNKARLVAKGYSQVEGLDFGETYAPVARLESIRILLAYATYHGFKLYQMDVKSSFLNGPIKEEVYVEQPPGFEDSEYPNHVYKLSKALYGLKQAPRAWYECLRDFLINNGFKVRKADPTLFTKTLENDLFVCQIYVDDIIFGSTNESTCEEFSRIMTQKFEMSMMGELKYFLGFQVKQLQEGTFLSQTKYTQDILNKFGMKDAKPIKTPMGTNGHLDLDTGGCKINRKSTSGTCQFLGRSLVSWASKKQNSVALSTAEAEYIAAGHCCAQLLWMRQTLRDYGYKLTKVPLLCDNESAIKMADNPVEHSRTKHIAIRYHFLRDHQQKGDIEISYINTKDQLADIFTKPLDEQTFTKLRHELNILDSRNFFC

SEQ ID NO: 215736 - protein, 118 aa, Zea mays
  unsure (1)..(118): unsure at all Xaa locations
  Clone ID: MRT4577_12834C.1.pep
MAVGDALRRLCEEVGWSYAVFWKAIGAADPVHLVWEDGCCGHVSCSAGSEAPEAGCELGTSVCTLVRKVMTSXIHVXGEGTIGRAAFTGXHQWIVHDPAMITSQTRVSAEMIISLQLA

SEQ ID NO: 215737 - protein, 1665 aa, Zea mays
  Clone ID: MRT4577_128350C.1.pep
MSGDHAKKEMETGEKPTTSNGSTSSEESRTKRREKKKNSSNKGKEKKSSSHHKEKKEKSSSHKPHRSGDKQKRMRKVVYYETDTSSTSTSGSDTPSVTSKRQERKKFSKIPLHYPRISKHASLLSVPLGKPPTFDGEDYARWSDLMRFHLTSLHKSIWDVVEFGAQVPSVGDKDYDEDEVAQIEHFNSQATTILLASLSREEYNKVQGLKSAKEVWDVLKTAHEGDELTKITKRETIEGELGRFRLRKGEEPQHMYNRLKTLENQVRNLGSKKWDDHEVVNVILRSLIFLNPTQVQLIRGNPRYTKMTPEEVIGHFVSFECMIEGSRKINELGDPSEAQPVAFKATEEKKEVSTPSRQPIDASKLDNEEMALVIKSFRQILKQRRGKDYKSRSKKVCYKCGKPGHFIAKCPISSDSDRGDDKKGRRKEKKRYYKKKGGDAHVCREWDSDESSSDSSDNEDAANIAVTKGLLFPNVGHKCLMAKDGKRKKVRSNSSTKYESSSDDNASDEEDSLRSLFANLNIAQKEKLNELVSAIHEKDDLLDSQEDLLIKENKKHVKVKKSYALEIEKCEKLSSELSTCREMIDNLKNENASLNAKVDSHVCNVSIPNPRDNNDDLLARIEELNISLASLKVENESLIAKAKDFDVCKVTISDLRDKNDILHAKIVKLNSCKLSTSIVEHVTICTRCRDIDINAIHDHMTLIKQQNDHIAKLDAKIAEHNLENEKFKFARSMLYNGRHPGIKDGIGFQRGDNVKISAPPKRLSNFVKGKAPMPQDNEGYILYPAGYPESKIRKIHSRKSHSGPNHAFMYKGETSSSRQPTHAKLPRKKTPNASNDHAISFKTFDASYVLTNKSGKVVAKFVGGKHKGSKTCVWVPKVLVSNAKGPKTVWVYASGGSSWILDSGCTNHMTGEKRMFSSYEKNQDPQRAITFGDGNQGVTVFRRSDDSIAFKGVLEGQLYLVDFDRAELDTCLIAKTNLGWLWHRRLAHVGMKNLHKLLKGEHIIGLTNVHFEKDREKSQTQETLKGFLRRAQNEFGLRIKKIRSDNGTEFKNSQIEGFLEEEGIKHEFSSPYTPQQNGVVERKNRTLLDMARTMLDEYKTSDRFWAEAVNTACYAINRLYLHRILKKTSYELLIGKKPNISYFRVFGSKCFILVKRGRKSKFAPKTVEGFLLGYDSNTRAYRVFNKSTGLVEVSCDVVFDETNGSQVEQVDLDEIGDEEAPCIALRNMSIGDVCPKESEESPNTQDQPSSSTLATPPTQNENEAQVDEVEDQANEPPQDDGNDQGGDANDQDKEDEEQRPPHPRVHQAIQRDHPVDTILGDIHKGVTTRSRVAHFCEHYSFVSSIEPHRVEEALQDSDWVVAMQEELNNFTRNEVWHLVPRPNQNVVGTKWVFRNKQDEHGVVTRNKARLVAKGYSQVEGLDFGETYAPVARLESIRILLAYATYHGFKLYQMDVKSAFLNGPIKEEVYVEQPPGFEDSEYPNHIYKLSKALYGLKQAPRAWYECLRDFLIANGFKVGKADPTLFTKTLENDLFVCQIYVDDIIFGSTNESTCEEFSRIMTQKFEMSMMGELKYFLGFQVKQLQEGTFISQTKYTQGILNKFGMKDAKPIKTPMGTNGHLDLDTGGEETTSRALMIPFLAIHAKKGEKGAQSKRTAPPPISKTQC

SEQ ID NO: 215738 - protein, 46 aa, Zea mays
  Clone ID: MRT4577_128351C.1.pep
FCSFLHIKNIPDSDKECAGVDIHLKALYLHTDVCLLYQGTREVISH

SEQ ID NO: 215739 - protein, 1838 aa, Zea mays
  Clone ID: MRT4577_128352C.1.pep
MSGDHAKKEMETGEKPTTSHGSTSSEESRTKRKEKKKISSNKGKEKKSSSHHKEKKEKSSSHKPRRSGDKQKRMRKVVYYETDTSSTSTSDSDAPSVTSKRQERKKFSKIPLHYPRISKHAPLLSVPLGKPPTFDGEDYARWSDLMRFHLTSLHKSIWDVVEFGAQVPSVGDKDYDEDEVAQIEHFNSQATTILLASLSREEYNKVQGLKSAKEVWDVLKTAHEGDELTKITKRETIEGELGRFRLRKGEEPQHMYNRLKTLVNQVRNLGSVKWDDHEMVKVILRSLIFLNPTQVQLIRGNTRYTKMTPEEVIGNFVSFECMIEGSRKINELDDPSTSEAQPVAFKATEEKKEEATPTRQPIDASKLDNEEMALVIKSFRQILKQRRGKDYKSHSKKVCYKCGKPGHFIAKCPISSDSDRGDDKKGRRKEKKRYYKKKGGDAHVCREWDSDESSSDSSDDEDAANIAVTKGLLFPNVGHRCLMAKDGKRKKVKSNSSTKYESSSDDNASDEEDNLRSLFANLNIAQKEKLNELVSAIHEKDDLLDSQEDLLIKENKKHVKVKKAYALEIEKCEKLSSELSTCREMIDNLRNENASLNTKVDSHVCNVSTSNPRDNNVDLLARIDELNASLASLRIENEKLLAKAKDFDVCNATISDLRTKNDMLHAKVVELKSCKPSTSIVEHVSICTRCRDINIDAIHDHMALIKQQNDHIAKLDAKIAKHNLENEKFKFARSMLYNGRRPGIKDGIGFQRGDNVKISAPPKRLSNFVKGKAPMPQDNEGYILYPAGYPESKIRRIHSRKSHSGPNHAFMGSSWILDSGCTNHMTGEKKMFSSYEKNQDPQRAITFGDGNQGVTVFRRSDDSIAFKGVLEGQLYLVDFERAELDTCLIAKTNMGWLWHRRLAHVGMKNLHKLLKGEHILGLTNVHFEKDRICSACQAGKQVGSHHPHKNIMTTDRPLELLHMDLFGPIAYISIGGSKYCLVIVDDYSRFTWVFFLQEKSQTQETLKGFLRRAQNEFSLRIKKIRSDNGTEFKNSQIEGFLEEEGIKHEFSSPYTPQQNGVVERKNRTLLDMARTMLDEYKTSDRFWAEAVNTACYAINRLYLHRILKKTSYELLTGKKPNISYFRVFGSKCFILVKRGRKSKFAPKTVEGFLLGYDSNTRAYRVFNKSSGQVEVSCDVVFDETNGSQVEQVDLDEIGIEEAPCIALRNMSIGDVCPKESEEPPNAQDQPSSSTQASPPTQNEDEAQVDEEEDQSNEPPQDDGIDQGGDANNQDKEDEEQRPPHPRVHQAIQRDHPVDTILGDIHKGVTTRSRVAHFCEHYSFVSSIEPHRIEEALLDSDWVVAMQEELNNFTRNEVWHLVPRPNQNVVGTKWVFRNKQDEHGVVTRSKARLVAKGYSQVEGLDFGETYAPVARLESIRILLAYATYHGFKLYQMDVKSAFLNGPIKEEVYVEQPPGFEDSEYPNHVYKLSKALYGLKQAPRAWYECLRDFLIANGFKVGKADPTLFTKTLENDLFVCQIYVDDIIFGSTNESTCEEFSRIMTQKFEMSMMGELKYFLGFQVKQLQEGTFISQTKYTQDILNKFGMKDAKPIKTPMGTNGHLDLDTGGKSVDQKVYRSMIGSLLYLCASRPDIMLSVCMCARFHADPKEAHLTAIKRILRYLAYTPKFGLWYPRGSTFDLIGYSDADWAGCKINRKSTSGTCQFLGRSLVSWASKKQNSVALSTVEAEYIAAGHCCAQLLWMRQTLRDYGYKLTEVPLLCDNESAIKMADNPVEHSRTKHIAIRYHFLRDHQQKGDIEISYINTKDQLADIFTKPLDEQSFNKLRHELNILDSRNFFC

SEQ ID NO: 215740 - protein, 676 aa, Zea mays
  unsure (1)..(676): unsure at all Xaa locations
  Clone ID: MRT4577_128353C.1.pep
MTTDRPLELLHMDLFGLIAYISIDGSKYCLVIVDDYSRFTWVFFLQEKSHTQETLKGFLRRAQNEFGLRIKKIRSDNGTEFKNSQIEGFLEEEGIKHEFSSPYTPQQNGVVERKNRTLLDMARTMLDEYKISDRVFGSKCFILVKRGRKSKFAPKNVEGFLLGYDSNTRAYRVFNKSSGQVEVSCDVVFDETNGSQVEQVDIDEIGNEEASCIALRNMSIGDVCPKEFEEPPNAQDQPSSSTQASPPTQNEDEAQVDEGEDQANEPPQDDGNDQGGDANNQDKEDEEPRPPHPRVHQAIQRDHPVDTILGDIHKGVTTRSRVAHFCEHYSFVSSIEPHRVEEALQDSDWVVAMQEELNNFTRNXRNKARLVAKGYSQVKGLDFGETYAPVARLESICILLAYATYHGFKLYQMDMKSVFLNGPIKEEVYVEQPPGFEDSEYPNYVYKLSKALYGLKQAPRAWYECLRDFLITNGFKVGKADPTLFTKTLANDLFVCQIYVDDIIFGSTNESTCEEFSRIMTQKFEMSMMGELKYFLGFQVKQLQEGTFISQTKYIQDILNKFGMKDAKPIKTPMGTNGHLDLDTGGKSVDQKSISNQVIGVLKGNWSLQRRQRLPLRNSSFVVSPNRSLSSGERAKQKDSYFGLIFTLLLMTKGGESNLKGSNDSVFGDSCQRGRK

SEQ ID NO: 215741 - protein, 1542 aa, Zea mays
  unsure (1)..(1542): unsure at all Xaa locations
  Clone ID: MRT4577_128354C.1.pep
MSGASAKRDLGTGDKSASSGRTHSRESAHKHKEKSSSSIKSHRMGDKKKKMRKVVYYETDSSSPSSSESASTTSKRHERKKYSKMPLRYPRISRRTPLLSVPLGKPPMFEGEDYSMWSDKMRHHLTSLHKSIXDIVEYGVQVPKKGDKDYDSEEVEQIHHFNSQATTILLASLSREEYNKVQGLKSAKEIWDVLKTAHEGDEVTKITKQETIEGELGRFRLRQGEEPQEMYNRLKTLVNQVRNLESKKWDDHEMVKVILRSLIFLNPTQVQLIRGNPRYTLMSPEEVIGNFVSFELMIKGSKKIIEHDGPSTPEAQPVAFKATEEKKEESTSSRLPIDASKLDNEEMALIIKSFRQILKQRRGKDYKPRSKKVCYKCGKPSHFIAKCLLSSDSDRGDNKKGKRRENKRYHKKKGGDAHVCREWDSNESSSDSSSDEDTAYIAVTKGLLFPNVGHKCLMAKDGKRKKVKSKSSTKYASSSDEDHSSDEEDNLRTLFANLNMQQKEKLNELISAIHEKDELFDSQEDFLIKENKKHVKVKSAYALEVEKCEKLSSELSTCHDIIVNLRNENASLIAKVDSNVCDDSISILRDDNVNLLARIKKLNDSLASLRNDNEKSIAKAKDLDVCNITISDLRSKNDILHTKIVELNSCKPSTSTVEHVSICTRCRDINVDAIHDHLALIKKQNDHIAQLNAKINEHDLENEKFKFARSMLYSGRRPGIKDGIGFQKGDNVKLNAPPKRLSNFVKGKAPMPQDNEGYILYPTGYPEHKIRRIHSRKSHSGPNHAFIYKGETSSSRQSTRAELPKKKTPIASNDSNISFKTFDASYVLTNKSGKVYASGGSSWIIVSKCTNHMTGEKKMFSSYEKNQDPQRAITFGDENQGVTVFRRSDDSIAFKGVLEGQLYLVDFDRAELDTCLIAKTNMGWLWHRRLAHVGMKNLHKLLKGEHILGLTNVHFEKDKICSACQAGKQVGVHHPHKNIMTTDRPLELLHMDLFGPIAYISICGSKYCLVIVDDYSRFTWVFFLQEKSHTQETLKGFLRRAQNKFSLRIKKIRSDNGTEFKNSQIESFLEEEGIKHEFSSPYMPQQNGVVERKNRTLLDMARTMLDEYKTSDRFWVEAVNTACYAINRLYLHRILKKTSYELLTGKKPNVSYFRVFGSKCFILVKRGRKSKFAPKAVEGFLLGYDSNTRAYRVFNKSSGLVEVSCDIVFDETNGSQVEQVDLDEIGDEEAPCVALRNMSIGDVCPKESEEPPHAQDQPSSSMQASPPTQDEDDAQDDEGEDQEVEPPQEESIDQGGDAHDQDEEDEQATRPPHPRVHQAIQRDHPPHRVEEALQDSDWVVAMQEELNNFTRNELYQMDVKSAFLNGPIKEEVYVEQPPGFEDSEFPTYVYKLSKTLYGLKQAPRAWYECLRDFLITNGFKVGKADPTLFTKTLENDLLVCQIYVDDIIFGSTNESTCEEFGRIMTQKFEMSMMGELKYFLGFQVKQLQEGTFISQTKYIQDILNKFGMKDAKPIKTPMGTNGHLDLDTGDSKPTLRKLTLRP

SEQ ID NO: 215742 - protein, 1737 aa, Zea mays
  Clone ID: MRT4577_128355C.1.pep
MSGEHANKEMETGDKPTTSHGKASSEESRKKGKGKEKKASSHKSHQSGDKKKKMRKVVYYETDTSSPSTSGFDAPSVTSKRHERKKFSKIPLHYPRTSRHTPLLSVPLGKSPTFDGEDYARWSDLMKFHLTSLHKSIWNVVEFGAQVPSVGDEDYDEDEVAQIEHFNSQATTILLASLSREEYNKVQGLKSAKEVWDVLKTAHEGDELTKITKRETIEGELGRFRLRKGEEPQDMYNRLKTLVNQVCNLESKKWDDHEMVKVILRSLIFLNPTQVQLIRGNPRYTLMTPEEVIGNFVSFEYMIKGSKKINELDDPSTSEAQPVAFKATEEKKEESTPSRQPIDASKLDNEEMTLVIKSFRQILKQRRGKDYKPRSKKVCYKCGKPGHFIAKCPISSDSDRGDDKKGRRKEKKKYYKKKGGDAHVCREWDSDESSSDSSDDEDAANIAINKGLLFPNVDHKCLMAKDDKKKKVKSKSSTRYESSSDDNASDEEDNLRTLFANINMQQKEKLNELISAIHEKDDLLDSQEDFLIKENKKHVKVKNAYALEVEKCEKLSSELSTCHETIDNLRNENANLLAKVDSNVCNVSIPNLRNDNDNLLAKIEELNITLASLRNENKNLLAKAKELDVCNITISDLRSKNDILHAKVVELKSCKPSTSTIEHTSICTRCRDVDINAIHDHMALIKQQNDHIAKLDAKIAEHELENEKFKFARSMLYSGRRPGIKDGIGFQKGDNVKLNAPPKKLSNFVKGKSLMAQDNEGYILYAAGYPESKIRRIHTRKSHSCPNHAFMYKGETSSSRQPTRAKLPKKKTPSASNDHDISFKTFDASYVLTNKSGKVVAKYVGGKHKGSKTCVWVPKVLVSNAKGPKTIWVYASEGSSWIIDSRCTNHMTGEKKMFSSYEKNQDPQRAITFGDGNQGVTVFRRSDDSVAFKGVLEGQLYLVDFDRAELDTCLIAKTNMGWLWHRRLAHVGMKNLHKLLKGEHILGLTNVHFEKDRICSACQAGKQVGAHHPHKNIMTTDRPLELLHMDLFGLIAYISIGGSKYCLVIVDDYSRFTWVFFLQEKSHTQETLKGFLRRAQNEFGLRIKKIRSDNGTEFKNSQHEGFLEEEGIKHEFSSPYTPQQNGVVERKNITLLDMARTMLDEYKTTDRFWAEAVNTACYAINRLYLHRILKKTSYELLTGKKPNISYFRVFGSKCFILVKRGRKSKFAPKTVEGFLLGYDSNTRAYRVFNKSSGQDEVSCDVVFDETNSSQVEQVDLDEIGDEEALCIALRNMSIGDVCPKESEEPPNAQDQPSSSTQASPPTQNEDEAQVDEGEDQANEPPQDDGNDQGGDANDQDKEDEEPRLPHPRVHQAIQRDHPVDTILGDIHKGVTTRSHVAHFCKHYSFVSSIEPHRVEEALQDSDWVVAMQEELNNFTRNEVWHLVPRPNQNVLGTKWVFRNKQDEHGVVTRNKARLVAKGYSQVEGLDFGETYAPVARLESIRILLAYATYHGFKLYQMDVKSAFLNGPIKEEVYVEQPPGFEDSEYPNHVYKLSKTLYGLKQAPRAWYECLRDFLIDNGFKVGKVDPTLFTKTLENDLFVCQIYVDDIIFGSTNESTCEEFSRIMTQKIEMSMMGELKYFLGFQVKQLQEGTFLSQTKYTQDILNKFGMKDAKPIKTPMGTNGHLDLDTEGAKGSHLANKKTKKWVQQKEQWITEGTPGLAHRTVWCATGQCPVHQGTPSQTLHLREIPGALAL

SEQ ID NO: 215743 - protein, 472 aa, Zea mays
  Clone ID: MRT4577_128356C.1.pep
MADGGSAVMARRSKPPLVSTDHRSAVQAAPRRSVSGQRPTGHRHHARPRAQTATSPSSSPAPALQRQHSAALVVPHSRARTQTLVGVSATADGDSADRCSKPPLVSTDHRSAVQVAPRHSASGQRPTGHRHHVRPHAQTATAPCSNNSASLAHCVCVSASTSGSSVTASTTVSGSASISSPMEENTPLPASLGSRSRIRTKQLTKKPPISMQKMSAATTSSASGNRSNVSISVEPTTNSREEEDKEEDNSLDMEDDFSLSLSSEDGGSQGEDEVQVAQVHNAKRGVKKAKGDVPLSPSKCKVKRVKRADCWKYFKVVEVQSKKKFGEMVTKAKCKFCYKLEYDRDHTRNLIAKMIIVHEYSLRMVEHRWFNILMKWMNNSYESIGRKTIKNECMKVYESEKDLLKKTLRKVESISLTTDLWTSNQNVQYMSLVAHYIDVNWELQCRVLNFVELDPPHTGVVIAQAILECLVE

SEQ ID NO: 215744 - protein, 428 aa, Zea mays
  Clone ID: MRT4577_128357C.1.pep
MSGDHAKKEMETGEKPTTSHGSTSSEESRTKRKEKKKDSSKGKEKRSSSHHKEKKEKSSSHKPHRSGDKKKRMRKVVYYETDSSSASTSGSDAASVTSKRQERKKYRDENYDEDEVAQIEHFNSQATTIFLASLSREEYNKVQGLKNAKEIWDLLKTAHEGDELTKITKRETIEGELGCFRLRQGEEPQDMYNRLKTLVNQVRNLGSKKWNDHEVVKVILRSLIFLNPTQVQLIRGNPRYTLMTPEEVIGNFVSFECMIKGSKKNNELDDPSTSEAQPVAFKATEEKKKESTPSRQPIDASKLDNEEMALIIKSFRQILKQRKRKDYKSRSKKVCYKCGKPSHFIAKCPLSSDSDRDNDKKGKRREKKRYHKKRGGDAHVCREWDSDESSTDSSDDEDAANIAVTKGLLFPNVGHKCLMAKDGKRKKP

SEQ ID NO: 215745 - protein, 345 aa, Zea mays
  unsure (1)..(345): unsure at all Xaa locations
  Clone ID: MRT4577_128358C.1.pep
MTKANNVLGQDMHNSQNVFNSNENSWKSTGGNVNSVQRFQQRKSDVSTTNESSDGKSISMMSSSMSMMAQDHYQMVTSRSGEQIGMNRSMAHRAPEMSGSPRKSTEFGTSDFNQEYLNATPNERQTHTLNHGQHITSDSAPRRHSIFAGKESENLGQSSQQAMGSYMLQNRAMGSSGMNISPSPGNPVSNNLFPPQMRNNLQHHFGTNSLVSNNMPSVSEKMMMAQEQLQSRHGVPNSSSALPFGGADTGLSQNRAVQNSQHMLQLLHKVDNSRNSDVAADIPNNXWXLXSAQQQPNHSLXGXGLRLAPPSQRQXISGNLXWSSQTNVDGKQSDHSAQDDDRTPQ

SEQ ID NO: 215746 - protein, 1306 aa, Zea mays
  Clone ID: MRT4577_128359C.1.pep
MKVVYYETDSSSPSTSGSESASATSKRHERKKYSKMPLHYPRISKRTPLLSVPLGKPPMFEGEYYSMWSDKMRHHLTSLHKSIWDIVEYGAQVPKKGDKDYDSEEVEQIQHFNSQVTTILLASLSREEYNKVQGLKSAKEIWDVLKTAHEGDEVTKITKRETIEGELGCFMLHQGEEPQVMYNRLKTLVNQVRNLGSTKWDDHEMVKVILRSLVFLNPTQVQLIRGDPRYKLMSLEEVIGKFVSFELMIKGSKQIIERGATSTPEVQPVAFKATEEKKEEFTPSRLPIDASKLDNKEMALIIKSYRQILKQRKGRDYKLRSKKVCYKCGKPGHFIAKCPLSSDSDRGDDKKGKRREKKRYYKKKGGDAHVCREWDSDESSTDSSSDEDAANIAINKGLLFPNVGHKCPMAKYGKKKEKLNELISVIHEKDELLDSQEDFLIKENKRHVNTKNAYAQETIENEKLIAKAKDLNVCNISISNLKNENAILHAKIDELNACKPSTSTVEHVTICTRCRDINVDAIHDHLTLIKQQNDHIAQLSAKINEHDLENENFKFARSMLYSGRCPGIKDGISFQQGDNVKLNAPKRLSNFVKGKALMVQDNEGYILYPTGYPEHKIRRIHSRKSHSGSHHAFMYKSEASSSRQSTHAKLPKKKTPIASNEPNISFKTFDASYVLTNKSGKVVAKYVGGKHKGSKTCVWVPKVLVSNVKGPKTVWVYASGGSSWIIDSGCTNHMTWEKRMFSSYEKNQDPQRAITFRDGNQAHVGMKNLSKLLKGEHILGLTNVHFEKDRDKSQTQETLKGFLRRAQNEFGLRIKKIRSDNGTEFKNSQIEGFLEEEGIKHEFSSSYTPQQNGVVERKNRTLLDMVRTMLDEYKTSDRVFGSKCFILVKRGRKSKFAPKVVEGFLLGYDSNTRVYRVFNKSTGLVEVSCDIVFDETNGSQVEQVDLDELDDEEAPCVVLRNMSIGDVCPKESEEPPQAQDQPSSSMQASPPTQDEDQAQEDENEDQEDEPPQEEDNDQGGDANNQDKEDDDARLESIRILLAYGTYHGFKLYQMDVKSAFLNGPIKEEVYIEQPPGFEDKFSRIMVQKFEMSMMGELKYFLGFQVKQLQEGTFISQTKYIQHILTKFGMKDAKPIKTPMGTNGHLDLDTGGKSVDQKAGCKINRKSTSGTCQFLGRSLVSWTSKKQNSVALSTAEAEYIDAGHCCAQLLWMRQTLRDYGYKLTKVPLLCDNESAIRMADNPVEHSRTKHIAIRYHFLRDHQQKRDIEIAYINTKEQLADIFTKPLDEQTFNKLRHELNILDSRNFF

SEQ ID NO: 215747 - protein, 167 aa, Zea mays
  Clone ID: MRT4577_12835C.1.pep
MLVYQDLLSGDELLSDSFTYKELENGVLWEVEGKWVTQGPVDVDIGANPSAEGGEDESVDDTAVKVVDIVDTFRLQEQPPFDKKSFVSYIKKYIKNLTAVLEPEKADEFKKGVEGATKFLLSKLKDLQFFVGESMKDDASVVFAYYKDGATNPTFLYFSHGLKEIKC

SEQ ID NO: 215748 - protein, 1723 aa, Zea mays
  unsure (1)..(1723): unsure at all Xaa locations
  Clone ID: MRT4577_128360C.1.pep
SLTTQSDVGSIRQEGDRDRRRQVHKLEENPRESAHKHKEESSSSVKTQRKGDKKKKMKKVVYYETDSSSPSTSGSESASTTSKRHERKKYSKMPLYYPRISKRTPLLSIPLGKPPVPKEGDKDYDSEEVEQIRHFNSQSTTILLASLSREGYNKVQGLKSAKEIWDMLKTTHEGDEVTEITKRETIEGELGRFMLNQGEEPQAMYNRLKTLVNQVRNLGSTKWDDHEMVKVILRSLVFLNPTQVQLIRGDPRYKLMSPEEVIGKFVSFELMIKGSKQIIERGTTSTPEVQPVAFKAMEEKKEESTSSRLPINASKLDNEEMALIIKSFRQILKQRRGXDYKPHSKKVCYKCGATTRGKXKEKKRYYKKKGGDAHVCREWDSDESSTDSSSDEDAANIAVNKGLLFPNVGHKCLMAKDGKRSDEDNSSDDEDNLLALFANLNMQQKEKLNELIGAIHEKDELLDSQEDFLIKENKKHVKVKNAYAQEVEKCEKLTSELSTYHDVISNLRNENAKLIAKVEKLDICDDSIVSLRNDNDNLITKIDKLNASLSSLKIDNEKLIAKAKELNVCNDVISNLRIENVMLHAKIDELNVCKPSTSIIEHVTICTRCRDINVDAIHNHLALIKQQNDHIAQLSAKINEHDLENEKFEFARSMLYNGRHPGIKDGIDFQKGDNVKLNAPKKLSNFVKDKAPMALDNEGYILYPAGCPEHKIRRIHSRKSHSSSHRAFIYKNEASSSRRSTHVKMSKKKTPIASNEPNISFKIFDASYVLTNKSGKVVAKYVGGKHKGSKTCVWVPKVYASGGSNWIIDSGCTNHMKGEKRMFSSYEKNHDPQRAITFGDGNQDSLDYNLLSISQLCKMGYNCLFTDIGVTVFRRSDDSVAFKGVLEGQLYLVNFNRAELDTCLIAKTNMGWLWHRRLAHVGMKNLHKLLKGEHILGLTNVHFEKDREKSQTQETLKGFLRRAQNEFGLRIKKIRSDNGTEFKNSQIEGFLEDEGIKHEFSSPYTPQQNGVVERKNRTLLDMARTMLDEYKTSDRFWAEAVNTACYAINRLYLHRILKKTSYELLTGKKPNISYFRVFGSKCFILVKRGRKSKFAPKAVEGFLLGYDSNTRTYRVFNKSSGLVEVSCDIVFDETNGSQVEQVDLDELDDEEAPCVALRNMSIGDVCPKESKEPPQAQDQPSSSMQASPPTQDEDQAQDDDDEDQEESPQEEDNDQGGDANDQDKDEEQDPRLPYPRVHQEIQRDHPVNTILSDIHKGGTTRSRVAHFCEHYSFVSSIEPHRVEEALQDSDWVLAMQEELNNFTRNEVWHLVPRPNQNVVGTKWVFRNKQDEHGVVTRNKARLVAKGYSQVEGLDFGETYAPVARLESIRVLLAYATYHGFKLYQMDVKSVFLNGPIKKDVYVEQPPDFEDSEYPNHVYKLSKALYGLKQAPRAWYECLRDFIITNGYKVSKVDPTLFTKTIAKDLFVCQIYVDDIIFGSTNKSTCEEFSRIMVQKFEMSMMGELKYFLGFQVKQLQEGTFISQMKYIQEILTKFGMKDAKPIKTPMGTNGHLDLDTGGKSVDKRFQADPKEVHLRAMKRIMRYLVYTPKFGLWYPKGSTFDLIGYSDADYVGCKIDRKSTSGTCQFLGRSLVSWASKKQNSVALSTAEAEYIVVGHCCAQLLWMRQTLRDYGYKLSKVPLLCDNESAIRMSDNPVEHNRTKHIDIRYHFLRDHQQKGISKLLM

SEQ ID NO: 215749 - protein, 1544 aa, Zea mays
  Clone ID: MRT4577_128361C.1.pep
MSEELAKKEMETGDKPTTSHGKASSEESRNKEKRKEKKKENKTSSHKSHRSGDKIKKMRKVVYYETDTSSPSTSGSDAPSITSKRHERKKFSKIPLHYPRTYRHTPLLSVPLGKPPTFDGEDYARWSDLMKFHLTSLHKSIWNVVEFGVQVPSIGDEDYDSDEVAQIHHFNSQATTILLASLSREEYNKVQGLKSAKEIWDVLKTAHEGDEVTKITKRETIEGELGRFMLHQGEDPQAMYNRLKTLVNQVRNFGSEKWDDHEMVKVILRSLVFLNPTQVQLIRGDPRYKLMSPEEVIGKFESFELMIKGSKKIIEQGTSSTPEAQPVAFKATEEKKEESTSSRQPIDASKLDNEEMALVIKSFRQILKQRKGKDYKSRSKKVCYTCGKPGHFIAKCPISSDSDRGDDKKGRRKEKKKYYKKRGGDAHVCREWDSDESSSDSSDDEDAANIAVTKGLLFPNVGHKCLMAKDGKKKKVKSKSSTRYESSSDENASDEEDNLHTLFANLNMQQKEKLNELISAIHEKDDLLDSQEDFLIKENKKHVKVKNAYALEVEKCEKISSELSTCHETIDNLRNENANLLAKVDSNACNVSIPNLRNDNDDLLAKIEELNLSLVSLRNENEKLIATAKDFDVCNATISNLRSENDILHAKVVELKSCKPSTSIVEHVSICTRCKDVDINAIHDHMSLIKQQNDHIAKLDAKIAEHNLENEKIKFARSMLYNGRRPGIKDGIGFQRGDNVKLSAPPKRLSNFVKGKAPMPQDNEGYILYPAGYPESKIRRIHSRKSHSGPNHAFMYKGETSSSRQPTRAKLPKKRTPNASNDHDISFKTFNASYALTNKSSNVVAKFVGGKHKGSKTCVWVPKVLVSNAKGPKTVWEKSQTQETLKGFLRRAQNEFGLRIKKIRSDNGTEFKNSQIEGFLEEEGIKHEFSSPYTPQQNGVVERKNITLLDMARTMLDEYKTSDRFWAEAVNTACYAINRLYLHRILKKTSYELLTGKKPNISYFRVFGSKCFILVKRGRKSKFAPKTVEGFLLGYDSNTRAYRVFNKSSGQVEVSCDVVFDETNGSQVEQVDLDEIGIEEALCIALRNMSIGDVCPKESEEPPNAQDQPSSSTQASPPTQNEDEAQVDEVEDQANEPPQDDGNDQGGDANDQDKEDEEQRPPHPRVHQAIQRDHPVDTILGDIHKGVTTRSRVAHFCEHYSFVSSIEAHRVEEALQDSDWVVAMQEELNNFTRNEVWHLVPRPNQNVVGTKWVFRNKQDEHGVVTRNKARLVANGYSQVEGLDFGETYAPVARLESIRILLAYATYHGFKLYQMDVKSAFLNGPIKEEVYVEQPPGFEDSEYPNHVYKLSKALYGLKQAPRAWYECLRDFLITNGFKVGKAGPTLFTKTLENDLFVCQIYVDDIIFGSTNESTCEEFSRIMTQKFEMSMMGELKYFLGFQVKQLQEGTFLSQTKYTQDILSKFGMKDAKPIKTPMGTNGHLDLDEGGKSVDQKKEHIGDLPVLGKVLGVLGFKEAKFRSSFYRRSRVYCRRTFLRATTLDEANP

SEQ ID NO: 215750 - protein, 33 aa, Zea mays
  Clone ID: MRT4577_128362C.1.pep
MSYDRAITVFSPDGHLFQVEYAQEAVTKGSTAV

SEQ ID NO: 215751 - protein, 117 aa, Zea mays
  unsure (1)..(117): unsure at all Xaa locations
  Clone ID: MRT4577_128363C.1.pep
MALAPKTASSSSLSWALQADDSPALVLKHMAPTLPPRRRYDADAEVNTTTTAKTAADAVTAAAAPPYAXRRSRCRQSIAVAPVERTIRTQTDTMSXLMANGKTACIPHMTAGDPDLS

SEQ ID NO: 215752 - protein, 139 aa, Zea mays
  Clone ID: MRT4577_128364C.1.pep
ARGVSPSVFLFERSFKIFPVVCCRFFCFFSPWFWPHFFAFFLSLWINLFSVIWGGSLRGGIYRCLFKVFRFHCFRSQAFLSPSYYFPPTSSGSLVTRCLAPLQMIFDLGFSPLGCLPLPSGSAPFLRCLNLFERKRFLG

SEQ ID NO: 215753 - protein, 37 aa, Zea mays
  Clone ID: MRT4577_128365C.1.pep
SCLPLQKLSWAVLCALTFGPQCYVAHFDLCVRAKKFL

SEQ ID NO: 215754 - protein, 64 aa, Zea mays
  Clone ID: MRT4577_128366C.1.pep
LQRSYLWDSIRKIRLTMNMRAQSDKWFSEYLLRIGNGTEETIGSDYVRLPEEIVIGYTDTEDSI

SEQ ID NO: 215755 - protein, 58 aa, Zea mays
  unsure (1)..(58): unsure at all Xaa locations
  Clone ID: MRT4577_128367C.1.pep
ILNNSLKSSFSASVIRTITCRTLQTRLKRFADGGATQLSLGDERQXHVNRCIHCPHDW

SEQ ID NO: 215756 - protein, 80 aa, Zea mays
  unsure (1)..(80): unsure at all Xaa locations
  Clone ID: MRT4577_128368C.1.pep
PKGSNLTYPXMQIQTPSKVSPKLISWAVFXQRRNGKNPGFTKFNPLEKNPPFTNWVNTKKAPTDPPSKKLPTLNGKWNPP

SEQ ID NO: 215757 - protein, 63 aa, Zea mays
  Clone ID: MRT4577_128369C.1.pep
HSSLVSHTIIAFFLLRDQIITAGISFTLFGIFHIINLNLHIWGYHNNNYYDHHNNSYFHHINY

SEQ ID NO: 215758 - protein, 107 aa, Zea mays
  Clone ID: MRT4577_12836C.1.pep
AIIGPPALDPSSPIRIPTCCSGCIPDWAFTPPLLRGLLGQPHQSISVASSLPGISYANHCSPLAVPYCNSPCDPATMTSVSNIRVRLGEQTSSASIYELPLTLLVNN

SEQ ID NO: 215759 - protein, 167 aa, Zea mays
  unsure (1)..(167): unsure at all Xaa locations
  Clone ID: MRT4577_128370C.1.pep
MGSKIRSLALQKRVAXSYLKCGKGKARVDPNEDREIYMANYXNSIRKWVQDGXIINKPNKXIHSTSRAXGHMTAKQKGRHSXMAKRQGTREARLPTKVLPMTRMRVLTRLLRKYREXQHIDMHMYYDMYMKVKGNALNNKRGLMXESIHKTKAEKATXKTLSDQLGG

SEQ ID NO: 215760 - protein, 211 aa, Zea mays
  Clone ID: MRT4577_128371C.1.pep
MAQGSVGEAGKMSRGPVGPAAGQLCRGSGLALRALGRGAWGGAHGSARRATRLGERSCSRARAQAERRSGPPRAGSRRECRAQGRAAAQGPLDATPGGTAERVRRGERGWVREERGEDSPGTAVCRDDSFCAIWIWGDLDLGRETRAANPLNKSIDTHLMKMQATLNLADQERLEAANRTGARGKGMDRKGETTLRPSKGKGNKKTCSIGA

SEQ ID NO: 215761 - protein, 36 aa, Zea mays
  Clone ID: MRT4577_128372C.1.pep
ECAPADPETRARAPLMVRRFLRLSNKLIDAWSTESA

SEQ ID NO: 215762 - protein, 36 aa, Zea mays
  Clone ID: MRT4577_128373C.1.pep
HMYLNIPVPLSSSSSWYLISHTPCSAIHIMLCNICP

SEQ ID NO: 215763 - protein, 72 aa, Zea mays
  Clone ID: MRT4577_128374C.1.pep
SGRVIPGTLADGSRRLRRRASPAYRSACTRKRSGLAAAHGPGRCSSPSRWRPWRSCASSSIAEATCCGNGRS

SEQ ID NO: 215764 - protein, 173 aa, Zea mays
  Clone ID: MRT4577_128375C.1.pep
QLLHTQNTSLINTKKKLETDISQIQGEMEDIVQEARNAEEKAKIAITDGPMIAEELKKEQDTSAHLERMKKNMEQTVKDLQHRLDEAEQLALKGGKKQIQKLEARVRELEGEVENEQKRNVEAIKGLRKHERRVKELTYQTEEDRKNVLRLQDLVDKLQSKVKAYKRQAEEPE

SEQ ID NO: 215765 - protein, 1037 aa, Zea mays
  unsure (1)..(1037): unsure at all Xaa locations
  Clone ID: MRT4577_128376C.1.pep
MLLCIRVYASGGSSWIIDSGCTNHMTGEKKMFSSYEKNXRPQRAITFGDGNQGVTVFRRSDDSVAFKGVLEGQLYLVDFDRAELDTCLIAKTNMGWLWHRRLAHVGMKNLHKLLKGEHILGLTNVHFEKDRICSACQAGKQVGAHHPHKNIMTTDRPLELLHMDLFGPIAYISIGGSKYCLVIVDDYSRFTWVFFLQEKSHTQETLKGFLRQAQNEFGLRIKKIRSDNGTEFKNSQIEGFLEEEGIKHEFSSPYTPQQNGVVERKNRTLLDMARTMLDEYKTSDRFWAEAVNTACYAINRLYLHRILKKTSYELLTGKKPKISYFRVFGSKCFILIKRGRKSKFAPKTVEGFLLGYDSNTRAYRVFNKSSGQVEVSCDVVFDETHGSQVEQVDLDEIGDEEALCITLRNMSIGDVCPKESEEPPNAQDQPSSSTQASPPTQNEDEAQVDEGEDQRDEPPQDDDNDQGGDANDQDKEDEELRPPHPRVHQAIQRDHPVDTILGDIHKGVTTRSCVAHFCEHYSFVSSIEPHRVEEALQDSDWVVAMQEELNNFTRNEVWHLVPRPNQNVVGTKLVFRNKQDEHGVVTRNKARLVAKGYSQVEGLDFGETYAPVARLESIRILLAYATYHGFKLYQMDVKSAFLNGPIKEEVYVEQPPGFEDSEYPNYVYKLSKALYGLKQAPRAWYECLRDFLITNGFKVGKADPTLFTKTLDNDLFVCQIYVDDIIFGSTNESTCEEFSRIMTQKFEMSMMAELKYFLEFQVKQLQEGTFISQTKYTQDILSKFGMKDAKPIKTPMGTNGHLDLDTGGKSVDQTVYRSMIGSLLYLCASRPDIMLSICMCARFQADPKEAHLTAVKRILRYLVHTPKFGLWYPWGSTFDLIGYSDADWAGCKIDRKSASGTCQFLGRSLVSWASKKQNSVALSTAEAEYIAAGHCCAQLLWMRQTLRDYGYKLTKVPLLCDNESAIRMADNPVEHSRTKHIAIRYHFLRDHQQKGDIEIAYINTKEQLADIFTKPLDEQTFNKLRHELNILDSRNFF

SEQ ID NO: 215766 - protein, 595 aa, Zea mays
  Clone ID: MRT4577_128377C.1.pep
MAAAPHQAQGPADSVIPLQSEPALDNNPSKSANARDQILSGTENVTTGNARGGSSLKSQKGPPEKASSVGKPGEQPFPYHQNVYAPQPQPLYPGGYMNPSGQWEEYPHYVSMEGLHSVSPGIYNDNQSLMLSPGYANNPQMMYGAYSPVSTVGDGQQYLPMHFPFSSPYYQPPASPSMGYSSSATGISQGDPMLQQEYFLPDGLLYSPTQGYHQPFSSFDRAPTQLNNAPGLFGQGNLPLASGMHHGSMYGPGSYKGRQQGSKFGGSTTSWSSAGRRFGTIDLSGNQQRGSMPFGSHNGSLEFMNEQNRGPRATKPKIQGTENTSGDERSEKIVPLIDSELYNRSDFITEYKDAKFFVIKSYTEDHVHRSIKYKVWASTASGNRKLDSAYHAAKEKEEHCPIFLFFSVNGSGQFCGVAEMIGPVDFDRSVDYWQQDKWSGQFPVKWHIIKDVPNNLLRHIILENNDNKPVTNSRDTQEVKLEQGLQMLTIFKSHEAETTIVEDFDFYEQREKALQENRRQQHAASTDTQKLVDTKAQDPVADISDAFAKAVQLKNTENSGTTPKTEGASAEKGSAATAKVEGSANLNTGPVEESS

SEQ ID NO: 215767 - protein, 1602 aa, Zea mays
  unsure (1)..(1602): unsure at all Xaa locations
  Clone ID: MRT4577_128378C.1.pep
MSGDHAKKEMETGEKPTTSHKSTSSEESRTKRREKKKSSSNKGKEKKSSSHHKEKKEKSSSHKPHRKGDKHKRMRKVVYYETDTSSTSTSDSDAPSVTSKRQERKKYSKIPLRYPRISKHTPLLSVPLGKPPTFDGEDYARWSDLMRFHLISLHKSIWDVVEFGAQVPSVGDENYDEDEVAQIEHFNSQATTILLASLSKEEYNKVQGLKNAKEVWDVLKTAHEGDELTKITKQETIEGELGRFRLHKGEEPQHMYNRLKTLVNQVRNLRSKKWDDHEVVNVILRSLIFLNPTQVQLIRGNPRYTKMTPEEVIGHFVSFECMIEGSRKINELGDPSEAQPVAFKATEEKKEESTPSRQPIDASKLDNEEMALVIKSFRQILKQRRGKDYKSRSKKVCYKCGKPGHFIAKCPMSSDSDRGDDKKGRRKEKKRYYRKKGGDAHVCREWDSDESSSDSSDDEDAANIAVTKGLLFPNVGHKCLMAKDGKKKKVKSNSSTKYESSSDDNASDEEDNLRILFANLNMEQKEKLNELISAIHEKDDLLDSQEDCLIKENKKHVKVKKAYALEVEKCEKLSSELSTCREMIDNLRNENAILNAKVDSHVCNVSIPNLRDDNIDLLAKIDELNVSLASLRLENENLIAKARDFDVCNTTISDLRTKNEMLHAKVVELKSCKPSTSNVEHVSICTRCRDVDVNAILDHMALIKQQNDHIAKLDAKIAEHNLENEKFKFARSMLYNGRRPGIKDGIGFQRGDNVKLNAPPKNLSNFVKGKAPMPQDNEGYILYPVGYPESKIRRIHSRKSHSGSNHAFMYRGETSSSRQPTRAKLPRKKTPNASNDHAISFKTFDASYVLTNKSGKVVAKYVGSKHKGSRTCVWVPKVLVSNAKGPKTIWVYASGGSSWILDSGCTNHMTGEKRMFSSYEKNQDPQRAITFGDGNQGVTVFRRSDDSIAFKGVLEGQLYLEKSQTQETLKGFLRRAQNEFGLRIKKIRSDNGTEFKNSQIESFLEEEGIKHEFSSPYTPQQNGVVERKNRTLLDMARTILDEYKTPDRFWAEAVNTACYAINRLYLHRILKKTSYELLTGKKPNISYFRVFGSKCFILVKRGRKSKFAPKTVEGFLLGYDSNTRAYRVFNKSTGLVEVSCDVVFDETNGSQVEQVDLDEIGEEQAPCIALRNMSIGDVCPRESKEPPNAQDQPSSSMQASPPTQNEDEAQVDEGQNKEDEPPQDDGNDQGGDAIDQEKEDEEEPRPPHPRVHQAIQRDHPVDTILGDIHKGVTTRSRVAHFCEHYSFVSSIEPHRIEEALQDLDWVVAMQEELNNFTRNEVWHLVPRPNQNVVGTKWVFRNKQNEHGVVTRNKARLVAKGYSQVEGLDFGETYAPVARLESIRILLAYATYHGFKLYQMDVKSAFLNGPIKEEVYVEQPPGFEDSEYPNHVYRLSKALYGLKQAPRAWYECLRDFLISNGFKVGKADPTLFTKTLENDLFVCQIYVDDIIFGSTNESTCEEFSRIMTQKFEMSMMGELKYFLGFQVKQLQEGTFICQTKYTQDILTKFGMKDAKPIKTPMGTNGHLDLDTGGKSVDQKXFKPSHRYIERKLESSAKTKASTP

SEQ ID NO: 215768 - protein, 256 aa, Zea mays
  unsure (1)..(256): unsure at all Xaa locations
  Clone ID: MRT4577_128379C.1.pep
MHHGSMYGPGSYKGRQYGSKFGGTTPSWSSAGRRFGTFDLSGNQQRGSMSFGSHNGSLEFMNEQNRGPRATKPKIQDTENSGDEKSEKTVPLIDSELYNRSDFITEYKDAKFFVIKSYTERPPGQVHRGIKYKVWASTASGNMKLDSAYHAAKEKEEHCPIFLFFSXINSSRNAGWGAFNSCRWQVRMQVATAIFCIFRMFCHTRSFRXXVNGSGQFCGVAEMIGPVDFDRSVDYWQQDKWSGQFPVKWHIIKDVL

SEQ ID NO: 215769 - protein, 41 aa, Zea mays
  Clone ID: MRT4577_12837C.1.pep
QSHRHCDLGSDLLVSCTHFCSFHFIACIVSYFLTGAIIEAA

SEQ ID NO: 215770 - protein, 74 aa, Zea mays
  Clone ID: MRT4577_128380C.1.pep
NSLVISKHPPPTITSSYTTNPFVQLPSSTFYSFQPSASFNSLNYIHHHQSLTQLNAANCLNFPPPPHLDLATPF

SEQ ID NO: 215771 - protein, 41 aa, Zea mays
  Clone ID: MRT4577_128381C.1.pep
DVHLTLFSGHMPPVKVRCSFRTVCNQNGRRCFCPKKKKNHK

SEQ ID NO: 215772 - protein, 113 aa, Zea mays
  Clone ID: MRT4577_128382C.1.pep
MATRPAAEGKPWELAAHPRLPKGRTVAVVVLDGWGEAAPDPFNCIHVADTPTLDALKKAAPERWRLIKAHGTAVGLPTDDDMGNSEVGHNALGAGQIYAQGAKLVDLALGSGR

SEQ ID NO: 215773 - protein, 169 aa, Zea mays
  Clone ID: MRT4577_128383C.1.pep
TLAGRRIPIPTHQPAPATYSRARISAMAAAPHQAQGPADSVIPLQSEPALDNNPSKSANARDQILSGTENVTTGNARGGSSLKSQKGPPEKASSVGKPGEQPFPYHQNVYAPQPQPLYPGGYMNPSGQWEEYPHYVSMEGLHSVSPSLMLSPGYANNPQMMYEAYSPVS

SEQ ID NO: 215774 - protein, 610 aa, Zea mays
  unsure (1)..(610): unsure at all Xaa locations
  Clone ID: MRT4577_128384C.1.pep
MARTMLDEYKTSDRFWAEAVNTACYAINRLYLHRILKKTSYELLTGKKPNILYFRVFGSKCFILVKRGRKSKFAPKTVEGFLLGYDSNTRAYRVFNKSSGLVEVSCDVVFDETNDSQVEQVDLDEIGDEEASCVALRNISIGDVCPKESEEPPNAQDQPSSSTQASPPTQNEDEAQVDEGEDKKDEPPQDDGNDQGGDANDQDKEDEEPRPPHPRVHQAIQRDHPVDTILDDIHKGVTTRYRVAHFCEHYSFVSSIEPHSVEEALQDSDWVVAMQEELNNFTRNEVWHLVPRPNQNVVGTKWVFRNKQDEHGVVIRNKARLVAKRYSQVEGLDFGETYAPVARLESIRMLLAYATYHGFKLYQMDVKNAFLNGPIKEEVYVEQPPGFEDSEYPNHVYKLSKALYGLKQAPRAXEFSRIMIQKFEMSMMGELKYFLGFQVKQLQEGTFISQMKYIQDILTKFGMKDAKPIKTPMGTNGHLDLDTGGKSVDQKAGCKIDRKSTSGTCQFLGRSLVSWASKKQNSVALSTAEAEYIAAGHCCAQLLWMGQTLRDYGYKLTKVPLLCDNESAIRMADNPVEHSRTKHIAIQYHFLRDHQQKGISRLLILTPKNN

SEQ ID NO: 215775 - protein, 149 aa, Zea mays
  Clone ID: MRT4577_128385C.1.pep
LAMSSGSSFGSSQWTQRSRSAEDDVDLDLQAEMEKRRKRRKESNRESARRSRLRKQQHHDDLTSQVDQLKGQNKQNSVLQTQRMELASRLGALTEILWCISSSTGTAAPTNPAMADGITTTWSWSDASGDILGASAWNQQQQPIDAYRC

SEQ ID NO: 215776 - protein, 252 aa, Zea mays
  Clone ID: MRT4577_128386C.1.pep
MAAAPHRAQVPADSTAPLQTGPVLENNPSKSANAKDQILSGTENVTTGNARGASSLRSPNGPPEKASSVGKAGEQPYLYQQNVYAPQPQPLYPGGYMNPSGQWEEYPHYVNMEGLHSVSPGIYNDNQSLMLSAGYANNPQMMYGAYSPVSTAGDGQQYFPVHYSFSNPYYQPPASPSMGYSNSATGMSQGDPMLQQEYFLPDGLLYSPTQGYHQPFSSFDRAPTQLNNAPGLFGQGNLPLASGMVCCHAIEF

SEQ ID NO: 215777 - protein, 192 aa, Zea mays
  Clone ID: MRT4577_128387C.1.pep
AFRSSTRADALCRFYLGLRRDIQDIMDYKEFNTVNKLFQFAMLAETELQGRQHRPRATFGASSTSRTHTPASSHTPSTTPASTRPPSTPAAHVGNLPLQVPTKKHNSLAPAATSSGRSSGIVCHRCHGIGHVKKDCPSQRTYIATDDGYISTSDAEGDDDDSSDVAANDDAMLGADAIVNLRSIMVQRVLSS

SEQ ID NO: 215778 - protein, 1201 aa, Zea mays
  unsure (1)..(1201): unsure at all Xaa locations
  Clone ID: MRT4577_128388C.1.pep
DSRATPKYTTSSDEGGSSEDKDDLLTLFADLNMKQKEKLNELIEAIHEMDDLLESQEDFLIKENKKHVKVKNAYAQEVEKCENLTKELTICHESITSLRNENASLVSKVKDLNVCNDSISSLRNENASLVSKIKKLNVCNDSISYLRNENAMLKSKIEELNVCKPSTSTVEHVSICTRCRDVNVDAINDHLALIKXQNDQIAQLTAKINEHEIENEKFRFARSMLYNGRRPGIKDGIGFQQGSNVKLNAPKRLSNFVKGKAPXSQDNEGYILYPASYPEHKIRRIHSRKSHSGSHHAFMYKNETSSSRHSTHVKMPKKKSPVASNEPNVSFKTFDASYVLTNKSGKVVTKYVGGKHKGSKTCVWVPKVYASRGSSWIIDSGCTNHMTGEKRMFSSYEKNEDSQRAITFEDGNQDLCVTVFRRSDDSVAFKGVLEGQLYLVDFNRAELDTCLFAKTNMGWLWHRRLAHVGMKNLHKLLKGEHILGLTNVHFEKDREKSQTQETLKGFLRRAQTKFGLRIKKIRSDNGTEFKNSQIEVFLEDEGIKHEFSSPYTPQQNGVVERNNRTVLDMARTMLDEYKTPDRFWAEAINTACYSINRLYLHRILKKTSYELLTGKKPNVSYFRVFGSKCFILVKRCRKSKFAPKVVEGFLLGYDSNTRAYRVFNKSTGLVEVSCDIVFDETNGSQVEQVDLDELDDEEASYVTLRNMSIGDMCPKESEEPPQAQDQPSSSMQASPPTQDEDQAQGDENEDQEDEPPQEEDNDQGGDNNDQDKEDDQEPYRVEDALRDSDYMLAMQEELSNFTRNEVWHLVPRPNQNVVGTKWVFRNKQDEHGVVTRNKARLVAKGYSQVKAFPNDVKSAFLNGPIKEEVYVEQPPGFEYSEYPNHVYKLSKALYGLKQAPRAWYECLRDFLITNGFKVGKADPTLFTKTIANDLFMSMMGELKYFLGFQVKQLQEGTFISQTKYIQDILTKFGMKDAKPIKTPMGTNGHLDLDTEDIMLFVCMCARFQADPKEVHLRAVKRIMRYLVYTPKFGLWYPKGSTFDLIGYSDADWAGCKIDRKSTSGTCQFLGRSLVSWASKKQNSVALSTAEAEYIATDHCCVQLLWMRQTLRDYGYKLSKVPLLCDNESAIRMADNPVEHSRTKHIDIRYHFLRDRQQRGDIEIAYVSTKEQLADIFTKPLDEKTFSKLRNELNILDSRNFD

SEQ ID NO: 215779 - protein, 121 aa, Zea mays
  Clone ID: MRT4577_128389C.1.pep
LMVREGNFGRTSPWKIDGQWLSAKTSAESAPGKLMVTGGNSGRTSPWETYDQRSKIWQNLPRSHWKWMFRSRNFGRTSPWDRQQVQVSETRGWMESPNFAGIRSTQTGRTGGVSVTKLRCY

SEQ ID NO: 215780 - protein, 127 aa, Zea mays
  unsure (1)..(127): unsure at all Xaa locations
  Clone ID: MRT4577_12838C.1.pep
MYRAAVGISRSSSALRRLLVRGVVGEXRVCWXRGYAATAKDVSFGVGSLAAMLQGVNDLADSDKVTMGPQXRTVYIEGAHRGPMVTKDGVSVXKAWSLWYSANIVGANLLKQVADASNNAAGDGTTC

SEQ ID NO: 215781 - protein, 60 aa, Zea mays
  Clone ID: MRT4577_128390C.1.pep
KNVWFSTPDVVKGVKSPAMPPGYLKKKRLFTVVVYLGKALQLPPCSFFVNRKNEAGDDFF

SEQ ID NO: 215782 - protein, 1940 aa, Zea mays
  Clone ID: MRT4577_128391C.1.pep
MSGDHAKKEMETGDKPTTSQGSTSSEESRTKKREKKKNSSKRKEKRSSSSHHKEKKEKSSSHKPHRSGDKHKRMRKVVYYETDTSSTSTSGSDAASVTSKRQERKKYSKIPLRYPRVPKHTPLLSVPLGKPPTFNGEDYAMWSNLMRFHLTSLHKSIWDVVEYGVQVPSIGDEDYDTDEVSQIEHFNSQAATILLASLSKEEYNKVQGLKNAKEIWDLLKTAHEGDELTKITKRETIEGELGRFRLRQGEEPQDMYNRLKTLVNQVRNLGSTKWDDHEVVKVILRALIFLNPTQVQLIRGNPRYPLMTPEEVIGNFVSFECMIKGSKKINELDEPSTSEAQPVAFKATEEKKEESTPSRQPIDASKLDNEEMALIIKSFRQILKQRKGKDYKPRSKKVCYKCGKPGHFIAKCPMSSDSDRGDDKKGRRKEKKKYYKKKGGDAHVCREWDSDESSSDSSDDEDAANIAVTKGLLFPNVGHKCLMAKDGKKKVKSRSSTKYETSSDEDDDKNEEDNLRILFANLNMEQKEKLNELISAIHEKDDLLDSQEDFLIKENKKHVKVKNAYALQVEKCEKLSSELSTCREMIDNLRNENAILNAKVDSHVCNVSIPNLRNDNVDLLAKIDELNASLASLRLENENLIAKAKNFDVCNATISDLRTKNEMLHAKVVELKSCKTSTSNVEHVSICTRCRDINIDAIHDHLALIKKQNDHIAKLDAKIAEHNLENEKFKFARSMLYNGRRPGIKDGIGFQRGDNVKLNAPPKNLSNFVKGKAPMPQDNEGYILYPAGYPESKIRKIHSRKSHSGPNHAFMYKGETSSSRQPTRAKLPKKEIPNASNDHAISFKTFDASYVLTSKSGKVVAKFVGGKHKHSKTCVWVPKVLVSNAKGPKTVWVYASGGSSWILDSGCTNHMTGEKRMFSSYEKNKDPQRAITFGDGNQGLVKGLGKIAISPDHSISNVFLVDSLDYNLLSVSQLCQMGYNCLFTDICVTVFRRSDDSIAFKGVLEGQLYLVDFDRAELDTCLIAKTNMGWLWHRRLAHVGMKNLHKLLKGEHILGLTNVHFEKDRICSACQAGKQVGTHHPHKNIMTTDRPLELLHMDLFGPIAYISIGGSKYCLVIVDDYSRFTWVFFLQEKSQTQETLKGFLRRAQNEFGLRIKKIRSDNGTEFKNSQIESFLEEEGIKHEFSSPYTPQQNGVVERKNRTLLDMARTMLDEYKTPDRFWAEAVNTACYAINRLYLHRILKKTSYELITEGFLLGYDSNTRAYRVFNKSTGLVEVSCDVVFDETNDSQVEQVDLDEIGEEQAPCIALRNMSIGDVCPKESEEPPSTQDQPSSSMQASPPTQNEDEAQNDEEQNQEDEPPQDDSNDQGGDTNDEEKEDEEEPRPPHPRVHQAIQRDHPVDTILGDIHKGVTTRSRVAHFCEHYSFVSSIEPHRVEEALQDSDWVVAMQEELNNFTRNEVWHLVPRPNQNVVGTKWVFRNKQDEHGVVTRNKARLVAKGYSQVEGLDFGETYAPVARLESIRILLAYATHHGFKLYQMDVKSAFLNGPIKEEVYVEQPPGFEDSEYPNHVYRLSKALYGLKQAPRAWYECLRDFLIANGFKVGKADPTLFTKTLENDLFVCQIYVDDIIFGSTNESTCEEFSRIMTQKFEMSMMGELKYFLGFQVKQLREGTFISQTKYTQDILAKFGMKDAKPIKTPMGTNGHLDLDTGGKSVDQKVYRSMIGSLLYLCASRPDIMLSVCMCARFQADPKESHLTAVKRILRYLAYTPKFGLWYPRGSTFDLIGYSDADWAGCKINRKSTSGTCQFLGRSLVSWASKKQNSVALSTAEAEYIAAGHCCAQLLWMRQTLRDYGYKLTKVPLLCDNESAIKMADNPVEHSRTKHIAIRYHFLRDHQQKGDIEISYINTKDQLADIFTKPLDEQSFTRLRHELNILDSRNFFC

SEQ ID NO: 215783 - protein, 132 aa, Zea mays
  Clone ID: MRT4577_128392C.1.pep
LPCKFQVIVYVKKTSAGPGGLGLGEVMVREGNFGRTSPWKTDSQCTKLRQNSGRTSPWETYDQRSKIWQNLPRSPWKWMFRSRNFGRTSPWDRQQVQVSETRGWMESPNFAGIRSTQTGRTGGVSVTKLRCY

SEQ ID NO: 215784 - protein, 86 aa, Zea mays
  Clone ID: MRT4577_128393C.1.pep
LGRRRRRYPFWQQSYFLCFLLSSAVLHRRRCFNSDRCRRARGAEAKQDTAGRPECNAWLLSRVIFIISRPSLRALIFCSCSCCHPV

SEQ ID NO: 215785 - protein, 822 aa, Zea mays
  Clone ID: MRT4577_128394C.1.pep
MPQDNEGYILYPAGYPESKIRRIHSRKSHSGPNHAFMYKSETSSSRQPTRAKLPKKKTPSASNDHGISFKTFDASYVLTNKSGKVYASGGSSWVIDSGCTNHMTGEKKMFSSYEKNQDPQRAITFGDGNQGVTVFRRSDDSIAFKGVLEGKLYLVDFDRAELDTCLIAKTNMGWLWHRRLAHVGMKNLHKLLNGEHILGLTNVHFEKDRICSACQAGKQVGAHHPHKNIMTTDRPLELLHMDLFSPIAYISIGGKTLKGFLRRAQNEFGLRIKKIRSDNGTEFKNSQVEGFLEEEGIKHEFSSPYTPQQNGVVERKNRTLLDMARTMLDEYKTSDRFWAEAVNTACYAINRLYLHRILKKTSYELLTGKKPNISYFRVFGSKCFILIKRGRKSKFAPKTVEGFLLGYDSNTRAYMVFNKSTGLVEVSCDVVFDETNGSQVEQVDLDEIDDGIDQGGDANDQDKEDEEQRPPHPRVHQAIQQDHPVDTILGDTHKGVTTRSRVAHFCEHYSFVSSIEPHRVEEALQDSDWVVAMQEELNNFTRNEVWHLVPRPNQNVVGTKWVFRNKQDEHGVVTRNKARLVAKGYSQVEGLDFGETYAPVARLESIRILLAYVTYHGFKLYQMDVKSAFLNGPIKEEVYVEQPPGFEDSEYPNHVYKLSKALYGLKQAPRAWYECLRDFLITNGFKVGKADPTLFTKTLENDLFVCQIYVDDIIFGSTNESTCEEFSRIMTQKFEMSMMGELKYFLGFQVKQLQEGTFISQTKYTQDILTKFGMKDAKPIKTPMGTNGHLDLDTGGKSVDQKGIHIRFNWLFRCRLGGVQNQ

SEQ ID NO: 215786 - protein, 135 aa, Zea mays
  unsure (1)..(135): unsure at all Xaa locations
  Clone ID: MRT4577_128395C.1.pep
MEKRRKPRKESNRESAGRSRLRKQQHHXDLTSQVDQLKGQNKQLNMALSMTSQNLVAVQAQNSVLQTQRMELASRLGALTEILWCISSSTGTAAPTNPAMADGITTTWSWSDASGDILGASAWNQQQQPIDAYRC

SEQ ID NO: 215787 - protein, 77 aa, Zea mays
  Clone ID: MRT4577_128396C.1.pep
GAPLFFFFLLPLQSSASCSRVIHGFPIGHLSWNLGHVSYVILQLYLLLMIIDDSARAHILCRVSIFMGLLSLSRLVC

SEQ ID NO: 215788 - protein, 1618 aa, Zea mays
  unsure (1)..(1618): unsure at all Xaa locations
  Clone ID: MRT4577_128397C.1.pep
MSGDHAKKEMETGEKPTTSHGSTSSEESRTKRREKKKSSSNKGKEKKSSSHHKEKKEKSSSHKPHQSEDKPKRMRKVVYYETDTSSTSTSGSDAPSVTSKRQGRKKFSKIPLHYPRISKHAPLLSVPLGKPPTFNGEDYARWSDLMRFHLTSLHKSIWDVVEFGAQVPSVGDEDYDEDEVAQIEHFNSQATTILLASLSREEYNKVQGLKSAKEVWDVLKTAHEGDELTKITKRETIEGELGRFRLRKGEEPQNMYNRLKTLVNQVRNLGSKKWDDHEVVKVILRSLIFLNPTQVQLICGNPRYTKMTPEEVIGNFVSFECMIEGSRKINELDDPSTSEAQPVAFKATEERKEESTPSRQPIDASKLDNEEMALVIKSFRQILKQRRGKDYKSRSKKVCYNDRGDDKERRKEKKRYYKKKGDDAHVCREWDSDESSSDSSDDEDAANIAVTKGLLFPNVGHKCLMAKDGKKKVKSKPSTKYESSSDDNASDEEDNLRTLFANLNMQQKEKLNELISAIHEKDDLLDTQEDFLIKENKKHVKVKNSYALEVEKCQKLSSEISTCHEMIDNLRHENISLNTKVDSHVCNVSIPNPRDNNDDLLARIEELNISLASLRVENENLIAKAKELDVCNVIISDLRDNNDILRAKIVELNSCKPSTPSVEHISICTRCRDVNIDAIHDHMALIKQQNDHIAKLDAKIAEHNLENEKFKFARSMLYSGRRPGIKDGIGFQRGDNVKLNAPPKRLSNFVKGKAPMPQDNEGYILYPAGYPEDKIRKIHSRKSHSGPNHAFMYKGETSSSRQPTRAKLPKKIPIASNDHDISFKTFDASYVLTNKSGKVVAKFAGGKHKGSKTCVWVPKVLVSNVKGPKTVWVYASGGSSWIIDSGCTNHMTWEKKMFSSYEKNQDPQRAITFGDGNQGLVKGLGKIAISPDHSISNVFLVDSLDYNLLSVSQLCKMGYNCLFTDIGVTVFRRSDDSVAFKGVLEGQLYLVDFDRAELDTCLIAKTNMCWLWHRRLAHVGMKNLHKLLKGEHILGLTNAHFEKDRICSACQAGKQVGVHHPHKNIMTTDMPLELLHMDLFGPIAYISVGGSKYCLVIVDDYSRFTWVFFLQKKSHTQKTLKGFLRQAQNEFGLRIKKIRSDNGTEFKNSQIEGFLEEEGIKHEFSSPYTPQQNGVVERNNRTLLDMARTMLDEYKTSDRFWAEAINTACYAINRLYLHRILKKTSYELLTGKKPNVSYFRVFGSKCFILVKRGRKSKCAPKVVEGFLLGYDSNTRAYRVFNKSSGLVEVSCDIVFDETNGSQVEQVDLDELDDEEASCIALRNMSIGDVCPKESEESPNAQDQPSSSMQASPPTQDEDEAQDDEGEDQEVEPPQEESNDQGGDARDQDEEDEQVPRAPHPRVHQAIQRDHPVNTILGDIQKGVTTRSRVAHFCEHYSFVSSIEPHRVEEALQDSNWVVAMQEKLNNFTRNELYQMDVKSAFLNGPIKEEVYVEQPSGFEDXYPNHVYKLSKALYGLKQASRAXEFSRIMTQKFEMSMMGELKYFLGFQVKQLQEGTFISQTKYIQDILNKFGMKDAKPIKTPMGTNGHLDLDTGGKSIDQKGIHIRFDWLFGCRLGGV

SEQ ID NO: 215789 - protein, 170 aa, Zea mays
  Clone ID: MRT4577_128398C.1.pep
MSSGSSFGSSQWTQRSRSAEDDLDLDLQAEMEKRRKRRKESNRESARRSRLRKQQHHDDLTSQVDQLKGQNKQLNLALSTTSQNLVAVQAQNSVLQTQRMELASRLGALTEILWCISSSTGTAAPPTNPAMVNGGVTTTWSWSDASGDILGASAWNHQQQQPIDAYRCYY

SEQ ID NO: 215790 - protein, 1370 aa, Zea mays
  Clone ID: MRT4577_128399C.1.pep
MCNTRHTTQGVAGGRRRLRGGGDVSNESSTDSSSDEDAANITVNKGLLFPNVGHKCLMARDGKKKVKSRASTKYATSSDDENSSDDEDNLLALFANLNMQEKEKLNELIGAIHEKDELLDSQEDFLIKENKKHVKVKNAYAQEVEKCEKLTSDLSTCHDTISNLRCENAKLIAKVEKLNVCDDSIVSLRNDNASLITKIDKLNASLSSLKIENEKLIAKTKDLNVCNISISNLKNENAILHAKIDELNACKPSTSSVDHVTICTRCRDINVDAIHDHLALIKQQNDHIAQLSAKINEYDLENEKFKFARSMLYSGRRPGIKDGIGFQKGDNVKLNSPKKLSNFVKGKTPMAQDNEGYILYPVGYPDHKIRRIHSRKSHSGSHHAFMYKSEASSSRQSTHVKLPKNKTPIASNEPNILFKTFDASYVLTNKSGKVVVKYVGAKHKGSKTCVWVSKVYASGGSSRIIDSGCTNHMTREKRMFSSYEKNHNPQRAITFGDGNQDSLDYNLLSVSQLCKMGYNCLFTDIGVTAFRRSDDSVAFKGVLEGQLYLVDFNRAELDTCLIAKTNMGWLWHRRLAHVGMKNLYKLLKGEHILRLTNVHFEKYREKSQTQESLKGFLRRAQNEFGLRIKKIRSDNGTEFKNSQIEGFLEDEGIKHEFSSPYTPQQNGVVKRKNRNLLDMTRTMLDEYKTSDRFWAEAINTACYAINRLYLHRILKKTSYELLTGKKPNVSYFRVFGSKCFILVKRGRKSKFAPKAAEGFLLGYDSNTRAYRVFNKFTGLVEVSCDIVFDETNGSQIEQVDLDELDDEETLCVTLRNMSIGDVCPKESEEPPHAQDQPSSSMQASPPTQDEDQAQDDENEDQEQSPQEEDNDQGGDANDQDKEDDEGPRPPHPRVHQAIQRDHPVNSILDDIHKGVTTQSRVAHFCEHYSFVSSIEPYRVEDALRDSDWVLAMQEELNNFTRNEVWHLVPRPNQNVVGTKWVFRNKQDEHGVVTRNKARLVAKGYSQVKGLDFGETYAPVARLESIRILLVYATYHGFKLYQMDVKSSFLNGPIKEEVYVEQLPGFEDNEYPNHVYKLSKALYGLKQAPRACYECLRDFLIANGFKVGKADPTLFTKTIANNLFICQIYVDDIIFGSTNKSTCEEFSRIMIQKFEMSMMGELKYFLGFQVKQLQEGTFISQMKYTQDILTKFGMKDAKPIKTPMGTNGHLDLDTGGYSDADWAGCKIDRKSTLGTCQFLGRSLVSWASMKQNSVALSTAEVEYIAAGHCCAQLLWMRQTLRDYGYKLTKVPLLCDNESAIHMVDNPVEHSRTKHIAIQYHFLRDHQQRGDIEIAYMSTKEQLADIFTKPLDEKTFTKLRHELNILDSRNFD

SEQ ID NO: 215791 - protein, 89 aa, Zea mays
  unsure (1)..(89): unsure at all Xaa locations
  Clone ID: MRT4577_12839C.1.pep
EQEKYKLIIVCRAKMCFNQLDYRSSYIXEXLYLLWPRAXHXXNXGGGGGGGXFXFXFSFFFLVGGVFFCFWGCLVLFFFFLLWFFGFCL

SEQ ID NO: 215792 - protein, 84 aa, Zea mays
  Clone ID: MRT4577_1283C.1.pep
MARRASLLLAAALLVAVAAAAVPPTCERIEASLQGTRWAAAVNDARRADPASPYTVAQYNSPFEFTGRVNEIWMLFDADDDASM

SEQ ID NO: 215793 - protein, 1226 aa, Zea mays
  unsure (1)..(1226): unsure at all Xaa locations
  Clone ID: MRT4577_128400C.1.pep
MSGEHAKKEIVTGGDKSTSHGKAPSGESGNKMKGAPSHTKSHWSGYKKKKMKKVVYYETDSSSPSTSGSDTLSITSKCHERKKFSKIPLRYPRNSKHTPLLSVPLGKPPVFDGENYCMWSDKMRHHLTSLHASIWDIVEFGAQVPSVGDEGYDSDEVAQIRHFDSQATTILLASLCREEYNKVQGLKSVKEIWDVLNTAHEWNEVTKITKREMIEGELGRFILNQGEEPQGMYNRLKTLVNQVRNLGSTKWDDHEMVKVILRSLVFRNPTQVQLIRGDPRYKLMSPEEVIGKFVSFELMIKGSKQIVEQGGTSTPEVQPVAFKATEEKKEESTSSRLPIDAPKHNNEEMELIIKSFRQILKQRRGKDYKPRSKKVCYKCGKLGHFIAKYPISSDSDRGDDKKEKRKEKKRYYKKKGGDAHVCREWDSDESSTDSSSNEDAVNIAVTKGLLFPNVGHKCLMAKDGKKKKEVEKCEKLISELSICHDTISNLRTENAKLIAKVEKLNVRDDSLVNLKHDNASLITKIDKLNESLSCLKIENNKLISKAKDLNVCNVSISNLRNENAMLHANIDELNACKPSTSSVDHVTICSRCRDINVDAIHDHIAMIKQQNDHIAKLDAKIAEHELENEKFKFARSMLYNGRRPGIKDDIGFQQGDNVKLNAPKKLSNSVKGKAPMVQDNEGYILYPASYPEHKIRRIHSRKSHSGSHHAFMYKSEASSSRQSTHAKLPKKKTPIASNEPNISLKTFDASYVLTNKSGKVVAKYVGGKHKGSKTCVWVPKVYASGGSSWIIDSGCTNHMTGEKKMFSSYEKNHDSQRAITFGDGNQDLGVTVFRRTDDSVSFKGVLEGQLYLVDFDRAELDTCLIAKTNMGWLWHRQLAHVGMKNLHKLLKGEHILGLTNVHFEKDRVCNACQAGKQVGVHHPHKNIMTTDRPLELLHMDLFGPIAYISIGGSKYYLVIVDDYSRFTWVFFLEEKSQTQETLKGFLRRAQNEFGLRIKKIRSDNGTEFKNSQIEGFLEDEGIKHEFSSPYNXQQNGVVERKNRTLLDMARTMLDEYKTSDRFWAEAVNTACYAINRLYLHRILKKTSYELLTGKKPNISYFRVFGSKCFILVKRGRKSKFAPKTVEGFLLGYDSNTRAYRVFNKSTGLVEVSCDVVFDETNGSQVEQVDLDEIGEEEAPCIALRNMSIGDVCPKESEEPPSAQDQPSSSTQAFPPTQNEDEAPVDE

SEQ ID NO: 215794 - protein, 1343 aa, Zea mays
  Clone ID: MRT4577_128401C.1.pep
MSGDHAKKEMETGEKPTTSHGSTSSEESRTKRKEKKKSSSNKGKEKKSSSHHKEKKEKSSSHKPHRKGDKHKRMRKVVYYETDTSSTSTSDSDAPSVTSKRQERKKFSKIPLHYPHTSRHTPLLSVPLGKPPTFDGEDYARWSDLMKFHLTSLHKSIWNVVEFGAQVPSVGDEDYDEDEVAQIEHFNSQATTILLASLNREEYNKVQGLKNAKEIWDLLKTAHEGDELTKITKRETIEGELGRFQLRQGEEPQDMYNRLKTLVNQVRNLGSKKWDDHEVVKVILRALIFLNPTQVQLIRGNPRYPLMTPEEVIGNFVSFECMIKGSKKINELDELSTSEAQPVAFKATEEKKEESTPSRQPIDASKLDNEEMALIIKSFRQILKQRKGKDYKSRSKKVCYKCGKPGHFIAKCPLSSDSDRDNDKKGKRREKKRYHKKRGDDAHVCREWDSDESSTESSSDEDAANIAVTKGLLFPNVGHKCLMAKDGKKKKVKSKSSTKYESSSDDNASDEEDNLLTLFANLNMEQKEKLNELISAIHEKDDLLDSQEDFLIKENKKHVKVKNAYALEVEKCQKLSSELSTCHDTIANLRNENASLIAKVESHVCDASIPNLRNDNNDLLAKIKELNDSLANIRVENENLIAKAKDFDVCNSIISDLRTKNDMLHAKIVELKSCKPSTSNVEHVSICTRCRDVDINAIHDHMSLIKQQNDHIALLDAKIAEHNLENEKFKFARSMLYNGRRPGIKDGIGFQRGDNVKLNAPPKNLSNFVKGKAPMPQDNKGYILYPAGYPESKIRRIHSRKSHSGPNHAFMYKGETSSSRQPTRAKLPRKKTPNASNDHAISFKTFDASYVLTNKSGKVYASGGTSWIIDSGCTNHMTGEKKMFSSYEKNQDPQRTITFGDGNQGLVKGVTVFRRSDDSIAFKGVLEGQLYLVDFDRAELDTCLIAKTNMGWLWHRRLAHVGMKNLHKLLKGEHILGLTNVHFEKDRICSACQAGKQVGTHHPHKNILTTDRPLELLHMDLFGLIAYISIGRRKISNQETLKGFLRRAQNEFGLRIKKIRSDNGTEFKNSQIEGFLEEEGIKHEFSSPYTPQQNGVVERKNRTLLDMARTMLDEYKTSDRFWAEAVNTACYAINRLYLHRILKKTSYELLTGRKSKFAPKTVEGFLLGYDSNTRAYSVFNKSSGQVEVSCDVVFDETNDSQVEQVDLDEIGIEQAPCIALRNMSIGDVCPKESKEPPNTQDQPSSSTQASPPTQNEDEAQVDEVEDQANEPLQDDDNDQGGDANDQDKEDEEQRPPHPRVHQAIQRDHPVDTILGVILKSVIKVDRVKPISLWPLLFIACDQH

SEQ ID NO: 215795 - protein, 265 aa, Zea mays
  unsure (1)..(265): unsure at all Xaa locations
  Clone ID: MRT4577_128402C.1.pep
MEPQWFKHPLALKSCXISSVCSHQILVGGSDAFARLYDRRMLPPLSSCQTKTRPPPCVKMFCPLHLANSKTYLHLTHVAFSPNGKEVLLSYSGEHVYLFDVDPDNLSSVRYTADYVREQLFXPFSQSTXKEHAKEKKTSVNTAPRNLSRDMCKKFMQVATRSLEIGKNLMHGIEACSEVLESTEPDIDDDMRHGFLCTRAALYLKRKWKNDVYMAIRDCNRARKIDATSYQAHLHMAEALLQLGRLXGASEYAEGSNRLLPPSCH

SEQ ID NO: 215796 - protein, 58 aa, Zea mays
  Clone ID: MRT4577_128403C.1.pep
DAWADFFSSLADPPGNVIFVAVADHQNTGEIHITIIFTGFIQSLQKSLLANPKRARIV

SEQ ID NO: 215797 - protein, 107 aa, Zea mays
  Clone ID: MRT4577_128404C.1.pep
GEGAYLIIDNERDHKAADYVDVLTDGDDNAATTLGAIYNQTRGTLRDVHDKHWLRLPRRDHLPDRDRQRGRSGLPPVRKTGASPTPRFRALPPPRPDGKRAQRHHAL

SEQ ID NO: 215798 - protein, 109 aa, Zea mays
  unsure (1)..(109): unsure at all Xaa locations
  Clone ID: MRT4577_128405C.1.pep
LFFFFFFGAGGGWGAAGTAAPVVPPTRPGSPLVVRRHRCTAGLLIPHPLGGGGAVGEFRHGGPXACPHIGRCGPPGGEGGTHGHTPWTCRPPTRRLPGCPAVWAGAFGH

SEQ ID NO: 215799 - protein, 73 aa, Zea mays
  Clone ID: MRT4577_128406C.1.pep
FFFFFFFFFFFFFFFFFFFFFWQQRTIPFVNGENLPRGGETGPTITESFLRSYLQPGAFFENIYNLIMGGKGK

SEQ ID NO: 215800 - protein, 89 aa, Zea mays
  Clone ID: MRT4577_128407C.1.pep
MNCLNTTVYIMVYIGDARHAQENLISTLLAYNFFAQAEALMVGKTPDQVKTEGAPDNLVPHKGLLGNRATTFILADKNTHATLGALIDY

SEQ ID NO: 215801 - protein, 198 aa, Zea mays
  Clone ID: MRT4577_128408C.1.pep
VLTIMLQLFDEGRLTDGKGKTIDCKDAIFIMTSNVASDEIAQHALQLRQEALEMSRNRIAENLGDVQISDKITISKNFKENVIRPILKAHFRRDEFLGRINEIVYFLPFCHSELIQLVNKELNFWAKRAKQRHNITLLWDREVADVLVDGYNVHYGARSIKHEVERRVVNQLAAAYEQDLLPGGCTLRITVEDSDKQL

SEQ ID NO: 215802 - protein, 712 aa, Zea mays
  Clone ID: MRT4577_128409C.1.pep
PTRPEVSNSETLNTVEMQQTISDRLNLPWNESEIVEKRARFLLKALARKRFLLLLDDVRKRFRLEDVGIPTPDTKSQSKLILTSRFQEVCFQMGAQRSRIEMKVLDDNAAWNLFLSKLSNEAFAAVESPNFNKVVRDQARKIFSSCGGLPLALNVIGTAVAGLEGPREWISAANDINMFSNEDVDEMFYRLKYSYDRLKSTQQQCFLYCTLFPEYGSISKEPLVDFWLAEGLLLNDRQKGDQIIQSLISACLLQTGSSLSSKVKMHHVIRHMGIWLVNKTDQKFLVQAGMALDSAPPAEEWKESTRISIMSNDIKELPFSPECENLTTLLIQNNPNLNKLSSGFFKFMPSLKVLDLSHTAITTLPECETLVALQHLNLSHTRIRLLPERLWLLKELRHLDLSVTAELEDTLNNCSRLLNLRVLNLFRSHYGISDVNDLNLDSLKALMFLGITIYTEKVLKKLNKTSPLAKSTYRLHLKYCREMQSIKISDLDHLVQLEELYVESCYNLNTLVADTELTASDSGLQLLTLSVLPVLENVIVAPTPHHFQHIRKLTISSCPKLKNITWVLKLEMLERLVVIHCDGLLKIVEEDSGDEAETTMLGQGHPSEEQEDKRIDGGQSVCKSDDNVHAELLNLRSIVLTDVKSLRSICKPRNFPSLETIRVEDCPNLRSIPLSSTYNCGKLKQVCGSVEWWEKLEWEDKEGKESKFFIPI

SEQ ID NO: 215803 - protein, 246 aa, Zea mays
  unsure (1)..(246): unsure at all Xaa locations
  Clone ID: MRT4577_12840C.1.pep
MEIGMASGLETLCGQAYGAKQYDKLGMHTYRAIVTLIAVSIPISLLWAFIGKLLILIGQDPLISREAGRYIVWLIPGLYAYAISQPLTKFLQSQSLIIPMLWSSIATLLLHIPLCWLLVFKTSMGYIGASLAISLSYWLNVMMLAAYIRYSDSCKETRSPPTVEAFKGVSVFLRLALPSALMXCGILPNPELHTSVLSICLTTITLMYTIPYGLGAAASTRVTDELGGGTPGRARSSVPGIMCIAV

SEQ ID NO: 215804 - protein, 205 aa, Zea mays
  Clone ID: MRT4577_128410C.1.pep
STKLIAATLLPAFLALHLHAPAAMATAAGSSNSNLFRDYIGALYNGVRFADVPVDPRARFDFILAFVIDYTTATEPPSPTNGRFNVFWQDTVLTPDAVAEVKRRNPKVRVAVSLGGATVNGRPVFFNVTSGVDSWVRNAVDSLTGIIRRYGLDGIDIDYEQFQVDPATFAECAGRLVAALKSNGVISFASIAPYGNADVQRYYRT

SEQ ID NO: 215805 - protein, 61 aa, Zea mays
  unsure (1)..(61): unsure at all Xaa locations
  Clone ID: MRT4577_128411C.1.pep
PSASPLSGSVLGQASLRGQDGDVVVIAGACATAHLCARGSVSSQLGSVSARVLCVFRXPQX

SEQ ID NO: 215806 - protein, 58 aa, Zea mays
  Clone ID: MRT4577_128412C.1.pep
KYRPTRQSQERFDIPTSGPTSNKYFYSDYTTSDSTYTLHLLTKSFLNDTLHYLINKFA

SEQ ID NO: 215807 - protein, 1854 aa, Zea mays
  Clone ID: MRT4577_128413C.1.pep
MSGDHAKKEMETGDKPTTSHGKATSEESRNKGKGKEKKASSHKSHRSGDKKKKMRKVVYYETDTSSPSTSGSDAPSITSKRHERKKFSKIPLRYPRIPKHTPLLSVPLGKPPTFDGEDYARWSDLMKFHLTSLHKSIWNVVEFGAQEYNKVQGLKSAKEVWDVLKTAHEGDELTKITKRETIEGELGRFRLRKGEEPQDMYNRLKTLVNQVRNLGSKKWDDHEMDKVILRSLIFLNPTQVQLIRGNPRYTLMTPEQVIGNFVSFEYMIKGSKKINELDDPSTSEAQPVAFKATEENKEESTSSRQPIDASKLDNEEMVLVIKSFRQILKQRRGKDYKSRSKKVCYNDSDRGDDKKGRRKEKKRYYKKKGGDAHVCREWDSDESSSDSSDDEDAANIAVTKGLLFPNVGHKCLMAKDGKRKKVKSNSSTKYESSSDDNVSDEEDSLRSLFANLNIAQKEKLNELVSAIHEKDDLLDSQEDCLIKENKKHVKVKKAYALEVEKCEKLSSELSTCREMIDNLRNVNASLNAKVDSHACNVSIPNSRDNNDELLARIEELNISLASLRLENENLIAKAKDFNVCNATISDLRSKNEILHAKVVELKSCKPPTSTVEHTSICTRCRDINIDAIHDHMALIKQQNDHIAKLDAKIAEHNLENEKFKFARSMLYNGRRPGIKDGIGFQRGNNVKLSAPPKRLSNFVKGKAPMPQDNEGYILYPDGYPESKIRRIHSRKSHSGPNHAFMYKGETSSSRQPTRAKLPKKTPSASNDHVISFKTFDASYVLTSKSGKVVAKFVGGKHKGSKTCVWVPKVLVSNAKGPKTVWVYASGGSSWILDSGCTNHMTGEKRMFSSYEKNQDPQRAITFGDGNQGVTVFRRSDDSIAFKGVLEGQLYLVDFDRAELDTCLIAKTNMGWLWHRRLAHVGMKNLHKLLKGEHILGLTNVHFEKDRICSACQAGKQVGIHHPHKNIMTTDRPLELLHMDLFGPIAYISIGGSKYCLVIVDDYSRFTWVFFLQEKSQTQETLKGFLRRAQNEFGLRIKKIRSDNGTEFKNSQIESFLEEEGIKHEFSSPYTPQQNGVVERKNRTLLDMARTMLDEYKTPDRFWAEAVNTACYAINRLYLHRILKKTSYELLTGKKPNISYFRVFGSKCFILVKRGRKSKFAPKTVEGFLLGYDSNTRAYRVFNKSTGLVEVSCDVVFDETNGSQVEQVDLDEIGNEEAPCIALRNMSIRDVCPKESEKPPSAQDQPSSSMQASPPTQNEDEAQVDEGQNQEDEPPQDDGNDQGGDAIDQEKEDEEEPIPPHPRVHQAIQRDHPVDIILGDIHKGVTTRSRVAHFCEHYSFVSSIEPHRVEEALQDSDWVVAMQEELNNFTRNEVWHLVPRPNQNVVGTKWVFRNKQDEHGVVTRNKARLVAKGYSQVEGLDFGETYAPVARLESIRILLAYATYHGFKLYQMDVKSAFLNGPIKEEVYVEQPPGFEDSEYPNHVYRLSKALYGLKQAPRAWYECLRDFLIANGFKVGKADPTLFTKTLENDLFVCQIYVDDIIFGSTNESTCEEFSRIMTQKFEMSMMGELKYFLGFQVKQLQEGTFISQTKYTQDILTKFGMKDTKPIKTPMGTNGHLDLDTGGKSVDQKVYRSMIGSLLYLCASRPDIMLSVCMCARFQSDPKESHLTAVKRILRYLAYTPKFGLWYPRGSTFDLIGYSDADWAGCKINRKSTSGTCQFLGRSLVSWASKKQNSVALSTAEAEYIAAGHCCAQLLWMRQTLRDYGYKLTKVPLLCDNESAIKMADNPVEHSRTKHIAIRYHFLRDHQQKGDIEISYVNTKDQLADIFTKPLDEQSFTRLRHELNILDSRNFFC

SEQ ID NO: 215808 - protein, 44 aa, Zea mays
  Clone ID: MRT4577_128414C.1.pep
PGFRFRHTAEDVVVQYLRTQAIGVPLPAERHPRLPRPLQTRHLG

SEQ ID NO: 215809 - protein, 1648 aa, Zea mays
  Clone ID: MRT4577_128415C.1.pep
MSGDHAKKEMVTGEKPVTSHGKAPSGESRNKGKEKESPSHKSHRSGEKKKKMRKVVYYEIDSLSPSTSGSDAPSVTSKRHERKKFSKIPLHYPRISKRTPLLSVPLGKPPIFDGEDYNMWSDKMRHHLTSLYTSIWNVVEFGVQVPSVGDEDYDSDEVAQIRHFNSQATTILLASLSREEYNKVQGLKSAKEIWDVLKTAHEGDEVTKITKRETIEGELGRFMLHQGEEPQAMYNRLKTLVNQARNLGSTKWDDHEMVKVILRSLVFLNPTQVQLIRGDPRYKIMSPEEVIGKFVSFELMIKGSKKIIEQGASSSVPEAQPVAFKATEEKKEDSTPSRIPIDASKLDNEEMTLIIKSFRQILKQRKGKDYKPRSKKWDSDKSSTDSSSDEDAANIAVNKGLLFPNVGHKCLMAKDDKKKKVKSKSSTKYATSSDEANSSDNEDDLFTLFANLNMQQKEKLNELISAIHDKDELLDSKEDFLIKENKKHVKVKNAYALEVKKCEKLTSELSTCHDIISNLRNENANLIAKVGKLDACDDSIVSLRNDNANLIAKIDKLNVSLSSLKIENEKLFAKAKDLDVCNASISNLRDENDILHAKIVESNICKPSTSSVEHVTICTRCRDVNVDAIHDHLSLIKQQNDHIATLTAKINEHDLENENFKFARSMLYNGRRPGIKDDIGFQQGDNVKLNAPPKRLSNFVKVKAPMVQDNEGYILYPAGYPKHKIRRIHSRKSHSGPNHAFMYKSEASSSRQSTHAKLSKKKTPKASNDHNVSFRTFDASYVLTNKSGKVVAKYVGGKHKGSKTCVWVPKVLVSNVKGPKTVWVYASRGSSWIIDSGCTNHMTGEKRMFSSYEKNQDPQRAITFGDGNQGVEKSQTQGTLKGFLRQAQNEFGLRIKKIRSDNGTEFKNSQIEGFLVEEGIKHEFSSPYTPQQNGVVERKNRTLLDMARTMLDEYKTSDRFWVEVVNTACYAINRLYLHRILKKTSYELLTGRKSKFAPKAVEGFLLGYDSNTRAYRVFNKSTGLVEVSCDIVFDETNGSQVEQVDLDELDDEEAPCIALRNMSIGDVCPKESEEPIQAQDQPSSSMQASPPTQDEDEAQADEGEDQEDEPPQEEDKDQGGDANDQDKEDEQNPRPPHPRPHRVEEALQDSDWVMAMQEELNNFKRNEVCHLVPRPNQNVVGTKWVFRNKQDEHGVVTRNKARLVAKGYSQVEGLDFGETYAPVARLESIRILLTYATHHDFKLYQMDVKSAFLNGPIKEEVYVEQPPGFEDSEYPNHVYKLSKALYGLKQAPRAWYECLRDFLITNGFKVGKADPTLFTKTIENDLFVCQIYVDDIIFGSTNKSICEEFSRIMIQKFEMSMMGDLKYFLGFQVKLLQEGTFISQTMYIQDILTKFGMKDAKPIKTPMGTNGHLDLDTGGKSVDQKVYWSMIGSLLYLCASRPDIMLSVCMCGRFQADPKEVHLRAVKRILRYLVQTPKFGLWYPKGSSFDLLGYSDADWAGCKINRKSTSGTCQFLGRSLVSWASKKQISVALSTAEAEYIAVGHCCAQLLWMRQTLRDYGYKFSKVPLLCDNESAIRMADKPVEHRRTKHIAIRYHFLRDHQQKGDIEIAYINTKDQLADIFTKPLDEQSFTKLRNELNILDSRNFD

SEQ ID NO: 215810 - protein, 110 aa, Zea mays
  unsure (1)..(110): unsure at all Xaa locations
  Clone ID: MRT4577_128416C.1.pep
DAWVMDQLTELTXKGCGCLLVVDEEHHLIGTFTDGDLRRTLKASGPAIFSLTVGEMCNRNPRTITAEAMAVEAMEKMEAPPSPVQFLPVVNENNVVCGIITLHGLVSAGL

SEQ ID NO: 215811 - protein, 114 aa, Zea mays
  Clone ID: MRT4577_128417C.1.pep
PSGSFTRFKPPPGVGSPKNPSNPSVGALKKKWWWRNPGALVGGFPPINLLLPIFFFFSCGKWVPPWLRKIHHPEGFFSAQSDDTPDFAPQFAIPKGVDPKFKWIGPPEKKRKVC

SEQ ID NO: 215812 - protein, 1577 aa, Zea mays
  Clone ID: MRT4577_128418C.1.pep
MSGDHTKREMETGDKPTTSHGSTSSEESRTKRKEKKKDSSNKGKGKEKKSSSHKSHRRGDKNKRMRKVVYYETDTSSTSTSDSDVPSVTSKRQERKKYSKIPLRYPHISKRTSLLSVPLGKPPVFDDEDYNMWSDKMRHHLTSLHTSIWNVVEFGVQVPSVGDEDYDSDEVAQIHHFNSQATTILLASLSREEYNKVQGLKCAKEIWDVLKTAHEGDEVTKITKWETIEGELGRFMLHQGEDPQAMYNRLKTLVNQVRNLGSEKWDDHEMVKVILRSLVFLNPTQVQLIRGDPRYKLMSPEEVIGKFVSFELMIKGSKKIIEQGTSSTPEAQPVAFKATEEKKEESTSSRQLIDASKLDNEEMTLIIKSFRQILKQRRGKDYKPRSKKVCYKCGKPGHFIAKCPLSSDSDRDDDKKGRRREKKRYHKKKGGDAHVCREWDSDESSTDSSFDEDATNIAITKGLLFPNVGHKCLMAKDSKRKKVKSKSSTKYESSSDDNASDEEDNLRTLFVDLNMQQKEKLNELISVIHEKDDLLDSQEDFLIKENKKHVKVKNAYALEVEKCEKLSSELSTCHNTIANLRNENAKLIAKVDSHVCDVSIPNLRNDNDDLLAKIEELNISLASLRVENEKLIAKAKELDVCNVTISDLRDNNDILRAKIVELNSCKPSTSTIEHVSICTRCRDVDIDAIHDHMVLIKQQNDHIAKLDAKIAEHNLENEKFKFARSMLYNGRRPGIKDGIDFQRGDNVKLSAPPKRLSNFVKGKAPMPQDNEGYILYSAGYPESNIRRIHSRKSHSGPNHAFMYKGETSSSRQPTRAKLPKKKTPNASNDHDISFKTFDASYVLTNKSGKVYASGGSSWIIDSGCTNHMTGEKKMFSSYEKNQDPQRAITFGDGNQGLVKGVTVFRRSDDSIAFKGVLEGQLYLVDFDRAELDTCLIAKTNMGWLWNRRLAHVGMKNLHKLLKEEHILGLTDVHFEKDRICSACQAGKQVGVHHPHKNIMTTDRPLELLHMDLFGPIAYISIGGMERKNRTLLDMERTMLDEYKTPDRFWAEAVNTACYAINRLYLHQILKKTSYELLTGKKPNISYFRVFGSKCFILVKRGRKSKFAPKTVEGFLLGYDSNTRAYRVFNKSSGLVEVSCDVVFDETNGSQVEQVDLDEIGDEEAPCIALRNMSIGDVCPKESKEPPNAQDQPSSSTQASPPTQNEDEAQVDGGEDQSGEPPQDDDNDQGEDANDQDKEDDEPRPPHPRVHQAIQRDHPVDTILGDIHKGVTTRSRVAHFCEHYSFVSSIEPHRVEEALQDSDWVMAIQEELNNFIRNEVWHLVPRPNQNVVGTEWVFRNKQDEHGVVTRNKARLVAKGYSQVEGLDFGETYAPVARLESIRILLAYATYHGFKLYQMDVESAFLNGPIKEEVYVEQPPGFEDSEYPNYVYKLSKALYRLKQSPRAWYECLRDFLIANGFKVGKADPTLFTKTLANDLFVCQIYVDDIIFVSTNESTCEEFSRIMTQKFEMSMMGELKYFLGFQVKQLQEGTFISQTKYVQDILTKFGMKDAKPIKTPMGTNGHLDLDTGVRAMESSE

SEQ ID NO: 215813 - protein, 384 aa, Zea mays
  Clone ID: MRT4577_128419C.1.pep
MKSITCMPACFQTARNQIRPPPDISPRRGISSNAPLTAPMGSLPVPASTECTPQGRATVSASDLAPLFSAQRRHLDHFFDRLDMSQAAAFAQVLLDAPGAVFFTGVGKSGIVARKTAQTLASLGFARAGFLAPVDALHGDIGALFPGDVLVLLSKSGASDELLALVPCARAKGAYLVSVTSAASGADCPLAAACDLNVHLPLQGEVCPFGLAPVTSTAIQMVFGDTVIAAIMEARRLSRDQYASNHPAGKIGKTLIFKVKDVMKKQNELPLCKEGDMIMDQLTELTSKGCGCLLVVDEEHHLIGTFTDGDLRRTLKASGPAIFSLTVGEMCNRNPRTITADAMAVEAMEKMESPPSPVQFLPVVNDNNVVCGIITLHGLVSAGL

SEQ ID NO: 215814 - protein, 99 aa, Zea mays
  Clone ID: MRT4577_12841C.1.pep
HTQFDFVSFSPTCYRSRHVDYQVIFHALPTSPHFSRYFPTTFSDQLSQSIPLSLSLLNQPLFPQITLQFRPVHHIHVISDSLNVSFILRLNHLNVLLLH

SEQ ID NO: 215815 - protein, 60 aa, Zea mays
  Clone ID: MRT4577_128420C.1.pep
MAKSKNDTAHNHSSKAHKNGIKKPKHHRQTSTKGMDPKYLTNFKYSMKGSSSSCDGESEE

SEQ ID NO: 215816 - protein, 1321 aa, Zea mays
  unsure (1)..(1321): unsure at all Xaa locations
  Clone ID: MRT4577_128421C.1.pep
MPGASAKREIGTGEKPATSHGKAPFGESANKVKGSPSHNKSRRSGDKKKKIKRVVYYETDSSSPSTSGSDTLSVTSKRHERKKFSKIPLRYPRISKRTPLLSVPLGKPPMFDGEDYNMWSDKMRHHLTSLHTSIWDVVEIGVQVPSPGDEDYDSDEVAQIRHFNSQATTILLASLSREEYNKVQGLKSAKEIWDVLKTTHEGDEVTKITKRETIEGELGRFRLRQGEEPQEMYNRLKTLVNQVRNLGSKKWDDHEMVKVILRSLVFLNPTQVQLIHGDPRYKLMSPEEVIGKFVSFELMIKCSKQIIERGATSTPEVQPVAFKAMEEKKEEYTSSRLPIDASKLDNEEMALIIKSFRQILKQRKERDYKPHSKKVCYKCGKPSHFIAKCPLSSDSDRGDDKKGRRKEKKKYYKKKGGDAHVCREWDSDESSTDSSFDEDTANIAFNKGLLFPNVGHKCLMARDDKMKIKSRASTKYATSSEEENSSDDEDNLLALFTNLNMQQKEKLNELIAGVTVFRRSDDSVAFKGVLEGQLYLVDFNRAELDTCLIAKTNMGWLWHRRLAHVGMKNLHKLLKGEHILGLTNVHFEKDRICSACQAGKQVGVHHPHKNIMTTDRPLELLHMDLFGLIAYISIGGSKYCLVIVDDYSRFTWVFFLQEKSQTQETLKGFLRRTQNEFGLRIKKIRSNNGTEFKNSQIEGFLEDEGIKHEFSSPYTPQQNGVVERKNRTLLDMARTMLDEYKTSDRFWAEAVNIACYSINRLYLHRIIKKTSYELLTGKKPNVSYFRVFGSKCFILVKRGRKSKFAPKAVKGFLLGYDSNTRAYRVFNKSTGLVEVSCDIVFDETNGSQVEQVDLDELDDEEAPCIALRNMSIGDVCPKESEEPPHAQDQPSSSNQASPPTQDEDQAQDDENEDQEDEPPQEEGNDQGGDAHDQDKEDDEGPRPPHPRVHQVIQRDHPVNSILSNIHKGVTTRSCVAHFCEHYSFVSSIEPYRVEDALWDLDWVLAMQEELNNFTRNEVWHLVPRPNQNVVGTKWVFHNKQDEHGVVTRNKAQLVAKGYSQVEGLDFGETYAPVARLESIRILLAYASYHGFKLYQMDVKSAFLNGPIKEEVYVEQPPGFEDXMSMMGELKYFXGFQVKQLQEGTFISQTKYTQDILTKFGMKDVKPIKTPMGTNGHLDLNTGGCKIDRKSTSRTCQFLGRSLVSWASKKQNSVALSTAEAEYIAAGHCCAQLLWMRQTLRDYGYKLTKVPLLCDNESAIRMADNPVEHSRTKHIAIQYHFLRDHQQRGDIEIAYVSTKEQLADIFTKPLDEKTFTXLRHEL

SEQ ID NO: 215817 - protein, 91 aa, Zea mays
  Clone ID: MRT4577_128422C.1.pep
VFNYLLGTLSRIFTTLQEVDDNLILYSIVAAFVLNAVLAIQMVYYWNSPAKKSAVPAKQNKKAVANSPAAAQASGVSPRPAGKSPTTRRRG

SEQ ID NO: 215818 - protein, 899 aa, Zea mays
  Clone ID: MRT4577_128423C.1.pep
MSGDHAKKEMETGDKPTTSQGSTSSEESRTKRKEKKKDSSKRKEKRFSSSHHKEKKEKSSSHKSHRKGDKHKRMRKVVYYETGTSSTSTSDSDAPSVTSKRQERKKFSKIPLHYPRTSRHTPLLSVPLGKPPTFDDEDYARWSDLMKFHLTSLHKSIWNVVEFGAQVPSVGDEDYDEDEVAQIEHFNSQATTILLASLSKEEYNKVQGLKNAKEIWDLLKTTHEGDELTKITKRETIEGELGRFSLRQGEEPQDMYNRLKTLVNQVRNLGSKKWDDHEVVKVILRSLIFLNPTQVQLIRGNPRYTQMTPEEVIGNFVSFECMIKGSKKINELDEPSTSEAQPVAFKATEEKKEESTPSRQPIDASKLDNEEMALIIKSFRQILKQRKGKDYKSRSKKVCYKCGKPGHFIAKCPLSSDSDRDNDKKGKRKEKKRYHKRRGDAHVCREWDSDESSTDSSSDEDAANIAVTKGLLFPNVGHKCLMAKDGKRKKVKSRSSTKYETSSDEDDASNEEDNLRVLFANLNMEQKEKLNELISAIHEKDDLLHSQEDFLIKENKKHVKVKNAYALEVEKCEKLSSELSTCHETIDNLRNENTRLNAKVDSHVCDVSIPNPRDNNDDLLARIEELNISLASLKIVELNSCKPSTSSVEHVSICTRCRDVDINAIHDHMTLIKQQNDHIAILDAKIAEHNLENEKFKFARSMLYNGRHPGIKDGIGYQRGDNVKLNAPPKNLSNFVKGKAPMPQDNEGYILYPAGYPESKIRRIHSRKSHSGPNHAFMYKGETSSSRQPTRAKLPKKKTPNASNDHDISFKTFDASYVLTNKSGKVYASGGTSWIIDSGCTNHMTGEKKMFSSYEKNQDPQRAITFGDGNQGLVKGVTVFRRSDDSIAFKGVLEGQLYL

SEQ ID NO: 215819 - protein, 1725 aa, Zea mays
  unsure (1)..(1725): unsure at all Xaa locations
  Clone ID: MRT4577_128424C.1.pep
VPSIGDEDYDEDKVAQIEHFNSQATTILLASLSREEYNKVQGLKSAKEVWDVLKTAHEGDELTKITKRETIEGELGHFRLRQGEEPQDMYNRLKTLVNQVRNLGSKKWDDHEVVKVILRSLIFLNLTQVQLIRGNPRYTLMTHEEVIGNFVSFEFMIKGSRKINELDGPSTSEAQSVAFKATEEKKEESTPSRTPIDASKLDNEEMALVIKSFRQILKQRRGKDYKPRSKKVCYKCGKPGHFIAKCPISSDRGDDKKGRRKEKKKYYKKKGGNAHVCREWDSDESSSDSFDDEDAANIAITKGLLFPNVGHKCLMAKDGKKKKVKSKSSTRYESSSDNNASDEEDNLRTLFANLNMQQKEKLNELISAIHEKDDLLDSQEDFLIKENKKHVKVKNAYSLEVEKCEKLSRKCALGSFLSILVIECQHKCLNVNLCPWMNKVQIKSKGALTIPNLRNDNDNLIAKIEELNITLASLRNENEKLLAKAKELDVCNATISDLRSKNDMLHAKVEELNVYKPSTSIVSHVSICTRCRDVNIDAIHDHIAMIKQQKDHIAKLDAKIAEHELENEKFKFARSMLYSGRRPGIKDVIGFQQGGNVKLNAPKRLSNFVKGKAPMPQDNEGYILYPAGYPEDKIRRIHAKKTHPISHHAFIYKNEASSSRRSTHVKMPKKKSPIASNNHNISFKTFDASYVLTNKXAKXAKYVGGKHKGSKTCVWVPKVLVSNAKGPKTIWVYASGGSSWIIDSGCTNHMTGEKKMFSSYEKNEDPQRAITFGDGNQSLEGLDKIAISPDHSISNVFLVDSLDYNLLSVSQLCQMGYNCLFTDVGVTVFRRSDDSIAFKGVLEGQLYLVDFDRAKLDTCLIAKTSPCWLWHRRLVHVGMKNLHKLLKGEHILGLTNVHFEKDRICSACQAGKQVGVHHPHKNIMTTDRPLELLHMDLFGPIAYISIGGSKYCLVIVDDYSRFTWVFFLQEKSQTQETLKGFLKRAQNEFGLRIKKIRSDNGTEFKNSQIEGFLEEEGIKHEFSSPYTPQQNGVVERKNRTLLDMARTMLDEYKTSDRFWAEAVNTACYAINRLYLHRILKKTSYELLTGKKPNISYFKVFGSKCFILVKRGRKSKFAPKTVEGFLLGYDSNTRAYRVFNKSSGLVEVSCDVVFDETNGSQVEQADLDEIGEEQAPCTALRNMSIGDVCPKESEEPPHAQDQPSSSTQASPPTQIEDEAQGVEQEDEPPQNDGNDQGGDANDEDKEDEHPRPPHPRVHQAIQRDHPVDTILGDIHKGVTTRSRVAHFCEHYSFVSSIEPHRVEEALQDSDWVVAMQEELNNFTRNEVWHFVPRPNQNVVGTKWVFRNKQDEHGVVTRNKARLVAKGYSQVEGLDFGETYAPVARLESIRILLAYATYHGFKLYQMDVKSAFLNGPIKEEVYVEQPPGFEDSEYPNHVYRLSKALYGLKQAPRAWYECLRDFLIANGFKVGKADPTLFTKTLDNDLFVCQIYVDDIIFGSTNESTCEEFSRIMTQKFEMSMMGELKYFLGFQVKQLQEGTFLSQTKYTQDILSKFGMKDAKPIKTPMGTNGHLDLDTGGCKINRKSTSGTCQFLGRSLVSWASKKQNSVALSTAEAEYIAAGHCCAQLLWMRQTLQDYGYKLTKVPLLCDNESAIKMADNPVEHSRTKHIAIRYHFLRDHQQKGDIEISYINTKDQLADIFTKPLDEQTFTKLRHELNILDSRNFFC

SEQ ID NO: 215820 - protein, 62 aa, Zea mays
  Clone ID: MRT4577_128425C.1.pep
VPCLFLSSFLREPPLFFLHCNAVSFQSFTWCKPVPVSVCRLFSPVAFFFCSCSTLQQNPYPI

SEQ ID NO: 215821 - protein, 1087 aa, Zea mays
  Clone ID: MRT4577_128426C.1.pep
MAHRTVRKRCKPISLSKRYYKKGGDAHVCREWDSDESSTDSSSDEDAANIVVNKGLLCPNVGHKCLMAKDDKKKKVEKLDVCDDSIVSLINDNASLITKIDKLNASLSSLKIENEKLIAKAKDLNVCNVSISNLKNKNAILHAKIDELNACKPSTSSVDHVTICTRCRDINVDAIHDHLALIKQQNDHIAQLSAKINEHDLENEKFKFARSMLYNGRRPGIKDGIGFQQGDNVKLKTPKRLSNFVKGKAPMAQDNEGYILYPTGYPEHKIRRIHSRKSHSGSHHAFIYKSEASSSRQSTHVKLPKKKSPIASNEPNISFKTFDASYVLTNKSGKVVAKYVGAKHKGSKTCVWVPKVYASGGSSWIIDSGCTNNMTGEKRMFSSYEKNHDPQRAITFGDGNQGLEKSQTQVTLKGFLRRAQNEFNLRIKKIRSDNGTEFKNSQIEGFLEDEGIKHEISSPYTPQQNGVVERKNRTLLDMARTMLDEYKTSDRFWAEAINTACYAINRLYLYRILKKTSYELLTGKKPNVSYFRVFGRKCFIIYKRGRKSKFALKAVESFLLGYGSNTRAYRVFNKSTGLVEVSCDIVFDETNDSQVEQVDLDELDDEEAPCVALRNMSIGDVCPKESEEPPRAQDQPSSSNQASPPTQDEDQAQDDDNEDQEEPPQEEDNDQGGDANDQDKEDDEGPRPPHPRVHQAIQRDHPVNSILGDIYKGVTTRSHVAHFCEHYSFVSSIEPYRVEDTLRDSDWVLAMQEELNNFTRNELYQMDVKSAFLNGPIKEEVYVEQPLGFEDSEYPNHVYRLSKALYGLKQAPRAWYECLRDFLIANGFKVGKADPTLFTKTLDNDLFVCQIYVDDIIFGSTNESTCEEFSRIMTQKFEMSMMGELKYFLGFQVKQLQEGTFISQMKYTQDILTKFGMKDAKPIKTPMGTNGHLDLDTGGCKINRKSTSGTCQFLGRSLVSWASKKQNSVALSTAEAEYIAAGHCCAQLLWMRQTLRDNGYKLTKVPLLCDNESAIRMADNPVEHSRTKHIAIRYHFLRDHQQKEDIEIAYINTKDQLADIFTKPLDEQTFTKLRHELNILDSRNFFC

SEQ ID NO: 215822 - protein, 2597 aa, Zea mays
  unsure (1)..(2597): unsure at all Xaa locations
  Clone ID: MRT4577_128427C.1.pep
MSGEHAKKEMETGDKPATSHGKASSEESHKKGKGKEKKASSHKSHRSGDKKKKMRKVVYYETDTSSPSTSGSDAPFVTSKRHERKKFSKIPLHYPRTSRHTPLLSVPLGKPPTFDGEDYARWSELMKFHLTSLHKSIWNVVEFGAQVPSVGDEDYDEDEVAQIEHFNSQATTILLASLSREEYNKVQGLKRAKEVWDVLKTAHEGDELTKITKRETIEGELGRFRLRQGEEPQDMYNRLKTLVNQVRNLGSKKWDDHEMVKVILRSLIFLNPTQVQLIRGNPRYTLMTPEEVIGNFVSFEFMIKGSRKINELDGPSTSEAQPIAFKATEEKESTPSRTPIDASKLDNEKMALVIKSFRQILKQRRGKDYKPRSKKVCYKCGKPGHFIAKCPISSDNDRGDDKKGRRKEKKRYYKKKGGDAHVCREWDSDESSSDSSDDEDAANIVVTKGLLFPNVGHKCLMAKDGKKKKVKSKSSTRYESSSDDNASDEEDNLRTLFANLNMQQKEKLNELISVIHEKDDLLDSQEDFLIKENKKHVKVKNAYALEVEKCKKLSSELSTCHETIDNLRNENSNLLAKVDSIACNVSIPNLRNDNDDLLAKIEELNMSLASLRIENEKLLAKAKELDVCNATISDLRTKNDILHAKVVELKSCKPSTSIVEHTSICTRCRDVNIDAIHDHMALIKQQNDHIAKLDAKIAEHDLENENFKFARSMLYRGRRPGIKDGIGFQQEGNVKINAPPKKLSNFVKGKAPMSQDNEGYILYPVGYPESKIRRIHSRKSHSGPNHAFMYKGETSSSRQPTRAKLPKKKTPSASNDHDISFKTFDASYVLTNKSGKVYASGVSSWIIDSRCTNHMTREKKMFSSYEKNQDPQRAITFGDGNQGLVKGVTVFRRSDDSIAFKGVLEGQLYLVDFDRAELDTCLIAKTNMGWLWHRRLAYVGMKNLHKLLKGEHILGLTNVHFEKDREKSQTQETLKGFLRRTQNEFGLRIKKIRSDNGTEFKNSQIEGFLEEEGIKHEFSSPYMPQQNGVVERKNRTLLDMTRTMLDEYKTSDQFWAEAVNTACYAINRLYLHRILKKTSYELLTGKKPNISYFRVFGSKCFILVKRGRKSKFAPKTVEGFLLGYDSNTRAYRVFNKSSGQVEVSCDVVFDETNGSQVEQVDLDEIGNEEAPRIALRNMSIGDVCPKESEEPPNAQDQPSSSTQASPPTQNEDEAQVDEIEDQANEPPQDNGNDQGGDANDQDKEDEEQRPPHPRVHQAIQRDHPVDTILGDIHKGVTTRSRVAHFCEHYSFVSSIEPHRVEEALQDSDWVVAMQEKLNNFTRNEVWHLVPRPNQNVVGTKWVFRNKQDEHGVVTRNKARLVAKGYSQVEGLDFGETYAPVARLESIRILLAYATYHGFKLXYQMDVKSAFLNGPIKEEVYVEQPPDFEDSEYPNHVYKLSKALYGLKQAPRAWYECLRDFLITNGFKVGKADPTLFTKTLENDLFVCQIYVDDIIFGSTNESTCEEFSRIMTQKFEMSMMGEFKYFLGFQVKQLQEGTFLSQTKYTQDILNKFGMKDAKPIKTPMGTNGHLDLDEGGKSVDQKFRPIHPPSRRLSVGDEDYDEDEVAQIEHFNSQATTILLASLSREEYNKVQGLKSAKEVWDVLKTAHEGDELTKITKRETIEGELGRFRLRQGEEPQDMYNRLKTLVNQVRNLGSKKWDDHEVVKVILRSLIFLNPTQVQLIRGNPRYTLMTPEEVIGNFVSFEFMIKGSRKINELDDPSTSEAQPVAFKATEEKKEESTPSRTPIDASKLDNEEMTLVIKSFRQILKQRRGKDYKPRSKKVCYKCGKPGHFIAKCPLSSDSDRGDNKKRRRKEKKKYYKKKGGDAHVCREWDSDESSSDSSDDEDAANIAVTKGLLFPNVGHKCLMAKDDKKKKVKSKSSTRYESSSDDNASDEEDNLRTLFANLNMQQKEKLNELISAIHEKDDLLDSQEDFLIKENKKHVKVKNAYALEVEKCEKLSSELRTCHETIDNLRNENANLLAKVDSNVCDVSIPNLRNDNDNLLAKIEELNTSTLASLRIENEKLLAKAKELDVCNVTISDLRTKLDAKIAEHDLENEKFKFARSMLYRGRRPGIKDDIGFQQGGNVKLNAPPKKLSNFVKGKAPMPQDNEGYILYPAGYPNNKIRRIHSRKSHSGPNHAFMYKGETSSSRQPTRAKLPKKKTPSASNDHDISFKTFDASYVLTNKSGKLVAKYVGGKHKGSKTCVWVTKVLVSNAKGPKTIWEKSHTQETLKGFLRWAQNEFGLRIKKIRSDNGTEFKNSQIEGFLEEEGIKHEFSSPYTPQQNGVVERKNRTLLDMARTMLDEYKTSDRFWAEAVNTACYAINRLYLHRILNKTSYELLTDKKPNISYFRVFGSKCFILVKRGRKSKFAPKTVEGFLLGYDSNTKAYRVFNKSSGQVEVSCDVVFDETNGSQVEQVDLDEIGVEEAPCIALRNMSIGDVCPKESEEPPNAQDKPSSSTPASPPTQNEDEAQVDEVEDQANEPPQDDGNDQGGDANDQDKEDEEPRPPHPRVHQAIQRDHPADTILGDIHKGGRGSTTRFGLGGGDARGAQQLH

SEQ ID NO: 215823 - protein, 54 aa, Zea mays
  Clone ID: MRT4577_128428C.1.pep
RREWPPRFLHRWWGGLPISYPLPSPAVLKHFYFTTLAFFITLIIITSSPLFHFI

SEQ ID NO: 215824 - protein, 2485 aa, Zea mays
  Clone ID: MRT4577_128429C.1.pep
MSGDHAKKEMETGEKPTTSHGSTSSEESRTKRKEKKKSSSNKGKEKKSSSHHKEKKERSSSHKPHRRGDKHKRMRKVVYYETDTSSTSTSGSDAPSVTSKRQERKKFSKIPLHYPRISKNAPLLSVPLGKPPTFDGEDYARWSDLMRFHLTSLHKSIWDVVEFGAQVPSVGDKDYDEDEVAQIEHFNSQATTILLASLSREEYNKVQGLKSAKEVWDVLKTAHEGDELTKITKRETIEGELGRFRLRKGEEPQHMYNRLKTLVNQVRNLGSTKWDDHEMVKVILRSLIFLNPTQVQLIRGNPRYTKMTPEEVIGNFVSFECMIEGSRKINELDDPSTSEAQPVAFKATEEKKEEATPSRQPIDASKLDNEEMALVIKSFRQILKQRRGKDYKSRSKKVCYKCGKPGHFIAKCPISSDSDRGDDKKGRRKEKKKYYKKKGGDAHVCREWDSDESSSDSSDDEDAANIAVTKGLLFPNVGHKCLMAKDGKRKKVKSNSSTKYESSSDDNDSDEEDNLRVLFANLNMEQKEKLNELISAIHEKDDLLDSQEDCLIKENKKHVKVKKAYALEVEKCEKLSSELSTCREMIDNLRNENASLNAKVDSHVCIVSTSNPKDNNDDLLARIEELNISLASLRVENKILIAKAKDYDVCKVTISDLRDKNDILHAKIVELNSCKPSTSIVEHVSICTRCRDVDVNAIHDHMALIKQQNDHIAKLDAKIAEHNLENEKFKFARSMLYNGRRPGIKDGIGFQRGDNVKINAPPKNLSNFVKGKAPMPQDNEGYILYPAGYPESKIRKIHSRKSHSGPNHAFMYKGETSSSRQPTRAKLPRKKTPNASNDHAISFKTFDASYMLTNKSGKVYASGGSSWILDSGCTNHMTGEKKMFSSYEKNQDPQRAITFGDGNQGVTVFRRSDDSIAFKGVLEGQLYLVDFDRAELDTCLTAKTNMGWLWHRRLAHVGMKNLHKLLKGEHILGLTNVHFEKDRICSACQAGKQVGAHHPHKNIMTTDRPLELLHMDLFGPIAYISIGGSKYCLVIVDDYSRFTWVFFLQDKSHTQETLKGFLRRAQNEFGLRIKKIRSDNGTEFKNSQIEVERKNRTLLDMARTMLDEYKTPDRFWAEAVNTACYAINRLYLHRILKKTSYELLTGKKPNISYFRVFGSKCFILVKRGRKSKFAPKTVEGLLLGYDSNTRAYRVFNKSTGLVEVSCDVVFDETNGSQVEQVDLDEIGEEQAPCIALRNMSIGDVCPKEFEEPPNTQDQPSSSTQASPPTHDEDEAQVDEGEDQKDEPPQDDGNDQGGDANDEDKEDEQPRPPHPRVHQAIQRDHPVDTILGDIHKGVTTRSRVAHFCEHYSFVSSIEPHRVEEALQDSDWVVAMQEELNNFTRNEVWHLVPRPNQNVVGTKWVFRNKQDEHGVVTRNKARLVAKGYSQVEGLDFGETYAPVARLESIRILLAYATYHGFKLYQMDVKSAFLNGPIKEEVYVEQPPGFEDSKYPNHVYKLSKALYGLKQAPRAWYECLRDFLIANGFKVGKADPTLFTKTLDNDLFEFSRIMTQKFEMSMMGELKYFLGFQVKQLQEGTFICQTKYTQDILTKFGMKDAKPIKTPMGTNGHLDLNTGGKSVDQKATFNSDRGDDKKGKRREKKKYYKKKGGDAHVCREWDSDESSTESSSDEDAANIAVTKGLLFPNVGHKCLMAKDGKRKKVKSKSSTKYESSSDDNASDEENNLRTLFANLNMEQKEKLNELISAIHEKDDLLDSQEDFLIKENKKHVEKCEKLSSELSTCHDTITNLRNENASLNAKVDSHVCNVSIPNLRNDNDDLLAKIEELNISLASLRVENENLIAKAKELDVCNVTISDLRDNNDILRAKIVELNSCKPSTSSVEHVSICTRCRDVDINAIHDHMTLIKQQNDHIAILDAKIAEHNLENEKFKFARSMLYNGRHPGIKDGIGYQRGDNVKLSAPPKRLSNFVKGKAPMPQDNEGYILYPAGYPESKIRKIHSRKSHSGPNHAFMYKGETSSSRQPTRAKLPKKKTPSASNEHDISFKTFDASYVLTNKSGKVYASGGSSWILDSGCTNHMTGEKKMFSSYEKNQDSQRAITFGDGNQGVTVFRRSDDSIAFKGVLEGQLYLEKSQTQETLKGFLRRAQNEFGLRIKKIRSDNGTEFKNSQIEGFLEEEGIKHEFSSPYTPQQNGVVERKNRTLLDMARTMLDEYKTPDRFWAEARGRKSKFAPKTVEGFLLGYDSNTRAYRVFNKSSGLVEVSCNVVFDETNGSQVEQVDLDEIGEEQAPCIALRNMSIGDVCPKEFEEPPNTQDQPSSSTQASPPTQNEDEAQVDEGEDQRDEPPQDNGNDQGGDASDQDKEDEQPRPPHPRVHQAIQRDHPVDTILGDIHKGVTTRSRVAHFCEHYSFVSSIEPHRIEEALQDSDWVMAMQEELNNFLRNEVWHLVPRPNQNVVGTKWVFRNKQDEHGVVTRNKARLVAKGYSQVE

SEQ ID NO: 215825 - protein, 250 aa, Zea mays
  unsure (1)..(250): unsure at all Xaa locations
  Clone ID: MRT4577_12842C.1.pep
MEVRVPLLPQHILRNGDGREKKCGGGGVRRWRELLAREAGKVGCVALPMAAVSVSQYAVQVASNMMVGHLPGVLPLSASAIATSLATVSGFSLLIGMASGLETLCGQAYGAKQYDKLGMHTYRAIVTLIAVSIPISLLWAFIGKLLILIGQDPLISREAGRYIVWLIPGLYAYAISQPLTKFLQSQSLIIPMLWSSIATLLLPFPLCWLLVFKTSMGYIGASLAIXLSYWVNVMMLAAYIRYSDSCKETA

SEQ ID NO: 215826 - protein, 937 aa, Zea mays
  unsure (1)..(937): unsure at all Xaa locations
  Clone ID: MRT4577_128430C.1.pep
MTGEKKXFSSYEKNQNPQRAITFGDENQGLVKGLGKIAISPDHSISNVFLVDSLDYNLLFVSQLCKMGYICLFTDIGVTVFRRSDDSVAFKGVLEGQLYLVDFNRAELDTCLIAKTNMGWLWHHRLVHVGMKNLHKLLKGEHILGLTNVHFEKDRICSACQAGKQVGAHHPHKNIMTTDRPLELLHMDLFGPIAYISIGGSKYCLVIVDDYSRFTWVFFLQEKSQTQETLKGFLRRAQNEFGLRIKKIRSDNGTEFKNSQIESFLEEEGIKHEFSSPYTPQQNGVVERKNRTLLDMARTMLDEYRTSDRFWAEAVNTACYAINRLYLHRILKKTSYELLTGKKPNISYFRVFGSKCFILVKRGRKSKFAPKTIEGFLLGYDSNTRAYRVFNKSTGLVEVSCDVVFDETNDSQVEQVDLDEIGDEEAPCIALRNMSIGDVCPKESEEPPKEQDQPSSSTQASPPTQNKDEAQVDEGQDQKDEPPQDDGNDQGGDANDQEKEDEQEPRPPHPRVHQAIQRDHPVDTILGDIHKGVTTRSRVAHFCEHYSFVSSIEPHRVEEALQDSDWVVAMQEELNNFTRNEVWHLVPRPNQNVVGTKWVFRNKQDEHGVVTRNKARLVAKGYSQVEGLDFGETYAPVARLESIRILLAYATYHGFKLYQMDVKSAFLNGPIKEEVYVEQPPGFEDSEYPNHVYKLSNALYGLKQAPRAWYECLRDFLIANGFKVGKADPTLFTKTLDNDLFVCQIYVDDIIFGSTNESTCKEFSRIMTQKFEMSMMGELKYFLGFQVKQLQEGTFISQTKYTQDILTKFGMKDAKPIKTPMGTNGHLDLDTGGAFNARQKRAEVRHAHTGAPDIEQYMSGVHRTSRRAQKSELQRSESNGIGDVAGALQVYASEGSSWIIDSGCTNHMTGEKKMFTSYVKNKDSQDSIIFGDGNQGK

SEQ ID NO: 215827 - protein, 53 aa, Zea mays
  unsure (1)..(53): unsure at all Xaa locations
  Clone ID: MRT4577_128431C.1.pep
AGGAQGGQISARXAAGRPPRARLXRGRRPVSLSVAWDPGRSYQCDGLGSFCGT

SEQ ID NO: 215828 - protein, 431 aa, Zea mays
  unsure (1)..(431): unsure at all Xaa locations
  Clone ID: MRT4577_128432C.1.pep
MAVAMASALLMLALATASAAVSGAGAPWRSRRPRPEADLVTGLPGQPAVGFSHYAGYVXHLGRRRRQXALFYWFFEAEREPDKKPLLLWLNGGPGCSSVAYGAAQELGPFLVRSYGANLTRNAYAWNKAANLLFLEAPVGVGFSYANRTSDLRRLGDRVTAQDSYAFLLGWLDRFPEFKGRDLYIAGESYAGHYVPQLAELIYEGNKGASRDRAISIKGFMIGNAVLNDATDQLGMVEYAWSHAIISDELYSAVRRDCDSFKEEADGGRPGKGCSPALRAFLGAYDDIDIYSIYTPTCLLSNLSSASAAAGSARPRPARLVAAPRLLSKHEEWHRLMKRVPAGYDPCTEAYVTKYFNRGDVQRALHANRTGLPYPYSPCSEVIRKWNDSPATVLPILKKLMGAGLRVWVYSGDTDGRVPVTSTRYSINTMG

SEQ ID NO: 215829 - protein, 51 aa, Zea mays
  Clone ID: MRT4577_128433C.1.pep
GGGVYGSRFRFTFPGCRALSPWRVRVQRRRCEMSTMFADTLLIVFISVCTA

SEQ ID NO: 215830 - protein, 39 aa, Zea mays
  Clone ID: MRT4577_128434C.1.pep
MKGVAINFVTRDDLRMGCDIHKFYNVLIDELPANVADLL

SEQ ID NO: 215831 - protein, 35 aa, Zea mays
  unsure (1)..(35): unsure at all Xaa locations
  Clone ID: MRT4577_128435C.1.pep
KNSRAHSYXLHTKQPILISFLKKTNITGLANIQKP

SEQ ID NO: 215832 - protein, 73 aa, Zea mays
  Clone ID: MRT4577_128436C.1.pep
NWMALIETTLENGSLNRAKKGGDTKKSNGDSSLEDTTRRFQLQRCYLERSPSPIRRKRRRRTTNTTNPIGPGK

SEQ ID NO: 215833 - protein, 73 aa, Zea mays
  Clone ID: MRT4577_128437C.1.pep
TRLLSSSPSVAKIHGGAQRPLRFCLESSFVVRNTLLPVHLAASLHRQHVGDACQLHIPCPNDRPVLARVNVQK

SEQ ID NO: 215834 - protein, 75 aa, Zea mays
  unsure (1)..(75): unsure at all Xaa locations
  Clone ID: MRT4577_128438C.1.pep
SPLQVKYAYMELERLEHKLFFEMLXPKKRTHAEMMNLFSKYGSIKDLQILRGSQRMSKVKSSWFILGTEHPRNHF

SEQ ID NO: 215835 - protein, 71 aa, Zea mays
  Clone ID: MRT4577_128439C.1.pep
SIKNGVGKHNSRRVALYGPFRTPTCKYLLGITVLGPMTWGYPDKNTGFEKKPCPQGPKFIRRAWFSREGAL

SEQ ID NO: 215836 - protein, 41 aa, Zea mays
  Clone ID: MRT4577_12843C.1.pep
GYAFCSGPLLWASLVGMMVSLQAMVRRDSFFPRVGGPPHET

SEQ ID NO: 215837 - protein, 103 aa, Zea mays
  Clone ID: MRT4577_128440C.1.pep
MRRSLVENSDSEPDFEETEQKTINEPHVNVRSEPLTTRRCALQPWMDGSSSSNSTVDLPDGVPPAPSRSKNDRLSKEEMIATMDEVVQGRKMQVEKAPKESED

SEQ ID NO: 215838 - protein, 391 aa, Zea mays
  Clone ID: MRT4577_128441C.1.pep
MERDFLAAIGKEQQHPRKEKAGGGAEESAYFGAAAVPAMDWSFASKPCAAPALMSFRSAAREEPSFPHFSAFDGTKNTAPRMLTHQRSFGPDSTQYAALHRAQNGARVVPVSSPFSQSNPMFRVQSSPSLPNSTAFKQPPFAISNAVASSTVGSYGGTRDAVRPRTAQLTIFYAGSVNVFNNVSAEKAQELMFLASRGSSAPVACKPEAPPTLAPAKVTAPEVLLPAKQMLFQKPQHLSPPPSSVPGILQSAALPRSASSSSNLDSPAPKSSVPLAVPPVSQAPPATLIATTTAAAIMPRAVPQARKASLARFLEKRKERVTTAAPYPSAKSPLESSDTFGSGSASANANDKSSCTDIALSSNHEESLCLGGQPRSIISFSEESPSTKLQI

SEQ ID NO: 215839 - protein, 46 aa, Zea mays
  Clone ID: MRT4577_128442C.1.pep
ALPAHLRAIRSSLLELFLPMYLSFLIISRLFISCISKDLKALYVVL

SEQ ID NO: 215840 - protein, 225 aa, Zea mays
  unsure (1)..(225): unsure at all Xaa locations
  Clone ID: MRT4577_128443C.1.pep
MPSTPTLVPPCDAVEPLLAESSDRFSMFPIRFPQIWEFYKKAVASFWTAEEVDLSADARHWDEALSPDERHFISHVLAFFAASDGIVLENLASRFMSDVQVAEARAFYGFQIAIENIHSEMYSLLLETYIRDDVEKDRLFRAIDTVPAVRRKADWAMRWIDGGERFAERLVAFACVEGIFFSGSFCAIFWLKKRGLMPGLTFSXELISRDXGLHCDFACLLYDVL

SEQ ID NO: 215841 - protein, 55 aa, Zea mays
  Clone ID: MRT4577_128444C.1.pep
SDYCVHHCICPVVVVRFPDDGSAECGEAGGLPTAVGAEDVLHPVPEEEEAEYHDS

SEQ ID NO: 215842 - protein, 38 aa, Zea mays
  Clone ID: MRT4577_128445C.1.pep
SMPLQSFFMHQYARACRDLNAARVPVASRCRCYPECSS

SEQ ID NO: 215843 - protein, 254 aa, Zea mays
  unsure (1)..(254): unsure at all Xaa locations
  Clone ID: MRT4577_128446C.1.pep
MPAAPTLLPPCDAEEPLLAESSDRFSMFPIRFPQIWEFYKKAVASFWTAEEVDLSADARHWDEALSPDERHFISHVLAFFAASDGIVLENLASRFMTDVQVAEARAFYGFQIAIENIHSEMYSLLLETYIRDHVEKDRLFRAIDTVPAVRRKADWAMRWIDGGERFAERIVAFACVEGIFFSGSFCAIFWLKKRGLMPGLXTFSKEXLNSRDEGLHCDFACLLYELLRNKLDEARVREIVADAXDIEREFVCDA

SEQ ID NO: 215844 - protein, 49 aa, Zea mays
  Clone ID: MRT4577_128447C.1.pep
IRGQLFVVVKFPSPIYVSVGCTLFQPSLKSFSSQRKFLCTWFNLFLSQK

SEQ ID NO: 215845 - protein, 717 aa, Zea mays
  Clone ID: MRT4577_128448C.1.pep
MACTYNAMRALFLVVLFCIVHGEKEESKGIDAKASGPGGSFDITKGASGNGNIEERRRMHAYVSSEFGSRMCRRPVPSAPAVRVLSPATATARGEGNQQAPPPLPLASAVPTGRQAGRPRQIYLSLPLVVAGRRAMRMRVLPASWSSSSAKHSSGSSESQEHPSSSSATAAVYLNIYDISPLNHYLYWFGLGIFHSGIQVHGMEYGFGAHEYPTSGVFQVEPKSCPGFIFRRSVCVGVTHMSRSQVRTSIEDLAEDYHGDTYHLILKNCNHFTADVCERLTGKPVPGWVNRLARLGSFFNCVLPDSIKVSAVRDVNAHPDFSDDGLGSNASILEGSDDDDLDHTISPKSSYPTLRIFAGNPTTFAQFPTSNRPHNPPTMPAAPTLLPPCDAEEPLLAESSDRFSMFPIRFPQIWEFYKKAVASFWTAEEVDLSADARHWDEALSPDERHFISHVLAFFAASDGIVLENLASRFMTDVQVAEARAFYGFQIAIENIHSEMYSLLLETYIRDHVEKDRLFRAIDTVPAVRRKADWAMRWIDGGERFAERIVAFACVEGIFFSGSFCAIFWLKKRGLMPGLTFSNELISRDEGLHCDFACLLYELLRNKLDEARVREIVADAVDIEREFVCDALPVALVGMNGDLMSQYIEFVADRLLMALGCKKMYNVTNPFDWMELISLMGKTNFFEKRVGDYQKASVMNSLNGGGAADHVFSIDEDF

SEQ ID NO: 215846 - protein, 238 aa, Zea mays
  Clone ID: MRT4577_128449C.1.pep
MRVLPASWSSSSAKHSSGSSESQEHPSSSSATAAVYLNIYDISPLNHYLYWFGLGIFHSGIQVHGMEYGFGAHEYPTSGVFQVEPKSCPGFIFRRSVCVGVTHMSRSQVRTSIEDLAEDYHGDTYHLILKNCNHFTADVCERLTGKPVPGWVNRLARLGSFFNCVLPDSIKVSAVRDVNAHPDFSDDGLGSNASILEGSDDDDLDQLLRTPNSDTVSSRDKTLLLAGIVSNCSPLIAK

SEQ ID NO: 215847 - protein, 163 aa, Zea mays
  unsure (1)..(163): unsure at all Xaa locations
  Clone ID: MRT4577_12844C.1.pep
TGVECSAPLTNARMLXALVXEFLEXQCINPTFITGHPKMMSPLAKSSRSVPGLCERFEAFVCKKEICNAYTELNVALEQRERFEEQARQKAQGDDEAQGVDETFCKALEHGLPPTGGWGMGIDRMMMFLTDNYSIREVLAFPTMKPEQNSGPSDKPAGQEAQA

SEQ ID NO: 215848 - protein, 86 aa, Zea mays
  Clone ID: MRT4577_128450C.1.pep
VSRGRSSCGRRSSYFLRVEVTGVQVAEWQWSPGQRGRDISARRFKLVGIVVVHPGGLLVSSSVGRGVEGERYQAAVRRPLEGEAED

SEQ ID NO: 215849 - protein, 101 aa, Zea mays
  Clone ID: MRT4577_128451C.1.pep
FRGYAVWGKLVKVKVSYKLSDADKKAFLKTKAKPANAAAAKTTAPKPAKAAADKSKNAAAAKPKKAAAAGTKRKVPEKNVVAKPKKSPAVKANAKPKTVKS

SEQ ID NO: 215850 - protein, 43 aa, Zea mays
  unsure (1)..(43): unsure at all Xaa locations
  Clone ID: MRT4577_128452C.1.pep
CWLFCLRCSRAXRLSVRRRAKDSQRRLMPSLAKLIPSAGSTQG

SEQ ID NO: 215851 - protein, 41 aa, Zea mays
  Clone ID: MRT4577_128453C.1.pep
MLSVCHDVLVVAPPRGRWARGNLVRAEEYLSTEEPSSEQVE

SEQ ID NO: 215852 - protein, 109 aa, Zea mays
  Clone ID: MRT4577_128454C.1.pep
NTFEGRPIYVLKFSTGGSKRPAIWIDTGIHSREWVTQASGVWFAKKITQDYGQDAAFTAILDTLDIFLEIVTNPDGFAFTHSTNRMWRKTRSHTAGSLCIGVDPNRNWD

SEQ ID NO: 215853 - protein, 150 aa, Zea mays
  unsure (1)..(150): unsure at all Xaa locations
  Clone ID: MRT4577_128455C.1.pep
RPPRRRLPPPSRRAXSPFPXPLSSPPPPVFSCPPCAPSVARPRXSPPFPWCPPLLXRFPASXSCGXSRRVXCRLLGRAXAXAALXGVPPPFAGLXLXCXLXWXLLARXLXSCXAPPPSCXXPVXRGCRFCXLALXXXXAVFFXXXWRPFL

SEQ ID NO: 215854 - protein, 983 aa, Zea mays
  Clone ID: MRT4577_128456C.1.pep
MSGDHAKKEMVTGEKPTTSHGKAPSRESGNKKKEGSPSRIRTHKSGEKKKKMKKVVYYETDSSSSSTSGSDAVSVTSKRQERKKYSKIPLRYPRIPRHTPLLSVPLGKPLTFDSEDYSRWSDMMRYHLTSLHKSIWDVVEFGVQVPSVGDEDYDEDEVAQIEHFNSQATTILLTSLSREEYNKVQGLKSAKEIWDVLKTAHEGDEVTKITKRETIKGELGRFMLHQGEEPQAMYNRLKTLVNQVHNLGSTKWDDHEMVKEVIGKFVSFELMIKGSKKIIEQGASSTPNVQPVAFKATEEKKEDSTPSRVPINASKLDNEDMTLIIKSFRQILKQRRGKDYKPRSKKVCYKCGKHDHFIAKCPLSSDSDRGDDKKGKRREKKRYYKKKGGDAHVCPEWDSDESSTDSSSDEDAANIAITKGLLFPNVGHKRLMAKDGKKKKVKSRSSTKYATSSDEDNSSDDEDNLLTLFASLNMQQKEKLNELISAIHEKDELLDSQEDFLIKENKKHVKVKNAYALEVEKYEKITNELSTCHDVISNLKNENARLIAKVESSMLGDVDAPPRSRSSLSFVAVVESEPLGRARRRLSVEARAESEPWGRAKRSSSSSGAEPKSEPWVGRSGVRHLQGLSPSPSPGSGGAEFAVFRGLARVRALGRAERSSPSSGAEPKSEPWVGRSGVSYENEKFKFAHSMLYSGRRPSIKDGIGFQRGDNVKLNAPPKRLSNFVKGKAPMAQDNEGYILYPAGYPEHKIRRIHSRKSHSGSNHAFMYKSEASSSRQSTRAKLPKKTPIASNEHNISFKTFDASYVLTNKSGKIVAKYVGGKHKGSKTCVWVPKVLVSNVKGPKTVWVYASGGSSCIIDSGCTNHMTGEKRMFSSYEKNQDPQRAITFRDGNQGVTVFRRSDDSVAFKGVLEGQLYLVDFNRAELDTCLIAKTNMGWLWHRRLAHVGMKNLHKLLKGEHILGLTNVHFEKERDVGDLFSNAKS

SEQ ID NO: 215855 - protein, 1638 aa, Zea mays
  unsure (1)..(1638): unsure at all Xaa locations
  Clone ID: MRT4577_128457C.1.pep
MSGGSAKREMETDTSHGKAPSKESDAKGREESPPRVKSHRSGDKKKKMKKVVYYETDSSSPSTSGSDAPSVTSKRHKHKKFRDEGYDSDEVAQIRHFNSQATTILLASLSREEYNKVQGLKSAKEIWDMLKTVHEGDEVTKNTNRETIKGELGRFILNQGEEPQAMYNRLKTLVNQVHNLRSTKWDDHEMVKVILRSLVFLNPTQVQLIRGDPRYKLMSPEKVIGKFVSFELMIKGSKQIIERGATSTPEVQPVTFKAMEEKKEESTSSRLPIDASKLDNEEMTLIIKSFRQILKQRKGXDYKPRSKXRGNDKKEKRKEKKRYYKKKGDDAHVCREWDSDESITDSSSDEDTANITVTKGLLFPNVGHKCLMAKDGKKKKVQARTTPKYTTSSDEGSSSDDEDNLLALFANLNMQQKEKLNELIGAIHEKDELLDSQEEFLIKENKKHVKVEKLNVCDDSHVNLKNDNANLIAKIDKLNESISSLKIENDKLFSKAKVINVCNVSISNLRNKNAMLHAKIDELNACKPSTSTVDHVSICMRCRDINVDAIHDHQALIKEQNDHIAQLTAKINEHEIENENFKFARSMLYNRRRPGIKDGIGFQQGDNVKLNAPKRLSNFVKGKAPMAQDNEGYILYPAGYPEHKIRRIHFRKSHSGSHHAFMYKNETSSSRHSTHAKMPKKKSPTASNDHNISFKTFDASYVLTNKSGKVVAKYVGAKHKGSKTCVWVPKVLVSNVKGPKTVWVYASGGVSWIIDSGCTNHMTGEKRMFFSYEKNDDPQRAITFGDGNQGVTVFRRSDDSVAFKGVLEGQLYLVDFNRAKLDTCLIAKTNMGWLWHRQLAHVGMKNLQKLLKGEDILGLTNVHFEKDRVCSAYQEGKQVGVHHSHKNIMTTDMPLELLHMDLFGLIAYISIGGRKSQTQETLKGFWRWAQNEFVLRIKKIRSDNGTELKNSQIEGFFEDEGIKHEFSSPYTPQQNGVVQRKNRTLLDMARTMLDEYKTSDRVFSSKCFILVKRGRKSKFAPKAVEGFLLGYDSNTKAYRVFNKSTRLVEVSCDIVFDETNGSQVEQVDLDELDDEEAPCVVLRNMSIEDVFPKESEEHTQAQDQPSSSMQASPPTQDEDQAQDHENEDQEEPPQEEDNDQGGDANDQDKKDDQGPRPPHQRVHQAIQRDHPVNSILGNIHKGVTTRSRVAHFCEHYSFVSSIEPYRVEDALRDSDWVLAMQEELNNFTRNEVCHLVPRPNQNVVGTKWVFRNKQDEHGVVIRNKAQLVAKGYSQVKGLDFVETYAPVARLESICILLAYATYHGFMLYQMDVKSAFLNGPIKEEVYVEQPPGFEDSEYTNHVYKLSKPLYGLKQAPRAWYECLRDFLITNGFKVGKADPTLFTNTIANDLFVCQIYVDDIIFGSTNKSTCEEFSRIMVQKFEMSMMGELKYFLGFQVKQLQEGTFISQSKYIQDILTKFGIKDAKPIKTPIGTNGHLDLDTGGYSDADWAGCKIDRKSTSMTCQFLGRSLVSWASKKQNSVALSTAEAEYIAAGHCCAQLLWMRQTLRDYGYKFSKVPLLCDNESAIRMADNPVEHNRTKHIAIRYHFLRNHQQRGDIEIAYVSTKEQLVDIFTKPIDEKTFTKLRNELNILDSRNFD

SEQ ID NO: 215856 - protein, 37 aa, Zea mays
  Clone ID: MRT4577_128458C.1.pep
LVDYSLRQASSATGILLSHNQLGLIWLMPTNGRESIM

SEQ ID NO: 215857 - protein, 1529 aa, Zea mays
  unsure (1)..(1529): unsure at all Xaa locations
  Clone ID: MRT4577_128459C.1.pep
MSGASAKREIGTGEKPATSHGKAPSGESTNKVKGSPSHDKSXRSGDKKKKMRKVVYYETDSSSPSTSGSDTPSVTSKRHERKKFSKIPLRYPRISKRTPLLSVPLGKPPMFDGEDYNMWSDKMRHQLTSLHTSIWDIVEIGVQEYNKVQGLKSAKEIWDVLKTAHEGDAVTKITKRETIEGELGRFRLRQGEEPQDMYNRLKTLVNQVRNLRSTKWDDHEMDKEVIGNFVSFELMIKGSKKIIELDGPSTPEAQPVAFKATEEKKEESTSSRQPIDASKLDNEEMALIIKSFRQILKQRRGKDYKSRSKKVDSERGDDKKGKRREKKRYYKKKGGDAHVCREWDSDESSSDSSSDEDAANIAVTKGLLFPNVGHKCLMAKDGKRNKVKSRSSTKYVSSGDEDNSSENEEDNLRTLFANLNMQQKEKLNELISAIHEKDELLDTQEDFLIKENKKHVKLLSELSTCHDVITNLRNENASLIAKVDSNAKELDVCNASISDLRDKNDILCAKIVELNSCKPSTSTIEHITICIRCRYINVDAIHDHLALIKKQNDHIAQLNAKINEHDLENEKFKFARSMLYSGRRPDIKDDIGFQKGDNVKLNAPPKRLSNFVKGKAPMPRDNEGYILYPAGYPESKIRRIHYMKSHSGPNHAFIYKGETSSSRQSTHARLPKKKTPAASNDHNISFKTFDASYMLTNKSGKVYASGGSSWIIDSGCTNHMTGEKKMFSSYEKNQDPQRAITFGDGNQGVTVFRRSDDSIAFKGVLEGQLYLEKSHTQETLKGFLRRAQNEFGLRIKKIRSDNGTEFKNSQIEGFLEEEGIKHEFSSPYTPQQNGVVERKNRTLLDMARTMLDEYKTSDQFWAEAVNIACYAINWLYLHRILKKTSYELLTGKKPNVSYFRVFGSKCFILVKRGRKSKFASKAVEGFLLGYDSNTRAYRVLNKSSGLVEVSCDIVFDETNGSQVEQVDLDEIGDEEAPCVALRNMSIGDVCPKEYEEPQHAQDQPSSSMQASPPTQDEDQAQDDENEDQEEPPQEEDNDQGGDANDQDKEDDEDPRPPHPRVHQAIQQDHPVNSILGDIHKGVTTRSRVAHFCEHYSFVSSIEPYRVEDALRDSDWVLAMQEELNKFTRNEVWHLVPRPNQNFVGTKWVFRNKQDEHGVVTRNKARLVAKGYSQVKGLDFSETYAPVARLESICILLAYATYHGFKLYQMDVKSVFLNGPIKEEVYVEQPPSFEDSEYPNHVYKLSKALYGLKQAPRAWYEWLRDFLIANGFKVGKANPTLFTKTIANDLFVCQIYVDDIIFGSTNKSTCEEFCRIMIQKFEMSMMGEFKYFLGFQVKQLQEGTFISQTKYIQDILTKFGMKDAKPIKTPMGTNGHLDLDTGGCKIDRKSTSGTCQFLGRSLVSWASKKQNSVALSTAEAEYIAAGHCCEQLLWMRQTLRDYGYKLTKVPILCDNESAIRMADNPVEHSRTKHIAIRYHFLRDHQQRGDIEIAYINTKDQLADIFTKPLDEKTFTKLRHELNILDSRNFD

SEQ ID NO: 215858 - protein, 70 aa, Zea mays
  Clone ID: MRT4577_12845C.1.pep
ANRLDHLNRIKWRHRYHKSYNRVAQVQHKPRIHWRKYLEHLHKPYFKLTSNKTFRKHGAKRTMDHPPCSS

SEQ ID NO: 215859 - protein, 1673 aa, Zea mays
  unsure (1)..(1673): unsure at all Xaa locations
  Clone ID: MRT4577_128460C.1.pep
MSGDHAKKEMVTGEKPVTSHGKAPSGESRNKGKEKESPSHKSHRSGEKKKKMRKVVYYEIDSLSPSTSGSDAPSVTSKRHERKKFSKIPLHYPRISKRTPLLSVPLGKPPIFDGEDYNMWSDKMRHHLTSLYTSIWNVVEFGVQEYNKVQGLKSAKEIWDVLKTAHEGDEVTKITKRETIEGELGHFMLNQGEDPQAMYNRLKTLVDQITGQGASXAWPTWSRGPCXRLESRGIRLGDXGFRAIPGDKCNVQEKXADDVAPPRGVRKAVADAXGPFVSARRAVPSARXAQAMQGENGPQDDTFGPPGSKKIIEQGASSSVPEAQPVAFKATENKKEDSTPSRVPIDASKLDNEEMALIIKSFRQILKQRKGKDYKPRSKKVCYKCGKPGHFIAKCSLSSDSDRGDDKKGKRREKKRYYKKKGGDAHVCREWDSDESSTDSSSDEDAASIAVNKGLLFPNVGHKCLMAKDGKKKKVKSKSSTKYATSSDEANSSDDEDDLFTLFANLNMQQKEKLNELIRAIHDKDELLDSQEDFLIKENKRHVKVKNAYAQEVEKNEKLTSELSTCHDIVSNLRNENAKLIAKVENLNVCDDSLINLRNDNANLIAKIDKLNASLTSLRNENEKLIAKAKELDVCNISISNLRNENNILHAKIVELKDCKPSTSTVEHVSICTRCRDVNVDAIHDHLALIKQQNDHIATLTAKINEHDLENEKFKFARSMLYSGRRPGIKDGIGFQKGDNVKLNAPPKRLSNFVKGKALMVQDNEGYILYPAGYPEHKIRRIHSRKSHSGPNHAFMYKSETSSSRQSTHAKLPKKKTPAASNDHNVSFKTFDASYVLTNKSGKLVAKYVGGKHKGSKTCVWVPKVLVSNVKGPKTIWVYASGGSSWIIDSGCTNHMTREKRMFSSYEKNQDPQRAITFGDGIKDKYQTQETLKGFLRRAQNEFSLRIKKIRSDNGTEFKNSQIEGFLEEEGIKHEFSSPYTPQQNGIVERKNRTLLDMARTMLDEYKTLDRFWAEAVNTACYAINRLYLHRILKKTSYELLTGKKPNVSYFRVFGSKCFILVKRGRKSKFAPKAVEGFLLGYDSNTRAYRVFNKSTGLVEVSCDIVFDETNGSQVEQVDLDELDDEEAPCIALRNMSIGDVCPKESEEPPQAQDQPSSSMQASPPTQDEDEAQDDEGEDQEDEPPQEDSNDQGGDANDQDKEDEQDAKPPHPRVHQAIQRDHPVNTILGDIHKGVTTRSRVAHFCEHYSFVSSIEPYRVEDALRDSDWVLAMQEELNNFTRNEVWHLVPRPNQNVVGTKWVFRNKQDEHGVVIRNKARLVAKGYSQVEGLDFGETYAPVARLESIRILLAYATHHGFKLYQMDVKSAFLNGPIKEEVYVEQPPGFEDSEYPNYVYKLSKALYGLKQAPRAWYECLRDFLITNGFKVGKVDPTLFTKTIENDLFVCQIYVNDIIFGSTNKSICEEFSRIMIKKIEMSMMGELKYFLGFQVKQLQDGTFISQTKYIQDILTKFGMKDVKPIKTPMGTNGHLDLDTGGKSIDQKVYRSMIGSLLYLCASRPDIMLSVCMCARFQADPKEVHLRVVKQIMRYLVYTPKFGLWYPKGSSFDLLGYSDADWAGCKLDRKSTSGTCQFLGRSLVSWASKKQNFVALSTAEAEYIAAGQXCAQLLWMRQTL

SEQ ID NO: 215860 - protein, 1502 aa, Zea mays
  Clone ID: MRT4577_128461C.1.pep
MSGDHAKKEMETGEKPTTSHGSTSSEESRTKRKEKKKSSSNKGKEKKSSSHHKEKKEKSSSHKSHRKGDKHKRMRKVVYYETDTSSTSTSDSDAPSVTSKRQERKKFSKIPLHYPRISKHAPLLSVPLGKPPTFDGEDYARWSDLMRFHLTSLHKSIWDVVEFGAQVPSVGDEDYDEDEVAQIEHFNSQATTILLASLSREEYNKVQGLKSAKEVWDVLKTAHEGDELTKITKRETIEGELGRFRLRKGEEPQHMYNRLKTLVNQVRNLGSKKWDDHEMVKVILRSLIFLNPTQVQLIRGNPRYTKMTPEEVIGNSVSFECMIEGSRKINELDEPTTSEAQPVAFKATKEKKEESTPSRQPIDASKLDNEEMALVIKSFRQILKQWKGKDYKSRSKKVCYKCGKPGHFIAKCPISSDSDRGDDKKGRRKEKKKYYKKKGGDAHVCREWDSDESSSDSSDDEDAANIAVTKGLLFPNVGHKCLMAKDGKRKKVKSNSSTKYESSSDDNASDEEDNLCTLFVNLNMQQKEKLNELISAIHEKDDLLDSQEDFLIKENKKHVKVKNAYALEVEKCQKLSIELSTCHETIDNLRNENANLLAKVDSHVCNVSIPNPRDNNDDLLARIEELNISLASLRLENENLIAKAKDFDVCKITISDLRDKNDILHAKIVELNSCKPSTSTVEHTSICTRCRDVNIDAIHDHMTLIKQQNDHIAKLDAKIAEHNLENENFKFARSMLYNGRRPGIKDGIGFQRGDNVKLSAPPKRLSNFVKGKAPMPQDNEGYILYPAGYPEDKIRRIHSRKSHSGPNHAFMYKGETSSSRQPTRAKLPRKKTPSASNDHDISFKTFDASYVLTNKSGKVYASGGSSWILDSGCTNHMTGEKKMFSSYEKNQDPQRAITFGDGNQGVTVFRRSDDSIAFKGVLEGQLYLEKSQTQETLKGFLRRAQNEFGLRIKKIRSDNGTEFKNSQIEGFLEEEGIKHEFSSPYTPQQNGVVERKNRTLLDMARTMLDEYKTSDRFWAEAVNTACYAINRLYLHRILKKTSYELLTEQVDLDEIGEEEAPCIALRNMSIGDVCPKESEEPPNAQDQPSSSTQASPPTQNEDEAQVDEVEDQANEPPQDDDNDQGGDANDQDKEDEEPRPPHPRVHQAIQRDHPVDTILGDIHKGVTTRSRVAHFCEHYSFVSSIEPHRVEEALQDSDWVVAMQEELNNFTRNEQDEHGVVTRNKARLVAKGYSQVEGLDFGETYAPVARLESIRILLAYATYHGFKLYQMDVKSAFLNGPIKEEVYVEQPPGFEDSEYPNHVYKLSKALYGLKQALRAWYECLRDFLIANGFKVGKADPTLFTKTLENDLFVCQIYVDDIIFGSTNESTCEEFSRIMAQKFEMSMMGELKYFLGFQVKQLQEGTFISQTKYTQDILNKFGMKDAKPIKTPMGTNGHLDLDTGGVKGSHLTNKKIEGTSGLEAPDCPMYTGQCPMHHRTVSGAPEDFNSNLPPSGISRGTPL

SEQ ID NO: 215861 - protein, 46 aa, Zea mays
  Clone ID: MRT4577_128462C.1.pep
ASKIWKEGSLNGPGGTYSVTLTGPGTYGFYCKPNKGAGLVGRITVN

SEQ ID NO: 215862 - protein, 1420 aa, Zea mays
  unsure (1)..(1420): unsure at all Xaa locations
  Clone ID: MRT4577_128463C.1.pep
MSGDHAKKMVIDGEKSATSHGKAPSRESANKKKDGSPSRIRSHKSGEKKKKMKKVVYYETESSSPSTSGSDATSVTSKRQERKKYRDEDYDEDEVAQIVHFNSQATTILLTSLSREEYNKVQGLKSAKEIWDVLKTAHKGDEVTKITKRETIEGELSRFRLCQGEEPQEMYNWLKTLVNQVRNLGSKKWDDHEMVKVILRSLIFLNPTQVQLIRGDPRYTLMSPEEVIGKFVSFELMMKGSKKIIEQDGPSTPEAQPVAFKATEEKKEESTSSRLPIDASKLDNEEMALIIKSFRQILKQRRGKDYNSRSKKVCYKCGKHDHFIAKCPLSSDSDRGDDKKGKRKEKKRYYKKKGGDAHVCREWDSDEDAANIAVTKGLLFPNVGHKCLMAKDGKSKKVKSRSSTKYASSSDEDYSSNEEDNLRTLFANLNMQQKEKLNELISAIHEKDELLDSQEDFLIKENKKHVKVKNAYALEVEKCEKISSELNTCHDIIANLKNENARLTPKVDSNVCDDSISNLRDDNVSLLAKIEELNVSLASLRNENEKLIAKAKDLDVCNVTISNLRSENGILHAKIVELKTCKPSTSTVEHVSICTRCRDINVDAIHDHLALIKKQNDHIAQLNAKINEHDLENEKFKFARSMLYSGRRPGIKDGIGFQKGDNVKLNAPPKRLSNFVKGKAPXPQDNEGYILYPVGYPEHKIRRIHSRKSHSGPNHAFMYKXVYASGGSSWIIDSGCTNHMTGEKRMFSSYEKNQDHQRAITFGDGNQDIGVTVFRRSDDSIAFKGVLEAELNTCLIAKTNMGWLCHRRLAHIGMKNLHKLLKGEYILGLTNVYFEKDREKSQTQETLKGLLRRAQNKFGLRIKKIRSDNGTEFKNSQIEGFLEDEGIKHEFSSPYTLQQNGVVERKNRTLLDMERAMLDEYKTLDRFWAAAINTACYSINRLYLHRILKKTSYELLTGCRRLLLGYDSNTRAYRVFNKSTGLVEVSCDIVFDETNGSQVEQIDLHELDDEEAPCVVLRNMSIGDVCPKESEEPXTRDQSSSSNQASPPIQDEDQAQDDENEDQEDEPPQKEDNDQGXGDDNDKKNDQEIQGQRAPHPRVHQAIQRDHPVNSILGDIHKGVTTRSRVAHFCEHYSFVSSIEPYRVEDALRDSGWVLAMQEELNNFTRNEVWHLVPRPNQNVVGTKWVFRNKKHEHGVVTRNKARLVAKGYSQVEGLDFGETYAPIVRLESIRILLAYATYYVFKLYQMDVKSAFLNGPIKEEVYVEQPPGFEDSEYPNHVYKLSKALYGLKQAPRAWYECLRYFLITNGFRVGKADPTLFTKTIVKVLFVCQIYVDDIIFVSTNKSTCEEFSRIMIQKFEMSMMGELKYFLGFQVKQLQDGTFISQTKYIQDILNKFGMKDAKPIKTPXGHLDLDTGGIYF

SEQ ID NO: 215863 - protein, 1148 aa, Zea mays
  Clone ID: MRT4577_128464C.1.pep
GREAPTCGDSSQTGKSKVKKNTVSSTDSSSDEDAANIAVTKGLLFPNVGHKCLMAKDGKKKKVKSRSSTKYATSSDEDNSSNDGDNLLTLFANLNMQQKEKLNELISAIHEKDELLDSQEDFHIKENKKHVKVKNAYALEIEKCEKLTSELSTCHDTISNLRIENANLIAKVEKSNICDYSIINLRNDNASLIAKIEKLNASLASLRNENEKLIAKAKELDVCNVSISNLRDENDILHAKIVELNSCKPSTSTVEHSGRRPDIKDGIGFQQGGNVKLNAPPKRLSNFVKGKAPMPQDNEGCILYHAGYLEHKIRRIHSRKSHSGSNHAFMYKSGASSSRQSTRAKLPKKRTPIASNDHNISLKTFDASYVLTNKSGKVVAKYVGGKHKGSKTCVWVPKVYASRGSSWIIDSGCTNHMTGEKKMFSSYEKNQDPQRAITFGDGNQGVTVFRRSDDSVAFKGLLEGQLYLVDFDRAELDTCLIAKTNMGWLWHRRLAHVGMKNLHKLLKGEHILGLTNVHFEKDREKSQTQETLKGFLIWAQNEFGLRIKKIRSDNETEFKNSQIEGFLEEEGIKHEKNITLLDMARTMLDEYKTSDRFWAEAVNTACYAINRLYLHRILKKTSYELLTGKKLNVSYFRVFGSKCFILVKRGRKSKFAPKAVEGFLLGYNSNTRAYRVFNKSTGLVEVSCDIVFDETNDSQVEQVELDELDDEEAPCVALRNMSIGDVCPKESEEPPHAQDEPSSSMQASPPTQDEDEAQNDEEEDQEDEPPQEESNDQGGDAHDQDKEDEQDQRPPHPRVHQAIQRDHPVNTILSDIHKGVTTQSHVAHFCEHYSFVSSIEPHRVEEALQDSDWVLAMQEELNNFTRNELYQMDVKSAFLNGPIKEEVYVEQPPGFEDSEYPNHVYKLSKALYGLKQAPRAWSTNESTCEEFSRIMTQKFEMSMMGELKYFLGFQVKQLQEGTFISQTKYIQDILTKFGMKDAKPIKTPMGTNGHLDLDMGGCKINRKSTLGTCQFLGRSLVSWASKKQNSVALSTAEAEYIAAGHCCAQLLWMRQTLRDYGYKLTKVPLLCDNESAIRMADNLVEHSRTKHIAIRYHFLRDHQQKGDIEIAYVNTKEQLADIFTKPLDEQTFTKLRHELNILDFRNFD

SEQ ID NO: 215864 - protein, 64 aa, Zea mays
  unsure (1)..(64): unsure at all Xaa locations
  Clone ID: MRT4577_128465C.1.pep
PEVRPCSLFRSSAQAPPRPRLCPALVRALRCAPAPCLGQMLDPGRQXFGPGPHGGXSPPKKKPQ

SEQ ID NO: 215865 - protein, 1648 aa, Zea mays
  unsure (1)..(1648): unsure at all Xaa locations
  Clone ID: MRT4577_128466C.1.pep
MSGASAKREIGTDDKSASSGRTHSRESAHKHKEESSSSIKSQRKGDKKKKMKKVVYYETDSSSPSTSGSESAFATSKRHERKKYSKMPLRYSRISKRTPLLSVPLGKPPMLEGEDYSIWSDKMRHHLTSLHKSIWDIVEYGPQVPKKGDKDYDSEEVEQIQHFNSQATTILLASLSREEYNKVQGLKSAKEIWDVLKTAHERDEVTKITKRETIEGELGRFMLHQGEEPQAMYNRLKTLVNQVRNLGSTKWDDHEIVKVILRSLVFLNPTQVQLIRGDSRYTLMSPEEVIGKFVSFELMIKGSKKIIEQGTSSTPDVQPVAFKATEEKKENPTPSRVPIDASKLDNEEMTLIIKSFRQILKQRRGKDYKPRSNKVCYKCGKPGHFIAKCPLSSDSDRGDDKKGKRREKKRYYKKKGGDAHVCREWDSDESSTDSSSDEDATNIVVTKGLLFPNVGHKCLMAKDDKRKKVKSKSSTKYATSSDEASSSDNEDDLLTLFAHLNMQQKEKLNELISAIHEKDEHLDTQEDFLIKENKKHVKVKNAYALEVEKCEKLSSELSTCHDVISNLRNENAKLIAKVEKSNVCNDSIDNLRNDNASSHAKVEKLNASLASLRNENEKLIAKAKELNACNVSISSLRDENAILHAKIVELNSCKPSTSTIEHVTICTRCRDVNIDAIHDHMAMIKQQNDHIVKLDAKITEHELENEKIKFARSMLYSGRRPGIKDGIGFQQGGNVKLNAPPKRLSNFVKGKTPMAQDNEGYILYPAGYPEHKIRKIHSRKSHSGSNYAFMYKSEASSSRQSTHAKLPKKKTPIASNDHNISFKTFDASYVLTNKSGKVVAKYVGGKHKGSKTCVWVPKAYAFGGSSWIIDSGCTNHMTGEKRMFSSYEKNQDPQRAITFGDGNQDSLDYNLLSVSQLCKMGYNCLFTDEKSQTQETLKGFLRRAQNEFGLRIKKIRSDNGTEFKNSQIEGFLEDEGIKHEFSSPYTPQQNGVVERKNRTLLDMARTMLDEYKTLDRFWAEAVNTACYAINRLYLHRILKKTSYELLTGKKPNVSYFRVFGSKCFILVKRGRKSKFAPKAVEGFLLGYDSNTRAYRVFNKSTGLVEVSCDIVFDETNGSQVEQVDLDELDDEEAPCVALRNMSIGDVCPKESEEPPHAQDQPSSSMQASTPTQDEDQAQDDEDDDQEEPPQEENNDRGGDANDQDKEDDDGPRPPHPRVHQAIQRDHPVNSILGDIHKGVTTRSRVAHFCEHYSFVSSIEPYRVEDALRDXKXVLAMQEELNNFMRNKVWHLVPRPNQNVVGTKWVFRNKQDXHGVVTRNKARLVAKGYSQVKGLDFGETXYAPVARLESIRILLAYATYHGFKLYXMDVKSAFLNGPIKXEVYVEQPPSFEDXSEYPNHVYKLSKALYGLKQAPRAWYECLRDFLIANGFKVGKVDPTLFTKTIANDLFVCQIYVDDIIFGSTNKSTCEEFSRIMVQKFEMSMMGELKYFLGFQVKQLQEGTFISQMKYIQDILAKFGMKDAKPIKTPMGTNGHLDLDTGDKSVDQKGVRLIKRAHQGLASSWEDSVALSTAEAEYIAAGHCCAQLLWMRQTLRDYGYKLTKVPLRCDNESAIRMADNPVEHSRTKHSHSVSLFEGSPTTGRYRDCLN

SEQ ID NO: 215866 - protein, 698 aa, Zea mays
  unsure (1)..(698): unsure at all Xaa locations
  Clone ID: MRT4577_128467C.1.pep
MSKVMKKIFVGTSKMILKDLNFWDATQETLKGSLRWAQNKFGLRIKKIRSDNGTEFKNSQIEGFLEEEGIKHEFSSPYTPQQNGVVERKNRTLLDLARTMLDEYKTPDRFWAEAINTVCYSINRLYLHRILKKTSYELLTAVECFLLGYDSNTRAYRVFNKSTGLVEVTCDIVFDETNGSQVEQIDLDELDDEEAPCVALSNMSIGDXDDQAQDNEDEDQEDEPPXEENNDQGGDEDDEDKEDDQEXRXRPPHPRVHXQFNXDHPVNSILXPYMVEDALRDADWVLFMQEELNNFTRNEVWHLVPRPNQNIVGTKWVFRNKQDEHGVVTRNKARLVAKGYSQVEGLDFDETYAPVARLESIRILLAYATYHGFKLYQMDVKSAFLNGPIKEEVYVEQPPDFEDSEYPNHVYKLSKALYMLKQAPRAWYECLQDFLITNDFKVRKVDPTLFTKTIAKDLFVCQIYVDDIIFLSTNKSTCEEFSRIMIQKFEMSMMGELKYFLGFQIKQLQDGTFINQTKYIQDILKKFGMKDGKPIKTPMGTNEHLDLDTGGCKIDRKSTSGTCQFLGRSLVSWASKKQNSVALSTAEAEYIVAGHCCMQLLWMRQTLRNYGYKLSKVPLLCDNESAIRMADNPVEHSRTKHIAIRYHFLRDHQQRGDIEIAYVNTKAQLADIFTKPLDEKTFTKLRNELNILDSRNFD

SEQ ID NO: 215867 - protein, 77 aa, Zea mays
  Clone ID: MRT4577_128468C.1.pep
GRASKAKPYFLFDGYAHLSSGLACSLAGLAAAMAIGIDRHARFRANAQPPKLGGGIILNLIFADTLALHGLIDGIIL

SEQ ID NO: 215868 - protein, 1703 aa, Zea mays
  Clone ID: MRT4577_128469C.1.pep
MSGDHAKKEMETGDKPTTSHGKASSEESRNKGKGKEKKSSSHKSHRSGNNKKKMRKMVYYETDTSSPSTSGSNAPSITSKRHERKKFSKTPLHYPRIPKHTPLLSVSLGKPPTFDGEDYARWSDLMRFHLTSLHKSIWDIVEFGVQVPSVGDEDYDEDEVAQIQHFNSQASTILLASLSREEYNKVQGLKGAKKIWDTLKTSHEGDEVTKITKRETIEGELDRFRLRQGEEPQDMYNRLKTLVNQVRNLRSKKWDDHEIVKVILRSLVFLNPTQVQLIRGNPRYTLRTPEEVIGNFVSFELMIKGSKKINELDGPSTSEAQPVAFKATEEKKEESTSSRTPIDASKLDNEEMALIIKSFRQILKQRRGKNYKPCSKKVCYKCGKPGHFIAKCPISNDSDRGDDKKGRRKEKKKYYKKKGDDAHVCREWDSDESSSDSSSDEDAANIAVTKGLLFPNVSHKCLMAKDGKKKKVKSRSSTKYETSSDEDNASNEEDNLRILFANLNMQQKEKLNELISVIHEKDDLLDTQEDFLIKENKKHVKVKNAYALEVEKYEKLSSELSTCHETIDNLRNNNAKLIAKVDSNACNVSIPNPRNDNVDLLAKIEELNISLASLRDENKKLLAKAKELDVCNASISDLRSKNDILHAKVVELKSCKPSTSIVEHTSICTRCRDINVDAIHDHLALIKKQNDHIAQLNAKISEHDLENEKFKFARSMLYSGRRPSIKDGIGFQKGDNVKLNAPPKRLSNFVKGKAPMPQDNEGYILYPAGYPESKIRRIHSRKSHSGPNHAFMYKGETSSSRQPTRAKLPKKKTPSASNDHSISFKTFDASYVLTNKSGKVYASGGSSWIIDSGCTNHMTGEKKMFSSYEKNQDPQRAITFGDGNQGLVKGATVFRRSDDSIAFKGVLEGQLYLVDFDRAELDTCLITKTNMGWLWHRRLAHVGMKNLHKLLKGEHILGLTNVHFEKDRICSACQAGKQVGVHHPHKNIMTTDRPLEILHMDLFGPIAYISIGGSKYCLVIVDDYSRFTWVFFLQEKSHTQETLKGFLRQAQNEFGLRIKKIRSDNGTEFKNSQIEGFLEEEGIKHEFSSPYTPQQNGVVERKNRTLLDMARTMLDEYKTSDRFWAEAVNTACYAINRVFGSKCFILVKRGRKSKFAPKTVEGFLLGYDSNTRAYRVFNKSSGQVEVSCDVVFDETNGSQVEQVDLDEIGDEEAPCIALRNMSIGDVCPKESEEPPNAQDQPSFSTQASPPTQNEDGAQVDEERDQNDEPPQDDDNDQGGDANDQDKEDEEPRPPHPRVHQAIQRDHPVDTILGDIHKGVTTRSCVAHFCEHYSFVSSIEPPRVEEALQDSNWVVAMQEELNNFTSNEVWHLVPRPNQNVVGTKWVFHNKQDEHGVVTRNKARLVAKGYSQVEGLDFGETYAPVARLESIHILLAYATYHGFKPYQMDVKSAFLSGPIKEKVYVEQPPGFEDSEYPNHVYKLSKALYGLKQAPRAWYECLRDFLITNGFKVGKADPTLFTKTLDNDLFVCQIYVDDIIFGSTNESTCEEFSRIMTQKFEMSMMGELKYFLGFQVKQLQEGTFISQTKYTQDILSKFGMKDAKPIKTPMGTNGHLDLDTEGAKGSQKANKKTKKRVQQKGARDNRSAPWSGAPDCPVCHRTVSGAPPDNDRCTRELQVEFNTFENSQRHSAIIHRTVRCPRGERL

SEQ ID NO: 215869 - protein, 177 aa, Zea mays
  unsure (1)..(177): unsure at all Xaa locations
  Clone ID: MRT4577_12846C.1.pep
PTRPQLAFGPGLVVXPGIYYFDDKMLQCRVFAYADTQRYRLGPNYLMLPVNAPRCAHHNNHYDCAMNFMHRDXEVDYYPSMHAPLRQAPPVPIPARPVVGKRQKETIQKPNDFKQPGERYRSWDANRQERFVRRFADSLGHPKVSQELRSIWIDLLSKCDASLGMKIATRLNMKPNM

SEQ ID NO: 215870 - protein, 88 aa, Zea mays
  Clone ID: MRT4577_128470C.1.pep
VLCLFEQPNHLPLPHPFIFRNYANSLSDIGLVPNDLCTASESVFFCLLHILLSLVFREKGQAPASLEPFLAEICFSGILVILTSSCYR

SEQ ID NO: 215871 - protein, 117 aa, Zea mays
  unsure (1)..(117): unsure at all Xaa locations
  Clone ID: MRT4577_128471C.1.pep
RFSSGAGSRASVLLRWSPAFPLFLFAPCLCSPPFWAPLLCAFFLRXSLLXSLCACCXVRPCPPSPSPPSLASAPSXGWSARLSLPLSRLSSRALCAWFPPPALXFPVVLCWGCQASA

SEQ ID NO: 215872 - protein, 71 aa, Zea mays
  unsure (1)..(71): unsure at all Xaa locations
  Clone ID: MRT4577_128472C.1.pep
HGKFESLGALGISSMLLVTXQGVMSSAPDIIGNTLHVHHDHGSSGHHHGIDLEHPVLALSMTTLAISIKEG

SEQ ID NO: 215873 - protein, 56 aa, Zea mays
  Clone ID: MRT4577_128473C.1.pep
TPLHQLSFAYTYLKLRRINPDRPFRLNMFKDCERRSIAKLFHHRSEESHSGAQLTR

SEQ ID NO: 215874 - protein, 483 aa, Zea mays
  unsure (1)..(483): unsure at all Xaa locations
  Clone ID: MRT4577_128474C.1.pep
MEDQALAPLLQPLPLGETGAIKGRARRAALEWWVESKKLWHIVGPAIFQRIALYGVNVVTQSFIGHLGDLELAAFSIAATVVGGFNFGFLLGMASALETLCGQAFGAKKHHMLGVYLQRSWIVLLIFAAALTPTYIFMEDLLLLIGQSPELSRLAGQMSVWLLPQHFAMAMLLPLTRFLQSQLKNWVTAITAAVALAIHVVATYVLVRLLDFGIVGAVASADMXWWLVVLGQYVYVVGGWCPLSWKGFTMEAFADFWEFIKLSSASGVMLCLENWYYRVLVLLTGYLDNAEIAVGQIKCSQTINGWEMMIPFGFLAATGVRVANELGAGSGKGARFAIVVSITTSVVIGLVFWCLILYFDDKIALLFTSSAVVLDAVHHLSVLLAFTILLNSVQPVLSGVAVGSGWQALVAYVNVGSYYLIGVPLGIVLGWPLHFGVGGIWSGMIGGTAVQTLILAYLTAKCDWHEEAKLASMRMKKWADESK

SEQ ID NO: 215875 - protein, 90 aa, Zea mays
  unsure (1)..(90): unsure at all Xaa locations
  Clone ID: MRT4577_128475C.1.pep
SVRDKWKGLDYDILDDQQDITRGKGLVDHLLQAAYGGXTHVGELRSYVLLSRGKSLTTSTYMTNGFYIGEGVVDKLVVHLFKNSMTLPNI

SEQ ID NO: 215876 - protein, 195 aa, Zea mays
  unsure (1)..(195): unsure at all Xaa locations
  Clone ID: MRT4577_128476C.1.pep
QVKVVVVTXSVLGPVLFNMLYVLVTGLFFGVPGNLVHDQVYDTMLVDVSTAXLILGVISRFLPLIVKYCVSFHEVSESXSISRDWQTVARASQAXSHAQIMMKIPLFSVMKVPHLAIYTPTATELNMSHESVSHPMTDVACSSAIIWLIVMCVRHALQSQSVVSTMXSASKSWEPSGSFASAIMITVLEVDGIDK

SEQ ID NO: 215877 - protein, 83 aa, Zea mays
  unsure (1)..(83): unsure at all Xaa locations
  Clone ID: MRT4577_128477C.1.pep
QQVLDLGGGEFVEDDLFPAVEDGQLLRLFFSCLPWIPVGALAMAFWLPDGGIGRXEXXXPVHGGXELACXCSSCRSRSILELV

SEQ ID NO: 215878 - protein, 127 aa, Zea mays
  Clone ID: MRT4577_128478C.1.pep
VVSSSCDGGCFFFFFDICTVTRNGVRVEWTTQLLSSLTLASSVQQTVPGPRSSSRGSLLASLVAPSLTPSSYHETALWYPLTGSRSGLGLHRGTPLFFLLRAWLPPCAGPTSQEASGKLGATGHGAP

SEQ ID NO: 215879 - protein, 50 aa, Zea mays
  Clone ID: MRT4577_128479C.1.pep
IDFRNNHLKIENKGRSWYNIKHKVIKHFKHCFLVLFLLISPDLCSFSAFC

SEQ ID NO: 215880 - protein, 107 aa, Zea mays
  Clone ID: MRT4577_12847C.1.pep
MGRLGSVARWCGGWRARRQKLLLLRRRGRQHNGGTVWLGRRRSCGRLAVSRLVRWRLVAELLRPIRKALMEMVAGAGSAAAPGRRQLVTLPQLNFPFVGTLTLPTVA

SEQ ID NO: 215881 - protein, 74 aa, Zea mays
  Clone ID: MRT4577_128480C.1.pep
GRPGGRNYINPAQGQEAENAKSFAEIEPEKKLRKKDAPKNEEYDSMLGVGREIPPQLILPGKILPPNAQKGVGG

SEQ ID NO: 215882 - protein, 143 aa, Zea mays
  Clone ID: MRT4577_128481C.1.pep
ECQSKGWHKSLTPAADVEREIHESQKAGFFEEINFPYPIVSVIGGGKREIDLYAYYFGADLAVFFLVAMFYQSILKNKSEFLEVYQLEDQFPKEFVFILMVLFILIVVDRIIYLWSFATGKVVFYLFNLVLFTYSVTEYAWGT

SEQ ID NO: 215883 - protein, 80 aa, Zea mays
  Clone ID: MRT4577_128482C.1.pep
FVVGWWSTGLFKGLVLQKLARRNHQSVFGSCLQSMRSSVPSRAAQFRRWPQRGLPCSEHMSMHTYSGHHPHSCHHVPSKF

SEQ ID NO: 215884 - protein, 92 aa, Zea mays
  Clone ID: MRT4577_128483C.1.pep
LEAGRGSAYHTTTTHTTLLLLCKYVINLENARHPPISNARHNFACEQGLGHDRDHDRRISSAVTTLQRRSVCHSFTKQRRTRADRAYAHGTC

SEQ ID NO: 215885 - protein, 80 aa, Zea mays
  unsure (1)..(80): unsure at all Xaa locations
  Clone ID: MRT4577_128484C.1.pep
GKTAYDNLLIFKDGKGCGSCYXERCMEKPACXGTAVTGFITNMNYEPIAPYHLXRAEWPVGYMANSGIXNDKLMHCGITD

SEQ ID NO: 215886 - protein, 193 aa, Zea mays
  Clone ID: MRT4577_128485C.1.pep
MAMLPRPTALVAAVVVAAALVLGMASAQGPAAAPAPGPAPGISDECFNAVLNMSDCLTYVTAGSKARHPDTPCCPELAGLLESHPVCLCQLLGGAAESYGVSVDYKRALALPGICRLTAPPVSACAAFGFPIPEGLVPTAAPMAGLSPSSIGPDVPANTPTGSAKSPAGRVTAAGGLVALAALPVAVAAGIMF

SEQ ID NO: 215887 - protein, 67 aa, Zea mays
  unsure (1)..(67): unsure at all Xaa locations
  Clone ID: MRT4577_128486C.1.pep
KCDQIHRADDDVCDVVAMYAXQRSLYSEMRAEFVRSASMIDDARSQSRXYLQSCEQVARAERSTLVS

SEQ ID NO: 215888 - protein, 71 aa, Zea mays
  Clone ID: MRT4577_128487C.1.pep
IISINISHSIDILLKKKYSSPTNIILIVNTKKNNIKKKKKKKKKKKKKKKKKKKKKKKKKKKKKKKKACTR

SEQ ID NO: 215889 - protein, 166 aa, Zea mays
  Clone ID: MRT4577_128488C.1.pep
MECLLGLLKVRVVRGVHLAICDPLTHSSDPYVVLRHGKQKVKSSIKYRTINPEWNEELTLSITNMMNPVKIGLFDHDTFTKDDSMGNAEFCILNFVEIAKQDLSDVPDGTVIKTIRPEKGSCLATESHITWKDGKVSQDMVLKLRDTETGELVLHLTWVNIPGVAM

SEQ ID NO: 215890 - protein, 117 aa, Zea mays
  Clone ID: MRT4577_128489C.1.pep
GRSRKLGYLHTTLLCQHIFLPPGPISSHSRRILYVIHLGIPALRFQPNPFLPRLPHDYMNLAFDIHQGKVPRERYRYRVFQAVLTILPPRSVKMSSPKRRIEADVMNRVYCTVIKNS

SEQ ID NO: 215891 - protein, 67 aa, Zea mays
  unsure (1)..(67): unsure at all Xaa locations
  Clone ID: MRT4577_12848C.1.pep
RIYRPTSFLGARARMPTITLAVGQIHIDLHMMWCQPTNLTYYMHASXQILVFTYAKFATLYVFYQRT

SEQ ID NO: 215892 - protein, 369 aa, Zea mays
  Clone ID: MRT4577_128490C.1.pep
MKASIKFRDDERPLVRAKVPIVVLGLPFQSGLAAGRDLRELRFDVSTAFASGPALRLSYRPNDPALPFALAVRAGLGPLGSPARAPFALAAEFNLVAHDPSSSPAFFLRLKPRLGDFSLSHTLRSPAAAPAPRKAGEPSSDGRREVKPLDYMPPFTFTGSGLAADVAAAGTGSGVGTLLSGMRLTTRSVLPLWGRASLRFNWGLRVPPELLAADGKGACAPVSKMPLLVMSKVCIEQSPRSVTGTKAGGRAPAPALASTDAASDGDAAFSLVRRQLESLSVDNMLLRRAVEDLRAEVRSSNSRAAPPAASAAGRGLGRVAATAPQMQTQTQPYHVTKPDHRPRGAAREAAAAPDDVGEELKKALEARLR

SEQ ID NO: 215893 - protein, 212 aa, Zea mays
  Clone ID: MRT4577_128491C.1.pep
MTSPVVDAAGLVGRTSSDPLTVRPFCWVVLLHASPWSGTQRRRSREMECLLGLLKVRVVRGVHLAICDPLTHSSDPYVVLRHGQQKVKSSIKYRTINPEWNEELTLSITNMMNPVKIELFDHDTFTKDDSMGNAEFSILNFVEIAKQDLSDVPDGTVMKTIHTEKGSCLATDSHITCKDGKVSQDILLRLRDTETGDLVLRLTWVNIPGVAR

SEQ ID NO: 215894 - protein, 91 aa, Zea mays
  Clone ID: MRT4577_128492C.1.pep
THLISILLPFFLQLLFSSKPFLYLTYSPFITSPFLHSTYFLQNPLFSPFPISSHPKSLFSLSLFLHIIPQFFFPYAHFYLFTCLPPISPSL

SEQ ID NO: 215895 - protein, 60 aa, Zea mays
  unsure (1)..(60): unsure at all Xaa locations
  Clone ID: MRT4577_128493C.1.pep
MSREENVYMAKLAEQAERYEEMVEYMEKVAKTXXXXEXIVVGGRLILVVYWTLDLVPCRV

SEQ ID NO: 215896 - protein, 88 aa, Zea mays
  Clone ID: MRT4577_128494C.1.pep
ASEGSDLLYHSFIGTRCFTCRPTFWNHRFGFTRPGPGWSYFSEVRCCLFVPTTFCRVIKQLARPSLPCPKYHPALLWLMHTLPFTLLS

SEQ ID NO: 215897 - protein, 289 aa, Zea mays
  unsure (1)..(289): unsure at all Xaa locations
  Clone ID: MRT4577_128495C.1.pep
HESADAWVGSTGDTTTAEAEAPAPVGDYELLERLGGRPPYTSVWRAVSRSTGAPVAVKQVRLTGVPARLRDSLDCEVRFLAAVSHPNIIRLIDVVQTQSCLYLVLELCEGGDLAAFIRRNGSVDERVARNFMKQIGAGLQVLHRHHVVHRDLKPQNILLSSPRSSDAILKISDFGLARVLGPGEYADTSCGSCLYMAPEVMLFQKYNDKVDMWSIGAILFELLNGYPPFHGRSNVXLQCINRSTSLPFSEPLASTLGPDCVDICTRLLCTNPVKRLSFQEFLDHRFFRV

SEQ ID NO: 215898 - protein, 57 aa, Zea mays
  Clone ID: MRT4577_128496C.1.pep
VLDRDGRPFFGFFFFFFFFFFFFFFFIFFFFLFFLFFLGKKKNFPGGAKKYYFKQKS

SEQ ID NO: 215899 - protein, 289 aa, Zea mays
  unsure (1)..(289): unsure at all Xaa locations
  Clone ID: MRT4577_128497C.1.pep
MGSTGDTTMAEAEAPAPVGDYELLERLGGRPPYTSVWRAVSRSTGTPVAVKQVRLTGLPARLRDSLDCEVRFLAAVSHPNIIRLIDVVQTQSCLYLVLELCEGGDLAAFIRRNGSVDERVARNFMRQIGNQVXLIHDCLXNCVVHRXDVIXEMAPVAGAGLQVLHRHHVVHRDLKXRFLGPGEYADTSXGSCLYMAPEVMLFQKYNDKVDMWSIGAILFELLNGYPPFYGRSNVQLLQCINRSTSLPFSEPLASXLGPDCVDICTRLLCTNPVKRLSFQEFLDHRFFRV

SEQ ID NO: 215900 - protein, 53 aa, Zea mays
  Clone ID: MRT4577_128498C.1.pep
MVQNTSHSWDVLSFTGNAYNTNYYGFDEQQVALSNITRGNHGEQQPGSYLDKR

SEQ ID NO: 215901 - protein, 261 aa, Zea mays
  Clone ID: MRT4577_128499C.1.pep
MRIGHAEPITMGRITRGPPCWTRPRDETTSSQVFVRRRVGRRVGEGIERRVASSPSPQQKPLQFEVGDFVYIKVSPTKGVQRFGIKGKLAPRYIGPYEIIESCGPVAYKLKLPPKMSAIHSVFHVSQLKKCVLLPTEILAEPELEIEPDLSYQEYPSKILDCKESSTRAKSIKMYKIQWSNHSEEEATWETEEFLRSNFPDYLPKEIVSRPDSSPPTSISACTRRPTDSDHPRRRPAHRRDPQDLSYVIDHLTGAALPPKT

SEQ ID NO: 215902 - protein, 106 aa, Zea mays
  unsure (1)..(106): unsure at all Xaa locations
  Clone ID: MRT4577_12849C.1.pep
PPDPAPPGQPPPALPEGASAASPGGKTPPPQPVKGAQQHRESPPPHNIVAXQRDRSFFFSCYPPHIRHHAKRLHGLTQSTKSRIGSIISSKQRDPPATVCLLGRNP

SEQ ID NO: 215903 - protein, 221 aa, Zea mays
  Clone ID: MRT4577_1284C.1.pep
MARRASLLLAAALLVAVAAAAVPPTCERIECPAYEVVDSANGFEIRRYTDAMWITTAPIEDISFVAATRTGFLQLFDYIQGKNAYNETIEMTAPVLTRVSPSDGPFCASAFAVSFYVPAKNQADPPPAEGLRVDRWAGARYAAVRRFGGFVADADVGEQAARLEASLQGTRWAAAVNDARRADPASPYTVAQYNSPFEFTGRVNEIWMLFDAADADDDASM

SEQ ID NO: 215904 - protein, 42 aa, Zea mays
  Clone ID: MRT4577_128500C.1.pep
LKVRTLASPCTHISYPKGYALEPRSYRKIVAEHYNTAPLHLT

SEQ ID NO: 215905 - protein, 62 aa, Zea mays
  Clone ID: MRT4577_128501C.1.pep
AGAGVFLSVIHIIINPVNSTVPISSEALKHIGVYNPIKLFWVTTLYVVTSNTFMAHKKNLNL

SEQ ID NO: 215906 - protein, 721 aa, Zea mays
  unsure (1)..(721): unsure at all Xaa locations
  Clone ID: MRT4577_128502C.1.pep
GSGCTILLFVHTLSLAESSVLSSVGGFGNAGSGGGGGGRIHXHWSNIPTGDEYVPVAAVKGSILTSGGVSKGLGYSGGNGTATGKACPKGLYGTFCKECPLGTYKNVTGSSKSLCFPCPPGELPHRAIYTNVRGGAAETPCPYRCVSDRYRMPHCYTALEELIYTFGGPWLFGLFLSGLLILLALVLSVARMKFVGTDELPGPAPTQQGSQIDHSFPFLESLNEVIETNRAEESHGHVHRMYFMGPNTFSEPWHLPHSPPEQITEIVYEDAFNRFVDEINTLAAYQWWEGSIYSILCILAYPLAWSWQQWRRRKKLQRLREFVRSEYDHSCLRSCRSRALYEGLKVTATPDLMLGYLDFFLGGDEKRPDLPPRLRQRFPMSLIFGGDGSYMTPFSLNSDSVLTSLMSQAVPSWIWHRLVAGLNAQLRLVRCGNLKVTCLPVINWLETHANPSLAENGIRVDLAWFQATALGYCQFGLLVYAVEGDAALTEPDGSPRIKTEQQTPTQNMLADTQLSQSRIKDALMRKRITGGVLNSNSLRTLNDRRDLFYPFSHILHNSKPVGHQDLVGLVISILLLADFSLVLLTFLQLYSYSMVDVLLVLFILPLGILSPFPAGINALFSHGPRRSAGLARVYALWNITSLVNVVVAFICGFVHYKSSTKTHPSVQPWNLGTDESSWWLFPTGLMVLKCIQARLVDWHVANLEIQDRAVYSNDPNIFWQS

SEQ ID NO: 215907 - protein, 110 aa, Zea mays
  unsure (1)..(110): unsure at all Xaa locations
  Clone ID: MRT4577_128503C.1.pep
FWLDVLLPXPVSGVRVREGFSRGYTRFVGWAXXRXWPAVGMYEYPXSFVGGPLPWATXRLTLSPLTPLQHTTWGGAXSHKYQCLDRGDCKRSPRASCFRHPSSTGGRAYA

SEQ ID NO: 215908 - protein, 174 aa, Zea mays
  Clone ID: MRT4577_128504C.1.pep
MEAQAQDNRAEDGDGARQHVAGGVAATGMAMGAIPMHGFMVPKPEPVEFFGGMAVVRSKPPPRNRDRHTKVEGRGRRIRMPAACAARIFQLTRELGHKSDGETIRWLLQQSEPAIIAATGTGTVPAIATTVDGVLRIPTQSSSSSSPSSLTTVVDGDEASAKRRRKLQPTRAAL

SEQ ID NO: 215909 - protein, 43 aa, Zea mays
  Clone ID: MRT4577_128505C.1.pep
REKCLPVVFLLCIANTQIGSWLAHTAQANRLGPTTTKPDCPNY

SEQ ID NO: 215910 - protein, 123 aa, Zea mays
  Clone ID: MRT4577_128506C.1.pep
MGTDLIAVHLGWGGGDKDNLASTRAEMGEVREENKRLKTMLSRIGEDYRALQLQVHDVFQKGEPMEKKLADHRPLTITPPTGIEEAEFVSLSLGTGTGTHKKEEKSVIISAAEGKWGEDYLMM

SEQ ID NO: 215911 - protein, 85 aa, Zea mays
  Clone ID: MRT4577_128507C.1.pep
LVMLVSFVAWGNGCLSQIKYCLLQCKSNQIYILLATRWRGRNRGVVSSASPSPDLLLLTAAHRNPLLVCLLYVLLFITWPQGQLL

SEQ ID NO: 215912 - protein, 118 aa, Zea mays
  unsure (1)..(118): unsure at all Xaa locations
  Clone ID: MRT4577_128508C.1.pep
MSRVCIRSSLPQPTGTFFWTWKAPNTLDNLESGSTAVLAEAPGKKVIAVGSVSLCRSPSLDPRSMXSDARRCMAWLDAKDLKSVVXVSFGSAERMPPAQLMQLGMALXCWDVGQRRDL

SEQ ID NO: 215913 - protein, 166 aa, Zea mays
  unsure (1)..(166): unsure at all Xaa locations
  Clone ID: MRT4577_128509C.1.pep
SAYHDLLSGDELLSDSFTSKELDNGVLWEVEXKWVTQGPVDVYIGANSCAAGGEDERVYYTPVKVVDIGDTFRIQEQPSFDKRSLDSYIKTYIKNLTGGNQPKKADEFKXGVEGATNVLLTKLNDLQFFVGESMKDDASVVFDYYKDGATNPTLLYFSHGLKEIKC

SEQ ID NO: 215914 - protein, 138 aa, Zea mays
  unsure (1)..(138): unsure at all Xaa locations
  Clone ID: MRT4577_12850C.1.pep
RFLYSKLPSKLIQSTSSTSPRSLTSEGLLALQLVEKAIKEQFVTYIDYSLPLHLLIFNTTHVPTGLLWQKFPIMWIHSRISPKRNILPYTXAVAQMIITGRRQALAYFGKEPDIIVQPYSVSQDTWLXQHRQDWLLAH

SEQ ID NO: 215915 - protein, 111 aa, Zea mays
  Clone ID: MRT4577_128510C.1.pep
GTLGVPRPSRQDNIFRSRRPPSVPQSLIFFPSYPPPGDHTRPQPPAHFCRTPRPCRVPSHRTLVLHAEDCHGAAQGLGGASTATISEFTDDFCVSITLAVQLCLPRPRAPT

SEQ ID NO: 215916 - protein, 513 aa, Zea mays
  unsure (1)..(513): unsure at all Xaa locations
  Clone ID: MRT4577_128511C.1.pep
MAAAPEERLDVLNAAGDKIGVSKPRSEVHRDGDYHRAVHVWIYSESTGELLLQRRADCKDSWPGQWDISSAGHISAGESSLFSAQRELEEELGINLPVDAFELIFVFLQECVINNGTYTNNEYNDVYLVTTLTPIPLEAFTLQESEVSAVRYMRCDEYKSCLAKESREYVPYDVNGQYGQLFSIIEERYKENTESQSLTLQKQMNRYVPIHLEPDLTSLSEGDREALGYILKAAIVIDDIFYEQVWNSNKMLRDWLKGHSEFSPFDKLKWAYYSINKSTWSCLDENKAFLSTADSAVQLLTEATKPVSGWKGIEYRAAFPLHKPPGANFYPPDMDKAEFELWKSKLTDKEQNDATGFFTVIKRHDSLSSSSLTQSDGSDQTKTKDDLFIVPYSKEYRPFLEKAAELLEKASACSDSPSLKNLLRTKANAFLSNDYYESDIAWMELDSNLYLTIGPYETYEDSLSSYKATLEAFVGIRDDTATAQAKLCGDQLQDLEKNLPMDXIFKSDSISAA

SEQ ID NO: 215917 - protein, 134 aa, Zea mays
  unsure (1)..(134): unsure at all Xaa locations
  Clone ID: MRT4577_128512C.1.pep
MHQTTLVLRAPPLCSSPPLHCALPPAGVLNPPGAAEAAAAAGSVFLPGLGSGGDGXTAAPALPLEALLALGLRQRTAXXALVNAEGXANLASGIAAAGLXGXCDKAVGXLLCAVASXCPTNALVHRPVLLTCVL

SEQ ID NO: 215918 - protein, 103 aa, Zea mays
  unsure (1)..(103): unsure at all Xaa locations
  Clone ID: MRT4577_128513C.1.pep
DAXADAXAQQGQXXXRXXNERKXXEENXEXPXRXRGEGRXRXRPXRDRQRGQXAPXGGEQTXAQXPGDRNXXGHSXQRRXXPXXATKQXSXRTRKQXXTDRTR

SEQ ID NO: 215919 - protein, 381 aa, Zea mays
  Clone ID: MRT4577_128514C.1.pep
MYSPFLEKAAKCLEKASASSDSPSLKNLLRTKANAFLSNDYYESDIAWMELDSNLDLTIGPYETYEDSLFSYKATFEAFVGIRDDTATSQVKLFGDQLQDLEKNLPMDNIFKSDSISAAPIRVINLLYNAGDVKGPQTIAFNLPNDERIVNERGTSMVMLKNISEAKFKHILKPIADACIREEQKEYVDFEPYYTHIVCHECCHGIGPHSITLPSGKKTTVRRELQEFHSALEEAKADIVGLWALNFLIKKGLLPKSLSQSMYVSFLAGCFRSIRFGLEEAHGKGQALQFNWLYEKGAFVLQSDGKFSVDFTMVEDAVESLSREILTIQAKGDKPSAQSLLQSRATLTQPLRMALERIEHMQVPVDIAPVFSTANKLFADI

SEQ ID NO: 215920 - protein, 51 aa, Zea mays
  Clone ID: MRT4577_128515C.1.pep
AWHGSYGSPGRPPLSSILLPATTATKRPALNTLTESRSAPTQHGSTARRAS

SEQ ID NO: 215921 - protein, 61 aa, Zea mays
  Clone ID: MRT4577_128516C.1.pep
FSFSWATLSAYNTLHFRLTHVDPVYLQTYTCLLFIEKLLVHIFAYSHLLSSKNFCKLFKYI

SEQ ID NO: 215922 - protein, 102 aa, Zea mays
  Clone ID: MRT4577_128517C.1.pep
VLVSSTVIKPPILVAVISGEKHTHTVTRGQTAGGVRSRDHEHGRAVTRNITVKRETQPTDWRRPCAPSLQTQKRPTPRQIRESGARALASLRPQRETRAERA

SEQ ID NO: 215923 - protein, 371 aa, Zea mays
  Clone ID: MRT4577_128518C.1.pep
MTSSACEPSPVLPGLSPSHSSGQDVAHEECVGARGGDDEDPPRPFRQERDETEVRPLAVDPRLFDLQRATAARVRRFRHVPVETWLPAQIDPATVDLFSTRIQETFFRAQMSAQIALRVHRLLDLPTFLLAVDADSEVHLSYLPGLLTLLTTSGRYVEEWVRFFYAFVWIDPNHQWMRFRFEREDVTLHASQIHQLFGFNESSTRLHSLCYSTSNPPRRPHGGVAPEFDVVDFLICEIEDTVLDGLRARRQLPYAHYLCHIFAQLIRPPKFQGTLEASRLLFGSYRPTPEDLVSAPAPVIDTQAEDTTFHQFETQGAAAPDDDDDDDDDDDFGIPPPRPHSHDHEVGSSSVVPAAPPAVVPALAAILQTLT

SEQ ID NO: 215924 - protein, 106 aa, Zea mays
  Clone ID: MRT4577_128519C.1.pep
FPGAGDAYVSSSSQLSPPSCMHHTYTPCATERIGGHLSIYHCVRCVPLPWLIMGRPVRVCSKLVTDSPARDSRGTRRSSSRTAGTSIRTWTMLFTRGGGATGYFAL

SEQ ID NO: 215925 - protein, 117 aa, Zea mays
  Clone ID: MRT4577_12851C.1.pep
LLWLKATDFNSKCQFLNHSSRVDGRKPPNISPDTNKGFLKPQPCFDQPTNFCQPISFSFSRGRNYFPPFRGPSCNSFPRPAIPLVPWKTPLLFSLPPAQFTKPPFGFIRAHFFFVRE

SEQ ID NO: 215926 - protein, 70 aa, Zea mays
  Clone ID: MRT4577_128520C.1.pep
CLKSLRGLLLEKSPKIIRDVFLYDRSLQLVVLEGELDLGHVFLRMEGILQWWDDLLLNDLPAYLPGRAIE

SEQ ID NO: 215927 - protein, 50 aa, Zea mays
  unsure (1)..(50): unsure at all Xaa locations
  Clone ID: MRT4577_128521C.1.pep
YSLTFYDSLXPXPSTTFNTNSITLTLFYYTLLYILNNSTNTHLHNHLPIT

SEQ ID NO: 215928 - protein, 528 aa, Zea mays
  unsure (1)..(528): unsure at all Xaa locations
  Clone ID: MRT4577_128522C.1.pep
MAFLAPPQFKWPLSTRAAAVFREPSGGAGSRPSRINCSFSSTAVVDAECLSVGPPPSPHRTLPGCFGEALLNKEAVVAAAAXKPSLWLAQXAEVAGEVARMAQNDHPAALPPRDDTVDSFLSREVLRSEVGLDARRAGLVEMLEGEEHSSIFSDESEDDDDGGHSIAVTVKSARRSERRARRVRAAMKTAKCSSSMKPVGASSTRRKRLKGCLTPLGCLYKMTGPRLLTAEQEVEFSEGIQDLLKLEAIQKEVAQYNAGEPTFSQWAAAAGTDENTLRRRLNHGVYCKNRMVKSNVRLVISIAKEHEGPGMEFSDLIQDGMQGLIRGAEKFDASKGFRFSTYSHWWIKQAIRKSVLEQTQIIRLPAHMAEASSRVKECCRRLGRELKRLPSNEEIAVDTGMTIRRVEAAMSLPKYSVSFTSKVGCTDVTYQEIMPDTSAETAEETLHRWLMKKDVNTALDSLSPRKKQVMRYRFGIEGGRARTLHDIGQLMGVSRERIRQIELGAFRKLRSKNRLQSLQHYLRPAESW

SEQ ID NO: 215929 - protein, 635 aa, Zea mays
  Clone ID: MRT4577_128523C.1.pep
MPSPTIRRLDVASPVPADIDIANSVEPLPIADIAAELGLRPEHYDLYGKYKAKVLLSVLDELKAQQDGYYVVVGGITPTPLGEGKSTTTVGLCQALGAFLDKKVVTCLRQPSQGPTFGIKGGAAGGGYSQVIPMDEFNLHLTGDIHAITAANNLLAAAIDTRIFHENSQSDKALFNRLCPANKEGKRHFADIMFRRLTKLGVSKTDPNELTPDEIRRFARLDIDPESITWRRVMDVNDRFLRKITVGQGPEEKGMVRETGFDISVASEIMAVLALTTSLADMRERLGRMVIGNSKSGEPITADDLGVGGALTVLMKDAIHPTLMQTLEGTPVLVHAGPFANIAHGNSSIVADKIALKLVGKGGFVVTEAGFGADIGTEKFMDIKCRYSGLVPQCAIIVATIRALKMHGGGPEVVAGKPLDHAYVSENVALVEAGCINLAKHISNTRSYGVNVVVAINKFASDTEAEMKAVHSAAMAAGAFDAVVCTHHAHGGKGAVELGLAVQRACESQAEPLKFLYPLESSIKEKIESIAKFYGASGVEYSEQAEKQIEMYTKQGFSSLPICMAKTQYSFSHVPSMKGAPTGFVLPIRDVRASIGAGFIYPLVGTMSTMPGLPTRPCFYQIDVDTATGKVMGLS

SEQ ID NO: 215930 - protein, 144 aa, Zea mays
  unsure (1)..(144): unsure at all Xaa locations
  Clone ID: MRT4577_128524C.1.pep
QTTDDTGCHTWDPSSPPSCPEFHGLQGYTVPRSAMAALPSARXQVRGRSRXGIRCYYIGSATNLIMVTTTTLMLLAGRFGLTASAYRKATVVLKLXARESGLQTLDPVELTLIDTLSCGVVWHMLCVGIVVTLKNSGALYRIIG

SEQ ID NO: 215931 - protein, 50 aa, Zea mays
  Clone ID: MRT4577_128525C.1.pep
PNGCFLLPLYLKDITPTSSYFSWLLFCARAIILKFGLYLLKGRGGMHYLN

SEQ ID NO: 215932 - protein, 74 aa, Zea mays
  Clone ID: MRT4577_128526C.1.pep
LHSPHQWIQAASKLCLTARILSRHRWARSMAMSALSFVPHGGVLGRRIRFPSSRCRTQPRGFLLRVDDSWVHTG

SEQ ID NO: 215933 - protein, 48 aa, Zea mays
  Clone ID: MRT4577_128527C.1.pep
AILVCCSYVGLPYYHHPLIKYPLFCYPMLISRPALATQFAIKGSLAIV

SEQ ID NO: 215934 - protein, 84 aa, Zea mays
  Clone ID: MRT4577_128528C.1.pep
VLDLPAAPHPGKHPGHHLPRLSPRRVKAQHGVVGITPMVTVRPPPGSWKKLNPDPGVLIHPFHASSEAGKRTFSPTWKFVSCFS

SEQ ID NO: 215935 - protein, 43 aa, Zea mays
  Clone ID: MRT4577_128529C.1.pep
LERKVKVVTCVLFDVRFEYGKNARDMDQVARFEYVAGEELNRL

SEQ ID NO: 215936 - protein, 75 aa, Zea mays
  Clone ID: MRT4577_12852C.1.pep
PKMPVVRLLARHNCHSAHAARRIRYDYSTWDQTLLYDPHCSPYEPTEELPCLHLIGILGLLCSYARITGAEPLRA

SEQ ID NO: 215937 - protein, 300 aa, Zea mays
  Clone ID: MRT4577_128530C.1.pep
MEGLRIGAPIMQVYHEKSFILPDVSRVLACLYEKDVKFETHTASYRSLLGLQASSHAPVPFYEGPTFLEESREICRYIAEKYENQGYPFLLGKDALERASIEQWLHNEEHAFNPPSRALFFHLAFPLGEGEDDDIDVHTRKLEEVLEVYEQRLSDSEFLVGNKFTLADLVHLPNSHYIKASNKFLYLYDSRKNVRRWWDAISDRSSWKKVLRYMKSVEEKNKQEELKKQQQQQEEAPRTSTDPTRVDSRKQSRTEPRTILVPPADNESSASIVPRTKKPLPGDHLVSTQQIDGVGMPATN

SEQ ID NO: 215938 - protein, 96 aa, Zea mays
  unsure (1)..(96): unsure at all Xaa locations
  Clone ID: MRT4577_128531C.1.pep
LLFPFFRVAGPSPRLLFLGLLFARGLLLPLSSGPSXFPYRFRPFLLWAPCLSLVFVFFCASLVWLLLLSCFLFFPAGPFVVSLFWALSPLSXLVAP

SEQ ID NO: 215939 - protein, 130 aa, Zea mays
  unsure (1)..(130): unsure at all Xaa locations
  Clone ID: MRT4577_128532C.1.pep
FLPRFSQLAVVNPAAXVQQQQLLLFSPLVVGNAPKYLQQQLLQQIVPVLTQLVVANPVAYLQQLFPFNQLILWNFGGALQQGQRLLNPWGGGNPLVAAFLQQQQLLPYNQFFLMNPVLWGQQPMVGGAIF

SEQ ID NO: 215940 - protein, 92 aa, Zea mays
  Clone ID: MRT4577_128533C.1.pep
SRMNNGHIGFHLYLGPDRRCKYNRYAIGSTSQREQKGGAVKLFKSTRHSLCRITFIPSMSNIDLQIIQLEIHSLFPFKLVPFSAVKPKLPCA

SEQ ID NO: 215941 - protein, 55 aa, Zea mays
  Clone ID: MRT4577_128534C.1.pep
GLNRFTVSLPNTPRGLFSRRWSSYSENHSITRHQPIFILMIVTVTKPSAVSAVLG

SEQ ID NO: 215942 - protein, 51 aa, Zea mays
  Clone ID: MRT4577_128535C.1.pep
FNVNDFVYNLIQDSSCAKELHKDGTSYSDFDLELDSLSVSTLAVSGCHGSG

SEQ ID NO: 215943 - protein, 100 aa, Zea mays
  Clone ID: MRT4577_128536C.1.pep
EDQGCICIILENLDSHRRGATFGETVKKAKLFPPKSHTKLRYYAKGARTSSARTKPEKRIDMCNQGEENWRLRQQNLSETHNAGRGNLRPWGEKGIETLI

SEQ ID NO: 215944 - protein, 135 aa, Zea mays
  Clone ID: MRT4577_128537C.1.pep
GDGSRGRRSPRRRWQRPLGVGGKRMRRAPQASYPRRAPATLHASRSNSADPGQPETAVTAAGGEGRRRRENPANTLRALTGSRLRLYRSGSEETVGNEGGEGLGNRSRAERGQRERGGGRSGLAVVPGPAGLEVP

SEQ ID NO: 215945 - protein, 335 aa, Zea mays
  Clone ID: MRT4577_128538C.1.pep
MGEPSADFSAEDVSSISGPCHNTCLKPCCEHGCACWEDEYVEAVISCVQDDLAVEEIGIALTEVTTIDLLAVDEGSGLHEDSDDDYIDDPILSLESDSTDDLVNVDFISPAFPIGGVTESSISNSVAGNSSINGTPRLVSAMKGTRAKKGIKTKLSVSWATDVYDPPITSDSHTVKGHRKSSTKGNYKYKCSKSSSSSNHSTTGSKKDKKHSRHRSSSEGGSKRDRKHSYCSSASSNSSRVVTNGSLYGNTCSGGGISSSSRTTTCVPESAKVSTLMVAENATPQERVPVLKTPEPIKCTTSYGKEKPFALLSRQFPPARYKGMFSFWSQNQLAS

SEQ ID NO: 215946 - protein, 38 aa, Zea mays
  Clone ID: MRT4577_128539C.1.pep
RGGACTSGDTYANLHQGTKILGAKKHNPTIKRQHVKSL

SEQ ID NO: 215947 - protein, 117 aa, Zea mays
  unsure (1)..(117): unsure at all Xaa locations
  Clone ID: MRT4577_12853C.1.pep
TRGYRGTLFGVSGFPXGLARLXRLFFLLAGLKKVSPGKFNQENFGGGGVPKRVKGSGKGPLGNFFFGGPRFSKGIGPIWGEKRFPKGPRPLGIGGFKREVFFKKVDPPFTRAIILEG

SEQ ID NO: 215948 - protein, 266 aa, Zea mays
  unsure (1)..(266): unsure at all Xaa locations
  Clone ID: MRT4577_128540C.1.pep
MWQPKYLILVAVSLSVLACAVVGDGGGRPLVTAVTKDAATSLYTIPVKSGRPLVLDLSGPIVWSTCADGAPHDTLECNNIDCMRAHRFHPPGCPHTGYGMPDVHNPFRCKCTAHPHNPVSGDTASGNMTRVALSANATDGMNPLGPVSFTAVTSCAPNTLLQGLPAGAVGVVGLARFSLAFPAQVAGTQGVANSFALCLPSNPGNGVAIFGGGPLFVLXGQPISEMLGGSTPLRKHGDSPGYYIRASKGITVDGLRILPGDHATLT

SEQ ID NO: 215949 - protein, 247 aa, Zea mays
  Clone ID: MRT4577_128541C.1.pep
KIRSSRRSDRGLLQVCARFPARSLHGALEIPQARRVRLIPCRACLSPSSELALPMMAAASSPSPSPSALQCASPLPWLGFPAPALCRVLLGSRPCSPWLPSSSLDPPPAAPLHGVLPCAGRPALSPGVHPSPSSLLHCAELSPAGPFSSQLMDLAPLRKSGCLRAPFFSAATRTTARARPCSPFGCSRGAILQCRVLQFSSSAVRAIPARHGHHAQTSGVFLPCAASQPACRAQLPPCFSPCLAVVL

SEQ ID NO: 215950 - protein, 85 aa, Zea mays
  Clone ID: MRT4577_128542C.1.pep
RVPFVFSGVNTHRAAWILAGGRPFLLSSVCSATNRIALPQTTIRLEATEGSEGSADAGVRCWRSCCGPWPIFHLRAEATACRCQV

SEQ ID NO: 215951 - protein, 57 aa, Zea mays
  Clone ID: MRT4577_128543C.1.pep
GGECKMEGGHGQVLLKKGLIGHDRQQATAVRVVDAVAHRLGTRSCSGFWALFIYSLL

SEQ ID NO: 215952 - protein, 51 aa, Zea mays
  Clone ID: MRT4577_128544C.1.pep
KTNYGCIFYAYLANTNTNELSLVCGLTAVTRRIRKNSISSCNRFTQKPPVF

SEQ ID NO: 215953 - protein, 82 aa, Zea mays
  Clone ID: MRT4577_128545C.1.pep
DTPHAALFLFCVLAPRFPPSILGNHSLFPTYLEGCGKHFGRLAYLNATLAYVGLWMKLSKEEAKMDRLISVVIADGFSLPHF

SEQ ID NO: 215954 - protein, 44 aa, Zea mays
  Clone ID: MRT4577_128546C.1.pep
PVQIHEFKEAFNMIDQNRDGFIDKEDLHDMLDSMVYNPTDEYLD

SEQ ID NO: 215955 - protein, 39 aa, Zea mays
  Clone ID: MRT4577_128547C.1.pep
MPPGLSGAAMATSKAGSGPEPSMPVSMAEEARPAGLEVP

SEQ ID NO: 215956 - protein, 66 aa, Zea mays
  unsure (1)..(66): unsure at all Xaa locations
  Clone ID: MRT4577_128548C.1.pep
PKSAQQSVKSLDHHNAEKSNLFVRRPIMHGGASQKKKTKNPXPSRSRHVYKGQCKPRWSSSSLAPR

SEQ ID NO: 215957 - protein, 73 aa, Zea mays
  Clone ID: MRT4577_128549C.1.pep
EFFVFSRAWLLHWGAGHCCSTGTSDSRGLHQGVRVLTTMAEPCGCSEGPTTPTMIALETLPAIYLQGANPDGH

SEQ ID NO: 215958 - protein, 99 aa, Zea mays
  Clone ID: MRT4577_12854C.1.pep
RSGYAFFMRGKVLLDQCLSLWWRRVPWPCISPPLTIIIMGYGFCLQCQQDRLTIAPRPPVWSPPRFSFGSCSQGTILKLQCQSGVCQKKLGGFCSCSGP

SEQ ID NO: 215959 - protein, 85 aa, Zea mays
  Clone ID: MRT4577_128550C.1.pep
ARSELHDDGALLFLVTRSGVADGLRAAPRGVDRTGDALHGGSLPQEQARGAGGQRERRRELVHREEGERHAPPPEPQVSSCSVTM

SEQ ID NO: 215960 - protein, 75 aa, Zea mays
  Clone ID: MRT4577_128551C.1.pep
RDIMPTKFLPNRNSTRLLSFRWSSLAVSPVPRPPPPLPLPYYARCTAACLGGLLVPTTGLVCFFSGNEHPPNAQC

SEQ ID NO: 215961 - protein, 53 aa, Zea mays
  unsure (1)..(53): unsure at all Xaa locations
  Clone ID: MRT4577_128552C.1.pep
MADKGDGPALGIDLGTTYSCAXGCWXHQRAEIIANDQSYRTTPWYGVFTDCLR

SEQ ID NO: 215962 - protein, 41 aa, Zea mays
  Clone ID: MRT4577_128553C.1.pep
ISTYAVSIAGYTMVINNGIVTVGLRTPNTLMLASSYFTPQA

SEQ ID NO: 215963 - protein, 204 aa, Zea mays
  Clone ID: MRT4577_128554C.1.pep
GGLMLVSPLCKSPSWSEWLYNKVLLNLLYYYGNRGLVKECLLQRYFSKKLRGDAQCPESDIVRASRSLLDDKQGENIWRFLHSINERHDLTDSLKKLQCRTLIFVGESSQFHEDAIHMATKLDRRYCALVEVQDCGSLVTEEQPHAMVMPMEYFLMGYGLYRPYQLSSSPRSPLSPCCISPELLSPESMGVKLKPIKTRVGISL

SEQ ID NO: 215964 - protein, 498 aa, Zea mays
  Clone ID: MRT4577_128555C.1.pep
MALAGTGVFAEILDSEVYRYYADGEWRSSASGKSVAIVNPTTRKTQYRVQACTQEEVNKAMDAAKVAQKAWARTPLWKRAELLHKAAAILKEHKAPIAECLVKEIAKPAKDAVSEVVRSGDLVSYTAEEGVRILGEGKLLVSDSFPGNERNKYCLSSKIPLGVVLAIPPFNYPVNLAVSKIGPALIAGNALVLKPPTQGAVAALHMVHCFHLAGFPKGLISCVTGKGSEIGDFLTMHPGVNCISFTGGDTGIAISKKAGMVPLQMELGGKDACIVLEDADLDLVSANIVKGGFSYSGQRCTAVKVVLIMESIADAVVQKVNAKLAKLKVGPPEDDSDITPVVTESSANFIEGLVMDAKEKGATFCQEYRREGNLIWPLLLDHVRPDMRIAWEEPFGPVLPVIRINSVEEGIHHCNASNFGLQGCIFTRDINKAILISDAMETGTVQINSAPARGPDHFPFQGLKDSGIGSQGITNSINMMTKVKSTVINLPSPSYTMG

SEQ ID NO: 215965 - protein, 74 aa, Zea mays
  Clone ID: MRT4577_128556C.1.pep
CGGYTDFQRDGVLGPGERRYLGVRVVVLTTLFGMRGKNGSGPPSQVIREWPSPSNYSLPCPPLFSIILPVCSNV

SEQ ID NO: 215966 - protein, 59 aa, Zea mays
  unsure (1)..(59): unsure at all Xaa locations
  Clone ID: MRT4577_128557C.1.pep
FEIIHVXKKKKKKKKKKKKKKKKKKKKKKKKKKPGICRHKFFPTRMHKLTRIGEIGDRS

SEQ ID NO: 215967 - protein, 60 aa, Zea mays
  Clone ID: MRT4577_128558C.1.pep
GHVLLFGTHFSTSVCPSYPAPSGMCAFVCSNALTPKRILGFFAIYHAEKMSPRALRCSLC

SEQ ID NO: 215968 - protein, 42 aa, Zea mays
  Clone ID: MRT4577_128559C.1.pep
GRRFWLLKKTFRGRFKTPIFQRNPTFLRKNELIFLCKMKIFW

SEQ ID NO: 215969 - protein, 63 aa, Zea mays
  Clone ID: MRT4577_12855C.1.pep
LHTEFPTLYITNLCIHSKHMTPSTSSTTATTTKFIISITPRYQSPTILTFSIALIILNNLQLL

SEQ ID NO: 215970 - protein, 118 aa, Zea mays
  Clone ID: MRT4577_128560C.1.pep
GVNTPYLQGGAFPSQNGKAKNKILKSLLVKPQRAPTPFLKKGVGAKIFLVSRLHKWGPLPSKLLWATANQVCPPFQIHYSWPKTKAATMMLFHSILFRSTRTIKFFLFGSPANKHNFF

SEQ ID NO: 215971 - protein, 80 aa, Zea mays
  Clone ID: MRT4577_128561C.1.pep
QLTCHGYIALMILFFEYKSCQNFRPPPPGFGVSSGQQKKKDLKWQQLHGVLTVLGEPPCAAKTRAEHWMRWRTHAPPMDA

SEQ ID NO: 215972 - protein, 94 aa, Zea mays
  Clone ID: MRT4577_128562C.1.pep
LSAVLVLRMEDQARVSCVVFVCAVCLRGYPADEHRVQCHSTRRLPAPPPHTSPLWAGREHTCVAQEEKLSLDCGSHGRRWILGSIFIKIETVLW

SEQ ID NO: 215973 - protein, 261 aa, Zea mays
  Clone ID: MRT4577_128563C.1.pep
MGRVIRAQRKGAGSVFKSHTHHRKGPARFRSLDFGERNGYLKGVVTDVIHDPGRGAPLAKVTFRHPFRYKHQKELFVAAEGMYTGQFVYCGRRATLSIGNVLPLRGIPEGAVVCNVEHHVGDRGVFARASGDYAIVISHNPDNGTSRIKLPSGAKKIVPSSCRAMIGQVAGGGRTEKPMLKAGNAYHKYRVKRNSWPKVRGVAMNPVEHPHGGGNHQHIGHASTVRRDAPPGQKVGLIAARRTGRLRGQAAATASKADKAT

SEQ ID NO: 215974 - protein, 325 aa, Zea mays
  Clone ID: MRT4577_128564C.1.pep
MATPPNPPPPSTPIAAAAPLLPAEFTRFTFRALYVRRTGPSSREMIQPGRPYDELGRRLTSDYPVYDGRGSDAALVARMQGITVLVGNAHQLFTIVFETGRFKGSTLLINGMVTEGSDEWAVYGGTGAFAMATGVIRRKNLFAGGGDSGGNSDELSMEVFCPVFGSPQQPPKDDEDGSAVTKIGLWGGPGGSAQDITTTEAPRRLNSVTIRAGIAVDSIEFTYTGKDRQRRTAGRWGGLGGNVRTIDLGDNEHIREVSGTYGTFEGATTLTSLRFITSTRAWGPWGTENGTRFCITAPIGSSVVGFYGRAGTRLVDAIGVYLRQL

SEQ ID NO: 215975 - protein, 261 aa, Zea mays; identical to SEQ ID NO: 215973
  Clone ID: MRT4577_128565C.1.pep

SEQ ID NO: 215976 - protein, 91 aa, Zea mays
  Clone ID: MRT4577_128566C.1.pep
PPLIPPPIGKTCTPPGPRPEFPGPPPRPPILNPFQIPPPVLKFPFSRPSFKLYFLRPQNPLPQFLPLKIFPFSPPRSSKIISSKPIFAFLN

SEQ ID NO: 215977 - protein, 75 aa, Zea mays
  Clone ID: MRT4577_128567C.1.pep
TSLPLLSCRAVTLIPTLSSASPASATIVSTAALFFSQSYLRLGEPRIDGTTRPPLCLLLGHTTPLTPSHRLIRLT

SEQ ID NO: 215978 - protein, 60 aa, Zea mays
  Clone ID: MRT4577_128568C.1.pep
DWVPQAGRVSYLPHTFSTVRDLIVIGSQPAPPSTYDGAKNRVPADRPRAADHHRHRAHRG

SEQ ID NO: 215979 - protein, 81 aa, Zea mays
  Clone ID: MRT4577_128569C.1.pep
YVYKGGAEGINERHGQKDPPVAACFVPLFKFVFFFLTCNNYSIPKKEFVSMNTTTLLARHEIIRFQNLESGIQIRNNRDDG

SEQ ID NO: 215980 - protein, 116 aa, Zea mays
  Clone ID: MRT4577_12856C.1.pep
TQFLVPFSHPDSPPSLSALLSLPPPPPLFAPPPPSTTPPLIVTAGGSLPRIRSCLQTIGDVIMAIISGIGRILTAIVNGVVSFCAILVRFLTCGYCGSKGGRAKRRGGSHMRTTRV

SEQ ID NO: 215981 - protein, 213 aa, Zea mays
  Clone ID: MRT4577_128570C.1.pep
MEWLSWRTVCCLSVLCTVLFLRPVEGIRFVIDREECFSHNVEYEGDTVHVSFVVIKADTPWHYSEEGVDLVVKDPNGAQVRDSRDKTSDKFEFIVQKRGVHRFCFTNKSPYHETIDFDVHVGHFSYFEQHAKDEHFAPLFEQIAKLDEALYNIQFEQHWLEAQTDRQAILNENMSRRAVHKALFESAALIAASVIQVYLLRRLFERKLGTSRV

SEQ ID NO: 215982 - protein, 153 aa, Zea mays
  Clone ID: MRT4577_128571C.1.pep
ASGDHSSSEHKVKDPNGAQVRDSRDKTSDKFEFIVQKRGVHRFCFTNKSPYHETIDFDVHVGHFSYFEQHAKDEHFAPLFEQIAKLDEALYNIQFEQHWLEAQTDRQAILNENMSRRAVHKALFESAALIAASVIQVYLLRRLFERKLGTSRV

SEQ ID NO: 215983 - protein, 82 aa, Zea mays
  Clone ID: MRT4577_128572C.1.pep
KTRRDPRVRKKKKKNHQFILNEPSKQTRATNKNARATPTPESNIRAHVTHPRHRENQGRTQLSQQAPHAPCLSRRDSKEAPT

SEQ ID NO: 215984 - protein, 64 aa, Zea mays
  Clone ID: MRT4577_128573C.1.pep
VLLVGVSVKARCVLYLVFGFGALCFGISREGFRFGLWPGSFSFLSRPFVRAGVSLHVDVGGGII

SEQ ID NO: 215985 - protein, 127 aa, Zea mays
  unsure (1)..(127): unsure at all Xaa locations
  Clone ID: MRT4577_128574C.1.pep
RPGAHTIEGKCVVHSFKNYTRLDNVGPEDFFCRFEYKAATGSFTPDRVAVNCKCEMPYNPXDLMVQCDACKHWFHPSCVAMTIEQAKKLDHFVCSDCFKENGSKRLSNAYATSPNFEPKAEPKRQRR

SEQ ID NO: 215986 - protein, 213 aa, Zea mays
  Clone ID: MRT4577_128575C.1.pep
MEWLSWRTVCCLSVLCTVLFLRPVEGIRFVIDREECFSHNVEYEGDTVHVSFVVIKADTPWHYSEEGVDLVVKDPNGAQVRDSRDKTSDKFEFIVQKRGVHRFCFTNKSPYHETIDFDVHVGHFSYFEQHAKDEHFAPLFEQIAKLDEALYNIQFEQHWLEAQTDRQAILNENMSRRAVHKALFESAALIVASVIQVYLLRRLFERKLGTSRV

SEQ ID NO: 215987 - protein, 65 aa, Zea mays
  Clone ID: MRT4577_128576C.1.pep
HSVDRSNLSFGVDDAITEGGGAAPSSPIHGVRLDVQRLGGRDETHPGEGDELDPQHGGRVTAIFS

SEQ ID NO: 215988 - protein, 49 aa, Zea mays
  Clone ID: MRT4577_128577C.1.pep
MTCRRRIKKKKKKKKKKKKKKKKKKKKKKKNQKKKKKKKKKGALGCSHC

SEQ ID NO: 215989 - protein, 54 aa, Zea mays
  Clone ID: MRT4577_128578C.1.pep
HVFVFSRQKAQPPPGQDGGALEGTLADDEDSRRLHSGHAHHTTKHRRPRSTQTS

SEQ ID NO: 215990 - protein, 213 aa, Zea mays
  Clone ID: MRT4577_128579C.1.pep
MEGLSWRTVCCLSVLCAVLFLRPAEGIRFVIDREECFSHNVEYEGDTVHVSFVVIKADTPWHYSEEGVDLVVKDPNGAQVRDSRDKTSDKFEFIVQKRGVHRFCFTNKSPYHETIDFDVHVGHFSYFEQHAKDEHFAPLFEQIGKLDEALYNIQFEQHWLEAQTDRQAILNENMSRRAVHKALFESAALIAASVIQVYLLRRLFERKLGTSRV

SEQ ID NO: 215991 - protein, 47 aa, Zea mays
  Clone ID: MRT4577_12857C.1.pep
STSRSGAPEQEEAIDKHAAQLNMLTDDCNLPNFVSWLRFFTLNTTLT

SEQ ID NO: 215992 - protein, 124 aa, Zea mays
  Clone ID: MRT4577_128580C.1.pep
GCFRDSPVSTDSSDRWSRAAPSNDQRERPRIVLDPPKRDASATPTPPAEAGRSRPSPFGAARPREDVLADKGLDWKKMETEIDQKRTSRPTSSQSSRTESAQPSRPGSPGSQISATGSEAAPTA

SEQ ID NO: 215993 - protein, 76 aa, Zea mays
  Clone ID: MRT4577_128581C.1.pep
KGQRANGLNYSIQIKFVIVCLCVCFAMEKINKWKLTRQEEGWRNSSCTVQCTIIIYITRTCSLSRSSSLIRSCKTS

SEQ ID NO: 215994 - protein, 71 aa, Zea mays
  Clone ID: MRT4577_128582C.1.pep
SGVCQAYTLNRIRDPGFQVKPRPHLSKDIMDMGKPASELVKLNTTSEYAPGLEDTLILTMKGIAAGMQNTG

SEQ ID NO: 215995 - protein, 89 aa, Zea mays
  Clone ID: MRT4577_128583C.1.pep
RILNSPATAGRQQQVSESELMRLLTPGAVLCTLSWMRLLLRPEPPWRLQTSCRSNGLTEEEADSRATVLLCNAWSAQHASDLSTPARKG

SEQ ID NO: 215996 - protein, 71 aa, Zea mays
  unsure (1)..(71): unsure at all Xaa locations
  Clone ID: MRT4577_128584C.1.pep
AGLPLRFLLPNIPLXRAHVSGFFFPPKYLPLCXQAVYPLNPPSPKYPXXQPXKISHFLIRYFSPSYPHFVI

SEQ ID NO: 215997 - protein, 80 aa, Zea mays
  Clone ID: MRT4577_128585C.1.pep
MSRSGQPPDLKKYMDKKLQIKLNANRVVIGTLRGFDQFMNLVIDNTVEVNGNEKNDIGMVVIRGNSVVMIEALEPVAKAQ

SEQ ID NO: 215998 - protein, 146 aa, Zea mays
  unsure (1)..(146): unsure at all Xaa locations
  Clone ID: MRT4577_128586C.1.pep
QRCNEVLGSGNWKCKATTKERMKIAKTLNEGQXPPLHDAKVEVRHPYVLLAAHKNHIQQQQHVAVQNXCVNKVGALNXEXKSEMLGSLWVXWVILAHSEMTAMMVEXNEWVGHKGAYALSQALKDIACVGETLETRQAGCTMDVEG

SEQ ID NO: 215999 - protein, 88 aa, Zea mays
  Clone ID: MRT4577_128587C.1.pep
AWRPGRVSTGQRRAVPLRWRGAGGLLGVVVGAPCGDPSLGGAAGAPCIRRRASAGSMEAAGAALLGGGRPSRGHHCGAVFFAAPTGSS

SEQ ID NO: 216000 - protein, 71 aa, Zea mays
  Clone ID: MRT4577_128588C.1.pep
GRVRMMWPGSSKECNIDLDCIPRLLSSAVRRGGASLGGLFAKLLVNMGSDSRLMFSLHHTEACTESVWIGA

SEQ ID NO: 216001 - protein, 65 aa, Zea mays
  Clone ID: MRT4577_128589C.1.pep
GNISGGSIQWDQMMCRTKQRVKPPRWGGQRRRKGRMATYNVFLEWLGLVRICSQLGMLRIDCAEI

SEQ ID NO: 216002 - protein, 57 aa, Zea mays
  Clone ID: MRT4577_12858C.1.pep
RSPALEPAVWSSHRSIPIEAAWLLSRMCTMVVQSSILSSVRQGFYAVPQHRGSPPEN

SEQ ID NO: 216003 - protein, 146 aa, Zea mays
  unsure (1)..(146): unsure at all Xaa locations
  Clone ID: MRT4577_128590C.1.pep
MGNGSESVLSRRTRRVDPLDGLRKYEGGYNITDRHYWSSAIFTGRFGYLMSGLWITGGIAFAAGLLGSKIFFPRKKERYTDLDYFLERYQVLTVXLCVLLTALAMGSSAGALRGTVQLHSAAESVKEKIGTTALEATAVIYNVTGA

SEQ ID NO: 216004 - protein, 119 aa, Zea mays
  Clone ID: MRT4577_128591C.1.pep
CDCYSVTSPHTALRPPDKHTRPLYRQRLRLLHRARTQLLLPPTRTAPCLRQNAMLRRHRHLQQLCWTRQHRAQPSSVSETDTLNKKSTRARLLSDLAILCIYTLNAGNSTPMHAIDCLR

SEQ ID NO: 216005 - protein, 49 aa, Zea mays
  Clone ID: MRT4577_128592C.1.pep
VICTGEAHVLTSEVIKVIPLNRGHHVQLKPGVSEPRFGWRGQSRDSIGT

SEQ ID NO: 216006 - protein, 53 aa, Zea mays
  Clone ID: MRT4577_128593C.1.pep
SLCSAQEAVGAMLEIPNSGRDPQGQRSILQCGMCPSGFIIASSALFLDDLRIF

SEQ ID NO: 216007 - protein, 346 aa, Zea mays
  Clone ID: MRT4577_128594C.1.pep
RKRAKRINPDADADLLEGGEDDGVAEMDQDFDEDQDLDEHQDQETNPLLLALDEQRPTKEQIVKQWYSQDVFTEAATGITEQSDTEDERESLQRNMKKMVTGKTEKVAKAQRLQRDDIEIVPAEPVRDEEDTSSSSGESDVSEDELDDYRKAEVLAYAKKMLRKKQREQILDDAYNKYMFDDEGLPNWFVEDEKRHRQPMKPVTREEVAAMRAQFKEIDARPSKKVAEAKARKKRVAMKKLDKARQKADAIADQNDINELSKRKMIDRIYRKAMPTKPQKEYVVAKKGVQVRTGKGKVLVDPRMKKDKRASGTCKKGKKGGKGGKGKGGQKGMRGKTGKKAGKAPS

SEQ ID NO: 216008 - protein, 452 aa, Zea mays
  Clone ID: MRT4577_128595C.1.pep
MSRPHDGHRSFFPMGNPFRMILPRGARLSPKLTELLTSYEDGLASSLRKVKPEATSEVFTLSWMKLAVECLSELHTNIATLITELELPLSDWDEKWVDIYLNSSVKLLDICIALSSELSRLDQGQLLVRYLLNVLNSGSDMPSQEQLRRAEVSLKEWIERASERSPRLDSCLAALQELSGNLSLMKVRHSAKGKVLMRALYGIEAVTVLICSVLVAVLSGTFKPLVDFDVPEKFGWSTAFIDLQKAISGELSRQLSRGSVAAVKELEDVDVCAKQLHTLTCTVQLEEENASLAHSFSRSKEVVLADTTAQGRGHADNLKLADDSSCQHEVIMLQSITTEGGMDTADIKEDTETIGHTKEVMAPEKIIDRGHQDDNTKQDTGVVTDISCLERREELLNCISRMSKSAERLQLGLDSLSKRVDDFFHIVLTGRDALLCNLRFSNGGKVAAEVRS

SEQ ID NO: 216009 - protein, 89 aa, Zea mays
  Clone ID: MRT4577_128596C.1.pep
DSTNTSTAPSPPPMEESLTTRSDQDKVHKDVMGLTGGYAGSEDGLKVSLANNPTPPEKSESDPQSHESPRRDEPQAPGVGPLYRRGIAR

SEQ ID NO: 216010 - protein, 57 aa, Zea mays
  Clone ID: MRT4577_128597C.1.pep
SWLHGILIRNWMSSSARLFVKLFWEFLGFVRLICRVLFVFGVSAFEVFFKDFLKILN

SEQ ID NO: 216011 - protein, 84 aa, Zea mays
  Clone ID: MRT4577_128598C.1.pep
LPRGVEKFQKLERAKAKDRGGIGRLSRDGAQTRQEVLFPATYGREGVRNQNGGRMYRQRLPLFGGGGAARLKLYPGPFPRSLSP

SEQ ID NO: 216012 - protein, 63 aa, Zea mays
  Clone ID: MRT4577_128599C.1.pep
LTLTLSGQNTMINQGLGHGAGRLTSSVGSMSRGASMHIVDKGSRAGSTSRASMTLKRGARPTS

SEQ ID NO: 216013 - protein, 37 aa, Zea mays
  Clone ID: MRT4577_12859C.1.pep
CDRVVDVELVFFQKGDCGVSLQLFLNQFVNFGDLEEI

SEQ ID NO: 216014 - protein, 170 aa, Zea mays
  Clone ID: MRT4577_1285C.1.pep
RPASRRPFLGGCANRSWGSWASASPGRQPAPSATSEFAHTRSPCPSRVPRCESDRSAGGSRRVLAPPISRCACACARDPNGTIPIIARSLSIASSGTDACICWASVPSANPTFHEAACGVRGRRSATHNCRSVSARTGARGRQRGGVENRRSTLCLWRRKWCCHLSEIRN

SEQ ID NO: 216015 - protein, 99 aa, Zea mays
  Clone ID: MRT4577_128600C.1.pep
PCKASVTASRSVVCPDLPGLHPPPALVNGASHKSCLDHEYLVDINGFHFCPWPQLVRISLLTMRGLAMFLPEIRASLSLPMYSARLRYVWREAQGAPFM

SEQ ID NO: 216016 - protein, 121 aa, Zea mays
  unsure (1)..(121): unsure at all Xaa locations
  Clone ID: MRT4577_128601C.1.pep
MHARGSSQFVSSELLNLPVLFTPTTDYIGGHFNQVFGRKTNXKKTGSGLRDLFLTVRKHYATELAEGPYKGIQLDSVLLTKFLENGTCXRMDDHECDPSTYNNTTXKYDATAVTEAKALKK

SEQ ID NO: 216017 - protein, 157 aa, Zea mays
  Clone ID: MRT4577_128602C.1.pep
KPLQESSEVDAARSGRPGKTNKTKAEFQTPGFQLTPCFREGGNFSSSYRVKRPRGTCIQVRSIKRILGAPARRRSEAPCRIGSQQQPQNPEKEGGSPTRGVSGSCKIAHSRQVGARGRQRHTQQRSWGRRCRQTADRQGSAATDTARAGAEPTRPRT

SEQ ID NO: 216018 - protein, 92 aa, Zea mays
  Clone ID: MRT4577_128603C.1.pep
VGGVFFFFFFFFFFFFFFFFFFFFFFFLNRGQESIVLAGVSRIKNPLFFPLGGGGGISLPIFYKPTIAHGPFDNPFFPGMGQCPHNDNPFNE

SEQ ID NO: 216019 - protein, 78 aa, Zea mays
  Clone ID: MRT4577_128604C.1.pep
ALDNPARDTIVYKVWSFSDAVINMRTLVWVAIDKYLMLKGSIGTYIHSRVILLRRRLRALCRYWLTTAICDQRTTGAQ

SEQ ID NO: 216020 - protein, 92 aa, Zea mays
  Clone ID: MRT4577_128605C.1.pep
LSLVCIIALCAYNILSCLCLSCLAFPWLHLDLILSVHELLWSCYMCHLTARTFGSLTIHYMLTLLSCWSIDTFFISPTSYSYLLHELWIFYS

SEQ ID NO: 216021 - protein, 74 aa, Zea mays
  Clone ID: MRT4577_128606C.1.pep
QTITKQLGIRTLSVAGHYSPALDAAELGEHLAVNCAHTRDGRVARAGRGHEAGRPQHPARKDDVLGELHAHSAG

SEQ ID NO: 216022 - protein, 51 aa, Zea mays
  Clone ID: MRT4577_128607C.1.pep
NITNEYLDPFHSCFDLFIYVSLFVVKDSCFELNTSSSLYKVPAQVETMTRI

SEQ ID NO: 216023 - protein, 121 aa, Zea mays
  Clone ID: MRT4577_128608C.1.pep
VFPPLMPDGNSDTELPTVGAALYVIRRVTKAPTRVESRGGVDDFVSLEDVLQHWMCRCSFKLMRLMKCAAVIECICVVCYPERSVVGSDPPCVCVGVGGCTASRASGMSWRSDWRRAWIGR

SEQ ID NO: 216024 - protein, 59 aa, Zea mays
  Clone ID: MRT4577_128609C.1.pep
YITNEYLDPIHSCFDLFIYVSLFVVKDSCFEPNTSSSLYKVAAQVEAMTRIKLKKRAED

SEQ ID NO: 216025 - protein, 39 aa, Zea mays
  Clone ID: MRT4577_12860C.1.pep
LRSVHAYPLTQELLPIGFSTNHNDHLRQSTVALGLGGFT

SEQ ID NO: 216026 - protein, 253 aa, Zea mays
  Clone ID: MRT4577_128610C.1.pep
MKMSTRGQPAEGHLWLVFTMLFVTSAVRSVGASSFAPPPSVSVSSPAYDPVIKVVGKVYCYRCFDEAHPDESHGKKHLQGAMVKVTCQADDQALVAFGYTRSNGKYSVILKGLPISSSSNYGAADSCKVELHGAPGGSDCNVPIELNLSGLSVYSRSSEEVVFKANQIMAFASKNAFGCSSKPQTQSSSSPVHPYYSSPPLIPHQYPSPPVPAATHRSPPPPPPAANQLPSPAYQYISPPLYSSSSPCFPLAT

SEQ ID NO: 216027 - protein, 84 aa, Zea mays
  Clone ID: MRT4577_128611C.1.pep
VAASPAPGVERGRSKRSIGHGGHPPQPIRDIPVWVRVRPTNRFAPLGKSAIHPPEPQPKSTATPKLKTGQGRKKARRSELPPPP

SEQ ID NO: 216028 - protein, 83 aa, Zea mays
  Clone ID: MRT4577_128612C.1.pep
PHCGRWSLSDHRLKDDIWGWPRYGARLDYVSNSGASSLQSVNLLMLPGNKARLLTLCRPLGCSPPYPTSSGLMVCPSLHRSLL

SEQ ID NO: 216029 - protein, 68 aa, Zea mays
  Clone ID: MRT4577_128613C.1.pep
PAVSRHRLVQQVSRTGPGERETQKERKKKERKVRLGGRRRKRDSRLLAPDYPRPTYLTLGVSTRKLST

SEQ ID NO: 216030 - protein, 59 aa, Zea mays
  Clone ID: MRT4577_128614C.1.pep
HRIWITIPTNNSAHDVNMYRNDHHVQLISDNDNFQHIENDHKKTSLAGLMNELDKIIDQ

SEQ ID NO: 216031 - protein, 46 aa, Zea mays
  Clone ID: MRT4577_128615C.1.pep
KNFSAQIESVHNGKVLEFNKPLLLKDQRRTFFKLFRFLRLLKVVPY

SEQ ID NO: 216032 - protein, 73 aa, Zea mays
  Clone ID: MRT4577_128616C.1.pep
LVLHCRGILMTLLCYLMPGGKTRQDYLYEGEFHSGAEGDLLMLTSLDTSGGGESILNFQQPAILAGNEYSDLT

SEQ ID NO: 216033 - protein, 54 aa, Zea mays
  Clone ID: MRT4577_128617C.1.pep
CGLGHSILFICVNDAQLFMPSPYITRMSCACPIWPLSCPGFSSKTLNCPPSSAL

SEQ ID NO: 216034 - protein, 167 aa, Zea mays
  unsure (1)..(167): unsure at all Xaa locations
  Clone ID: MRT4577_128618C.1.pep
DXAACSGRTETVVITDMNYTPGVAPYHFDLSGTAFGRLAKPGRNDDLRRAGIIDIQFARVPCEFPGLKVGFHVEEGSTQVYFAVLVEYENGDGDVVQVDLMEKRARRWTPMSQSWGSIWRLDSNHRLQPPFSIRTRTDSGKTLVARDVIPLNWRPNTFYRSIVQYSS

SEQ ID NO: 216035 - protein, 83 aa, Zea mays
  Clone ID: MRT4577_128619C.1.pep
LSLGTYPAVTHSFHMAKQIVLTTIGAGISTGEILAGRSWGGVTTTHCWRILDSHTGRGACTNIEQYHALCKVSYALYVGISNR

SEQ ID NO: 216036 - protein, 140 aa, Zea mays
  unsure (1)..(140): unsure at all Xaa locations
  Clone ID: MRT4577_12861C.1.pep
QGFFLFLKLAPCVCLPLLLFPFVLFLFVLRRFSLSFGCCLLVARGCCRSPACSFCLLXPVGLWVWVFPSCRLLCCSARWSVCSSRGLCALRVFGRRCCPCCWSWGPSLPGSFPCLCWFVFVLFLLLAFAWAWACPALRVR

SEQ ID NO: 216037 - protein, 132 aa, Zea mays
  unsure (1)..(132): unsure at all Xaa locations
  Clone ID: MRT4577_128620C.1.pep
ILTPSTDRFTKXCPSNXRYTLSFKPXKTYMLRIINAALNEKLFFMIAGHQLTVVEVDATYVKPFKTDTIVISPGQTTNFHVTTXSSFXKYLIPPSPFMYAPNSFYNLTPTSTLHYASFSYEFPSLLFLSPPS

SEQ ID NO: 216038 - protein, 60 aa, Zea mays
  Clone ID: MRT4577_128621C.1.pep
CCRSWCSRKSKLIGRKTKEKGLRSCYLGVANPNRKMYGLGNLAKIHRIMHNTGSGGALDL

SEQ ID NO: 216039 - protein, 95 aa, Zea mays
  Clone ID: MRT4577_128622C.1.pep
CEDWLLFQGSLPSFPVLHNKTLLSSTYLLSNEVLSNVNLSVCLVLQQREILPFTRAELYGGNWEAKMNLLAPVSNLHLLYFHGAKVTITVSSKKG

SEQ ID NO: 216040 - protein, 78 aa, Zea mays
  Clone ID: MRT4577_128623C.1.pep
ARAYDGAHLLRPCPTRCAPWLSPPGLARRQRSYACRRSQRPRRWPRPPLLRPLPSSRTGWLVACTWLSIKSGRWEYAP

SEQ ID NO: 216041 - protein, 71 aa, Zea mays
  unsure (1)..(71): unsure at all Xaa locations
  Clone ID: MRT4577_128624C.1.pep
VVMDPELIAVIPRCIACTFKPKKVWLVSLYMQGGRGLQYYSITPPXXRGCPVLDTICIEKKKGRPLYTLPG

SEQ ID NO: 216042 - protein, 64 aa, Zea mays
  Clone ID: MRT4577_128625C.1.pep
FPKSPGRLKKLIFQNQPRNLSKLVGIQFVLLGVQCTWYKRTFSAVFPVFQNRISFTVFQPAPSK

SEQ ID NO: 216043 - protein, 62 aa, Zea mays
  unsure (1)..(62): unsure at all Xaa locations
  Clone ID: MRT4577_128626C.1.pep
IPQFFHAXFLSHNQPXXIAQFINTYRAXNKKTTHIMILQHAXFTFNYSLKTLISFFFFKFIS

SEQ ID NO: 216044 - protein, 78 aa, Zea mays
  Clone ID: MRT4577_128627C.1.pep
RPLAWILGPSPAGVRPLRVTDPPFPAVPEDGCCNDRVGRRRRRLHPQVLRAAQAAAYRRHAGRLPAPTRLASLLGDNL

SEQ ID NO: 216045 - protein, 99 aa, Zea mays
  Clone ID: MRT4577_128628C.1.pep
NPVFRVMLQHPMSHHEKKRQIARRMNNGQFLVVAIVLRSWTFGGCHRSSLVGLKLKPFHPRSGDSGPIEYAIFSRIRVYPSVLWNCLDSSGLSSHNPIL

SEQ ID NO: 216046 - protein, 134 aa, Zea mays
  Clone ID: MRT4577_128629C.1.pep
MSNRTGHMYKAPSFSFPSKVSCAGNGCTSSKFASLIPFEEMVRENCLKLLNLDDDADEEKFIKAKERPHSPNLSIMRPRRTKLPTYAEPHSLGRSLNGCPALGSDAIDSKTRSKASEAKEPVIQKSTQNYIQLD

SEQ ID NO: 216047 - protein, 83 aa, Zea mays
  Clone ID: MRT4577_12862C.1.pep
TPKTMTAMTQSAETRYKDLKLLATTKLKPDEEPMALRPEGEAEGEWPGHQQATRAEGRGDQEIEGEEGASWSTGSSAEVDSQP

SEQ ID NO: 216048 - protein, 109 aa, Zea mays
  Clone ID: MRT4577_128630C.1.pep
RSSPNPGYRSSRAAARSRSPPGTSPPRLSLLLDFTDLACFTVPSYGGSGSRPLPASTAHAMHGRSIPSDRDCRRHAVASPLASPLSHPLASFCVVSGFDTACLSRSYSF

SEQ ID NO: 216049 - protein, 60 aa, Zea mays
  Clone ID: MRT4577_128631C.1.pep
VSLSLVRPRLAAHALSFFFGRAYILFSYYCGVFYANCFFSNFPVGGSPFVMSRGCVFFLD

SEQ ID NO: 216050 - protein, 142 aa, Zea mays
  Clone ID: MRT4577_128632C.1.pep
NPVFRVMLQHPMSHHEKKRQIARRMNNGQFLVVAIVLRSWTFGGCHRSSLVGLKLKPFHPRSGDSGPIEYAIFSRIRVYPSVLWNCLDRWFICQKWPSKQFFFTGGSQNLRLISTLKYKHPETKVIGDTKRHSGQQETQYLV

SEQ ID NO: 216051 - protein, 236 aa, Zea mays
  unsure (1)..(236): unsure at all Xaa locations
  Clone ID: MRT4577_128633C.1.pep
MAEVSTLPLQFVVAAFLALSVTTTASASPAPANRSSCYKRMFSFGDSLIDTGNFIVHYANASGPVLALPYGETFFGRPTGRWSDGRLVVDFIVERLGFPYWPAYLQAAAGKSPAEEFRYGANFAVAAATALSQEFFIKKNLSVDQFPPIPPYSLDVQIGLFKKVLAALASTDQERKEVMASSLFLXVGEIGANDYNHPFFQNKXVEWVRPIVPQVIRSIALSIEGLDRAGRKDMYV

SEQ ID NO: 216052 - protein, 67 aa, Zea mays
  Clone ID: MRT4577_128634C.1.pep
WMDVGCFLTIWTCCSFVSLAMYVLAVQRPPYKIWRSFVDYTDRCSFPELLSAKIRDINGKKKKKKGP

SEQ ID NO: 216053 - protein, 36 aa, Zea mays
  Clone ID: MRT4577_128635C.1.pep
MGKTRGMGAGRKLKTHRRNQRWADKAYKKSHFCNEW

SEQ ID NO: 216054 - protein, 56 aa, Zea mays
  unsure (1)..(56): unsure at all Xaa locations
  Clone ID: MRT4577_128636C.1.pep
IXKSVTANLITQYQSGVIKFYNRSGKLTQRQIGKNRQRHNTIGATQARSKGRRGTQ

SEQ ID NO: 216055 - protein, 74 aa, Zea mays
  Clone ID: MRT4577_128637C.1.pep
RSGAKFFRGGVAFLVLGHFCGPDGGPPFFFWGIWVFCFCQKKKKKKKKKKKKKKKKKKKKKKKKKKKKKKKKAA

SEQ ID NO: 216056 - protein, 84 aa, Zea mays
  unsure (1)..(84): unsure at all Xaa locations
  Clone ID: MRT4577_128638C.1.pep
MYITQCRVKCEPGDKTCEVCHVAPEDTTHILLRCTFASAFXRALGVGISQGESDVFLLSLIRLPSIPFDLHNNILINGFVLWEY

SEQ ID NO: 216057 - protein, 83 aa, Zea mays
  Clone ID: MRT4577_128639C.1.pep
LTEGRYVHHSAPWQGLCCPLLLIRYPSHRSKHPPALVQAHHIDGLALTSKSHKLTSSGQALHQMYVPRFRAQRCFFPQVCLLP

SEQ ID NO: 216058 - protein, 92 aa, Zea mays
  Clone ID: MRT4577_12863C.1.pep
CGTCCSHEGRAAAWSAESSLQHSAVVTMSLPLNPKPFLNGLTGKPVMVKLKWGMEYKGYLVSVDGYMNMQLANTEEYIDGALSGHLGEVLIR

SEQ ID NO: 216059 - protein, 41 aa, Zea mays
  unsure (1)..(41): unsure at all Xaa locations
  Clone ID: MRT4577_128640C.1.pep
DFEKHYYLTFDXXRAVLAGLDNETFMLTFKGQKFQGPFLIV

SEQ ID NO: 216060 - protein, 155 aa, Zea mays
  unsure (1)..(155): unsure at all Xaa locations
  Clone ID: MRT4577_128641C.1.pep
VIGFLMFGENTXLSQITLNLPKHSVASKVALWTTVINPFTKYALLLNPLARSLEELRPEGFLNETSCSIILRTALVASTVCIAFLLPFFGLVMALIGSLLSILVAVIMPALCFLKIAQNKATCPQVIASVGIVILGVVSAALGTYSSVKKIAENY

SEQ ID NO: 216061 - protein, 47 aa, Zea mays
  unsure (1)..(47): unsure at all Xaa locations
  Clone ID: MRT4577_128642C.1.pep
EKRRQDAPRGPPSRCKGSSSXRDSPDPQERKVLTVVSTRPCRLNPIK

SEQ ID NO: 216062 - protein, 522 aa, Zea mays
  unsure (1)..(522): unsure at all Xaa locations
  Clone ID: MRT4577_128643C.1.pep
MEASRRARAAASRTAVIPTRRDDDNDEERDGDGVGSPRSFQSHKWPQSYRETTDTYTIAASPSFGYLGPSTSKYSLLDLGRSGLGSDLKLPLLSDKADGKQDSVKTXENPWFNKRXRVSFQLQHTGELYITQGCNVTQTVFNGINVLAGVGLLSTPFTIHEAGWTGLAVLLCFAIVCCYTGILLKHCFESKDGISSYPDIGEAAFGRIGRLLISIILYTELYTYCVEFIILEGDNLTSIFPKAGFDWLGIHVDGKHFFGVLTAILVLPTVWLRDLRVLSYLSAGGVIATLLVFLSVGLVGATDGIGFHSTGKVVNWSGMPFAIGIYGFCYSGHSVFPNIYQSMSDRSKFPKALFICFAICTAIYGSFAVIGFLMFGENTLSQITLNLPKHSIASKVALWTTVINPFTKYALLLNPLARSLEELRPEGFLNETSCSIILRTALVASTVCIAFLLPFFGLVMALIGSLLSILVAVIMPALCFLKIAQNKATCAQVIASICIVMLGVISAALGTYSSVKKIVENY

SEQ ID NO: 216063 - protein, 82 aa, Zea mays
  Clone ID: MRT4577_128644C.1.pep
GKRGVNVPCKLAGKSIIPPQPGCPFFDALAKMTHHRGFLGKRFFFWGVAYPPPHQQEIKLFCPGLSHPQNKGSNFWPGFPSF

SEQ ID NO: 216064 - protein, 70 aa, Zea mays
  Clone ID: MRT4577_128645C.1.pep
TQPTSQQNKKLSISLPCDKACDSVRRRFGVHAEMNQLLLVLPEDLTDCDQVLGAPSIGRGPGGFTYVWGY

SEQ ID NO: 216065 - protein, 56 aa, Zea mays
  Clone ID: MRT4577_128646C.1.pep
KESNLCTELDFTNKWWQNYIHVAGMTINRCGDCYGSGRGRHLLSPHTYSRIAGCYG

SEQ ID NO: 216066 - protein, 69 aa, Zea mays
  Clone ID: MRT4577_128647C.1.pep
TYHWPGILIIQCERYKGKASFNWDNTHSLKCAFFLQSKMDRAHLHIVHVRHFPRTQKGQQMVPKGLKRN

SEQ ID NO: 216067 - protein, 45 aa, Zea mays
  Clone ID: MRT4577_128648C.1.pep
VLFADCSSKRGYRQQLAEQGTQDYQTKNYNLVNCNVATVFVIETM

SEQ ID NO: 216068 - protein, 106 aa, Zea mays
  Clone ID: MRT4577_128649C.1.pep
SPYGFGKFPKFPPPGKPYFLRWVPLWQNMANNRPGFVFLKVFWGVPPHVFFFTKLKLCSVLFPFCQTVFFFFPQKPCFFAPWGGPLLGPENFCLNFSLFFFRLCPL

SEQ ID NO: 216069 - protein, 62 aa, Zea mays
  Clone ID: MRT4577_12864C.1.pep
QQPKPCFSPVISNYSQFNSLESSSFRGRKGNPRKEGRKKLQFRSCCEQPRLWAWRPSSTASR

SEQ ID NO: 216070 - protein, 58 aa, Zea mays
  Clone ID: MRT4577_128650C.1.pep
AHFAAKEMALAFQPDEAIGTGESCAGVYIPPPWHISSSPPHPTPPELSLAPLQLQSQS

SEQ ID NO: 216071 - protein, 48 aa, Zea mays
  Clone ID: MRT4577_128651C.1.pep
RSVQFGQKGIPYLNTYYFRTGRYPDPVINANYTINIDLETNKIMDFIK

SEQ ID NO: 216072 - protein, 193 aa, Zea mays
  Clone ID: MRT4577_128652C.1.pep
KKKKRKRQLAPSKSVSTQITTEPSPGAAPADLSRSTGDEAYNVELNGKDETIVKESGCRLSSSELNDANQGGKSVQFVSDALASIDLICKQEKFGHSLKGCKDPSIANAIYSTSENVAIEGKTTKESCVPLDRGDKPEEKKQHNEGCHNEAVPEISHMEKGGRSTDVSNKRRTNQITSQVKKGKKSKVGSVGM

SEQ ID NO: 216073 - protein, 68 aa, Zea mays
  Clone ID: MRT4577_128653C.1.pep
FAWPANRKTHPRFSPPRQGPSKRRDLGLLPRRQPCAPSLTIQMYADKDPLLCPGRRPSRTANRQAVPL

SEQ ID NO: 216074 - protein, 74 aa, Zea mays
  unsure (1)..(74): unsure at all Xaa locations
  Clone ID: MRT4577_128654C.1.pep
MYNALPVQFRCSLSKRVNIELSFVXLQLLLGLLGSLNSKHQLDGAAALYKLANKSMALSPVDAAPPQPKKRVSF

SEQ ID NO: 216075 - protein, 108 aa, Zea mays
  Clone ID: MRT4577_128655C.1.pep
MFVSEENAIRICRTIFLKKKKKKKKKSPQQQKKKKKKKKKKKKKKKKNKKKTKNKKKGATPIKKKPNLPRPVNHKHFPKGHRKRMLRPPCEHIGDRKTPARPTLNRLQ

SEQ ID NO: 216076 - protein, 58 aa, Zea mays
  unsure (1)..(58): unsure at all Xaa locations
  Clone ID: MRT4577_128656C.1.pep
NKRNPLTKKKXSYNXLFFFSYFKFETHYHAFAFYILYLSNIINLFHCFKLHTLIIVFI

SEQ ID NO: 216077 - protein, 84 aa, Zea mays
  Clone ID: MRT4577_128657C.1.pep
PSLDLSFNWIKGIPHKIFGVKFVNKLLLTENDICADSICCERVSCLQKLLNLSLNANRLGSLPPTLGLLTFLCELCVAKNTLYN

SEQ ID NO: 216078 - protein, 224 aa, Zea mays
  unsure (1)..(224): unsure at all Xaa locations
  Clone ID: MRT4577_128658C.1.pep
NHQIISYNSFPILEIAMPDQDKENDEATAFLHDEDEVSQTGRWVASHSHYRRWCCLTAVNLLLFLVFTVINFTIWSRRGPSSWQTDFPDARKAVQYEEQTYTGALTYDATQRRVIRLHDAKVEYFGPPSPEIEQAWEELLHGEFPTMSKKEATPFLDDLTPQRKDGEYHFEPDVFHSLHCLNAIRNEIQPVLYNVSNXRHAHSQTERKIAEKIGDPMWNVNIWD

SEQ ID NO: 216079 - protein, 53 aa, Zea mays
  Clone ID: MRT4577_128659C.1.pep
APGVKRRRPRPGALRPFGGPVKFGKKRKVGIGRPLRSLTRRWGIGGCPRWTPE

SEQ ID NO: 216080 - protein, 112 aa, Zea mays
  unsure (1)..(112): unsure at all Xaa locations
  Clone ID: MRT4577_12865C.1.pep
MAALPLATDEGCDANPHLNMNGELRALDPNMQIYRQRQDYAAPNATLKGYEDSELNRELXLRRKGHGGALGDDSGGGTHCAIQDGNPDQHPQNNGGAGILDNGCIRDVDENN

SEQ ID NO: 216081 - protein, 112 aa, Zea mays
  unsure (1)..(112): unsure at all Xaa locations
  Clone ID: MRT4577_128660C.1.pep
LSLSVSLAPVCGSCAPVLSVCARLPPVLPASSPARELRYSLVPPPGARGFFFGYRQLVAAVIGTAKASGNRALFVPAEGMDPLAQMFLEPPYXPSLDTAKTFLADYWVQQIA

SEQ ID NO: 216082 - protein, 60 aa, Zea mays
  Clone ID: MRT4577_128661C.1.pep
RTRESTIPSTSTKQATPSGMDSKERKELVIVLSSTCRSVCRAWDPTPVPGPLRWAGIHDG

SEQ ID NO: 216083 - protein, 271 aa, Zea mays
  unsure (1)..(271): unsure at all Xaa locations
  Clone ID: MRT4577_128662C.1.pep
MPAAATSAAVRAAMRKLGGLLPRAHRPHSTTTGPDAVAPPSSHTLHDFNRLLAALARDGDGDAALRVLRRMRLSSPACAPTAASYTSAMSALAKAGRPADAASLFDDMLANGVAPDRAAFSLLLHVYSSHLHLPAAAHSVLLWMTGLGLPPTPIDYTDLIFSFCRAGRLHNAFQLLDEMRALNYPLTPHAFAPILKAVCDNADIQAADALISSMRSSGCLPDVVVYNIYIHGLCKIXDFDAVERVIYESARNGWEPDAVTYSTYIVGLCRS

SEQ ID NO: 216084 - protein, 104 aa, Zea mays
  Clone ID: MRT4577_128663C.1.pep
AVGHNDRIQPVFIHQLLQPIGGDLLQPRDGSSFFCGDAVGVSPAIRSGCRRSFSFFFSGCASLHAITWGGWVLESGVGSLVSVDAYLELRKNSKISRLPRSVKF

SEQ ID NO: 216085 - protein, 60 aa, Zea mays
  Clone ID: MRT4577_128664C.1.pep
IVKLSRREYHVLFVLALGPSGLTYSCRTRVEVLEYGKSPLVMFWSLEGQPQRNHEGRVGY

SEQ ID NO: 216086 - protein, 580 aa, Zea mays
  Clone ID: MRT4577_128665C.1.pep
MLASATPRLLYGLESATPIAPQDTRPFLHAPATASHCRRRPSRSVRAVSVLTSAKTGYRRRPTPGAEASLSLRRRRSNSQQQQEDTMKLDVNALRYLAKDDFRVLTAVEMGMRNHEIVPAELVDRIARLKHGGTYKVLRNLLKNKLVHHDATKYDGYRLTYLGYDFLAIKTLVNRGVFASVGRQIGVGKESDIFEVATEDGTVLAMKLHRLGRTSFRAVKSKRDYLRHRRSFNWLYLSRLAALKEFAFMKALGDHGFPVPTAVDCNRHCVIMSLVQGYPLVQVKELQNPDDVFDTILGLIVRLAEHGLIHCDFNEFNIMIDDDEKITVIDFPQMVSVSHRNAQMFFDRDIECIYKFFNKRFNLTSEKNEEQAGSESDDEGNSRPSFLSVKKTAGSLDKELAASGYTRKEQVEMDKYIEEDAERHDSSSDDDDDDDDNDKVGDAVSLVSLKIDQDDSAEPDCNLASRDSDVPGTFSEEHETSCSSEKRLESPSGDNGEAMKPLESEGKTLSQKDDNNDDDSSEDADEEEEDAELTKQLNKQRKKAIAAASGRRRPVSSRNAYKDKGKGTMNSKIQRQACQW

SEQ ID NO: 216087 - protein, 78 aa, Zea mays
  Clone ID: MRT4577_128666C.1.pep
PDEESRVRIGGVPDIRREGGIQTYGVAQGKRVATVSVRIRHRGPPFMLLPPVGQPRGRMVVVQAIKSAPSMYSNPPGG

SEQ ID NO: 216088 - protein, 190 aa, Zea mays
  Clone ID: MRT4577_128667C.1.pep
MRRLALLFLLPLLLATGVTTASAEPATPPASPPPPPPPPPPPPPPPPPPTLAELLPKYGLPPGIFPSTVTAFSLASNGSLTVDLEGPCYVHFEYLTYFEPHITGVLRYGSLSDLQGIQVRRFLIWFNVIRIKVDLPPPPGYVYLDIGGITRKLPVADFQSIHACEDSRRGRLTSALAVAAKWFQDFFAQF

SEQ ID NO: 216089 - protein, 100 aa, Zea mays
  Clone ID: MRT4577_128668C.1.pep
ACRYRNRNVRGARPREKKRKKRKRKKQKKKKKKRRPRLLRRRHEHISKGRGRGCQTRREQLGQEGYKEMGKKGELSTTDKSGGERAAREGVSIHECKGTK

SEQ ID NO: 216090 - protein, 190 aa, Zea mays
  Clone ID: MRT4577_128669C.1.pep
MSSRLFPMRRLALLFLPLLLATGVTTASAEPATPPASPPPPPPPPPPPPILAELLPKYGLPPGIFPSTVTAFSLASNGSLTVDLAGPCYVHFEYLTYFEPHITGVLRYGSLSDLQGIQVRRFLIWFNVIRIKVDLPPPPRYVYLDIGWITRKLPAADFQSLHACEDSRRCRLTSALAVAAKWFQDFFAQF

SEQ ID NO: 216091 - protein, 144 aa, Zea mays
  unsure (1)..(144): unsure at all Xaa locations
  Clone ID: MRT4577_12866C.1.pep
MYRHGLPRRSGRRLGPGVGRGGGEAGRDGGVVHGVVEALRLHHLHAQPPRLVLRQHAEPPGRGRGRGRPPRQRLVLGRRPRVDVVRLPGPPQQRRPPLXPSPTGRALAVAEQAXAGPEPAGGRRRPSLMTLPWMEVLDSDEKEV

SEQ ID NO: 216092 - protein, 57 aa, Zea mays
  Clone ID: MRT4577_128670C.1.pep
NRRACSIRDRQDIHSYARFTLGENTAWRSADGRIKKCKGLQNRRRNLKSNTDGGILR

SEQ ID NO: 216093 - protein, 169 aa, Zea mays
  unsure (1)..(169): unsure at all Xaa locations
  Clone ID: MRT4577_128671C.1.pep
MMSVFSGETQEVSHELVAAGNRTPSPKTKAXKMMACFMAGTDPCATTKIGYHGYFDYSHTCQAILRPKSVEINNDMFXLFKAKLXNLGRLSHXMAENLPRTTRCILIIIXFYYTMMDRAXYPNKLMLLYLMNYYXYXLFNKATNSLLVASKRDFISLVFCLITIDAWVC

SEQ ID NO: 216094 - protein, 73 aa, Zea mays
  Clone ID: MRT4577_128672C.1.pep
HTSVDSRLCARTNGRPARTRREGASPPLLLLLLAQGRSVTVSWALRSRSYFQRQGGSNPSRMIDWASCSSRRG

SEQ ID NO: 216095 - protein, 122 aa, Zea mays
  unsure (1)..(122): unsure at all Xaa locations
  Clone ID: MRT4577_128673C.1.pep
FCSFCTSPAVLLLPGLPSGLFPSGRQVASARVSCVGGVLALLGLWFILSCSVTCAPHPLQNLARGVVLAPSRLPGXVSSSRSSFAVSFVPLVRFGLSSCVLVCWGGRASRPPRNFRSGSCGR

SEQ ID NO: 216096 - protein, 54 aa, Zea mays
  Clone ID: MRT4577_128674C.1.pep
WLLLPAQIKQTVACAGADAIAAPPAAGVRGARRRCAQLATSCAAATCQRSGTCP

SEQ ID NO: 216097 - protein, 61 aa, Zea mays
  Clone ID: MRT4577_128675C.1.pep
NSKASKFCFSAPLWALGYKNVRLRFKVTKAKGKWERQPRPPFLARVFIGMLNKLNKGVCVG

SEQ ID NO: 216098 - protein, 234 aa, Zea mays
  unsure (1)..(234): unsure at all Xaa locations
  Clone ID: MRT4577_128676C.1.pep
MASSSLVVLAAMAALLLSPVTSLPVFTGDASPGFHAASCPQLDGIVWSSVEAALRQEVAVAAGLLRLYFHDCFPQGCDASILLNNTAARETALGPNLTIQPRAMQLIESIRARAHAVCGPVVSCADITLLATRDIIVISGGPWFNVPQGNLDSLAPAAQEKVFDLPAPKTASVATLVESFATRGLGDVADLVELSGAHTIXGRSQCGSFEDRSQRADDTFSRQLGRNCSKHPER

SEQ ID NO: 216099 - protein, 70 aa, Zea mays
  unsure (1)..(70): unsure at all Xaa locations
  Clone ID: MRT4577_128677C.1.pep
GGGGGGXXGCXGGGGFXXVADGYLEAGRAGISSTSRVSLEHTSCITVLDAQAVVSCSFPAVGSTPRDLRC

SEQ ID NO: 216100 - protein, 98 aa, Zea mays
  Clone ID: MRT4577_128678C.1.pep
KRFGTFVCKSEGSTNLSRRIRLGHGHLVSHVPPLRVGEAPRHCLAVEPCSTPAGRSQGSRFARNHSIRGREPAGKFRARRDLVLAWRLGFRYGGGGNS

SEQ ID NO: 216101 - protein, 642 aa, Zea mays
  unsure (1)..(642): unsure at all Xaa locations
  Clone ID: MRT4577_128679C.1.pep
MAAVASRERLSPGAAPQVDAGKYVRYTPEQVEALERVYSECPKPSSLRRQHLIRDCPILRNIEPKQIKVWFQNRRCREKQRKESSRLQTVNRKLSAMNKLLMEENDRLQKQVSRLVFDNGYMKNRLHSPSVATTDTSCESVVTSGQHNQQQNPAVLHPPQRDANNPAGLLAIAEETLAEFMSKATGTAVXWVQMXGRGFNDAVSGFPDDGWSCLLNTDGAEDITVTINSSPNKLVGSHVSASPLFSAMGGGIMCAKASMLLQNVPPALLVRFLREHRSEWADPGIDAYSVASLRANPYTVPGLRAGGFMGNQVILPLARTLEHEESLEVIRLEGHGFSHEEVLMSRDMFLLQLCSGVDEDAPGACAQLVFAPIDESFADDAPLLPSGFRVIPLDAKTDVPTATTRTLDLASALEVGSGGSGMRASCDGSGTCATRSVLTIAFQFSFENHLRESVAAMAKQYVRGVMASVQRVAMAIAPSRLGSRIELKHPPGSPEALALATWIGRSYRAHTGTEIRWSDTEGADSPLMLFWKHSDAILCCSLKPPAFTLKFANSAGFDILETTMVNIQDLPLEAVLDEEGQKALSAQLPAIMQQGLAYLPGGVCRSSMGRQASYEQAVAWKVVGDDGAPQCLALMLANWTFI

SEQ ID NO: 216102 - protein, 61 aa, Zea mays
  Clone ID: MRT4577_12867C.1.pep
KGALFFHLVFRGGTGLFEEKRPGKTVTTRAHFPFGKPILWKKGGGKRTSLKRRGPNQTIIW

SEQ ID NO: 216103 - protein, 47 aa, Zea mays
  Clone ID: MRT4577_128680C.1.pep
FYCFVNKITTKHLLLTNSQKICLHKMKHFLLHFLTLFQHKQPTRGQK

SEQ ID NO: 216104 - protein, 71 aa, Zea mays
  Clone ID: MRT4577_128681C.1.pep
LISNNNILKPTDCIHFHTKILGMTLHMFFPFILTTIFSQQLTNALLLFIPPIILHSFSSSNTTLLLDIFNL

SEQ ID NO: 216105 - protein, 126 aa, Zea mays
  Clone ID: MRT4577_128682C.1.pep
KNKRGNTSQQALKRGQGPHRKGGAQGHNTSFAHRARDWGSFHLTLGNHKHAIINGEVHVDTVPGTERGRSWRPRTRGHDKLSEDRRGINYRGRDLGQQNKHPGGGKTGLGRPEERPCKYFWRGGGP

SEQ ID NO: 216106 - protein, 249 aa, Zea mays
  unsure (1)..(249): unsure at all Xaa locations
  Clone ID: MRT4577_128683C.1.pep
HQQNSASIPPRRSARAAPTLAAATSSPTSLYLAAVGASRPDARAASSEGGGRAFLPALGSCASSVVTATAASAAAGGSSAGLWHGWRPPWWWARARRGRLAPWRVLAGAGRPSRRRVARWSQIRLGPGRIRCPRGRGAHLCVGGATSGVQQRLRLAWPTQRGFGWYDCDRLCRRAVVAWCHRLWAVLAWRGXSGTSRLQQRRLVARTARGGGGGMSQNLHHYAGRRVSGDDGGSLLCFEGSARRDAWGS

SEQ ID NO: 216107 - protein, 76 aa, Zea mays
  Clone ID: MRT4577_128684C.1.pep
SSLVEFQESALSQVSLSSSGMSSTVSMTGQSPSTGERPFPTSTWSLVDVAIGSGGLFLITSAQHPRRFHFKPLSSL

SEQ ID NO: 216108 - protein, 211 aa, Zea mays
  unsure (1)..(211): unsure at all Xaa locations
  Clone ID: MRT4577_128685C.1.pep
MATSSARGYRQSKNKSYPKHRHXPSVPDPKTTIYNDAMIRMADDQLPYCLHIVSSHKVNXVPGKVLRLCRIACNKYTEPXARNDDFQLXRLILHSXLMPLLINRHAFLCAGADKLQTGLVRGAFGRASMSTCAMADMAQXVLSVSXEDNSAALAIAPLLRAKIKFPERRKIIGRRXRGFTEFSLSSHYLKYKKXGMTAPXDGXNAKLLDNH

SEQ ID NO: 216109 - protein, 114 aa, Zea mays
  unsure (1)..(114): unsure at all Xaa locations
  Clone ID: MRT4577_128686C.1.pep
MAYSKVASADTLRTRKDVNKRLLGRKQFLLXAIHHERGNASKAEXNERIDTACDAKDPYTIFSFMSCTQLVSSKTAGFSLIYDDHEDDNNYEAXYRLVMNATSLLLVEKSPPCI

SEQ ID NO: 216110 - protein, 68 aa, Zea mays
  unsure (1)..(68): unsure at all Xaa locations
  Clone ID: MRT4577_128687C.1.pep
MEQHQHYEVRRYRKGVLKVQDGSEIRAIAXNKVEFARIVDYRFRKLYADGDWRLSLKELQPAIADICA

SEQ ID NO: 216111 - protein, 84 aa, Zea mays
  Clone ID: MRT4577_128688C.1.pep
EVNQVLVADVLPSWLGLPSHEYQSIFNSYFINSWKMYLACHPPNKLQGFRQPDLPQLLAHHALFCIGAVGSTNWEGYFVHRICC

SEQ ID NO: 216112 - protein, 36 aa, Zea mays
  unsure (1)..(36): unsure at all Xaa locations
  Clone ID: MRT4577_128689C.1.pep
KLVYTXRGAKPGVDPVVKPTASWHRCAAATRVRFYL

SEQ ID NO: 216113 - protein, 59 aa, Zea mays
  unsure (1)..(59): unsure at all Xaa locations
  Clone ID: MRT4577_12868C.1.pep
RDRMHACALTRRHMAGLRRRVQRANPCVSRVQDTVMSCVGTDSSDFELRKAXPSXTYQP

SEQ ID NO: 216114 - protein, 159 aa, Zea mays
  Clone ID: MRT4577_128690C.1.pep
MAGFSYTSHVAVALVSVLLLSLAHGSLGLGARRLMELYKPDPSELLTYHNGAVLQGAIPVSVLWYGRFTPAQKAVVSDFLLSLTTASPAPTPSVSQWWNTIHQLYLSKAKGANAKRATQVALAGQVSDERCSLGKSLKLPQLAALAASAKPRKGGIALV

SEQ ID NO: 216115 - protein, 75 aa, Zea mays
  Clone ID: MRT4577_128691C.1.pep
LFQKRCSLAKKTRGPVKKKKKKKKKKKKKKKKKKKKKKKKKKKKKKKKKKKKKKKKKKKKKKGGGPPFFFFFFFF

SEQ ID NO: 216116 - protein, 86 aa, Zea mays
  Clone ID: MRT4577_128692C.1.pep
FFFFFFFTLFFLCCVLFKTKTLFFTILFIPLLLIEKKKTTEIQSKANGWMETTTEKKGSLSSGRETPHLWVLKINPHQCLPHPLFY

SEQ ID NO: 216117 - protein, 69 aa, Zea mays
  Clone ID: MRT4577_128693C.1.pep
HISLFEHNHLIHIMYQADKMVIKCYQISCYSKKLHCLMKVLQNIMHNIVCMNEVKYFPSYVKTAVIPMK

SEQ ID NO: 216118 - protein, 93 aa, Zea mays
  unsure (1)..(93): unsure at all Xaa locations
  Clone ID: MRT4577_128694C.1.pep
KIHVYDDIRPHHYIIIFSAMQLEDXQTMGHYNMQKGSTLHLVLRLTGEMHIFVNTLTGSTITLDVGSSDTIDNGQGSIQDTVRISPEHERLIF

SEQ ID NO: 216119 - protein, 101 aa, Zea mays
  unsure (1)..(101): unsure at all Xaa locations
  Clone ID: MRT4577_128695C.1.pep
MSANLKWAPVLALLGVCAVMGGTTRACNIAKYWGQNGNXSSLADACNSGLYAYVYIAFLTTIGNGQTLFFNLAGHCDPGFRSCTGQSXDIHTCQSLGIKGL

SEQ ID NO: 216120 - protein, 273 aa, Zea mays
  unsure (1)..(273): unsure at all Xaa locations
  Clone ID: MRT4577_128696C.1.pep
EAGTDTLFVAALRSHLSASPPPAVASLSRFLPGITPLRFSHLVVLLAGRVRPPHNLLTALLPSPPPSLPLAILLHSLPPRRCAELLTSVLPSVSPRAFPDLLHHVILTARLAAGTQRAAVVPAIDVLFSSCARDKKLSWATLTYRAMRAHGMFPTVESCNVFISGALRLRRPEIAISFFREMRRCRVSPNVYTVNMVMRAKCALXRVVDAAQLLDEMPCWGFSRTAASFNTLIAAYCHDSGGMETVLRLKERXEREGPVPNEVTYNTIVHGLC

SEQ ID NO: 216121 - protein, 35 aa, Zea mays
  Clone ID: MRT4577_128697C.1.pep
MLMCSDITPRHPSYAAVVSQQRSPTDPDIKDRRGT

SEQ ID NO: 216122 - protein, 82 aa, Zea mays
  Clone ID: MRT4577_128698C.1.pep
VVVERLFVSNGSLWRVDMQSVLWPRMSNASATSAQERRTESRIRRQFMILYHAMRIGSCLPKPSGAGTWLRTKPWTRGRTRG

SEQ ID NO: 216123 - protein, 294 aa, Zea mays
  unsure (1)..(294): unsure at all Xaa locations
  Clone ID: MRT4577_128699C.1.pep
SIVDRCHGLPLAIVTIGGMLSSRQRLDIWTQKYNQLRSELSNNDHVRAILNLSYHDLPDDLKNCFLYCSLFPEDYHMSRESLVRLWVAEGFVVRKEKNTPEMVAEGNLMELIHRNMLEVVENDELGRVSTCKMHDIVRELAISVAKEERFASADDYATMILVQQDKDVRRLSLCGWKDDTAVKVKLPHLRTVLSLGATSPCRGMLSSILSESNYLAVLELQDSEITEVPTSIGSMFNLRYIGLRRTKVRSLPDSIENLFNLHTLDIKQTQIEKLPRGVVKIKKLXHLLADRYAD

SEQ ID NO: 216124 - protein, 76 aa, Zea mays
  Clone ID: MRT4577_12869C.1.pep
CSPGSNTGGPSDGPGNEAGSRPCRSCRRRRPLRCLGPRPRQLSGAAHGTRSRNLACAGYPLRDAIRTHACTLAGPP

SEQ ID NO: 216125 - protein, 104 aa, Zea mays
  Clone ID: MRT4577_1286C.1.pep
TSRSCERGPEADDGEPDTVYTESRASSRFVPSYKSTKRPPTHGTLAHGVGHATVTSRLNPGWRTTLPAQFRLTVQIRGRRLSRPSLPSDLTPQACTIRHARSVA

SEQ ID NO: 216126 - protein, 46 aa, Zea mays
  Clone ID: MRT4577_128700C.1.pep
HAFFHTFGRINGRRHLGSSRSFYISSSIDDFYSLCLNMSSTTHFLT

SEQ ID NO: 216127 - protein, 246 aa, Zea mays
  Clone ID: MRT4577_128701C.1.pep
MWSWLTKIASACLGPVRRCARTRKDEDDSDNGRGVADDLLWSRDLGRHAAGQFSFAVVQANEALEDHSQVETGSAATFVGVYDGHGGAEAARFISDHLFAHLIRLAQENGTISEDVVRSAFSATEEGFLTLVRRTRFIKPLIAAVGSCCLVGVIWRGTLYVANLGDSRAVIGVLGRSNKIVAEPLTRDHNASREEVRQELISRHPDDSQIVVLKHGVWRIKGIIQVSRTIGDAYLKRREFALDPSI

SEQ ID NO: 216128 - protein, 91 aa, Zea mays
  unsure (1)..(91): unsure at all Xaa locations
  Clone ID: MRT4577_128702C.1.pep
TKTNPHFINSSSTIDTYFLTSMNFTXGPSHSKXFAEQLPPHKCFANSHYTSFSVKKLASRNKGKISHLIHPALQVCCKDFPIPPLXNTINY

SEQ ID NO: 216129 - protein, 54 aa, Zea mays
  Clone ID: MRT4577_128703C.1.pep
VQVLGQISVVLGVPITHQEPGKSSARRVEGIRDQVSAVEENETVGDNTAAACRC

SEQ ID NO: 216130 - protein, 51 aa, Zea mays
  Clone ID: MRT4577_128704C.1.pep
YFFVSLKFTSPPHFFAYSGRLSLLFVPLGGRAAVGRCSSDCPYRRHDRMVR

SEQ ID NO: 216131 - protein, 79 aa, Zea mays
  Clone ID: MRT4577_128705C.1.pep
HARLASIRIEGAGDMRVVATAAQGRRTWAGPADPTRGTLAHIRTAESAGQATSPGSREQGATNSSIESSSVPGKAQAQK

SEQ ID NO: 216132 - protein, 71 aa, Zea mays
  unsure (1)..(71): unsure at all Xaa locations
  Clone ID: MRT4577_128706C.1.pep
TXXKAGAILFNRDGAKDTIFFTQIXNGPTTVTGSISCLKPYLHWFHVHALFYTTKCLLYTCPHYNPANNEH

SEQ ID NO: 216133 - protein, 46 aa, Zea mays
  Clone ID: MRT4577_128707C.1.pep
TTICGSKISGAWLIHSLVRRCRAALHLMVHRRGPRGAQKYGFVKAL

SEQ ID NO: 216134 - protein, 99 aa, Zea mays
  unsure (1)..(99): unsure at all Xaa locations
  Clone ID: MRT4577_128708C.1.pep
MSSPARSTVSAASGGAVSAAEDVADSIDALYRKDETMAELKFEVMEALXEVRSLDDDNWMFAXASRFRINLESRTGAYMPKQHGKLSELGQASKKTRNF

SEQ ID NO: 216135 - protein, 62 aa, Zea mays
  Clone ID: MRT4577_128709C.1.pep
SNTSRFCGWVASARISLGSCCHMGFTDLFFTLVFRFFMQCRKMTYGSMPLALRSARMIPRST

SEQ ID NO: 216136 - protein, 99 aa, Zea mays
  unsure (1)..(99): unsure at all Xaa locations
  Clone ID: MRT4577_12870C.1.pep
CCSCAAFFGVQNMTHVMIFNVIYLPMIIFFCFLWFCCLLVELFHWFLFASPLHAAFFSPTIHVLNYNNPXFLLFLLFRPCFQSSELSCGWRMNLLDVGT

SEQ ID NO: 216137 - protein, 65 aa, Zea mays
  Clone ID: MRT4577_128710C.1.pep
GAFFLIAPEHQSTFFNTHIIYKHPPLGSTTKPTFDPLTHLCYNHIHSTDTLLTPPSRGRAELLLN

SEQ ID NO: 216138 - protein, 40 aa, Zea mays
  Clone ID: MRT4577_128711C.1.pep
NLQHQLSNSKNHEAGACAFRYHCFRIKGYIVHRQAAADVV

SEQ ID NO: 216139 - protein, 57 aa, Zea mays
  Clone ID: MRT4577_128712C.1.pep
FRWPLIKGQPFASRESNLDTLIAAARFIFFFFFFVCFFLLFLFFFFLHRRTLQLLNR

SEQ ID NO: 216140 - protein, 137 aa, Zea mays
  unsure (1)..(137): unsure at all Xaa locations
  Clone ID: MRT4577_128713C.1.pep
MSLIAGEDFQHILRLLNTNVDGKQKIMFALTSIKGVGHHFSNIVCKKANIDMNKQAGELSXDELERLMTVVANPRQFKVLDWFLNNKKDYKDGRFSQVVSNALDMKLRDDLERLKKIGSVYDHRFGVIIDYLMLYIR

SEQ ID NO: 216141 - protein, 37 aa, Zea mays
  Clone ID: MRT4577_128714C.1.pep
SQYTFKIIYCSDDNFEGILRSINCTRYNSPKHRYIII

SEQ ID NO: 216142 - protein, 121 aa, Zea mays
  Clone ID: MRT4577_128715C.1.pep
HCVFDPCRYTVFATHMERLSELSTMYPNVKILHFEVDLRNDRLDFKVSSTCHTSDFRNLFHHVCYTNIIPTPTSVLPKGWHPTGTTLWASAGQSSWYPYFGDRHFNKYHFTDHRAGNLTPI

SEQ ID NO: 216143 - protein, 72 aa, Zea mays
  Clone ID: MRT4577_128716C.1.pep
CDQSKEDGSRLFASIYILLFPAFIYSFLFLFQSYFSRCARCEPDVLCDQLVQAISQSFVYPFGFNLKDQPPG

SEQ ID NO: 216144 - protein, 71 aa, Zea mays
  Clone ID: MRT4577_128717C.1.pep
TSPRVRGWSCGLGLKAWVKARTIGETSLCMRGPAHALIELFLVKYRGAVFPHRPSFYILDITCMIFGDNSW

SEQ ID NO: 216145 - protein, 140 aa, Zea mays
  Clone ID: MRT4577_128718C.1.pep
LAVEGKPSPKLWGAGAPNLVVLLGKGGPRRVGFFSLPFFFFFSFPGGKKKVCFFLGGGVCFFFFFQKFNFPPLSRFCSPLEPGGAFFVVLRAVNSFPWVGLKGNFVGGGGGQSRGGPPFFSGRGGGPLKKNVGGLGPLFF

SEQ ID NO: 216146 - protein, 41 aa, Zea mays
  Clone ID: MRT4577_128719C.1.pep
RTRRHTYDRIQENNRSFFIHCSLYKTGGFFLNYHIQIIKKT

SEQ ID NO: 216147 - protein, 70 aa, Zea mays
  unsure (1)..(70): unsure at all Xaa locations
  Clone ID: MRT4577_12871C.1.pep
LTVCVLMEAPKGXKGPEKNALGKVLVVCLLGGLFSGVGLEWVWLIGKGWLIRFFGGGFLRGNRLNFKFLF

SEQ ID NO: 216148 - protein, 36 aa, Zea mays
  Clone ID: MRT4577_128720C.1.pep
HASTEYTSTTHSILPLTVFFTSLNANPSSLFNTYLP

SEQ ID NO: 216149 - protein, 55 aa, Zea mays
  Clone ID: MRT4577_128721C.1.pep
GVSGEIALFGGPAGGVRYILTYSFLHTGGRRGDYTEARADARAPRRDRTILCYVL

SEQ ID NO: 216150 - protein, 88 aa, Zea mays
  unsure (1)..(88): unsure at all Xaa locations
  Clone ID: MRT4577_128722C.1.pep
RIRSLACGKSSIIAAADESTISCGPSPPFGEHVYGDHKPKSSTAAQEVKTLDGIFSEQVAMGYSHSLAIAXDESXTEKEKIKKLPQYN

SEQ ID NO: 216151 - protein, 448 aa, Zea mays
  Clone ID: MRT4577_128723C.1.pep
MWAERVVGERRMRQIQRFARNAKLTVVCLLLTVVVLRGTVGAGRFGTPQQDLIELRQHFVSHPHRALAEHHDARSRASTTTTSSSSSSSSGRRDEPDPPPRSLRDPPYTLGPKISDWDEQRAAWHRRHPETPPFLNDIKPRVLLVTGSSPKPCENPVGDHYLLKSIKNKMDYCRVHGIEVFYNMALLDAEMAGFWAKLPLMRALLLAHPEVEFLWWMDSDAMFTDMAFELPWERYGPYNLIMHGWDEMVYDDKNWIGLNTGSFLLRNCQWSLDMLDTWAPMGPKGPVRIEAGKVLTKSLKDRPVFEADDQSAMVYILATQREKWGDKVYLENGYYLHGYWGILVDRYEEMLENYKPGLGDHRWPLVTHFVGCKPCGKFGDYPVERCLKNMDRAFNFGDNQILQMYGFTHKSLASRRVKRIRNETSNPLETKDELGLLHPAFKAVKTST

SEQ ID NO: 216152 - protein, 112 aa, Zea mays
  Clone ID: MRT4577_128724C.1.pep
MPASSSSSPNILSCSALEEDPWSPTATMMTSGDDDDLLLVQLVPRDVSDELLGKFADTSAFDFDYGRSGLWSPLLLRPEVMLLAQSPAAGRRPRRRRRRKRRKVLCGCWRWW

SEQ ID NO: 216153 - protein, 39 aa, Zea mays
  Clone ID: MRT4577_128725C.1.pep
SLGIGYGFFLLRLEGKITKSSSRGVVALYDISLMKSLDS

SEQ ID NO: 216154 - protein, 448 aa, Zea mays
  unsure (1)..(448): unsure at all Xaa locations
  Clone ID: MRT4577_128726C.1.pep
MWAERVVGERRMRQIQRFARNAKLTVVCLLLTVVVLRGTVGAGRFRTPQQDLIELRQHFXHWRPRRRPGSSHASSNKNPDETXKSPPNARRDDDPDPPPRTLRDPPYTLGPKISDWDEQRAAWHRRHPETPPFLNDIKPRVLLVTGSSPKPCENPVGDHYLLKSIKNKMDYCRVHGIEVFYNMALLDAEMAGFWAKLPLMRALLLAHPEVEFLWWMDSDAMFTDMAFELPWERYGPYNLIMHGWDEMVYDDKNWIGLNIGSFLLRNCQWSLDMLDTWAPMGPKGPVRIEAGKVLTKSLKDRPVFEADDQSAMVYILATQREKWGDKVYLENGYYLHGYWGILVDRYEEMLENYKPGLGDHRWPLVXTHFVGCKPCGKFGDYPVERCLKNMDRAFNFGDNQILQMYGFTHKSLASRRVKRIRNETSNPLETKDELGLLHPAFKAVKTST

SEQ ID NO: 216155 - protein, 185 aa, Zea mays
  Clone ID: MRT4577_128727C.1.pep
MWAERVVGERRMRQIQRFARNAKLTVVCLLLTVVVLRGTVGAGRFGTPQQDLIELRQHFVSHPHRALAEHHDARSRASTTTTSSSSSSARRDDDPDPPPRSLRDPPYTLGPKIFDWDEQRAAWHRRHPETPSFLNDIKPRVLLVTGSSPKPCENPVCDHYLLMSIKNKMDYWRVHGIEVFYNMAL

SEQ ID NO: 216156 - protein, 155 aa, Zea mays
  unsure (1)..(155): unsure at all Xaa locations
  Clone ID: MRT4577_128728C.1.pep
NVMKCDDDTFVRLDSVVTEIKKVPXGRSLYMGSMNIQHKPLRHGKWAVTYEEWPQKVYPLYANGPGYVISSDIADFIMSEFMKQKLMLFKMEDVSLGVWVEQFNKTRPVEYVHSDKFCPNGCVPDYYTAHYQSPKLMLCMWQKLLEGKTDCLHAR

SEQ ID NO: 216157 - protein, 120 aa, Zea mays
  Clone ID: MRT4577_128729C.1.pep
LFLVVIKHTGRRNLDKLIFLVVGLLLDHLFFSFNELLLSSLHLLNIWVLGHLLVRVGDAQNPTHGGTGTRGGGGKASRNWWRVVGLHRQEMPRIASVAARGHPRRFTTALPPPWYGSIRR

SEQ ID NO: 216158 - protein, 103 aa, Zea mays
  unsure (1)..(103): unsure at all Xaa locations
  Clone ID: MRT4577_12872C.1.pep
IGEVALLGLNVSATCTHTSSSCRWQPPTTVHVPALQHLPPEXHLRSPMHLPPTRHLXSPVHLXPTGHVPSPFHTTPPPXQYITQPLQPQTNPQPHRCYCQQEH

SEQ ID NO: 216159 - protein, 57 aa, Zea mays
  Clone ID: MRT4577_128730C.1.pep
YRRSKAAGRLDNGYVAVRTRLDYKTLGRNKQTRKDTEIYLDVAYGKRQNTRRGTCYE

SEQ ID NO: 216160 - protein, 186 aa, Zea mays
  unsure (1)..(186): unsure at all Xaa locations
  Clone ID: MRT4577_128731C.1.pep
FISLEGDTTLCITVTLTGXLHSQYSFHNGLXQQXKLCSTKPQCKKCAGTLDPNHVEKKXXQXXFQYCXSWWEQDESGIRFNWCSVEAXSPEENPVLWXRPARSIXQSFRGSKELCRIPFGTVQNEARCSTSSEEKRAXSVPGEGELVEKWPAASVPTRPRPLSGGLGSDQEPPGWGLSASKWRQAG

SEQ ID NO: 216161 - protein, 96 aa, Zea mays
  Clone ID: MRT4577_128732C.1.pep
LVLGAYINLQAYRSQHVEEMAAVVLHSVNIHLDTTVDVQVLEVTGELMVHVLQIIRILSSGVLEVGGLKPHRLLHIFFATASGPTDSGRAGAGGEK

SEQ ID NO: 216162 - protein, 60 aa, Zea mays
  Clone ID: MRT4577_128733C.1.pep
AHNFCFMGCFYLVLARAANPLMPTGNFVLPTQNSILNLFFDHSMSRHWWVRLPVAGDTMT

SEQ ID NO: 216163 - protein, 78 aa, Zea mays
  Clone ID: MRT4577_128734C.1.pep
SYVWSFLLTCKVQYCSLYDQGVHNTVPNQLLRDGPGGSYRPAYTLSDGSLERAGRAKKTGKRDGSANGTKNNGNEMEQ

SEQ ID NO: 216164 - protein, 77 aa, Zea mays
  Clone ID: MRT4577_128735C.1.pep
DRVIRRSIDGATLLHVTRVWIAEALFVYFYSVSGGMYGIIMLTVMCVTVRAAHNSIEYKRLKSGMQLGAEGFTVGFL

SEQ ID NO: 216165 - protein, 45 aa, Zea mays
  Clone ID: MRT4577_128736C.1.pep
PYFLMINGNARGDFKSNYDRGPARSHMPNRPLLPGSQDKPNQRVT

SEQ ID NO: 216166 - protein, 169 aa, Zea mays
  Clone ID: MRT4577_128737C.1.pep
MGHDEAVVTQNSVKAPSPPKDQPAIYPCFDWSTVQAYYGPGVLPPAFFNPGIAPGHAPPPYVWGPQTMPPAAFGKSYAAIYPHAGGFLHPLMPLVVNPLSAEPAKSGNSKDNSLNKKLKEIDGSAVSSGNSEKTRWLHDISNIFFPTNLEVYCSGMLFEPDLSRRTVRP

SEQ ID NO: 216167 - protein, 83 aa, Zea mays
  Clone ID: MRT4577_128738C.1.pep
LLFYTFLLLTQISIYIAWFLFQLLVLFYTHYIQPFTFNHSIYLNILNPQLSNHIFTLLTSLPTSLNISINISQIHINLTYYFN

SEQ ID NO: 216168 - protein, 52 aa, Zea mays
  Clone ID: MRT4577_128739C.1.pep
NNPHKVWYTVQEVWLLDGVMLQLNVLFIQIHACFGKINPSFPKKKKKKKAAL

SEQ ID NO: 216169 - protein, 69 aa, Zea mays
  Clone ID: MRT4577_12873C.1.pep
WVPEPYLWGWFQQGGTNVAGVRGRLVKVFRDWIFYRFVFPRLADTMWFDCGDLTPPPPTAAVGKSPPIE

SEQ ID NO: 216170 - protein, 65 aa, Zea mays
  unsure (1)..(65): unsure at all Xaa locations
  Clone ID: MRT4577_128740C.1.pep
ELXRRTHAYLNSHPLNHTHFLFNTHIILFEPFHSILRDKIIIRSFTNLLYDPLPLIFYTGTQSEP

SEQ ID NO: 216171 - protein, 139 aa, Zea mays
  unsure (1)..(139): unsure at all Xaa locations
  Clone ID: MRT4577_128741C.1.pep
KKKDRIFSGLRWIGIISDEEIIPRGNPLGPLCATLEKKIQFXEGEPHMVMLQPRFEIENKGGNKAVRPCTLVDYGDPKGYSAMAKLVGVPCPVTVQQVLYGSLNKKGILAPFSPEIFKPLIKTLEGQYGVFFKEKALPM

SEQ ID NO: 216172 - protein, 90 aa, Zea mays
  Clone ID: MRT4577_128742C.1.pep
CSVFLVSAFPEHSKDKRRARDPSAATRNRVQDAAPKGALTSQHGDSKFERTIGSDDVTSWWSWRRKRRGRRTVTWIARRSDENLFPGRPG

SEQ ID NO: 216173 - protein, 51 aa, Zea mays
  unsure (1)..(51): unsure at all Xaa locations
  Clone ID: MRT4577_128743C.1.pep
RKIRRAVLIGGHAVCRACTCTAMSSFLRCPSYTSKNPPPPPXPPPPPPPPP

SEQ ID NO: 216174 - protein, 321 aa, Zea mays
  Clone ID: MRT4577_128744C.1.pep
RPQQAFWLLFYQAHGMSLRGAGLIDGKGQKWWDLPCKSHKGQGGSSVHGASCVRPVALRFFMTNNVTVQGLKVQNSPEFHIRFDSCRGVVASGLSISSPALSPNTDGIHVENTQDVLITNTAVSNGDDCVSIGAGTLNMHVENVTCGPGGHGISIGSLGKQGSRACVANVTVRNAVIRHSDNGVRIKTWQGGSGAVSSVSFQNVRMDAVRNPIIIDQYYCLSKSCENATSAVFVSGVSYAGIRGTYDPRTPPIHFGCSDAVPCTNITLSDVELLPASGETIDDPFCWNVYGSTATPTVPPVPCLIEGVPRNLDDNSSLKCY

SEQ ID NO: 216175 - protein, 48 aa, Zea mays
  Clone ID: MRT4577_128745C.1.pep
AVCQSTEQFLRLPLRSQLLFPRLLGPVVQLLKQPALQPLEQLSLRLFS

SEQ ID NO: 216176 - protein, 421 aa, Zea mays
  unsure (1)..(421): unsure at all Xaa locations
  Clone ID: MRT4577_128746C.1.pep
MAPVLLCASGSTTKTLRYEECRHIMLYLLTNLEEVMPYIDQGTQLHKNMIPFLEMVLEMDCLISFPSSNRSYDQSQPKRKITCSGVFTPRLDEVEYYGRIKEIYELIFHGSKSLTPVIFKYHWFDIEVTRWTHSNLGLVKMRQDSTLPGADVYIVAQQATQVYYLPYACQTKEHLKGWDVVCKISPHDKLPIPNDEDYNLNPDTYDKEFFQKDGLEGRFDKDLIETIRMEVDIEMVVHEEDDEDFFRCEDRYETRANVVATVSCKKLVMDMHYEARILASIXYHDSVLGEKVXMVNRWCSNEWDEAHNASQEWHLLMQXSASHGGQPCSIFTAYAMAHKXKVTSDATYNLEDGLEAYNNPAVHSLHTEYIAMAKEVHGSDYDLRTKDIDGDVLMRVRGGKXYGQYWIADRAINLSSSSTLS

SEQ ID NO: 216177 - protein, 97 aa, Zea mays
  Clone ID: MRT4577_128749C.1.pep
CSGPDPEGGSRVGRVEGGQGHGTGAASVSAYHAWGKAACSPAWPVVSDRSMWSIGRVSQRHANVPDAMPTPSIHIHNGTRAHPGNSEQVPSGAHDFP

SEQ ID NO: 216178 - protein, 94 aa, Zea mays
  Clone ID: MRT4577_12874C.1.pep
PHGEHRPLPPVPPLLDPYKHRGRSGLGQAASGTRPLPPPVASSGGAPLQWRGHPWPGAFVYNRRLPHCTHAIAPSSPYRHSRCCSSTLAPSRAE

SEQ ID NO: 216179 - protein, 374 aa, Zea mays
  Clone ID: MRT4577_128752C.1.pep
MLGAARRQLGSGPMLGQVLRRLRPAVAAEVARGYSAAAKEMTVRDALNSALDEEMSADPSVFLMGEEVGEYQGAYKISKGLLDRYGPDRVLDTPITEAGFTGIGVGAAYHGLRPIIEFMTFNFSMQAIDHIINSAAKSNYMSAGQISVPIVFRGPNGAAAGVGAQHSQCYAAWFAHVPGLKVLTPYSSEDARGLLKAAIRDPDPVIFLENELLYGESFPVSAEVLDSSFCLPIGKAKIEREGKDVTITAFSKMVGYALQAAEILSKEGISAEVINLRSIRPLDRAAINASVRKTNRLVTVEEGFPQHGIGAEICMSVVEESFAYLDAPVERIAGADVPMPYAANLERMAVPQVDDIVRAAKRACYRAVPMAAAA

SEQ ID NO: 216180 - protein, 105 aa, Zea mays
  Clone ID: MRT4577_128753C.1.pep
NGFQVCFPGLKKKAQVKTCCRSFWALLWGVNLSPFNSKKIKSFWDLFIVASHACQWGKNVQISWLGRISVLFMFQKSSLHLLGDHVKRGGGHKFYCAHFTHCEFR

SEQ ID NO: 216181 - protein, 45 aa, Zea mays
  Clone ID: MRT4577_128754C.1.pep
LLSPVSGVQLRDRSDKPLLWRSQGGQAKKEVDAPRAVLPCLTAGG

SEQ ID NO: 216182 - protein, 374 aa, Zea mays
  Clone ID: MRT4577_128755C.1.pep
MLGAARRQLGSGPMLGQVLRRLRPAAAAEVARGYSAAAKEMTVRDALNSALDEEMSADPSVFLMGEEVGEYQGAYKISKGLLDKYGPDRVLDTPITEAGFTGIGVGAAYQGLRPVIEFMTFNFSMQAIDHIINSAAKSNYMSAGQISVPIVFRGPNGAAAGVGAQHSQCYAAWFAHVPGLKVLTPYSSEDARGLLKAAIRDPDPVIFLENELLYGESFPVSAEVLDSSFCLPIGKAKIERGGKDVTITAFSKMVGYALQAAEILSKEGISAEVINLRSIRPLDRAAINASVRKTNRLVTVEEGFPQHGIGAEICMSVVEESFEYLDAPVERIAGADVPMPYAANLERMAVPQVDDIVRAAKRACYRAVPMAAAA

SEQ ID NO: 216183 - protein, 128 aa, Zea mays
  Clone ID: MRT4577_128756C.1.pep
RPGSGRVLAEMMHKRLNDRLASALSPCSDGHIRVNKSAAACHSARRRRARLCCPGCHIRLLSGRHVLRSRQCITVVRRDQDYGHCMYPRPRATPSVTATPAAAPCTRSRAFYEPTIPRTSRTPTPPLP

SEQ ID NO: 216184 - protein, 77 aa, Zea mays
  Clone ID: MRT4577_128757C.1.pep
TTRTTTPAPTVCSEAMPPVDTRPHNKALAQSPYQPSLQTSLRFIAISQNQLQLYYRPVTLYGISQSHKSDLVCRNDR

SEQ ID NO: 216185 - protein, 82 aa, Zea mays
  Clone ID: MRT4577_128758C.1.pep
GVFEFSKFPVGTEAVAKKLAELSGKGVPPFLGGGAPFPPVKKVGVPPVFTPLSPGGGPTLELLEEKDLPGVVALNKPPPVPV

SEQ ID NO: 216186 - protein, 97 aa, Zea mays
  unsure (1)..(97): unsure at all Xaa locations
  Clone ID: MRT4577_128759C.1.pep
LSKYRRRAITLVNCPRQVMRXIHAADTNLKAEDSWWRLKKKYGNGVSAMVLVYHAPGVSLSLTDDGKDWMGSVYRXPIPGRFHKGQRIPFLHRQTRL

SEQ ID NO: 216187 - protein, 207 aa, Zea mays
  Clone ID: MRT4577_12875C.1.pep
GRVGEKLLEFRQKQDGFIETSFDTISGYGANGAIIHYRPTPESCSSVGSDNLFLLDSGAQYIDGTTDITRTVHFGEASPRQKECFTRVLQGHIALDQAVFPERTPGFVLDVLARSSLWKIGLDYRHGTGHGVGAALNVHEGPQSISYRYGNLTALQKGMIVSNEPGYYEDNSFGIRIENLLLVKELNLANSFGGISYLGFEKLTLAP

SEQ ID NO: 216188 - protein, 552 aa, Zea mays
  Clone ID: MRT4577_128760C.1.pep
MEAVRGDGRWCVVTGGRGFAARHLVTMLLRSGEWRVRVADLGPAITLDRDEEEGFLGAALREGQAVYVSADLRDKAQVARAFEGAEVVFHMAAPDSSINNFHLHYGVNVDGTKNVIDACIRCKVKRLIYTSSPSVVFDGVHGIFNADESMPYPDKFNDSYSETKADAEKLVMRANGREGLLTCCIRPSSIFGPGDKLMVPSLVAAARAGKSKYIIGDGNNYYDFTYVENVAYGHVCAEKTLSSEDGAKIAAGKTYFITNMEPIKFWEFMSLILEGLGYERPSVKIPVSVMMPVAHVVEWTYQKFAKYGMKVPQLTPSRIRLLSCNRTFSCSRAKEQLGYEPLVSLKDGVKRTVESYSHLQAQNHRSISKASIFLGNGNLAKTVLWEDAKQTVTVLLLLAVIYYHLFTCGYTFITAMAKLLSLTALFLFIHGMLPSNLFGHKVEKLEASNFHITQAQAHHIAHSISSNWNSLVSALRSLCRGNDWLLFLKVSLSLLVVSILSSMSSQAAFKIGTALVFTGFKAYEKWEDSIDSMVGDACTILLHFGSAKESSS

SEQ ID NO: 216189 - protein, 38 aa, Zea mays
  Clone ID: MRT4577_128761C.1.pep
AKCFLLAFIFFLNGHGTLLLGQGNYLNISNGFHKSIRI

SEQ ID NO: 216190 - protein, 82 aa, Zea mays
  Clone ID: MRT4577_128762C.1.pep
RTSPIGKKCGWTNTEKWRPIASFATDCILPGTDGRAGAHATERGDVAMAYWGAPGLAFASCPTLQTARHPSCAEHSVRACCF

SEQ ID NO: 216191 - protein, 88 aa, Zea mays
  Clone ID: MRT4577_128763C.1.pep
IPWSLSSLVFGRPSFFFFFFSFKTPVEDHPAALMKQAAKTGLAGMGVSHTQLPVSFSHVHRLNSTYCGLHCLVVPKAYWAGLHTHPIY

SEQ ID NO: 216192 - protein, 58 aa, Zea mays
  unsure (1)..(58): unsure at all Xaa locations
  Clone ID: MRT4577_128764C.1.pep
QQAVLSFLHQQQLLAFXQEFWGNPATLLQLQQLLPFVQLGLTNPASFYQQHIIGGALF

SEQ ID NO: 216193 - protein, 119 aa, Zea mays
  Clone ID: MRT4577_128765C.1.pep
KTWVHEHEPMGTLLKAVQSLNPTVLIGTSTKGGTFTKEVVEAMTSQNEKTVIFWLTNPTSNSECTAEHAYTWTKGQAVFASGRPFNSIQLDCKVLVPKQSNNAYILPEFGLGVVISGDI

SEQ ID NO: 216194 - protein, 108 aa, Zea mays
  Clone ID: MRT4577_128766C.1.pep
QNVHCHVTANSKSDSFIRPTTLNMNSKLRLISIPISKGPSPRHTPTHPKHSQYTEPAHPMSLLIVPTASTRHASNSVSPRPTDAREQLRQNPLQPPDGPEQASFEQQG

SEQ ID NO: 216195 - protein, 69 aa, Zea mays
  Clone ID: MRT4577_128767C.1.pep
VSDDPTKKESPDQGFMLSTVTGTYPRKREATNSDYTYHIGMQRNRHICTASYFATAMDLPMGYCAHGHG

SEQ ID NO: 216196 - protein, 82 aa, Zea mays
  Clone ID: MRT4577_128768C.1.pep
MLRLRWRAVLPPLPLPPPPGLLRRLPPHRRALSSSSGTIPLPPPVMEASYKFGPYKIDAREVFHATPLSYAMVNLRPLLPGG

SEQ ID NO: 216197 - protein, 129 aa, Zea mays
  Clone ID: MRT4577_128769C.1.pep
PTRPPTRPDLGDSLAYNSLKGLILRNTFRAQKNAEDESCVIALGNLRSEVIKLRNEALEKDKILLSLVDRVKEDESKLNTQSETYKAEIEDLQKKLAEANENFALAKASQEISEWSKTRLEKNVEELRE

SEQ ID NO: 216198 - protein, 71 aa, Zea mays
  Clone ID: MRT4577_12876C.1.pep
RYRIPTKLESYKLVCLSCLCCSFTLGVKLLLEIQLCILTQICSMLLLQICKSNLKPLSLMFFSKNCKGISA

SEQ ID NO: 216199 - protein, 101 aa, Zea mays
  Clone ID: MRT4577_128770C.1.pep
EDIPGTEFIHRRFFHTSFPTPQAEFFFFLGGVKHRAALLVDRLLLSPPVLLDRFSAADMQRNNSFGASWADQRDYGGDPSPRAPRDGGKAGGGVGEKTKAA

SEQ ID NO: 216200 - protein, 64 aa, Zea mays
  Clone ID: MRT4577_128771C.1.pep
YKKDAVIKGNFKGGCFFFFFEKRILERAFWLGVFWKKGRVGKGGYFERGFSLVRNGVFRVRVLE

SEQ ID NO: 216201 - protein, 142 aa, Zea mays
  unsure (1)..(142): unsure at all Xaa locations
  Clone ID: MRT4577_128772C.1.pep
GSRHCNRSGQTWEIEAEEDREKKRRRERETDAAGGGGAGGGAVRGGGPRGAARRAAAGRARARPRXPRLPARSSPSLPPLPPGXPPXAFSPFPPPXPPPPPPPLPPPPPXPPPPPSPPPPPPPPPXPPPPPSPPPSPPAPPP

SEQ ID NO: 216202 - protein, 83 aa, Zea mays
  Clone ID: MRT4577_128773C.1.pep
VYLCIGFGGCDRDLWVMGERPINGTLGDVLVGGWYLSRIATYEVFVISMSRVLWRVPSGREGVLYTWILGIEARESFNPPSCG

SEQ ID NO: 216203 - protein, 57 aa, Zea mays
  Clone ID: MRT4577_128774C.1.pep
GRVGGRVGIRFRETTLDRYFDITLHYSVRKEVALTMHFWKGHFAVFLPLWRENLLLL

SEQ ID NO: 216204 - protein, 92 aa, Zea mays
  Clone ID: MRT4577_128775C.1.pep
NSQPKNPTNNHPSTSYINTHSPSTHSLSTYKPHTDSKKKKPFHQKLTTNQIYKHLQQIKTPHLKNFTPSIPKQSYTNTINSLKTHWQLPIFQ

SEQ ID NO: 216205 - protein, 113 aa, Zea mays
  Clone ID: MRT4577_128776C.1.pep
GGQCFPPLSLGPPLLANEPLSVSLFTRPLPVRWAALFSSWRAWFLSLIPPAWLVALFFCWPPPFAPPSWFVLSLGGPLFALFAGGLVFSGAPPPPPFSPRSLVCPSVRRGRLR

SEQ ID NO: 216206 - protein, 648 aa, Zea mays
  unsure (1)..(648): unsure at all Xaa locations
  Clone ID: MRT4577_128777C.1.pep
MRLVAKNLSADATPVEKVMTPDPEFATVDMPILDALRTMQERKFLHLPVMDRDGSIISIIDVTHASAHASAHASAHASAHASGPVRPCVRPTIRPSAAMVGGMSPPRRTLSMGSGGAMGRRAASAGVMGDSPKRGLSRSMTMGGERTVKRLRLSRALTVPESTTVLEVCRRMAARRADAALLTDSNALLCGILTDKDIATRVIARELKIDETPVWKVMTRHPIFVLSDTLAVEALQKMVQGKFRHLPVVDNGEVVAMLDIAKCLYDAISRMERASEKGKAAIANVAAGDDKYSIVEALKEQMFRPCLSAIIGEDSTVVMVSPGDSVLAATKRMVEAHATSAVVAVGSKPQGILTSRDILMRLVAKNLSADATPVEKVMTPDPEFATVDMPILDALRTMQERKFLHLPVMDRDGSIISIIDVIDIAHAAISIVESSGGGGDGSAGSDEAASSMFQRFWDSAMALGPLDDETDTQSQMSEASRSQMMMSDVXTTTTTTTPXGGSEAGFSLSSFSFKLQDRRGRMHRFSCEVQSLTPLVTCILRRLGADIDPDRLPQILYEDEDRDKVVLASDDDLAAAVEHARLAGWKGLKLFLDYSGTTGRRKAVATPRGAMAVGMSSRDAWAAAYSGVAAGAALVTGIGVMAYLRRSA

SEQ ID NO: 216207 - protein, 157 aa, Zea mays
  unsure (1)..(157): unsure at all Xaa locations
  Clone ID: MRT4577_128778C.1.pep
TLQPATTIRVVHKSHYAITVFFQEPDEHSGSCGTELASRNTGSGAMTPPHAWLADAHPSLTKRAKRMTTKPAATLCVLVTTVCWYASSVTAAPRHPIRNPLREIQREMNGSGXHAAAACCLPSSLPVALWLLCSDAIACGDDETKDLGVGLGMAGWG

SEQ ID NO: 216208 - protein, 74 aa, Zea mays
  Clone ID: MRT4577_128779C.1.pep
AIICSKRPNQGFELSPGPEPQLYGKGSTLFKSLECCSNSLTNLLTRKPLPLILTPLAQAQLGIPCNGLQRLKLY

SEQ ID NO: 216209 - protein, 49 aa, Zea mays
  unsure (1)..(49): unsure at all Xaa locations
  Clone ID: MRT4577_12877C.1.pep
KAGKEGTRGERSVDRGCDGGXXGAXXGXXACIVGSAPAGEERNLXEGVA

SEQ ID NO: 216210 - protein, 147 aa, Zea mays
  Clone ID: MRT4577_128780C.1.pep
RLLMHGWLTRTRDSEGNESFLDEEGEEDDDEARRDALRAGHHRLLVRQQRHGGAQAPDQKPAQVPVHAAAACCLPSSLPVALWLLCSDAIALRVETTKRRIWELGWGWPDGDKKPQGQRLRRSRPGRGFFFFFFFIFFFFFSPFFGN

SEQ ID NO: 216211 - protein, 78 aa, Zea mays
  Clone ID: MRT4577_128781C.1.pep
KAQWGTFDRASRGTKRTTLLRLAGLCACVAHATIHPEGSQAHMDSLLPIYLPSVMATACEKGGLQPYRPKQALVIRNI

SEQ ID NO: 216212 - protein, 225 aa, Zea mays
  unsure (1)..(225): unsure at all Xaa locations
  Clone ID: MRT4577_128782C.1.pep
MSFMFESIDSRFKTLKIFFKKKKKKKKKKKKKKKKKKKKKRRGISSNAPLTAPMGSLPGPASTKCTPKGRATVSASNLAPFFSAKRRNLNHFFNRLNMSKAAAFAKVLLNAPGAVFFTGVGKSGIGARKTAKTLASLGFARAGFLAPVNALHGNIGALFPGNGLGLLSKSGASNKLLALVPCARAKEGNLVSVTSAASGANCPLAAAXNLNVHLPLKGEXCPFGL

SEQ ID NO: 216213 - protein, 202 aa, Zea mays
  Clone ID: MRT4577_128783C.1.pep
MVIAGEPEPEEVAVMFSDRLRAEEETVVFPGWVMLDRISRTHCDGDLGAAREAVNGNKTAVQVEMDSGHSFYVSFTLAPPPQGASYLDLHWPLEGSAKSVPPYKQPAYPFVRAIDKDLVLFHISIPSLPHRNFVPPDLFVYNAAGHPPSVQQLPLYRRRSFLRVNFTTGILRRQNGSYIVSDLNVYPKKEGTGNNSMCAELC

SEQ ID NO: 216214 - protein, 104 aa, Zea mays
  Clone ID: MRT4577_128784C.1.pep
ELAGGYGTLEELLEIITWAQLGIHKKPVGLLNVDGFYDPLLSFIDLAVREGFVSEAARRIIISAPTAKELVMKLEDYVPEYDVGLVWEEQKPNSLVPAAGITSS

SEQ ID NO: 216215 - protein, 72 aa, Zea mays
  Clone ID: MRT4577_128785C.1.pep
RTRRLRIRAWTQTVLKTLLMISGIVTLCKLTGTISALKLAKRLLEAHKMAHCTIEDIVGDHIYMNTTGTCPS

SEQ ID NO: 216216 - protein, 58 aa, Zea mays
  unsure (1)..(58): unsure at all Xaa locations
  Clone ID: MRT4577_128786C.1.pep
HRSQAIFMSILQCMLQXAAXSGLVEVLLVAQIAHQLTAICGLQYACTCRYTVVDVVLY

SEQ ID NO: 216217 - protein, 70 aa, Zea mays
  unsure (1)..(70): unsure at all Xaa locations
  Clone ID: MRT4577_128787C.1.pep
PVLSPFVIHHLKPQPCCPKLCLNNVGGEPPQSHRIKLGGLPPPNLGKKKILRVFHIGGVRNIVAGXXXXX

SEQ ID NO: 216218 - protein, 61 aa, Zea mays
  Clone ID: MRT4577_128788C.1.pep
FQTKTLSTTKFHNSSIPTTFMLVIFSFEAVFKIQFLKFLNLDVVLVDNMTSNEKVVNYKIL

SEQ ID NO: 216219 - protein, 80 aa, Zea mays
  Clone ID: MRT4577_128789C.1.pep
NPPGGQSRSFFIGRISGSSDDFSFRKCVDKILPLLEDIKVGIGKKFGGHPKGDAAADRGRLVVCGRGGWRGARVRGRREG

SEQ ID NO: 216220 - protein, 99 aa, Zea mays
  Clone ID: MRT4577_12878C.1.pep
TKNKGGLFYVPGASFFLIPGLAPFMAPPFPLLSGRLFTFSLGGLFLDSLGLISLLPDLDFPWVAPTFCALGQISLFPRWGFLFRKVGPPLSLPNVLPPP

SEQ ID NO: 216221 - protein, 151 aa, Zea mays
  Clone ID: MRT4577_128790C.1.pep
MGRGRGRGRKQLTNGRTHADKGSSGEEVAAPARKRRGRPQKRVAAEKTIEAEMKKLVEEADDGDEDYVVGAGDGGAKPKGSRTEHASAGAGGTGNKRNRVHNEEEGSSLLDMDENSSSTRSSNDESTRSNGFRQSGSRRKSTPRRAAEAGL

SEQ ID NO: 216222 - protein, 49 aa, Zea mays
  Clone ID: MRT4577_128791C.1.pep
THLFTHAEKTKRVQEHASFDVAGPTPTTCYPSVSPYQQALDFREGPHYW

SEQ ID NO: 216223 - protein, 90 aa, Zea mays
  Clone ID: MRT4577_128792C.1.pep
KRAQQGPGGGPPPKPGPGPDPWPGPPPPGPPGAPPPPPVPKPPPRAPPGPVAHPDPYPEPEPWPGPPWPPTPPSPGPPAAPGDPPPNPPA

SEQ ID NO: 216224 - protein, 144 aa, Zea mays
  Clone ID: MRT4577_128793C.1.pep
MENGGAKGDVPNDANEHCPGTQSEEAGKADACAGCPNQQICATAPKGPDPDVVAIVERLATVKHKLLVLSGKGGVGKSTFSAQLSFALAEMDHQVGLLDIDICGPSIPKMLGLEGQDIHQSNLGWSPVYVESNLGVMSIGFMLP

SEQ ID NO: 216225 - protein, 183 aa, Zea mays
  unsure (1)..(183): unsure at all Xaa locations
  Clone ID: MRT4577_128795C.1.pep
MAPIAPSNSLETRLXFAPSSCYATXTPXTAFPIKIACLFPSNAAQNSRADVVSTSSPDIPKQLTTXITTDXRIYRARMMLVVLHRQVXEYLTERFAGDYVYHNFXLRKNADDFIKDQDYKVILVKYAMLAVNRGCHPQKNCNKXSANCTTEAVWFIIGTLLLDGNSLKYFGKWITINLKLCVI

SEQ ID NO: 216226 - protein, 87 aa, Zea mays
  Clone ID: MRT4577_128797C.1.pep
PAPRVVPQITVFFDIDANRGVNVSGEGKTTLHNNNITITNDKGRLSKEEIEKIVHDADNYKSEDEDHNKKVESKNSLENYAYNIRNN

SEQ ID NO: 216227 - protein, 73 aa, Zea mays
  unsure (1)..(73): unsure at all Xaa locations
  Clone ID: MRT4577_128798C.1.pep
RTRGFRYVIFKIEDKQKHVVVVNEGATTESYDDLLDSLPENDXRYALYXDFDFVTGEYVQKSXIIFIDQAPST

SEQ ID NO: 216228 - protein, 431 aa, Zea mays
  unsure (1)..(431): unsure at all Xaa locations
  Clone ID: MRT4577_128799C.1.pep
MKVDVVGTTLVAPSEDTPHPELWLSNLDLAVPKTHTPLVYYYPAPAAGGDTDGEAAFFAPERLEAALAKALVPFYPLAGRLGVGEGGRLQIDCTGEGALFVVARADFAGEDVFSDYEPSPEVRRLFVPFAASGDPPCVMSMFQVTFLKCGGVVLGTGIHHVTMDGMGAFHFIQTWTGVARGLDTAEACGPLPFHDRTLLRARSPPAPAFDHPVYSPALLNGVPRPFVTRVYAVSPKLLAGIKSRCAPGVSTYCAVTAHLWRCMCVARGLAPGSDTRLRVPANVRHRLRPPLPRSYFGNAIVRDLVTTRVEDVLERPLGFVAQAIKDAVDRVNDAYVRSVVDYLEVESEXAARRRAGSSCRSPTCGXVSWLGMPMYDADFGWGTPRFVAPAQMFGSGTAYVTQRANRDDGLAVLFGLEPEYLQCFEKVFYGE

SEQ ID NO: 216229 - protein, 322 aa, Zea mays
  unsure (1)..(322): unsure at all Xaa locations
  Clone ID: MRT4577_12879C.1.pep
MTERQVAELGPGTACCGWNHCGRRLAAGAVDGSVSVYDSQPPPSFKWQAHEQAIVNVVWLPPEYGDAIACVCADGTLSLWEEVAADDQLPTWRNCKIFEDGNSHIXMYILDYIWXLKMVTAYSDGQVKVYELLDSLELDKWQLQAEFQNITDPISRFGKPACTSASIAWNPRRGGSQQASFAIGFNSDSPHFNSCKIWEFEEAHQRWLPLVELGSPEDTGDKVCAVAWAPNIGRPYEIIAVATCKGIAIWHIGLNADADGGPSTQNVALLNGHDGEVWQLEWDMGGMTLASTGGDGMVKLWQANLDGVWHEQAVLDCSGSHV

SEQ ID NO: 216230 - protein, 218 aa, Zea mays
  Clone ID: MRT4577_1287C.1.pep
MARRASLLLAAALLVAVAAAAVPPTCERIECPAYEVVDSANGFEIRRYTDAMWITTAPIEDISFVAATRTGFLQLFDYIQGKNAYNQTIEMTAPVLTRVSPSDGPFCASAFAVSFYVPAKNQADPPPAEGLRVDRWAGARYAAVRRFGGFVADADVGEQAARLEASLQGTRWAAAVNDARRADPASPYTVAQYNSPFEFTGRVNEIWMLFDADDDASM

SEQ ID NO: 216231 - protein, 124 aa, Zea mays
  unsure (1)..(124): unsure at all Xaa locations
  Clone ID: MRT4577_128801C.1.pep
ITNSILVSGFSTSQSXTSSLASFPSPNSPLASETWATLSCGSATSATSSPRGEGETSTSSSSLNSPPTALPEPTSSPFSTSGTSFSSSATGDSTSSAILSTTFTSTAAPLSSRTRRKTRGRTRG

SEQ ID NO: 216232 - protein, 362 aa, Zea mays
  unsure (1)..(362): unsure at all Xaa locations
  Clone ID: MRT4577_128802C.1.pep
YLEPAGCRQQKKTGXGLSSRGDNLDILKQELKVQSKHVKSLKKXSLWSKNLEEVMVKLVDIVHFLYLEIYNAFGRPDSEEPQEPAKHHNRLGPAGLALHYANIINQIDNLVSRSCAMPPNARDTLYHSLPPTIKSAFRSKLQSFEVKEELTASRIKAEMEKTLRWLVPFASNTNRAHHGFGWVGEWANTGSELNCKISGQMDMSRMETLYHADKEKTEALILELVVWLHHLISKSGNASGGVRSPIKSPVSSPTQKGAAITLLSGKTNNLPPILTQEDQDMLRGVKYRKFVPGISKSQEFDTKSSHSKHSRLSKSNSHSPASGSRKDLLPVRRSSMLPVIDFEIDRTKALDLIDRLDNLKVQ

SEQ ID NO: 216233 - protein, 59 aa, Zea mays
  unsure (1)..(59): unsure at all Xaa locations
  Clone ID: MRT4577_128803C.1.pep
QFLSSSPHSSVRTSLEQVDGFLATPYQFLAAFFLRLLFLLFSFKIARDAPARLHXHCRL

SEQ ID NO: 216234 - protein, 147 aa, Zea mays
  unsure (1)..(147): unsure at all Xaa locations
  Clone ID: MRT4577_128804C.1.pep
SRGSPREIPAPGPEGGPAPPKGXGPEGGENRAKAGPGGKGESPHNATKQXPEEKREKPGGPKKGKNPKEXRGPNPRKKNEKPGPQGEKKKPPTPGERGNGKGAQRGDSFNPKKREKVENPAPPGPEKGGKSGPPRVAPTGKNPGGGG

SEQ ID NO: 216235 - protein, 97 aa, Zea mays
  Clone ID: MRT4577_128805C.1.pep
AGVYIWAFFPVQPTPGGGPRETKRDPPRCFRPRPAGPFWGGAGMTYIGYSNICAGLGRNCPKEPLKSQAAFPEKGPFSLSQWADGQPEKPPGPPKSH

SEQ ID NO: 216236 - protein, 162 aa, Zea mays
  Clone ID: MRT4577_128806C.1.pep
FDLAGCITTKELGTVMRSLGQNPTEAELQDMIAEVDSNGSGTIDEQEFLGLMARKMRDAESEEELREAFRVFDKDQNGVISAAELRHLMTNLGEKLSEQEVAEMVREADVDRDGHINYDEFVKVMTAKRRSKRTEEKATRGKKKPAAAPSDAGKRGQKCVIL

SEQ ID NO: 216237 - protein, 44 aa, Zea mays
  Clone ID: MRT4577_128807C.1.pep
FQGMFKSLEMCQSIDSLGRIPVCEPSGFFWSKYTNHCYSHHFIF

SEQ ID NO: 216238 - protein, 146 aa, Zea mays
  Clone ID: MRT4577_128808C.1.pep
PPRRRLPTSQSPLVVGVATFLLHAVASPRCLPAFNGSHPAASSAWLAVLVHGHRCSPSCVAPDPAVCSPGRVLSRLFLHTRLWFLLQLHRALPVARVATYSVECENRWPILLRRLISVRSSPGCRGAAIPRQSYWCIVCSLGVVAG

SEQ ID NO: 216239 - protein, 55 aa, Zea mays
  Clone ID: MRT4577_128809C.1.pep
VLQPPLFQLLIQLSPSHVPFHVAVLRSAIEHSSALAQQLVDPGAYCGSFCARVCS

SEQ ID NO: 216240 - protein, 35 aa, Zea mays
  Clone ID: MRT4577_12880C.1.pep
AVGLRTTLNIGTDSSDTQRGRGRECAYCLKLVGCV

SEQ ID NO: 216241 - protein, 109 aa, Zea mays
  Clone ID: MRT4577_128810C.1.pep
AETKPAEQNPTDETVEKKRKAANRVPRMDCRKNYVDAHCKYSVTTYEIYIINSVMHVHADIGISSNDMSIMNSFINDIYEKLAVEADILARYNKMLTITSREIQTSVRL

SEQ ID NO: 216242 - protein, 139 aa, Zea mays
  Clone ID: MRT4577_128811C.1.pep
GFSVFRGQRACIMAWAWAWASIISLHITPFFLGPTPFEVGFQGKKPPVVASSLNKTSGGCQNRPPQPPVFFLGLPVFPIGRGGGSPINSFSPRKPPPLGFFLARPPPRIFKKTPGFFGPGFLKTSPLVGFAQTAAGGVF

SEQ ID NO: 216243 - protein, 234 aa, Zea mays
  Clone ID: MRT4577_128812C.1.pep
QVSVRNSRVDPRVREVFRSIILNEYKRCDGRDLTSLRNISCEVDMFKTLHGSALFQRGQTQVLCTVTFDSLESSIKSDQIITAINGVKDKNFMLHYEFPPYATNETGKVTGVNRRELGHGALAEKALCPVIPKDFPFTIRVTSEVLESNGSSSMASACGGSLALMDAGVPISSAVAGVAVGLVTKTNPEKGEIEDYRLLTDILGIEELYGDMDFKIAGTNKGITALQADIKLPG

SEQ ID NO: 216244 - protein, 92 aa, Zea mays
  Clone ID: MRT4577_128813C.1.pep
AADHSATCTFSFTSNLPPRANYQAAAVQSLSLMATAVGVSRPDPAAFYFDITALGSSITQESWQQPDPAPAFPSSSFSIGSKAAVTSSNKNW

SEQ ID NO: 216245 - protein, 205 aa, Zea mays
  Clone ID: MRT4577_128814C.1.pep
MDRKNQTPQGQIAQVVVEFLEVAISCIVFLKGFYPPRAFERRRYMNVVVQKALHPELTSYIHSVTFGLLPFIQKGLVERVVVIFYDKGHVPTEKFVFKLAVNQSYRSKLEEANLEFALRAFLIRLTVAEPVTRPLPPDGSWEVTAYFRSLPGDGDREAQLWIPTDAELWMQPPQITPIKSVSCDPLTMQLYLEHPSVTEPKEPPA

SEQ ID NO: 216246 - protein, 60 aa, Zea mays
  Clone ID: MRT4577_128815C.1.pep
HGRGRGVISSSLDLEDAIEVHLDGSTSTCTCVFCYASLSLYGDLECKDKYKVECQFSCVA

SEQ ID NO: 216247 - protein, 255 aa, Zea mays
  Clone ID: MRT4577_128816C.1.pep
MGRRHSGGGGGRGRGRGRGRGRDEEEDLPLHKAARSGDAAAVESVCESNPLAVNSRDRLSRTPLHLAAWAGHVDVVRCLCKHKADVGAAAMDDTAALHFASQKGHVEVARELLASGASVKAKNRKGFTALHFAAQNSHLDLVKYLVKKGVDVTAKTKGGQTALHVAEDDEVRAFLKECEQSLKKGAELPSEKDDSAEKEGDSKSSGEVMKDEEDAEQGEKRKSELVGASSLSGVKKAKVSLGHLVCENDMDEEEE

SEQ ID NO: 216248 - protein, 180 aa, Zea mays
  Clone ID: MRT4577_128817C.1.pep
TRPQGVIMNKGGARLLANVASETDDPQTLRMVAGAIANLCGNEKLHLMLKQDGGIKALLGMFRSGHADVIAQIARGIANFAKCESRMISQGHRKGRSLLIEDGVLSWMVAHSTMFSASTRRHIELAFCHLAQNEDNTCDIIASGGIKELLRISRESPGEDTRNLAKKALDSNPAFLREIQ

SEQ ID NO: 216249 - protein, 90 aa, Zea mays
  unsure (1)..(90): unsure at all Xaa locations
  Clone ID: MRT4577_128818C.1.pep
VHASDPRQILTYDNRCTSRRDGCVTNAGACRYNDTRTHGYGLHTVYVSTVLFGDRTXCXRCYEVLRVYSSSRCKPEAAELMVTVTELCPC

SEQ ID NO: 216250 - protein, 129 aa, Zea mays
  Clone ID: MRT4577_128819C.1.pep
SGIHRVFLISYSSIIGHRKGRSLLIEDGVLSWMVAHSTMFSASTRRHIELAFCHLAQNGKHIEVCSRPFCADILPNIAHIFAEDNTCDIIASGGIKELLRISRESPREDTRNLAKKALDSNPAFLREIQ

SEQ ID NO: 216251 - protein, 69 aa, Zea mays
  Clone ID: MRT4577_12881C.1.pep
QLEHSCFSFHPAGGCSFSVSLIVHKIMVSNKLQDWNCDPWYHSHRTGGHFLKETNGTSPLPTKKLYCRN

SEQ ID NO: 216252 - protein, 71 aa, Zea mays
  Clone ID: MRT4577_128820C.1.pep
DNPSCGSGYKRTLGLSSPKQLHATCCKCAVRHRQRMIYGHSWRMSSKTWELCPGFSPASTSLWLVFYGGGR

SEQ ID NO: 216253 - protein, 57 aa, Zea mays
  unsure (1)..(57): unsure at all Xaa locations
  Clone ID: MRT4577_128821C.1.pep
MGEVYNMELYEWAKVDPSDKAQKERVNAIIXGQEPFXGKALLDAKCFKLGKSFWGQF

SEQ ID NO: 216254 - protein, 221 aa, Zea mays
  unsure (1)..(221): unsure at all Xaa locations
  Clone ID: MRT4577_128822C.1.pep
SRSGAGLTCRRISSAASETGSSSSGTPARGASARRGAARSXPPSPALLVIAKSDSCYPYAAASXCPRGGPSSSPPSSQDGAASDPATAGSRSPSTRPSTCSSTPSPRCKSSSHRLTTGTSTIATGTGGFPRSSAPRAPPRMTSLPPRSAASTGSRTSPPVPRGGPSWASASAGRSGTSSPTSSTLTKVNSTVSPTGTCMYSVSLRAGAGSLPTPKRRGPQS

SEQ ID NO: 216255 - protein, 105 aa, Zea mays
  Clone ID: MRT4577_128823C.1.pep
KTPRNRPIAIHFRTQTKTRALRDFLATRDETVFFPGSRPVLQSAHNVAYTNRTTNWSPTYAGFRAGFLLPPGHRARPDSGAYLGVFLLNPTREPGILTITYTFCF

SEQ ID NO: 216256 - protein, 61 aa, Zea mays
  Clone ID: MRT4577_128824C.1.pep
SCTCSPSYAVYRRPFVKVILAAYARAYKIAEAKMPQFSPVPEIVHERIRQHRGSHLNRSHL

SEQ ID NO: 216257 - protein, 52 aa, Zea mays
  Clone ID: MRT4577_128825C.1.pep
SHGGVTSPPTGFVNYSKSLGHIKSFSLKMSEKGNLQIVVKDFPPLMKKTPNP

SEQ ID NO: 216258 - protein, 107 aa, Zea mays
  Clone ID: MRT4577_128826C.1.pep
HRRLPLAFAPPEVASIQRQHHSHAADNSTDQSSSITSFLAIFFYAFNFPNQKNNIGGEILWNTKHDRLADGPSPCCPTDGGGRGCHRRWRPPRCRTARPASPLWCPW

SEQ ID NO: 216259 - protein, 89 aa, Zea mays
  Clone ID: MRT4577_128827C.1.pep
ICRYRQFHSASGVPISKIYWSIAIGLVSMLNYKVVVVRYENMNVMRWALVPSLNACAPVFSHLRRQKVCIRVTEGRPVQIQASVLYILI

SEQ ID NO: 216260 - protein, 79 aa, Zea mays
  Clone ID: MRT4577_128828C.1.pep
SGVGRISRSRQQLGKVPWIHLARLSAYIRQRGEVHVHQGRIFQRWLSPLAHSHSPTVAPLYASVVLVSVEGVRTIFCYA

SEQ ID NO: 216261 - protein, 153 aa, Zea mays
  Clone ID: MRT4577_128829C.1.pep
MAAPSSAATACFVSPLPPPRRPRHFLRHLARAAAAEPTPASASSFALPSPWPWARRLRDLVPAEAAGRLLSSAAGSLIVALASASLVLGDAGAASAFVVSTPRKLQADELATVRLFQENTPSVVYITNLAVRQDAFTLDVLEVPQGSGSGFVW

SEQ ID NO: 216262 - protein, 124 aa, Zea mays
  Clone ID: MRT4577_12882C.1.pep
TLLAYHQLLENRQKKKHILIGAACMWKIYICLGSTHAFAQDDQVDGTGHALLLCWPLSPVSHSFIELHAPADAGGGVETAAPLKDAVQESCGRSQRRPSDYCRRRKEGGIRRRNTGCCLLPSSL

SEQ ID NO: 216263 - protein, 198 aa, Zea mays
  Clone ID: MRT4577_128830C.1.pep
MDDREQMRMTVLNQEQVFRHQVHELHRLYHVQKQLMMQQAHTPAPATRAPAVLDDAKAKPRRPHLDIWCSETARNPPQQRIISFNTATAPAPAPAPAPARAEDCNLELTLATGRPSSSSGSSSCDAGRRRGKRLKVSTNSDSGATAVSSTSTDSELAQFGDIDAANLPVVRFQGEVTRRMGEVGQGPWMYRCLSLKTA

SEQ ID NO: 216264 - protein, 198 aa, Zea mays
  Clone ID: MRT4577_128831C.1.pep
MDDREQMRMTVLNQEQVFRHQVHELHRLYHVQKQLMMQQAHTPAPATRAPAVLDDAKAKPRRPHLDIWCSETARNPPQQRIISFNTATAPAPAPARAEDCNLELTLATGRPSSSSGSSSCDAGRRNNKRLKGATNSDSLRPPRRRPTSTDSELAPFREVVEDVATPVRFRGEVSGRRRMDEVGQGPWMFQQCLSLRTA

SEQ ID NO: 216265 - protein, 199 aa, Zea mays
  Clone ID: MRT4577_128832C.1.pep
MRTSGSIMDDREQMRMTVLNQEQVFRHQVRELHRLYHVQKQLMMQQAHTPAPATRAPAVLDDAKPKPRRPQLDIWCSETARNPPQQRIISFNTATAPAPAPAPAPARAEDCNLELTLATGRPSSSSGSSSCDAGRRRGKRLKVSTNSDSGATAVSSTSTDSELAQLGDIDAANLPVVRFQGEVTRRMGEVGQPVGCTGA

SEQ ID NO: 216266 - protein, 94 aa, Zea mays
  Clone ID: MRT4577_128833C.1.pep
LPEFVMFEGIAEITEMTHTKGERMHKSEDDVLSKEKKSRRAGRSRSKGEALPEAANDDAIDEDSNGGAGNDTLSQGEKSKRVKSSSKKKTDIYK

SEQ ID NO: 216267 - protein, 84 aa, Zea mays
  Clone ID: MRT4577_128834C.1.pep
RAHRYRHTLHGCPMCHIEKADSVSHTRRTLCLIHFATSENGATGLQAGTASSLQDLASCTNFGPLACTFDTNTVSQAYQRLPLR

SEQ ID NO: 216268 - protein, 73 aa, Zea mays
  Clone ID: MRT4577_128835C.1.pep
NLGDFFIYFQGQSPGGLFSPILAQMKDPSSQPTKKSGDRLRLTFSKKFWPGRQATGNPTPRLKPAQAKAANTA

SEQ ID NO: 216269 - protein, 62 aa, Zea mays
  unsure (1)..(62): unsure at all Xaa locations
  Clone ID: MRT4577_128836C.1.pep
LLPLTRIYSYFXQRLYTAMXSISVAIFQMIAHSEGAYQLIWHHDVILQRLAHVAYFSKRIQT

SEQ ID NO: 216270 - protein, 65 aa, Zea mays
  Clone ID: MRT4577_128837C.1.pep
FSFLLYIFFFLFFFFFFFFFFFFFFFFFFFLLPKYNEVHELTYQFVVQITNKVDPLMGETNTNTN

SEQ ID NO: 216271 - protein, 98 aa, Zea mays
  Clone ID: MRT4577_128838C.1.pep
ARVRTRSIHRSAHAYLQASDRISGDRVLIAVRGVLLSVLDHGSGRAETSCVPGSAIRHNALLLCLWYDNRQTWKLGPRLPWAELKRRCYHELADIGAY

SEQ ID NO: 216272 - protein, 631 aa, Zea mays
  Clone ID: MRT4577_128839C.1.pep
MENLRRFLNPLVLNLQKMELELTCPVCLKLLTSPTTLPCYHTSCSKCALTPTSKGYSCAICKSGYCSQDLRPASHLESIVSIHRSLSSTVSTMIEQQDSQINIHVAKAASHGTPESGNRSGVEEKSDQMKSYNPVASKLVYNQPTGPAFGNIDSVQAKDPAFENNAGAAAVAPMAFVRKGHSGSQSSDGPGDLDCDSNDLEGELMTSLSPLQTALKREANAMDDHTRELKKQKSNDQVQRQTNMASAWKCEFCHSSQVTECTGPLSHYLNGEPVEADQAWKSSVQHVHEKCIEWAPQAFFTGDTANNLGPELARASKIKCSVCGLKGAALGCLVKSCRKSFHVPCAYNVKGCKWDQENFVMLCPTHSSKKLPCERLKPKKKAKLQQPSSDIDGPISPSPMQRAELWTASPFLTSEWVICGSALIGHEKEILDQFECHTGITVTNTWSSDVTHVIANTDERGACARTLKVLMAILAGKWVLNVNWLKACMEAREPVPEEPYEIRCDVHGSVDGPRSGRLRAMQQAPGLFAGLTFYFSGHFMPGYRANLEDLIAAAGGSVLEKAELSSTSLILYSMEAPPPHNNLDALETINKRLAEAQELATTAGCKAIPHTWLLDCIASCAVELNVSCSTA

SEQ ID NO: 216273 - protein, 51 aa, Zea mays
  Clone ID: MRT4577_12883C.1.pep
EILFAQDNEEQSVATLILDSLIQCPIDTRKQLAENLVVIGGTSMLPGFLHR

SEQ ID NO: 216274 - protein, 54 aa, Zea mays
  Clone ID: MRT4577_128840C.1.pep
RDQPGPRPGPRGRLGRGPSRPAAGAPSGVCVVLAARESLAASRTVQVDASGRPG

SEQ ID NO: 216275 - protein, 55 aa, Zea mays
  Clone ID: MRT4577_128841C.1.pep
ARGAARCRRDRRTGRWEWAELAVSFVLFGHGFFFFFFFFKQYRSSSPPFIHQINK

SEQ ID NO: 216276 - protein, 103 aa, Zea mays
  unsure (1)..(103): unsure at all Xaa locations
  Clone ID: MRT4577_128842C.1.pep
LQSQTHLFKRFCNNLTTGGRKILTLLAHLALLVSATNAXLVDTXTLAPNAIIPHYLPPVTXMDFEHSAVQAYXLQLSLAESVLQQPIAHLHQQFLAHINLQTI

SEQ ID NO: 216277 - protein, 71 aa, Zea mays
  Clone ID: MRT4577_128843C.1.pep
MDIKHLNTNYISQMKLYIHSPYAHYIHKPCATITMHNYGDNNVYFDLDYINHTTSQCYLYRSDSPSYYNPL

SEQ ID NO: 216278 - protein, 56 aa, Zea mays
  Clone ID: MRT4577_128844C.1.pep
LVGIKYECEDFQSLIKRLSELGHACQINSGEQYLSTWPRGCTHHWGTNWTTTSLIT

SEQ ID NO: 216279 - protein, 103 aa, Zea mays
  Clone ID: MRT4577_128845C.1.pep
ASRPQLVASVTARLVRPEKVYMNKGVRIKEEDEWSAVHAWVYGEGRRCLSLNVVGSSCRGKSRRSCRTNHSCMDSKCGNPIDDEDESTTCSYSSSRNKRASAP

SEQ ID NO: 216280 - protein, 69 aa, Zea mays
  Clone ID: MRT4577_128846C.1.pep
MAASDVYYRCFVGILSWFTDDHYLHNSFCTYGEVHEFKIILDLETQRCRGFSFVTFYTEEAIRYAIAGL

SEQ ID NO: 216281 - protein, 128 aa, Zea mays
  Clone ID: MRT4577_128847C.1.pep
NLFAFFRQQQFFPFTHRGALDFGGFLHHQFPFGRLVVASPPQFFPFNPVGALNFAVFFQQQRVPPFSQLVFVGPVAFFPPPRLLPFYLPGGPNAGPLFQLPPLLPFTPLVLPNPPPFFPPPLIGGAPF

SEQ ID NO: 216282 - protein, 122 aa, Zea mays
  unsure (1)..(122): unsure at all Xaa locations
  Clone ID: MRT4577_128848C.1.pep
MRSRPSTKGTERDVAAYLLGELTGNASPSAEDLTGILESVGCEENKERMELLMCQLISKDITELIDKGREKLAXVPCGGGGVGAAAGAPAAGGADAANEAKKEEKVEREEESDYNMGYKLVQ

SEQ ID NO: 216283 - protein, 182 aa, Zea mays
  unsure (1)..(182): unsure at all Xaa locations
  Clone ID: MRT4577_128849C.1.pep
PGDHGGDTAGXXADPETXARNREXEAXHXRXAXXGAPGRAXPESPAKNGAKXGEAAGGKAGAQXXPEGGXDXPGNPNXAHAQSXXAXXAXQXXPXGXXEGHRXGGGPPGEGXDKAXPGGAXDPXGXADDPDTAAQXXGKEPTNGRXAXXXXXGRRGPATXTAQGPNANPXDHXADPGAHNAG

SEQ ID NO: 216284 - protein, 42 aa, Zea mays
  Clone ID: MRT4577_12884C.1.pep
CLLLGAFLWILPLMTISGVLLHYYFSRLTGMGGGDFPILITH

SEQ ID NO: 216285 - protein, 74 aa, Zea mays
  Clone ID: MRT4577_128850C.1.pep
CSWFVLWFCRLRARRAPVAGVLLVLAWLGPPGSRGPPLAGSVSAFPLPPGSGLARPGVFAFPRPPLGVPARVVG

SEQ ID NO: 216286 - protein, 56 aa, Zea mays
  Clone ID: MRT4577_128851C.1.pep
RTRGLTVFICLHPIGYMLACNQMLTEEMMCNRRTMLIKHTNIILFGKSGVSVIYSY

SEQ ID NO: 216287 - protein, 175 aa, Zea mays
  Clone ID: MRT4577_128852C.1.pep
MATPTTYSVRISSETHKIEAWVVSDEALARQLQEEENTRDAAADTREVAGNVPLESSSPAVEYRPAQNAAQVAREDNVDPDNMSYEQLQALGEAVGIQSRGLSDELISYLEPFRNKCTFFSRKKNSEECVICKTTYRSRQKLIRLPCSHCYHADCITRWLKINKACPVCNEEVFG

SEQ ID NO: 216288 - protein, 143 aa, Zea mays
  Clone ID: MRT4577_128853C.1.pep
ISSDSIEISATKVRMEVLSSVLPPNWHLTKQKKEFGTSVSDQETKHTRDKKQTTLLQNRSARRITQRPSSRTNWKEIAVRTSPPSSRSAEKNGVTDPPPRPPSPPLYLSTSEPLPLPFSQTLFFPFSFLTGAADVSRGSSKVK

SEQ ID NO: 216289 - protein, 90 aa, Zea mays
  Clone ID: MRT4577_128854C.1.pep
RIQSRAIGYSDVGRSRAGQRAGRGVMSGSAMGSALQVAVAHQARRISGRARARPVSYWYSREDLQEEPQRIPSSRIPSLRTRACDVIALL

SEQ ID NO: 216290 - protein, 64 aa, Zea mays
  Clone ID: MRT4577_128855C.1.pep
NQTYELNKLRISTNERIVVIHQVELTDQLTISFLTVCIANATSSRILYHRERNLHEIVFLYIEK

SEQ ID NO: 216291 - protein, 66 aa, Zea mays
  Clone ID: MRT4577_128856C.1.pep
HYVSLGNHPKLKWQGLFFLVGTTLDVSSYSPYWRKLSRAANVHIFSTDTSDFIVYVILLFGARREL

SEQ ID NO: 216292 - protein, 517 aa, Zea mays
  unsure (1)..(517): unsure at all Xaa locations
  Clone ID: MRT4577_128857C.1.pep
MVAMAAPGRVALLAAALLFGAFFPSAFATSSYPARLAGRLLSTTASAVAKQLWSLKSAATKTATASVAGRSMVRYEGGYAVDTVFDGSKLGIEPHAAQINRAGDLLLLDSINSNIYRVQLPLSPYSRPKLLAGSPEGLSGHVDGRLREARMNHPKGFTVDDRGNIYVADAMNMAIRKISDTGVTTIAGGKSIRGGYIDEPSVSDDAKFYVADGMNMAIRKISDTGVTTIAGGKSIRGGHIDGPSDDAKAGFPLGFALLCAAGFFGYMLGMLQHRLLGMPSTIDKPQAPPRPSIASIPPSYQKPLNPYIRHPFIPREETAKQETEEGFFTTAGKLMGGAKSSVGEIFGFKKKRLSSPYHQQQQQQQRRANPWPVQESYAMTHDEPPPALDTRAPTPQKNYSLMRKEPEKTHYVRHGHPYFNSWDGHCHPQQQPDQQLYHQQQQQHLQQHRQCSAGPQTFYEQSCEATNEVVFGAXVQEVDSKRRMVEIKAVNYGDTFYERYGMRYRNNFIGYNNNNNY

SEQ ID NO: 216293 - protein, 64 aa, Zea mays
  Clone ID: MRT4577_128858C.1.pep
SRPSYMQLNVLLGKAPLGNAAVVKAQVHLGGGVAPPVEFLPRLCLRDSDRIRLLSPLLSQKKSP

SEQ ID NO: 216294 - protein, 147 aa, Zea mays
  Clone ID: MRT4577_128859C.1.pep
MGGVTVKDIESHTFVKAYAAFLKRQGKLPIPGWVDTVKTSHSNELPPQDIDWFYVRAAAIARHIYMRKTVGVGRLRKVHGSTKNRGSRPSHHVDASGSVDRKVMQALEKIGVLEQDEDKGGRRITQSGQRDLDRIAQTTLEAEEDDE

SEQ ID NO: 216295 - protein, 329 aa, Zea mays
  Clone ID: MRT4577_12885C.1.pep
MASAGTTAVVPEVALRSGNARTAMPMVGMGTASFPLVHEAVKDGVLSAIEVGFRHFDTASMYGTEKPLGDAVAEALRRGTLRSREDLFVTSKLWCSQNHPDLVLPSLRETLKNLQMEYVDLYLIHWPVCLKPGPPELPTRKENAVPLDLAGVWRAMEECQRLGLAKAIGVSNFTTRHLDGVLAVATVPPAVNQVELNPAWQQRTLRAYCADRGIHVAAYSPLGGQNWDGQGSAVLDSEVLAAIAKARGKTVAQVALRWIHEQGVTCIVKSYSKERLRQNLGIFDWELTDEERLKISQIPQRKVVQTSSLFSQEGEFTAVDPAELNILEE

SEQ ID NO: 216296 - protein, 167 aa, Zea mays
  Clone ID: MRT4577_128860C.1.pep
MCFLVLYADRLSQHGEDSRRIRPKLDMSRNQLIGEIPAELGAMPVLSVLDLSSNELSGAIPPALANLRLTSLNLSSNQLSGQVPAGLATGAYDKSFLDNPGVCTAAAGAGYLAGVRSCAAGSQDGGYSGGVFHALRTGLLVAGEGEATETRRVRQTASAHGYLYLFT

SEQ ID NO: 216297 - protein, 48 aa, Zea mays
  Clone ID: MRT4577_128861C.1.pep
CRHTDRPCACECCCSEWSQILSACGLWHRLHRCDDTKATLTVDDCLTH

SEQ ID NO: 216298 - protein, 48 aa, Zea mays
  Clone ID: MRT4577_128862C.1.pep
FPCQKFGVCLAKIIKDILSFYCTSVQFELLSDHLKLFHAVLLSIGMYI

SEQ ID NO: 216299 - protein, 201 aa, Zea mays
  Clone ID: MRT4577_128863C.1.pep
MLACGLATHFVPSNRMLLLEESLKKVDTSNSFVVCSIIDQFCQQPSLKQKSSLNRLEIINKCFSNRTVEEIISSLEEVASNSASKWVAQTIQYLKKASPTSLKITLRSIREGRTQTVGECLQREYRMVCHVVRGDFSRDIFEGCRAILVDKDKNPKWMPPRLEQVHDDAVEEYFSRVDDPEWEDLDLPVMCSNGRIMESKL

SEQ ID NO: 216300 - protein, 112 aa, Zea mays
  Clone ID: MRT4577_128864C.1.pep
LEPCGFFHHHLFPFSRLVFAYFKQQKLFPFNQWPPLTPPAYFHHQILLPFSDLVPPSRASFLPKHQLFPFSNRFGANPPPLLQLHQLLPFVHLVLPNPPPPSQQPIMGGPPF

SEQ ID NO: 216301 - protein, 37 aa, Zea mays
  unsure (1)..(37): unsure at all Xaa locations
  Clone ID: MRT4577_128865C.1.pep
PSRGPTQLCLQSRAGWVXEXTNSFSXHYSXPXRXXXX

SEQ ID NO: 216302 - protein, 156 aa, Zea mays
  unsure (1)..(156): unsure at all Xaa locations
  Clone ID: MRT4577_128866C.1.pep
MSFRSIVRDVRDGFGSLSRRSFEVTLASIYGLTGHHKGKTQSSSHVLDDSPSIIRESRWANLPPELIRDIIRRLEADESTWPARKHVVCFAAVCRTWREMCKEIVLSPEFCGKLTFPVSLKQPGPRDGXQWVQCFIKGNKSKSTYHLYLXLLACVT

SEQ ID NO: 216303 - protein, 147 aa, Zea mays
  Clone ID: MRT4577_128867C.1.pep
MSFRSIVRDVRDGFGSLSRRSFEVTLASIYGLTGHHKGKTQSSSHVLDDSPSIIRESRWANLPPELIRDIIRRLEADESTWPARKHVVCFAAVCRTWREMCKEIVLSPEFCGKLTFPVSLKQPGPREWNTMVQCFIRGIVKITYHLY

SEQ ID NO: 216304 - protein, 137 aa, Zea mays
  Clone ID: MRT4577_12886C.1.pep
MPGEHENITMFQFFEWYTPADRMHWVRLKEQASLLSSLGLSAIWIPPPMKGCSEWDVGYAPYDLWDFGEFDQKGMVPTKYGTKDELKAAIDECHKYGMKIYLDAVLNHKAGGDETEVFKAVAVADDDRNREIEEPMT

SEQ ID NO: 216305 - protein, 153 aa, Zea mays
  Clone ID: MRT4577_128870C.1.pep
LAGAAPWFLSLSPTVSLLSSLPSALTHPRAAPKDRAAAPELQPAARPRPPRSAQKRSDRALQPESTAPRSFPAPSASCSLSSPERATDRPRDPGADPAQCRARKPSHRCLSPRVRFSFVNGDLTRPFLFLHSSSLNAINGMMSADLSSPPSPL

SEQ ID NO: 216306 - protein, 117 aa, Zea mays
  unsure (1)..(117): unsure at all Xaa locations
  Clone ID: MRT4577_128871C.1.pep
PLLLLRLFVLESCSFAAGSLHQELDISRPHCRCKVLDNWRLLTLPLDRTSGSGFQSRHEYLFSHTDMQLRLVPSNSAVSGTAYYLXXHGGAHHKINFLLLANVSGVPYTLLTNMFSL

SEQ ID NO: 216307 - protein, 133 aa, Zea mays
  unsure (1)..(133): unsure at all Xaa locations
  Clone ID: MRT4577_128872C.1.pep
RPRVRFMILVLYPELILSRVFLYLLLIGECYYRWRLRHSXHMDTRLFHAETVHPDELDQELDTFPTLRPXDXVLRMRFDRLLIVALRIQTVVSDLATQGERLQSVLSWTDPMSTGLFVDLCFVGAILLYVTPF

SEQ ID NO: 216308 - protein, 100 aa, Zea mays
  unsure (1)..(100): unsure at all Xaa locations
  Clone ID: MRT4577_128874C.1.pep
HALLDKFMENLPKGSHIAKGGWHDGSQMXPSKKLNLNHHIIGGELLELSKNEVPHEDIVFHRLYLNKTGPVNPKAKRKDSVLDEXEKCEELVVNILTINS

SEQ ID NO: 216309 - protein, 40 aa, Zea mays
  Clone ID: MRT4577_128875C.1.pep
SSIEEIFSAITHNLFSCLTTYLGKKVHHRIYIIDYQRLHF

SEQ ID NO: 216310 - protein, 49 aa, Zea mays
  Clone ID: MRT4577_128876C.1.pep
SSTGMKIRQWLSFSGGGVFGPSATCHMLSFPWLLAPVGHTASYPEHLTC

SEQ ID NO: 216311 - protein, 64 aa, Zea mays
  Clone ID: MRT4577_128877C.1.pep
ANQLICSRSMGLRRLISESSYPGACYEWPHKQCGLFLQFGNGNTISTKSTLEWKLCSTSECSTG

SEQ ID NO: 216312 - protein, 99 aa, Zea mays
  Clone ID: MRT4577_128878C.1.pep
PPVGPPQVLGQAKANCNLGKENRFVFPKKKSPKCSSPLPAKIKALEKFCPEKSRFPSPFPHLKSSVVHKTPPGSFGHLERNVMRPPLNAPKKIFAFAPP

SEQ ID NO: 216313 - protein, 39 aa, Zea mays
  Clone ID: MRT4577_128879C.1.pep
HLSMPLPILFPLATPKLLIRFDLDRPGQSNGIQEWLESR

SEQ ID NO: 216314 - protein, 98 aa, Zea mays
  Clone ID: MRT4577_12887C.1.pep
TGMKRLKCKPQPFKGVSNTTGPRFNVPRLKRGGMPRFCPAAFYMGGPQIFPTKNHNTGGTSVAPKKPGAKTHCIGSLDSSKHLVLAFRHVKAGLLPLA

SEQ ID NO: 216315 - protein, 154 aa, Zea mays
  Clone ID: MRT4577_128880C.1.pep
LGMTFCLPFRHRKGNLPPISQPGPFFLGRIPMAQSLSSSLEIGYLVLVLYLERSCSLGKKSTNQARIASGMNMETLGWDGFQLLKNVRLKNRREQRHFGSVFTPDQLIPSGKVRSREPDWISPAREALGLSPLLCSRAFCSLSTRGGREYPGKP

SEQ ID NO: 216316 - protein, 73 aa, Zea mays
  Clone ID: MRT4577_128881C.1.pep
QRCFFFYSYLPLHSTNNSLFPKTPHHFITHIIIKKLITHQTNILSKSIFNNFQIKLLNLKWLSSLLHIYLFLT

SEQ ID NO: 216317 - protein, 125 aa, Zea mays
  unsure (1)..(125): unsure at all Xaa locations
  Clone ID: MRT4577_128882C.1.pep
MPEMISSSSLRVKHTFSAMGQDKQKLNMSXIGRTDSYCVTQRGYVLYNVERIAKLLMLRXFRQDAATMNMRPFTSAGVLDATSAERHKRSNIDSALEEHAISKSHCTDIYAIQHRDXVKNIITVS

SEQ ID NO: 216318 - protein, 118 aa, Zea mays
  Clone ID: MRT4577_128884C.1.pep
RTFADTVHAQSRRMEAYVRAQTRLDRSDQLRTPDAECLCPREGRVPAAGIPARVISSAGAGLPIARSNRRMHNLIKRNILLQQTRTCSRRRRRRLEGRIALRPLSCRDDCPPLVGGAY

SEQ ID NO: 216319 - protein, 80 aa, Zea mays
  Clone ID: MRT4577_128886C.1.pep
IGLLAIPSVLPRLNLLMQIQVKQMADNSIEQALIENPPNVLKWKPSERAKRFRRCRSTPSDPTDQKPAENGSVLKAKELF

SEQ ID NO: 216320 - protein, 234 aa, Zea mays
  unsure (1)..(234): unsure at all Xaa locations
  Clone ID: MRT4577_128887C.1.pep
MSPPTQMASLAVLVCLVCAALASDAAAVRVELTRVHADPSVTASQFVRAALHRDMHRHNARKLAASSSDGTVSAPVSPTTVPGEFLMTLAIGTPPLPFLAIADTGSDLIWTQCAPCSRQCFQQPTPLYNPSSSTTFSALPCNSSLGLCAPACACMYNMTYGSGWTYVFQGTETFTFGSSTPADQVRVPGIAFGCSNASSGFNASSASGLVGLGRGSLSLVSSSXXPQFSYWLTA

SEQ ID NO: 216321 - protein, 101 aa, Zea mays
  Clone ID: MRT4577_128888C.1.pep
QQILQVIPELLPFVPLFLENCAVHVILETRTAVVHTWESAAGGLFWRGVRSEGLPFPSAGLPSTLLHARLQSPWVNKAVRRECRRGRGPSRKQGTSCRFSP

SEQ ID NO: 216322 - protein, 80 aa, Zea mays
  unsure (1)..(80): unsure at all Xaa locations
  Clone ID: MRT4577_128889C.1.pep
MVXXXXGGAVRALXQKEKDKPMMLVVDFHQDTKNCKLQMERYAFNRTKDGIYIIKLGKKWEKMQIEVRVNVAIENPQDII

SEQ ID NO: 216323 - protein, 74 aa, Zea mays
  Clone ID: MRT4577_12888C.1.pep
MVRSKEAPKKKPKDPLLTPPSKPRGGFLDEGRPWNRGGAAMSPAPASVPSYMRGTSSSDAKAERRGRPVEFVFE

SEQ ID NO: 216324 - protein, 94 aa, Zea mays
  unsure (1)..(94): unsure at all Xaa locations
  Clone ID: MRT4577_128890C.1.pep
MAASYPQQHLPSHLVSSMNSAAHVQXQQLLPFRQLADESPAAFMTQQQXLPFYLHAMHSAFTLLPLQQLLPFNQLAMTNPAVHYQQPIIEGALY

SEQ ID NO: 216325 - protein, 247 aa, Zea mays
  unsure (1)..(247): unsure at all Xaa locations
  Clone ID: MRT4577_128891C.1.pep
AWSRPRYINNNLAECWNAWIKQLKDLPLHCMVDAIREKGVXLFEKRRSITRALDGVILPAVVQQLNAASKGLNHLKVTKGIPDQTEVTVMYRDQEVRRHVVYLEKKECTCRXWQVTRKPCPHAFVVITTCRQPQLEPYVDMAFFVSMLRAAYDKGWPNITDMSQWPKVDKDFKLQPPIFKRRGVGRQKKNRFLSPLERTSKARRQVKCANCGENDHRKGSWKCXLTGTKKRLSYECFILCTCPGGRS

SEQ ID NO: 216326 - protein, 62 aa, Zea mays
  Clone ID: MRT4577_128892C.1.pep
AAPSNQQFFLKSNIRYRPTRVTAFFVPDSKLLETCELLKPRTNTALTTEPKGPHCQKLSRGT

SEQ ID NO: 216327 - protein, 68 aa, Zea mays
  Clone ID: MRT4577_128893C.1.pep
SKCGAAKCKKAFGKAGVPFYVIQQSLIPRNHARPGGILGSTKIGGPDLNIPPSNRLDAGNILGLKFVF

SEQ ID NO: 216328 - protein, 82 aa, Zea mays
  Clone ID: MRT4577_128894C.1.pep
YSYTMSLKLPIPQGLSFLRSVGWFEDRKVDSAAKQQLSPTLKLQTDKETYRPGDSVTVTIEICSPASLKDDVGQAVSGEDAP

SEQ ID NO: 216329 - protein, 129 aa, Zea mays
  unsure (1)..(129): unsure at all Xaa locations
  Clone ID: MRT4577_128895C.1.pep
KTTRSTPLRGLFVALXLLALAWNANFKHTNRGFRLQPTAAVHLPAAVHFPTSVQLATSVHFPTAVQLAAAVQLPTAVHVPASVHLPAAPCHYPIXPPRAQTHTQTHPCPCQQTHSNPCQMQGTCGVGST

SEQ ID NO: 216330 - protein, 51 aa, Zea mays
  Clone ID: MRT4577_128896C.1.pep
GLCGGNLFLRGMLIQAPATQSFFRGPWIRHHALRTFTCVNVSSWLVSLDGM

SEQ ID NO: 216331 - protein, 446 aa, Zea mays
  Clone ID: MRT4577_128897C.1.pep
TLPGSKQRRGEHMFLDCSAPSLVSKVIIGAGRTKTYIARVELPKTLPPSYRGISIRYFYYVRTTLFGRPVMLGNGDQYKGLVNNAIHLEARVPLQIRVSQKSSSLLNEESAFFGGQPSIFWKGKDEDSEWSKANDNVDLEEGYDSSKDEVSSVSSYNPSKAHPEFSLRSSLSMHSLSSRLSTSELFYNQVERPNFPSYNPIPRLSVSAISGDHLGALVASQRKLNILLPDHTSNGQRVSPDSDHSKDDAGLPLTPKNVDPAGSEGFTTGRSYNIRIDDQVLLRFSPKNSDSTYYFGDMIGGALTFFHGTGKRRCLEVSIALETSETINPRALHPSRRGSPTITKLHSEHHEVVADLHQTSFLFSIPIDGPMSFCTSKVTVQWSLRFEFFTTPEGTDPARYEHPLLVDKREKGEWVLPVTVYTPPLRRRATHERNGRSVSPGNIFNS

SEQ ID NO: 216332 - protein, 112 aa, Zea mays
  Clone ID: MRT4577_128898C.1.pep
MEATLCPKPHFVVIPWPATSHMIPIVDIGCLLAAHGAAVTIITTPSSSQLVQSRVDRAGQASAGVTVTAIPFPGAEAGLPDGCERTDHIPSPDLVPNFFVATARFGEAVARH

SEQ ID NO: 216333 - protein, 81 aa, Zea mays
  Clone ID: MRT4577_128899C.1.pep
RNAPRRRRGPDALQPEKGLGREGPPKQRRISQGGPRGPPPTPRQGGTGHRRAVKRLRARANQGIKGKKRPLGQRVGPRALD

SEQ ID NO: 216334 - protein, 298 aa, Zea mays
  Clone ID: MRT4577_12889C.1.pep
MQLTERCACSSLCDVQGFRKIDPDSWEFANEGFLRGQRHLLRLIKRRRPAPPPPYLQASQSQGSCLEVGRFGGLDGEMERLRRDKSILLAEVVKLRQEQQSTRADMRAMEERLRHAEHKQVQMMGFLARAVQSPDLFQLLAQQQGRRRELEGAALLSAASRKRRRPIGAAPANGGLQQQEEEQQQGDDDDPTATRALFAELDERGTTSELENLALNIQGLGKRRQDGSEKQGGRARSQQQGGFETAELTDDFWEELLNEGMKGGAEAETLPPERRRPAWYVDALAQKLSSMSNNTTAK

SEQ ID NO: 216335 - protein, 89 aa, Zea mays
  Clone ID: MRT4577_1288C.1.pep
GRTTAARFFFFFPEKDVSKPFRQTECKKGPLFFHGNARGGVSLFSVRVGPTSGPPFRGAERRGLFLMLPKNRRRGPPLPGMWPSRKKGP

SEQ ID NO: 216336 - protein, 52 aa, Zea mays
  Clone ID: MRT4577_128900C.1.pep
LNLVFQFRRLTLDKMCTVSREPNKPMVRLVTVVRRTRMTIEGRDDLISTCLV

SEQ ID NO: 216337 - protein, 57 aa, Zea mays
  Clone ID: MRT4577_128902C.1.pep
EPSCMHLLLYDQSTIAVTFELIHFLMIIIHSISCYSFDLQFGFTNKNSPAADIFRDT

SEQ ID NO: 216338 - protein, 86 aa, Zea mays
  Clone ID: MRT4577_128903C.1.pep
SNPDIIFHFLCPGFKVCGNFGFVGKKGSDCFFFFVEPSVNLAFELSILWGFCASLGWFWHPNNNLMVCFPLYGPRRLMAPSFKRFL

SEQ ID NO: 216339 - protein, 80 aa, Zea mays
  unsure (1)..(80): unsure at all Xaa locations
  Clone ID: MRT4577_128904C.1.pep
RRINIVDKPPDRSPPPPPPETTRSGGNEGTGSAWCFSDPEMXRRRRVASYKAXSVEGKXKASFRRGFRWIKAKCSELIHG

SEQ ID NO: 216340 - protein, 50 aa, Zea mays
  Clone ID: MRT4577_128905C.1.pep
CIFELLKCYKLSIRYSNYFSCGCWHQTCVFHGYSLRDLESTHYNYQTACV

SEQ ID NO: 216341 - protein, 103 aa, Zea mays
  unsure (1)..(103): unsure at all Xaa locations
  Clone ID: MRT4577_128906C.1.pep
TGTSVGHLGRISSPNTPCCAKVSLEPLSPMSPTVFDIAYYKTLLSQKGLMHSIQNLFSSVRAVSTVRTFVSSSSPFNSSFELSMVKMCNLXPLTGTIGQIRLA

SEQ ID NO: 216342 - protein, 94 aa, Zea mays
  Clone ID: MRT4577_128907C.1.pep
DYGTDPAITSLLNTLDIFLLPGTNPDGYVFSQTTNRMWRKTRSKRSGSGCVGVDPNRNWDANFGGPGASISPCSDSYHGRKPNSEVEVESIVDF

SEQ ID NO: 216343 - protein, 158 aa, Zea mays
  Clone ID: MRT4577_128908C.1.pep
GSQFVVFSGRFASVSSRAPPADAVLRRLSLLELPVGRSVLMLEQDTHSYRRGPPVVPSPWSSPISSSAPPRPGPPLCTPCSASFSLGPCSSGPGVAWQDLASPASAFLPSPPLKLSSIASGSSHHALGVLLGEPVLLLWRTTARSCPSLSPKTASPNT

SEQ ID NO: 216344 - protein, 58 aa, Zea mays
  Clone ID: MRT4577_128909C.1.pep
RKKSKFSGSKNNDRASATSFYVYTPGGSKALNFKGGAPPAPHIFMYISMEPQKRYLFC

SEQ ID NO: 216345 - protein, 66 aa, Zea mays
  Clone ID: MRT4577_12890C.1.pep
LLSTRINDSLLITLMLKDNIHLYASYNKVKRTLHIIDRLYHIIINTKQRNVTVLRLALSRYHHHEA

SEQ ID NO: 216346 - protein, 134 aa, Zea mays
  Clone ID: MRT4577_128910C.1.pep
MTGGGKSGGKASGSKNAQSRSSKAGLAFPVGRVHRLLRKGNYAQRVGAGAPVYLAAVLEYLAAEILELAGNAARDNKKTRIIPRHLQLAIRNDEELNKLLGHVTIAQGGVLPNIHQNLLPKKTGKTGKNASQEL

SEQ ID NO: 216347 - protein, 171 aa, Zea mays
  Clone ID: MRT4577_128911C.1.pep
MQSLQDKASEWSGVAAADAFAIDDVNIFESLGGTPQPFVDLSTNFYTRVYEDEEEWFREIFGGSKKEDAIQNQYEFLIQRMGGPPLFSQRRGHPALIGRHRPFLVTHRAAERWLHHMQQALDATESIDVDSKTKMMNFFRHTAYFLVAGNEMTRQQGHGVACKHATSKPAE

SEQ ID NO: 216348 - protein, 67 aa, Zea mays
  Clone ID: MRT4577_128912C.1.pep
RFCAGVWPSRVRVVRCPLRSLLPVPFFPLDAMLSVCWVPAFSPVISQGSFRCSVSEERGSPRYLRGG

SEQ ID NO: 216349 - protein, 157 aa, Zea mays
  unsure (1)..(157): unsure at all Xaa locations
  Clone ID: MRT4577_128913C.1.pep
GPSRPAGPGAFVDLSTNFYTRVYGDEEERFREIFGGSKKEDAIQNQYEFLIQRMGGPPLFSQRRDGLPKMIEETSIFXHPALIGRHRPFLVTHRAAERWLHHMQQALDATESIDVGSKTKMMNFFRHTAYFLVAGNEMTRQQGHGVACKHATSKPAE

SEQ ID NO: 216350 - protein, 42 aa, Zea mays
  Clone ID: MRT4577_128914C.1.pep
NFFPSDVPAVHASAATDGRGGSLPPPNDRSNAWHYQLAPRGG

SEQ ID NO: 216351 - protein, 146 aa, Zea mays
  unsure (1)..(146): unsure at all Xaa locations
  Clone ID: MRT4577_128915C.1.pep
MATHRHCLPLLLVAAALALAAVPARAALGGGRGPALGGWDPLAGGGAARAXRRVRRGLLRGPMALIRKLRQAKKDAPAGEKPEPVRTHRRAMTIARGRIGSCVGVYDAKTFDQVEIGPGMMGQYLAGLSMGYRPALDGGAGLGVPR

SEQ ID NO: 216352 - protein, 46 aa, Zea mays
  Clone ID: MRT4577_128916C.1.pep
VGSRQRRAAEWKAEAGRELIRSGARSLRLGCGYDLRGCLARPCECP

SEQ ID NO: 216353 - protein, 119 aa, Zea mays
  unsure (1)..(119): unsure at all Xaa locations
  Clone ID: MRT4577_128917C.1.pep
APGNVRXXRRRLRXVXAALVVRHGFPRLRAPQTPHHERRDRRRHCLLRHAAADGVVILLLLPLLLLIRQRHQVLPLVQQKRSRTICLAPVAAFAPSSSPMTTATVHLRRDGFLDLSRAW

SEQ ID NO: 216354 - protein, 28 aa, Zea mays
  Clone ID: MRT4577_128918C.1.pep
TPFSLVKWTYHREWSLKPLWWLKTPFSM

SEQ ID NO: 216355 - protein, 113 aa, Zea mays
  Clone ID: MRT4577_128919C.1.pep
MATGAGDLILHVLRKNNSFLVKRFGNGNAMVHFTKEANNLYNIHSFKHWGLANKKTVTIQPAGKDSAGGLTTTKTKKENAPGKLTHKSGMRKEFQKMAMAGKNQVCDIYYRAV

SEQ ID NO: 216356 - protein, 132 aa, Zea mays
  Clone ID: MRT4577_12891C.1.pep
VACKVVDRPEGDHVILSETFKGIDLPNVVTESVINSKHDMPNNGQYYLHPKATFGQDLCLGSYKIVGENGEVPLCSSTTATTTPELTVNTETKHEFHQAVYQEPSNSFNSSAEVFGDPLAPDSRDDAPSVIS

SEQ ID NO: 216357 - protein, 116 aa, Zea mays
  unsure (1)..(116): unsure at all Xaa locations
  Clone ID: MRT4577_128920C.1.pep
MRPSIRCRTRCTNDLMKDLATLPXGTPLGLLLLLLQLLLVAILLAIMYFTSDFASGYFFXYLITTTVLKCTWSLTVIIAHIYELLVKHRLPNTLSVTLYCIGDRVRKILILLFMVL

SEQ ID NO: 216358 - protein, 112 aa, Zea mays
  Clone ID: MRT4577_128921C.1.pep
YPDPLPLLVYSNAFFTCPAYFRFIHEDLHPWRAVVGFTRSMFYRSRAHYNFLLFCHLCPFLLLCIFVFFFFVLLFPLLLFLYFFFILLFFFFFYFIFIFFLCFFFYLFSFFF

SEQ ID NO: 216359 - protein, 88 aa, Zea mays
  Clone ID: MRT4577_128922C.1.pep
LAQGFGNSRRETAEKQYNLINPLQRNTLAVPTGGWAVIRFVANNPGMWILHCHFDAHLPIGLAMAFEVQDGPTPETALPPPPPDFPQC

SEQ ID NO: 216360 - protein, 60 aa, Zea mays
  Clone ID: MRT4577_128923C.1.pep
GGPNPKFSFNGGLRGSPLKFTPLKGLGESEKPFFKRNKRVSLPKSKCYFKTPPCFKILGF

SEQ ID NO: 216361 - protein, 149 aa, Zea mays
  Clone ID: MRT4577_128924C.1.pep
KKKKERFFFLGKKTHFTQGSREYKLRTGKGVKFARKALGGRWEKNRFRGAGPQEIFSLETPGGLGGVKPPPGAVVGTGAAATQKGKNTGKPPPPAGLDPQKAEEKNPPIKNKVGHISREQTGGAPLGEKIGSYSPAPKKAANPGRKGAP

SEQ ID NO: 216362 - protein, 208 aa, Zea mays
  Clone ID: MRT4577_128925C.1.pep
MVKSFVMAVKNVAQTWYSSLRPGTITSWQKLKDMLITSFQGFQTKPVTAQALFQCTQDHEEYLQAKPPQTLEKLLQKMDEYIRADNDFCQRSEEAYRFSEMTRGFGGRIHPRHVRSIHSSSQSEDRGSQFQRPQHSSQSSGQQQSSFRPPAPRGRGGRGFRGRYGDQPMKIYFLFCGEDKSHTTRTCQVTIQKQKEIAEAEARQNQPK

SEQ ID NO: 216363 - protein, 67 aa, Zea mays
  Clone ID: MRT4577_128926C.1.pep
NTGMLLNENTSAAKLLLNKKKQCCLKHWHVTQRNTSGPAFLLNKKKHLYETLSCYSTKHERPNISIK

SEQ ID NO: 216364 - protein, 165 aa, Zea mays
  Clone ID: MRT4577_128927C.1.pep
GRLQVPVRNSRVDPRVRFAVESIRKKRVRKGKVEYLVKWKGWPPKYSTWEPEEHILDPRLVMAYEEKEERDRASGYRKRGPKPRRLLLQESAAPDVVQTPGDWEPMEQAPEEEAEADLTNGPPPWTPTLPSSEVTVTDITANSVTVTFREAQAAEGFFRDRNEKL

SEQ ID NO: 216365 - protein, 80 aa, Zea mays
  Clone ID: MRT4577_128928C.1.pep
KNLFFYLIFSLTHRTGKLFLLGQPYRFQINRAGDHPFRGGKRGFLIAWFQFLRGYKKFPFPGEGFEVLTSTLKSQGPVVF

SEQ ID NO: 216366 - protein, 218 aa, Zea mays
  unsure (1)..(218): unsure at all Xaa locations
  Clone ID: MRT4577_128929C.1.pep
LEPAGRELGTTPSHASPVPSRRSRPASASASASSIAPSFPPHPTATPVFPRQQSWDPYKLLGVDQDASEEEVRSARNFLLKQYAGYEESEEAIEGAYDKIIMNSYTDRKKSKFNLKSKLKEQVEGSPSWLKALFGYFEVPSLEIISRRFAFFAFFAGWSIATSAETXPAFQLAMSLASCIYFLNEKMKNLVRASTTGFGIFVGGWILGSLLVXVIPAF

SEQ ID NO: 216367 - protein, 39 aa, Zea mays
  Clone ID: MRT4577_12892C.1.pep
RIQSLAIISFFLLHILKKNSKRGNFRHVTKNSYLSPRHR

SEQ ID NO: 216368 - protein, 141 aa, Zea mays
  unsure (1)..(141): unsure at all Xaa locations
  Clone ID: MRT4577_128930C.1.pep
YNAGRGAHLTLKRTEKAGRVVNRIPGLVDVVTTKIVAWETERRKEFTYDGVHLRSMLVDYIIILHEXESXNKKHRDQKKIQDQLKAEHEALYGXKPSTSKTESANKVPRQFMGGANRRLSIGGITTQAPKTDIMHLKTACA

SEQ ID NO: 216369 - protein, 262 aa, Zea mays
  Clone ID: MRT4577_128931C.1.pep
MQAAAAFNQAAFTARSLHRPPRPLHLAVAEDAFAGIRGAPFTRPRCCGSLSVGVGSYNSEHTPVFPRQQSWDPYKLLGVDQDASEEEVRSARNFLLKQYAGYEESEEAIEGAYDKIIMNSYTDRKKSKFNLKSKLKEQVEGSPSWLKALLGYFEVPSLEIISRRFAFFAFFAGWSIATSAETGPAFQLAMSLASCIYFLNEKMKNLVRASTTGLGIFVGGWILGSLLAPVIPAFVVPPTWSLELLTSLTAYAFMFVGCTFLK

SEQ ID NO: 216370 - protein, 44 aa, Zea mays
  Clone ID: MRT4577_128932C.1.pep
EKQWFGLINHQQFVHLVNANVYVLFRGPPLHLKRPTLEKRNHKC

SEQ ID NO: 216371 - protein, 47 aa, Zea mays
  Clone ID: MRT4577_128933C.1.pep
EYNKQDFTCCVTDNTTNSKRGHIYKNSQLMNVTTITIPKKQKLVQGW

SEQ ID NO: 216372 - protein, 96 aa, Zea mays
  unsure (1)..(96): unsure at all Xaa locations
  Clone ID: MRT4577_128934C.1.pep
PHATAHAXAHAXAHAAXXXXXXXXRXRSXTSRTRGRTRGRTRGRTRGGVLLLISNFCIFEHSIEFIRSFCTGFYLSMLWILLGEIILLILWNYWRA

SEQ ID NO: 216373 - protein, 71 aa, Zea mays
  unsure (1)..(71): unsure at all Xaa locations
  Clone ID: MRT4577_128935C.1.pep
TQHQQLTQLXKKLXSLPVHTSTTKKLLXTILINSTYPTLTLSXTTNYTDPFVLPIPPYERKKTAPAKVQQS

SEQ ID NO: 216374 - protein, 188 aa, Zea mays
  Clone ID: MRT4577_128936C.1.pep
AILLSKPFSLNGAGTPPPSPPQGPSRSSGGGPTSSSLNPAEVAKFASIAETWWDSSGPFKPLHVMNPTRLSFIRSTLCRHFRRDPNSSKPLEGLKVIDVGCGGGILSEPLARMGATVTAIDAVDKNIKIASIHAASDPTTASIEYCCATAEGLVKEKRLFDAVISLEVIEHVANPLEFSGNLSSLSLS

SEQ ID NO: 216375 - protein, 120 aa, Zea mays
  unsure (1)..(120): unsure at all Xaa locations
  Clone ID: MRT4577_128937C.1.pep
NPNMQSNSFWRTVWSDSQQDLYLTRTAASVIFXMHIQFLASWGIAKKDSGGAPQLKGARFFSFDELDWKKRLRIALGSARGLAYLHELADPPPVWSSRTWPAVLQRSREGEGEGEEMQVA

SEQ ID NO: 216376 - protein, 69 aa, Zea mays
  Clone ID: MRT4577_128938C.1.pep
NFPIYFCQQVNDCIGACQLPLGSGYTCFCISGMCSHWQIRIACVVYSKHVETECLEFFPSVGYMEVLYF

SEQ ID NO: 216377 - protein, 259 aa, Zea mays
  unsure (1)..(259): unsure at all Xaa locations
  Clone ID: MRT4577_128939C.1.pep
GRLRYRSGIPGSTHASGIVGCTKGRHNSEKPPEPVKPEVKTTEKKELSELKPKFQEHIIQAPKPVEAIKRPSPDEPMTNLELKISASLKQALDKLKLSSGSEEDKKEEDSDEIKIGTSCKNGGCSKTYQGLQSLEEVCVYHSGVPIFHEGMKYWSCCRRKTSDFNTFLAQEGCTRGKHVWTKKDAGKKVVPCRHDWHQTGGEVTISVYAKNSLPELSQVEANSTLVNVHIVFEGEQEFHQNVKLWGXVIDGKRXYVTMT

SEQ ID NO: 216378 - protein, 44 aa, Zea mays
  unsure (1)..(44): unsure at all Xaa locations
  Clone ID: MRT4577_12893C.1.pep
MDEYPLLLAIAAGILPLSPLFLQQSSALLQQLPLVHXLAQNIRA

SEQ ID NO: 216379 - protein, 41 aa, Zea mays
  Clone ID: MRT4577_128940C.1.pep
SFQIPGATHAPAITGTFLFRCSLCRPVSYYSRTDQLLVHCL

SEQ ID NO: 216380 - protein, 172 aa, Zea mays
  unsure (1)..(172): unsure at all Xaa locations
  Clone ID: MRT4577_128941C.1.pep
QRPPSVRICSHLHFPXGVSMSKDGSFFVFCEGSRGRLSRYWLKGEKAGTVDLFAILPGFPDNVRTNEKGEFWVAIHCRRGLYARLMSRHVKLRKFLLSLPIPAKYHYLMQIGGRLHALIIKYSPEGQVLDILEDTKGEVVRAVSEVEEKDGKLWIGSVLMPFIAVFDLAKAS

SEQ ID NO: 216381 - protein, 137 aa, Zea mays
  unsure (1)..(137): unsure at all Xaa locations
  Clone ID: MRT4577_128942C.1.pep
RLSRYWLKGEKAGTVDLFAILPGFPXNVRTNEKGEFWVAIHCRRGLYARLMSRHVKLRKFLLSLPIPAKYHYLMQIGGRLHALIIKYSPEGQVLDILEDTKGEVVRAVSEVEEKDGKLWIGSVLMPFIAVFDLAKAS

SEQ ID NO: 216382 - protein, 35 aa, Zea mays
  Clone ID: MRT4577_128943C.1.pep
LPSRQLTRRTRGDHQADPGAVEFTIDSSQHTADAC

SEQ ID NO: 216383 - protein, 67 aa, Zea mays
  Clone ID: MRT4577_128944C.1.pep
GKKHQRDEKRHCNRRAHTWPCWRGKEGDHGRRGQCRSASKTARVNDAKGRTAGSGAAGKKAFTAGRV

SEQ ID NO: 216384 - protein, 398 aa, Zea mays
  Clone ID: MRT4577_128945C.1.pep
MASPGVVAAALLVAVLAAFCGTDPLRMGSMAGFPGFEAHFVDLPDPAEMPPHADERERLRGAEVRFRGDVQGPESVAFDPQGRGPYTGVADGRVVFWDGERWVPFATASPRWTQELCGGPKASPVEYLPNEHICGRPLGLRFDKKTGDLYIADAYFGLLKVGPEGGLATPLATEAEGVRLNFTNDLDLDDEGNVYFTDSSIHYQRRNFMQLVFSGDPSGRLLKYNPQTKETTVLHRNLQFPNGVSMSKDGSFFVFCEGSRGRLSRYWLKGEKAGTVDLFAILPGFPDNVRTNEKGEFWVAIHCRRSLYARLMSRHVKLRKFLLSLPIPAKYHYLMQIGGRLHAVIIKYSPEGQVLDILEDTKGEVVRAVSEVEEKDGKLWIGSVLMPFIAVFDLAKAS

SEQ ID NO: 216385 - protein, 186 aa, Zea mays
  unsure (1)..(186): unsure at all Xaa locations
  Clone ID: MRT4577_128946C.1.pep
MDATGQQEQHTGSVGGDLYGVLLYYKYAEVPDAAALAAFYEAHCRSLALVGRVRVGPDGVNATLGGQMNALEKHIAEMSSNDLFVGTDFKLASCDDPADERVARECGFTSLSVRVVKELVTLCCNPALAPPECXAGTNYAVASAEKKEVVVLHARNVYETRIGKFNVANAKTLDPEIRQYSDLPSW

SEQ ID NO: 216386 - protein, 55 aa, Zea mays
  Clone ID: MRT4577_128947C.1.pep
HYSSPPMYIGRTGSGEPQNPCLGLRLSTRDTAEPHLRVTNPLLLQRLLIPLTENE

SEQ ID NO: 216387 - protein, 615 aa, Zea mays
  unsure (1)..(615): unsure at all Xaa locations
  Clone ID: MRT4577_128948C.1.pep
MDATGQQEQHTGSVGGDLYGVLLYYKYAEVPDAAALAAFYEAHCRSLALVGRVRVGPDGVNATLGGQMNALEKHIAEMSSNDLFVGTDFKLASCDDPADERVARECGFTSLSVRVVKELVTLCCNPALAPPEISSAGRHLSAAKFHSVLQNVAGTNYAVASAEKKEVVVLDARNVYETRIGKFNVPNAKTLDPEIRQYSDLPSWIDKHAEQLHGKSILMYCTGGIRCEMASAYIRSKGEGFENVFQLYGGIQRYLEQFPDGGYFEGKNFVFDHRISVGSLKENILGACLICDSSFDDYSSRCRCSHCRMLVLVCPTCQDSTEEYACELCQKNGKEPCQLSTGQDCKIQRGLSESFEKPSISYHNVTSKVSWSDXGSEQLKRLRILCLHGFRQNASSFKGRTSALSKKLKHITELVFVDAPHELSFVYQPIRGHCSDKPSPLSVTPKRKFAWLIAPNSHCNPEQNWRAADVPFDPLQYQQQTEGFEESYTYLENAISHMGKFDGILGFSQGAAMAALFCRQQQKMCGFPKFRFGMFCSGYPAPVGDFGNEPIKLPSLHCFGNGDGHDRQIANRASAELAGLFEQDCCSVVEHDMGHIIPTRSPYIDRIKDFLSSFL

SEQ ID NO: 216388 - protein, 47 aa, Zea mays
  Clone ID: MRT4577_128949C.1.pep
NQVVPQHPAHLNFLKSPRPGALKLCRWSSECDMFFLHLPSARTVASV

SEQ ID NO: 216389 - protein, 85 aa, Zea mays
  Clone ID: MRT4577_12894C.1.pep
MRVLRARLCRRRKVGTALLKACEALGLQWRHVFMVLRAYEDDDGARGLYSKAGYRVVSRDPDWVSWVGRRRRVVMVKELPVHDDQ

SEQ ID NO: 216390 - protein, 50 aa, Zea mays
  Clone ID: MRT4577_128950C.1.pep
SDSNRAYPVSAPSKPCQYPKSQLLGTPRSGAESDYWQQRQSHLHPHAADP

SEQ ID NO: 216391 - protein, 64 aa, Zea mays
  Clone ID: MRT4577_128951C.1.pep
FGLTRVGQERVKQSAISCLAMPHADPGGVWPVLPTRSKAWLVRFYWWLSKHFSGPYRFLMIVLI

SEQ ID NO: 216392 - protein, 56 aa, Zea mays
  Clone ID: MRT4577_128952C.1.pep
SITVRYFVPVQFVDVTGITGGKGFAVCILLVLIFCDFTCQDSSLLCCKRDKLSPGF

SEQ ID NO: 216393 - protein, 139 aa, Zea mays
  unsure (1)..(139): unsure at all Xaa locations
  Clone ID: MRT4577_128953C.1.pep
MDGPRGLAPGRGRGRGEGRTVPPEWIGGSGSGQGAVPDGSWSYSWGWTSGPEGGWGYGHGSAXPRGAADGFAYGGSGGGGSGRGGIEFSFGGLSGGFGWGAGGGPFGVGGGHGSWSARGGGFSGGGRQRPPRGRGRGSN

SEQ ID NO: 216394 - protein, 95 aa, Zea mays
  Clone ID: MRT4577_128954C.1.pep
KPLVHRGETTIMDQTRGLIILKKGFQPKKTSLQIGANRAKTWGNFRDTPQGINWAILGRALNILRTRMGWGQPPKLISGNWQGSKDVKKTIPNFI

SEQ ID NO: 216395 - protein, 90 aa, Zea mays
  unsure (1)..(90): unsure at all Xaa locations
  Clone ID: MRT4577_128955C.1.pep
KVLFILMHLLLCLRNAHAVIMRECSQASCPKITQALLPSTLDGYHQPPMQAYRVHQAVGPSAXQQPMSQLKQHSLPQLTIQSIARQHRQQ

SEQ ID NO: 216396 - protein, 31 aa, Zea mays
  unsure (1)..(31): unsure at all Xaa locations
  Clone ID: MRT4577_128956C.1.pep
FQTVTLHFSLXKYLSFRALLCWPAHYFILLM

SEQ ID NO: 216397 - protein, 51 aa, Zea mays
  Clone ID: MRT4577_128957C.1.pep
SMAMLLLTSLDPPPSQAAVLVILGDQIELASHYTDYGTCTPPCIYLVRDYL

SEQ ID NO: 216398 - protein, 237 aa, Zea mays
  Clone ID: MRT4577_128958C.1.pep
RTSRRFLRFSAGLGIPPSLEVLSQYCESWSRDDAQRQYIVELGIPEEWMHEALALYHEYYGDKQGALENLIQCGNWKKAHTIFVTSVAHSMFLSSNHQEVWRITSALENHKYEIADWDLGAGIYIDFYVLKNSMQERNAMDDSGSLEEMSESCRSFFGRLNESLLVWGSKLPVESRACYSKMVEELCALLVDTPSETLNLPMGCLLMMLNAPVPDESRSSYLQDALSVFTEILCSDP

SEQ ID NO: 216399 - protein, 172 aa, Zea mays
  Clone ID: MRT4577_128959C.1.pep
WVPRGRPGSSRADARPCRPALALPPGHQRLARPHAPPHDPLPSHATERSRPFPSSPPTHSIDGRNNRCRNWQPPALPLPSRRSLSSLSLSIKASAKPPWSVPHPSLISSSLLSLPHLRSLEPLDWTVRRSPDHPPSSPHRPCPASLHPRLASAAPVLLPLFAVDDPTPPFVD

SEQ ID NO: 216400 - protein, 73 aa, Zea mays
  Clone ID: MRT4577_12895C.1.pep
RALIPRFAYRTHAYQAREQGEHESLHRDMMVGFGKWSWSPLELEDPVPDGDGKVHLWHRAEDLIVPVGLSRAL

SEQ ID NO: 216401 - protein, 393 aa, Zea mays
  unsure (1)..(393): unsure at all Xaa locations
  Clone ID: MRT4577_128960C.1.pep
MAASSSEAATATPTTTVGLGGSGTPGPPPPTPSNHHAAPSSAAGGATDASLSAFLHRLLLSSPAPQLRSPLAARSQASPPSLPPLVSLESPDQRALRNAADVGYFHLAGHGIPSGLPSSALAELSRIDASTRLESNLRTLGFSVEEGEEQDVDGGADDPAVVFDACEGDLDALPAAAEYARRMKDVGMRVVALLSGCPDTGFREKPFAEGRRKPRCLLWASRVSTADTAPPAVGKAKAYPYVVALHCQWEASGQEEAPPSWVMNHGGEWTAVAARDDAMLVTVGDIAQVWSNGKLKKVRGMARPTSAPPMAAQHGETDRLSLTVLITLPLDNIVSPLVPLSNXAGEGREAEANGAGADDEDGWRFHSFLLEDYAWRVYNQRLQFKDPLVRYRI

SEQ ID NO: 216402 - protein, 53 aa, Zea mays
  Clone ID: MRT4577_128961C.1.pep
MLGTPRRHEYFSSEYRWYYPTPVREGINSFATDANGRLTTIFSEENPNACTIV

SEQ ID NO: 216403 - protein, 80 aa, Zea mays
  Clone ID: MRT4577_128962C.1.pep
MSMVTLAENSSPSYPSRRAQRYPREKQNDTGQPQTRAIPPIWAVKSVWLDLEGASYANKLNHQVDVGNHPLTLVLHKGYR

SEQ ID NO: 216404 - protein, 456 aa, Zea mays
  Clone ID: MRT4577_128963C.1.pep
ETANLNQCLLVSTPAYLKLYHQGISWHEAVRALLLGLGEDDRRAGLLRTPTRVAKAFRDGTRGYRQKVKDIVQGALFPQVGVDKRTGSAGGTGGQVVVRDIELFSYCESCLLPFSIQCHVGYVPSGGRVVGLSKLSRVSDVFAKRLQNPQRLANEICGALHASIQPAGVAVALQCWHIPLPENLECKTLEGWIRTSHSSRSGVFEGESSTFWSDFLALVKLRGIDVEAKDRTVSIPWCPLRSHEVPLSNGLCKKNSTNGMVSAVTSMLLSLGEDPLRKELLGTPQRYVQWLMKFKACNLLDVKLNGFTLSNVSLYERTGGGTTDHGAIRSELHLPFCAQCEHHLLPFYGVVHIGYFGNGSGEGIDRSHFQALVHFYGCKLQVQERMTRQIAEAVYSVSHNGAMVVVEANHICMISRGIEKIRSNTATIAVLGQFLADPSAKACFLQNVLDSVGSAV

SEQ ID NO: 216405 - protein, 95 aa, Zea mays
  Clone ID: MRT4577_128964C.1.pep
TRRGISPHADLEDHLLGDIEGQHISAGVIAGHDGRVWAQPENFPQIKPEEVAGMIKDFDEPGTIAPTGLSGGGTKHMVTQGEPGVGIRGKKGTWG

SEQ ID NO: 216406 - protein, 233 aa, Zea mays
  Clone ID: MRT4577_128965C.1.pep
MGALEGAHLAAVACACDDDEEQSDCIPLLAGDAATAADAMEPAVRALLLGLGEDDRREGLRRTPKRVSKAFRDGTRGYRQKVKDIVQGALFPEVGVDKRTGSAGGTGGQVVVRDIELFSYCESCLLPFSIQCHVGYVPSGGRVVGLSKLSRVSDVFAKRLQNPQRLANEVCGALHASIQPAGVAVALQCWHIPLPENLECKTLEGWIRTSRSCRSGLFGGGSSTFWSDFLALL

SEQ ID NO: 216407 - protein, 81 aa, Zea mays
  Clone ID: MRT4577_128966C.1.pep
ACAPPHLLYTHCAALNNTESRVWCLSLSLIYNQRGRANMMCTYQHRTPYNVTRLSRSRTSLEPNSELTYACMRRHSSSIVS

SEQ ID NO: 216408 - protein, 121 aa, Zea mays
  unsure (1)..(121): unsure at all Xaa locations
  Clone ID: MRT4577_128967C.1.pep
VFFFFFFFFFVWFNQAVFGVVXRGQYWTXXLARQAGVELRKNMSKRXHLSGGGGHXELKLETNRNRFGHLAELKQKCLLEWYRAPGLTVHNCWSLGWDSTTWGAINFTWGPHRRGQHHRGS

SEQ ID NO: 216409 - protein, 77 aa, Zea mays
  unsure (1)..(77): unsure at all Xaa locations
  Clone ID: MRT4577_128968C.1.pep
YVPXIFKGYEEDSPKGFLAGYPIFDFPSVLLDGSYHHVDSSXVLSFQIAVIXSFPEGMRKICPRLLQPIMKVEVITL

SEQ ID NO: 216410 - protein, 46 aa, Zea mays
  Clone ID: MRT4577_128969C.1.pep
WRRNGSGYSGGGGSYSDGRGGYGSGGGYRGANRGGGYRNNHGNWTN

SEQ ID NO: 216411 - protein, 216 aa, Zea mays
  Clone ID: MRT4577_12896C.1.pep
MAVLRASPPPFLPHPLSRPSQCKRRPTCRVVAATARPSPAPSRPRSGGVHGGRPKRGLLAARRRPGEGRVPCLRATEAGVGAAGVAKEEDEYLAREAGWGVRRMARVGEEMRRVAQVQAEAFHVPVALFNDFFFDFFKAEVLSALIYRVRNSPPDRYACLVAEEAEAADQPSKAPYEKIVGVVDCTVQDEDGILKHLRGADEYLYVSGIAVLPPFR

SEQ ID NO: 216412 - protein, 54 aa, Zea mays
  unsure (1)..(54): unsure at all Xaa locations
  Clone ID: MRT4577_128970C.1.pep
MCSQTYXSLKYHGMLKYHSVVLGLRKYYVPKHRCFLLSTCCLLVHRDKSTRSNS

SEQ ID NO: 216413 - protein, 65 aa, Zea mays
  Clone ID: MRT4577_128971C.1.pep
NIIILLWVFVLTCGLQKALLLFYGKNGIGGPHWEEQCLFTGHVREVPTPGYFMIARDASQTIRNG

SEQ ID NO: 216414 - protein, 98 aa, Zea mays
  Clone ID: MRT4577_128972C.1.pep
PSGFQVAYVVPFYSYSRVCLFLTLILKRREAFTVRNRVSIVPDYYKTKYTSIGSAIEYTVCALKEEVLVVIQHNYCLCIRALVLLQDRAPDNFHFGLK

SEQ ID NO: 216415 - protein, 368 aa, Zea mays
  Clone ID: MRT4577_128973C.1.pep
MRRWLCCNCHYDVEEDGHAKEQAKAQSNKIDPKQKSSKPPGSQPEPEFSPPTIDVPELSLDDLKLKTDDFGSSALIGEGSYGRVYHATLDDGRQAAVKKLDASENEPNDEFLKQVSLASKLKHENLVEMLGYCVDGNYRILAYEFATMGSLHDVLHGRKGVQGAQPGPVLDWMQRVKIVIEAAKGIEYLHEKVQPSIIHRDIRSSNVLLFEDFKAKIADFSLLIQAPDRAARLHSTRVLGTFGYHAPEYAMTGQLTQKSDVYSFGVVLLELLTGRKPVDHTMPRGQQSLVTWATPRLSEDKVKQCVDPRLKGEYPPKGVAKLAAVAALCVQYEAEFRPNMSIVVKALSPLLQQRPAPGTAEPAPQPVS

SEQ ID NO: 216416 - protein, 90 aa, Zea mays
  Clone ID: MRT4577_128974C.1.pep
QANLMEVARDTRSRYPTLRQRQLTTQHAIFSVRNTKPWPLPALYSNCGDYSRGKTLAADGRPRTPHTTAAETRAAQRAALAGTATMGRTG

SEQ ID NO: 216417 - protein, 406 aa, Zea mays
  unsure (1)..(406): unsure at all Xaa locations
  Clone ID: MRT4577_128975C.1.pep
RCFVRDVGSFLLTLSALSIXXTIGKVTVWGAMMFVSIYVVYAFVVAANEVLRKHARRLKFDVFTPLLPVRASIFEQGAEQDESAYSSLLEEDADGEVTQMNTSVPQWMWASHVAIYSNHGNRDGSPGSSRPLWGWSEGEVDNSTFNIYKLFSFMELPLTIPRKLTIPIVEEDRWSKEYAVASSCLAPVLLAFLWSSQDTVFTKVSIAAYVMAVMLGIALAALVFLFTSNERPPRRFLFPWVFGGFVMSIIWFYIIANELVALLVALGVILXINPSILGLTVLAWGNSMGDLMSNVALAMNGGDGVQIAMSGCYAGPMFNTLAGLGISMLLGAWSTAPNSYVLPQDHSLIYTMSFLVAGLIWALVMLPRGDMRPNKILGVGLISLYSVFLFIRVSNAVGILPLPGLS

SEQ ID NO: 216418 - protein, 368 aa, Zea mays
  Clone ID: MRT4577_128976C.1.pep
MRRWLCCNCHYDVEEDDHAKEQAKAQSNKTDSKQKSSKPPGSQPEPEFSPPTIDVPELSLDDLKLKTDDFGSSALIGEGSYGRVYHATLDDGRQAAVKKLDASENEPNDEFLKQVSLASKLKHENLVEMLGYCVDGNYRILAYEFATMGSLHDVLHGRKGVQGAQPGPVLDWMQRVKIAIEAAKGIEYLHEKVQPSIIHRDIRSSNVLLFEDFKAKIADFNLLNQAPDMAARLHSTRVLGTFGYHAPEYAMTGQLTQKSDVYSFGVVLLELLTGRKPVDHTMPRGQQSLVTWATPRLSEDKVKQCVDPRLKGEYPPKGVAKLAAVAALCAQYEAEFRPNMSIVVKALSPLLQQRPAPTTEEPAPQPGS

SEQ ID NO: 216419 - protein, 131 aa, Zea mays
  Clone ID: MRT4577_128977C.1.pep
ATGPALAPNLEKRYRGGRGPEHQGQRGPLTRKEGEPDPRDPGAPRRHPNTLGRAGGPAPPRPLGQGAQFAPGGGPPGPPHGEPQNAPILESARPKPCHQETRGVPDPGKPERARGGNRLQGDRGQDSKGGA

SEQ ID NO: 216420 - protein, 199 aa, Zea mays
  Clone ID: MRT4577_128978C.1.pep
MRQWLCCNCHFDDEEDGHDKEQAKAQSNKIDPKQKSSKPPVSQPEPEFSPPTIDVPELSLDDLKQKTDDFGSSALIGEGSYGRVYHAALDDGRQAAVKKLDASENEPNDEFLKQVSLASKLKHENLVEMLGYCVDGNYRILAYEFATMGSLHDGLHGRKGVQGAQPGPVLDWMQKVKIVIEAAKGIDILHEKGQPSIIH

SEQ ID NO: 216421 - protein, 104 aa, Zea mays
  Clone ID: MRT4577_128979C.1.pep
ALSGILVYIGAYSIGMGPVPWVVMSEIFSINMKATGGSLVTLVSWLGSFAISYSFSFLMDWSSAGTFFMFSSASLITVLFVAKLVPETKGRTLEEIQDSLNTRR

SEQ ID NO: 216422 - protein, 33 aa, Zea mays
  Clone ID: MRT4577_12897C.1.pep
LHKHAPKAQANRIGYLQINIVGPYEARKIMIQA

SEQ ID NO: 216423 - protein, 76 aa, Zea mays
  Clone ID: MRT4577_128980C.1.pep
FYLSVIYMLNVYFLYEPMCDKDWYFFFVPGWVPKKLVVSLAPGWKVKFVPHDKLVTWELAQGLEICVISQSGLVGG

SEQ ID NO: 216424 - protein, 60 aa, Zea mays
  Clone ID: MRT4577_128981C.1.pep
KSLTLFKADTDDNSFQRVKAVTQMLCNLPHHETCMSHTVQSPIQNPELSRNQTFASLEQI

SEQ ID NO: 216425 - protein, 63 aa, Zea mays
  Clone ID: MRT4577_128982C.1.pep
GVGDFQQVIVILNQAIVVLEPPLCFFLFRHVLLALVKSGPFLVTRSSRHLKQVVVGFSCRPMN

SEQ ID NO: 216426 - protein, 65 aa, Zea mays
  unsure (1)..(65): unsure at all Xaa locations
  Clone ID: MRT4577_128983C.1.pep
KKAPTSQQERRQPWRRWSVXTATGNFSCFSSWPTRQPSSASRQRINSYLERATQYLAALRSIALA

SEQ ID NO: 216427 - protein, 43 aa, Zea mays
  Clone ID: MRT4577_128984C.1.pep
MSDGTDTCIDIILAIILQPLGVLFKFGSRVEIWMCLILAFVGY

SEQ ID NO: 216428 - protein, 112 aa, Zea mays
  Clone ID: MRT4577_128985C.1.pep
GFPGLSLSKPPPPNGLPSLPRANIGAPSSTSRRTPSRNFAATHRSLLLFVAPPQLAPPTSHWSQLPDLKKQITSTASRDTDKSAIKFLQYLQSPLSPVLGKNHVLLASDVAF

SEQ ID NO: 216429 - protein, 113 aa, Zea mays
  unsure (1)..(113): unsure at all Xaa locations
  Clone ID: MRT4577_128986C.1.pep
MPRGIPGAGGGIDACHMPTLXTEIFGDNYRLQFAGXTLGHPREDAPGAATNQVAIEAWVQAHNEGREPAHEGKESIKATRTWRGELATAGEISNEIKXDGIKATVTISSNKKY

SEQ ID NO: 216430 - protein, 128 aa, Zea mays
  Clone ID: MRT4577_128987C.1.pep
LVKKQTSFDIKFLIKSWMRLGSLNMRVKVDVLLLPSFPTYIKYLHREFGMVLSTIRKSTTLGSSFPPSFLPPILQSELAPTRRRSGEEGHHLEKEMGGGWRLGLRGWGVLHKREGIRGRGWRPNRGWR

SEQ ID NO: 216431 - protein, 110 aa, Zea mays
  Clone ID: MRT4577_128988C.1.pep
TKKPQKQRKSSFKKKTAGATGGTSQKKKRGTTTFAPTAKRTCPPTRKPGNAPWPKGGPSYKRKPEQRIKVPLMSKKNRGQTQNDSTPRLANTDIVLKKHLQKPGNPANVW

SEQ ID NO: 216432 - protein, 120 aa, Zea mays
  unsure (1)..(120): unsure at all Xaa locations
  Clone ID: MRT4577_128989C.1.pep
ASALPSCLLGLAMARXPSPPXSVSXPLTSSSSSMESKDGTHDPATTAAPPAGAPQPAMPSGGGGRXXTRQMGPPAAPGAHPENQEAARWTVVRGDQELSAYVIIGEPVGVLFVSQEWGKG

SEQ ID NO: 216433 - protein, 55 aa, Zea mays
  unsure (1)..(55): unsure at all Xaa locations
  Clone ID: MRT4577_12898C.1.pep
SHSFXHXXFLFSLXPHLPWEPXKDPGTGXXXXHXEAPLALEAPTPLLGEPMDFMT

SEQ ID NO: 216434 - protein, 111 aa, Zea mays
  Clone ID: MRT4577_128990C.1.pep
AVYDRASGQRVGPDVHVYPSSMSRQQRGGNSGEKMKERPTVLRRIELGWCRDSFRDGEPRARTARRSELAVRGSRAWAARRARSGGMSAQGRLATLDEIIRLSVEACIGPG

SEQ ID NO: 216435 - protein, 102 aa, Zea mays
  Clone ID: MRT4577_128991C.1.pep
QKPKKLGEIYMVDWTSKDACSLRRFCPTWCGIADAQCGSPMPRGAPPLQPRPARLGHRDAASLMHGAAHRRRAAGSREQDTSPMRREIKMGGRLGFGHGFGL

SEQ ID NO: 216436 - protein, 58 aa, Zea mays
  Clone ID: MRT4577_128992C.1.pep
TPSLSPPNSSLSSSHTPPLSFFFEKTRACSPLSPRTHKGEGNRFSAHHTYQVIVIISC

SEQ ID NO: 216437 - protein, 45 aa, Zea mays
  Clone ID: MRT4577_128993C.1.pep
GRAAALFFFFSNLFLNFHVLTFRYFQDQECYCNNINSTLSLYRII

SEQ ID NO: 216438 - protein, 84 aa, Zea mays
  Clone ID: MRT4577_128994C.1.pep
TAAMTAPRQLGWSTQRLDDTVRPPRGQAVPGAPPPRERGRARRPVPLYHACQGHAHDPVSVHGRHQFLDARHGHGENRGVDVRS

SEQ ID NO: 216439 - protein, 94 aa, Zea mays
  Clone ID: MRT4577_128995C.1.pep
NNIATACWLLRRAAVLLLLKARDVGRRRGAGSALRQLYADEEQGSAAGGWGGSAAATGGWGGRTAARRRMPTRRRTGAFCFLAKMRAAAGASGL

SEQ ID NO: 216440 - protein, 86 aa, Zea mays
  Clone ID: MRT4577_128996C.1.pep
TQPLSLRLAAYYIYGPDHDLHQCAPLDLLAGGQGCSCIATTQSSLSEHTPCQDTIMYLMLKYDTGVRHCNDHDACEYDSYTVLIGH

SEQ ID NO: 216441 - protein, 325 aa, Zea mays
  Clone ID: MRT4577_128997C.1.pep
MEVVVAAKQKAKKHIHLFYCSECEELALKIAASSDAIELQSINWRSFDDGFPNLFINKAHDIRGQHVAFLASFSSPSVIFEQISVIFALPKLFIASFTLVLPFFPTGSFERVEEEGDVATAFTLARILSMIPKSRGGPTSVVIYDIHALQERFYFGDDVLPCFETGIPLLLQRLRQLPDAENITIAFPDDGAWKRFHKLLQHFPMIVCNKVREGDKRIVRIKEGLPEGRHVVIVDDLVQSGGTLRECQKVLALHGAAKVSAYVTHAVFPKQSYERFMASSSAGPGDQFAYFWITDSCPHTVKAIGQRPPFEVLSLAGSIADALQI

SEQ ID NO: 216442 - protein, 96 aa, Zea mays
  Clone ID: MRT4577_128998C.1.pep
LLLANYNSFFYRVTLNPIHYPPFCCGGGGGRKPLTISQFIPPFITTPFPHLTSLQKSPSQSPFPTIPHPKSQLEPPFYPLFKRGGSRFYFFFARYL

SEQ ID NO: 216443 - protein, 254 aa, Zea mays
  unsure (1)..(254): unsure at all Xaa locations
  Clone ID: MRT4577_128999C.1.pep
MEVVAAAAAAKQKAKKHIHLFYCSECEELALKVAASSDVIELQSINWRSFDDGFPNLFINKAHDIRGQHVAFLASFSSPAVIFEQVSVIFALPKLFIASFTLVLPFFPTGSFERVEEEGDVATAFTLAHILSMIPKSRGGPTSVVIYDIHALQERFYFDDVLPCFETGIPLLLQRLRQLPDAENITIAFPDDGAWKRFHKLLQHFPMIVCXQVREGDKRXVRIREEINWAKTSICCSEPRWLNCRCSSDMSVHW

SEQ ID NO: 216444 - protein, 146 aa, Zea mays
  unsure (1)..(146): unsure at all Xaa locations
  Clone ID: MRT4577_12899C.1.pep
SHGSTGHGCLPAPLGPFPACLCLFRVGSSPPPLSLSLSLMARPRKAKPPPPPPRAAAPSIAEALLMXTICMVGLAVEVRXRDGSTYSXXLHTXCXXGXXGGVLXKXXKIXNXKXDXXLXLXSXVDXLGGHPXXLGXVIAKXLSLPX

SEQ ID NO: 216445 - protein, 75 aa, Zea mays
  Clone ID: MRT4577_1289C.1.pep
QTKPKSLGFSHLGSTNKRRGENRLFLGHKTHSTFSSPSHKTFTQHPKKDFSRGLSLKKFFGKTNTHFWPFTLREG

SEQ ID NO: 216446 - protein, 98 aa, Zea mays
  unsure (1)..(98): unsure at all Xaa locations
  Clone ID: MRT4577_128C.1.pep
PGACCHTTQGAACRVHETHRKQAVQEALAYARHGTANVPLVILKALLLVGQLNFTGPCXGDVTIQLDCSLITTTDLIQYMDHGNWIEIIRADNLFITR

SEQ ID NO: 216447 - protein, 239 aa, Zea mays
  unsure (1)..(239): unsure at all Xaa locations
  Clone ID: MRT4577_129000C.1.pep
MEVVVAAKQKAKKHIHLFYCSECEELALKIAASSDAIELQSINWRSFDDDVLPCFETGIPLLLQRLRQLPDAENITIAFPDDGAYCLYYKRLSHFQLINMSVNREHDKRIGIYTLSSKESLNLLTLPDTFFLKKICLVLQKVLALHGAAKVSAYVTHAVFPKQSYERFMASSSGNWQFIQLSNSEXLVAYYVLITAGPGDRFAYFWITDSCPHTVKAIGQRPPFEVLSLAGSIADALQI

SEQ ID NO: 216448 - protein, 237 aa, Zea mays
  unsure (1)..(237): unsure at all Xaa locations
  Clone ID: MRT4577_129001C.1.pep
FVESFVTLHHATWSFDDGFPNLFINKARDIRGQHVAFLASFSSPAVIFEQVSVIFALPKLFIASFTLILPFFPTGSFERVEEEGDVATAFTLAHILSMIPKSHGGPTSVVIYDIHVLQERFYFEDDVLPCFETGIPLLLQRLRQLPDAENITIAFPDDGAWKRFHKLLQHFPMIVCNKVREGDKRIVRIKEGNPEGHHVVIVDDLVQSGGTLRECQKVLASHGAXKVIAYVTHAVFP

SEQ ID NO: 216449 - protein, 102 aa, Zea mays
  Clone ID: MRT4577_129002C.1.pep
GGISRAIFFLAKCRGPKMFFKNPFLGKNKCLGFLGKTFELGLLEQTPFLAKIPPCQALKTFGTPIFFFQNPVLNPLKPLGGPWTFWLWAHPGGRVHFFPSRF

SEQ ID NO: 216450 - protein, 198 aa, Zea mays
  unsure (1)..(198): unsure at all Xaa locations
  Clone ID: MRT4577_129003C.1.pep
MNRIPSVSLRGGGANEDAAAASPPPDPAALSRWVRAFCVIRFDLERGQLVEACFPPDALTAPGSGLDRLVAFSSFPDSMSHHLPRHRSSVHDSLFSFRIPDPSSPRRAFLYGFVFNRQRQDERLPRGGEQKSVVILSHAPYSSLFRLLLQILGPLCFDVGPSALAMVASHVAVWPAPAPGHPMELPXGSAALRVHLPP

SEQ ID NO: 216451 - protein, 224 aa, Zea mays
  unsure (1)..(224): unsure at all Xaa locations
  Clone ID: MRT4577_129004C.1.pep
VVTVGGFVQVQEEVEAGLRLMQSLRYIERAPAETPAAERAAWKLVFRTPPQLPIFTGSKIEGEAGRPLEVVLVDACTGSPAAPPVPRALRVELVPVLGDFPPDGREDWAADELERSVVREREGRRPLLTGDVGLTLRDGRATVGELRFTDNSSWVRSRRFRIAARAARGSGGARVQEAVTEAFVVRDHRGERCRKHYPAALTXDVWRLEKTAXGGVFHTRLMCR

SEQ ID NO: 216452 - protein, 73 aa, Zea mays
  unsure (1)..(73): unsure at all Xaa locations
  Clone ID: MRT4577_129005C.1.pep
VPLDVHVAIDAGTTNSTSSVDAALDRAVRDLQASXAVNTGNPGRSGREPHRSGHKQQQQRQHCHNRSPYRRDN

SEQ ID NO: 216453 - protein, 107 aa, Zea mays
  Clone ID: MRT4577_129006C.1.pep
GGGKCKRALGGPPPTQPMRERGRGRPVAKKGEPPVLTGNGGGKKGPKTGIKTRKRGKGAPLGKARGPPVGREIPKSPPKGGPAHERANFGPFLCMLELFFLVLWFFS

SEQ ID NO: 216454 - protein, 147 aa, Zea mays
  unsure (1)..(147): unsure at all Xaa locations
  Clone ID: MRT4577_129007C.1.pep
PIFKNKDSPRHSQWDVPTAPATPSPAPTPPNHPSPSXPGSXSKASDAAVKNSASPPPTSPSAGSQSAATKTSTQASTTAGAPSTPPPSLLLPPHPPTPQHPQTQHPQTQHPPHPPPHPPTTPSXPKXPPPPPPYRKHSTPPSCPSST

SEQ ID NO: 216455 - protein, 95 aa, Zea mays
  Clone ID: MRT4577_129008C.1.pep
IPAGLKQNAIAQLRERTEGRREGLAGDLRSGLDVGAQFLAGQCRAYTEKVALSPVKSGGRAAQNASSALREVMGSYTNAIRRRLRLDQRVRLRAT

SEQ ID NO: 216456 - protein, 51 aa, Zea mays
  Clone ID: MRT4577_129009C.1.pep
CCLDQLLGALHQFIKHNIEVVIETNAFEALDRSLNVRIPSTFIIGNAFWKG

SEQ ID NO: 216457 - protein, 96 aa, Zea mays
  unsure (1)..(96): unsure at all Xaa locations
  Clone ID: MRT4577_12900C.1.pep
QSRVWEIPAVDXNNTVVWELXVLGWEVSXRLEFTPNSKVGYTVFVQKICKVPVXKEPFMKGRFKSAEIGKMVLGVTSAESRKKNMLCRFKIRSCAA

SEQ ID NO: 216458 - protein, 89 aa, Zea mays
  Clone ID: MRT4577_129010C.1.pep
CGCPVPRWAVPSVHREGRALADQVWRTSCSERVVGIERSHGLLHKCNPPSSTSRPTREVTSHLKNKLVAGISSARQVVPLITYFYPLMF

SEQ ID NO: 216459 - protein, 276 aa, Zea mays
  unsure (1)..(276): unsure at all Xaa locations
  Clone ID: MRT4577_129011C.1.pep
MTTARQWWRRATAAVKDRRSLYXTRGGTATTAXSGVAAAVLWSPELEAAVIRATSHDERSVDYGNAARVFALARASPVSVQPLMWALARRAGRTRCWAVALKALMLAHGLLLRPDLAPRSVRLGRIPFDLADFRDRSSPPSKSSGFSAFVRAYFRFLDTRSLFIAQDLDAVADTGETDGEDARLDHVTKQQHLLHLLLQIRPYGDGMELGLIFEAMDCVVIEIFEVYSEICTGIARFLVAVLGSAPMTPRARGETLAAARRPKAVQGMRVLENARE

SEQ ID NO: 216460 - protein, 79 aa, Zea mays
  Clone ID: MRT4577_129012C.1.pep
NIKALLMLLLSRLLTHARVGFFMITALIAMSLSLPTLWREMFWRKVKAISDTHGSCAFIKDQITELDNQSTGCAIGGTP

SEQ ID NO: 216461 - protein, 41 aa, Zea mays
  Clone ID: MRT4577_129013C.1.pep
LSLGDPQNAIQLYELTTTHDPNRKQRYQTASLKDKSINTTS

SEQ ID NO: 216462 - protein, 241 aa, Zea mays
  Clone ID: MRT4577_129014C.1.pep
GTGDARSDLQSWLSGALGNQDTCKEGLDATGSVLGSLVAAGLDAVTSLLADGLGQVAGGDDATAPASSLPPSSSRRGAAPPRWLRARERRLLQMPVGPGGLAVDAVVAQDGSGNFTTVGAAVEAAPAQSAARYVVYVRKGVYRETVEVKKKKWNLMLVGDGMGATVISGRRSYGDGYTTYRSATVAVNGKGFIARDLTFENTAGPAKHQAVALRCDSDLSVFYRCAFEGYQDTLYAHSLRQ

SEQ ID NO: 216463 - protein, 85 aa, Zea mays
  unsure (1)..(85): unsure at all Xaa locations
  Clone ID: MRT4577_129015C.1.pep
MAYMCADSGNLMAIAQQVIQQQQQQQQQEHQRHHHHHLPMPLPLPPPPXPGAAYATGHGAPARPDPGGVPAIRRRRVAPGGPFLP

SEQ ID NO: 216464 - protein, 59 aa, Zea mays
  unsure (1)..(59): unsure at all Xaa locations
  Clone ID: MRT4577_129016C.1.pep
MRECLSIHIGQAGIQVRNSCWELYCLEPCIQADGXMPRDQNIGGGDEELNTFFRENGTG

SEQ ID NO: 216465 - protein, 327 aa, Zea mays
  unsure (1)..(327): unsure at all Xaa locations
  Clone ID: MRT4577_129017C.1.pep
RSYFKCTHPNCLVKKKVERSHEGHVTEIIYKGTHNHPKPTQSRRPGAGAHPLGGGAQADAADNLQGSQANAAEANQPWRAGVQDGVDATSPPSVPGELCDSAASMQVDCAARFGSPEGADVTSAVSDEVDGDDRVTLTHGGANAAEGDELESKRRKLESYAIDMSTASRAVREPRVVIQTTSEVDMLDDGYRWRKYGQKVVKGNPNPRSFYKCTQPXCMVRPLFSARFLRSYALLSFFPSLGLLFFFFSLASSPFFFFSSFPLFPPPLFPFFPPFFRPFSLPFPLFFPFPPSPFRLFSRFPPFSFLSSPFSPVFLPLFLPVPFRFFL

SEQ ID NO: 216466 - protein, 54 aa, Zea mays
  Clone ID: MRT4577_129018C.1.pep
RGDVVPSAPSLMIGSWGPYAHSTRASIICGRYIAVSAPQGCCRTSLDSECGGVL

SEQ ID NO: 216467 - protein, 55 aa, Zea mays
  unsure (1)..(55): unsure at all Xaa locations
  Clone ID: MRT4577_129019C.1.pep
FIIMYFVYMFGVMLIXLYILCLFVLWRVEEPVTEDPGAQQIEVAEQELIEGKLCP

SEQ ID NO: 216468 - protein, 61 aa, Zea mays
  Clone ID: MRT4577_12901C.1.pep
HNANNVSYVADIDTLDFVNVISLTTRFEVWILESLTILTVDANESGRTRRSSVTRKFAFRP

SEQ ID NO: 216469 - protein, 179 aa, Zea mays
  unsure (1)..(179): unsure at all Xaa locations
  Clone ID: MRT4577_129020C.1.pep
MAAAPVAPPLASTDDEIVYESMPCIRVYKKRVERYFGTEFVAASTDAATGVASRDVVISPNVSARLYLPRLDDESAKLPIFVYYHGGGFCLGSAFNPTFHSYFNSFAGLANVLVVSVEYRLAPEHPVPAXYYDRLRASGWSGEAEIWQAPNKGHTFHLLEPCCDEAVAQDKVISDFLNR

SEQ ID NO: 216470 - protein, 65 aa, Zea mays
  unsure (1)..(65): unsure at all Xaa locations
  Clone ID: MRT4577_129021C.1.pep
FYILICFXSLSFLFIICLLFSLFFLCYALIFIFIPFFIYLFXFFYFLLFFFFFSFFFIFIIIFLF

SEQ ID NO: 216471 - protein, 663 aa, Zea mays
  unsure (1)..(663): unsure at all Xaa locations
  Clone ID: MRT4577_129022C.1.pep
CDKINVPNKSDKENPLLKAKCKYCNXSFIVEGKVLLKNCPKYRKHIEEKLDQTLLNFAPSKAGESGCGLPTISSPREYNHEQVXKLNAKMIIVHEYPFRMVEHTWFNIVMKYMNLLYEFIGRKTIRAECIKVYESEKESLAKALKGVDFISLTTDLWTSNQMLSYMCLVAHYIDKDWKMQYCVLNFFELDPPXGHVIGQAAYXCVTAWKIEDKIISFTLDNVANNDSAIRGLRARFAARKGNAFISKYFHVCCCAHIINLVVNDGAAALASLIENLRLTVKYLKKSPSCMHKFVDICRSPAIQIGEGMRLDVSTRWGSTYKMLRTTIAYKEAIKTXADSDLNYKWKPTLEEXDLFAAIEPILASLGTTTLSTSSYPTANLFYPHNVDVKIALRAAMVSTNFNMKXMGIAMMEKFNKYWEXRNNVMVIATILDPRYKMRYIEWCFGKIFYVDQVGFEIEEFRDELEKLYEDYEMQHRERKAAQSKLSASSSLAMNRSCSLPTASCEFQSYLSSTEVNPSKSELLIYXDEXNVSLADKDFDLLSWCKVNSHRFPVVSRMAKFLIVPATSVSSESTFRTGGRTLDDYRSSLSPSMVEALICSSSWIRSAHDGSHMYCSMIFFYFFILVCFLFFYQCNALFIFWSKMKKTILKTMHFQKVWWRATRS

SEQ ID NO: 216472 - protein, 153 aa, Zea mays
  Clone ID: MRT4577_129023C.1.pep
MADVDVDPEVAAAGPKKRTFRKFSYRGVDLDALLDMSSEDLVGLFPARARRRFSRGLKRKPMALVKKLRKAKSEAPAGEKPEQVRTHLRNMIIMPEMIGSVVGIYNGKCFNQVEIKPEMIGHYLAEFSLSYKPVKHGRPGIGATHSSRFIPLK

SEQ ID NO: 216473 - protein, 57 aa, Zea mays
  Clone ID: MRT4577_129024C.1.pep
GFVLDRYVVQSISIKVRPILRWSHALLLFENSTHSIVLPIMLRAAISLGACIRNPTA

SEQ ID NO: 216474 - protein, 69 aa, Zea mays
  Clone ID: MRT4577_129025C.1.pep
HMAYNASCMKLAFGKLEKARGIVSIRHPSTHAQDDGISIPAGAGTIGKIIECYTLREGRQDCLRSMKNG

SEQ ID NO: 216475 - protein, 275 aa, Zea mays
  Clone ID: MRT4577_129026C.1.pep
MAATFCAGPAASAAVNPSSAGCRPQNLTRAAVLSACWRPSRPTPAFVSLRRPNAELRPLRVAAGSGVDPKVVNGEDFPPMKDLIQLYRTAFLERNEEVLGVVEKAITAVQKEKSTIASQFESTTTEITSGKEKFIRLNADLENFRKQTEKDRAKLTSNIRVEVVQSLLPLVDSFEKINLENTPETEKEQKISASYQGIYKQLVETLRYLGVGVVETVGKPFDPSVHEAISREASMQFKAGIVMHEVRRGFHLKERLLRPATVKVSTGSGKQSASS

SEQ ID NO: 216476 - protein, 48 aa, Zea mays
  Clone ID: MRT4577_129027C.1.pep
RKTVWHIGLTLANSHIHCPYHNPTSTAYTTLKNLFNLCNNEQPFLYTL

SEQ ID NO: 216477 - protein, 58 aa, Zea mays
  Clone ID: MRT4577_129028C.1.pep
GPPFFFFLLIHITSCSLPIPDCPSHSLLPSLLPFSPEWVGPLGIPSVLKLQGSARLAA

SEQ ID NO: 216478 - protein, 167 aa, Zea mays
  Clone ID: MRT4577_129029C.1.pep
MTYGLACITVMFVTTCLMSLVIIFVWQKNLLISLLFFVFFGALEGAYLSAAVMKVPQGGWAPIALSAVFMFIMYVWHYGTRRKYLFDLQNKVSMRWILNLGPSLGIVRVPGIGLIYTELVTGVPAIFSHFVTNLPAFHQVLVFVCRQAPPAGDVPMDQRYLIGRIGP

SEQ ID NO: 216479 - protein, 171 aa, Zea mays
  unsure (1)..(171): unsure at all Xaa locations
  Clone ID: MRT4577_12902C.1.pep
MSAPLAVPVAGSGFVRRLSAVEATRENINMGPTVVVPPQHLMAPSKQSEIASGFETARRHLDAVAPGSPDLTPPETSVTDKYAFAFDIDGVLIRGGRPIPEAIEAMKMLNGDNEYGIQVPYIFVTNGGGKTEAERCIQLSKQLEIEVSPGQFICGXTPMREMAEKYGTVGR

SEQ ID NO: 216480 - protein, 51 aa, Zea mays
  Clone ID: MRT4577_129030C.1.pep
WLHLDNINSISVFCLSSVIHVSDRMVTVGLVLMSTNCNCRAAQHLLLGGMR

SEQ ID NO: 216481 - protein, 91 aa, Zea mays
  Clone ID: MRT4577_129031C.1.pep
MESSRGKLSAAAVLLLMTLLMVAAMRAVEARDCLTQSTRLPGHLCVRSDYCAIGCRAEGKGYTGGRCLISPIPLDGILCYCVKPCTSTTTE

SEQ ID NO: 216482 - protein, 75 aa, Zea mays
  Clone ID: MRT4577_129032C.1.pep
LCCEPSLVALCLKGLVLPMGWVYTCVSNWTRSGFVMGLSILVLSQIDRFVVWVVSFPFFEKNGGCFCPPFERSSS

SEQ ID NO: 216483 - protein, 54 aa, Zea mays
  Clone ID: MRT4577_129033C.1.pep
ICFNVLFDYSMILLVYVRNNIYKFILRHPLNSIIIYIFALNDSYMHRYLGVILK

SEQ ID NO: 216484 - protein, 760 aa, Zea mays
  Clone ID: MRT4577_129034C.1.pep
DKSHTQETLKGFLRRAQNEFGLRIKKIRSDNGTEFKNSQIEGFLEEEGIKHEFSSPYTPQQNGVVERKNRTLLDMARTMLDEYKTPDRFWAEAVNTACHAINRLYLHRILKKTSYELLTGKKPNISYFRVFGSKCFILVKKGRKSKFAPKTVEGFLLGYDSNTRAYRVFNKSSGLVEVSCDVVFDETNVSQVEQVDLDEIGEEQAPCTALRNMSIGDVCPKESEEPPHAQDQPSSSTQASPPTQIEDEAQDVEQEGQEDEPPQIDGNDQGGDANDQEKEDEQEPRPPHPRVHQAIQRDHPVDTILGDIHKGVTTRSRVAHFCEHYSFVSSIEPHRVEEALQDADWVMAMQEELNNFTRNEVWHLVPRPNQNVVGTKWVFRNKQDEHGVVTRNKARLVAKGYSQVKGLDFGETYAPVARLESIRILLAYATYHGFKLYQMDVKSAFLNGPIKEEVYVEQPPGFEDSEYPNHVYRLSKALYGLKQAPRAWYECLRDFLIANGFKVGKADPTLFTKTLDNDLFVCQIYVDDIIFGSTNKSTCEEFSRIMTQKFEMSMMGELKYFLGFQVKQLQEGTFISQTNYTQDILSKFGMKDAKPIKTPMGTNGHLDLDTGGCKINRKSTSGTCQFLGRSLVSWASKKQNSVALSTAEAEYIAAGHCCAQLLWMRQTLRDYGYKLTKVPLLCDNESAIKMADNPVEHSRTKHIAIRYHFLRDHQQKGDIEISYINTKDQLADIFTKPLDEQSFTRLRHELNILDSRNFFC

SEQ ID NO: 216485 - protein, 150 aa, Zea mays
  Clone ID: MRT4577_129035C.1.pep
TKSNIVLKIEHKICVIFNLAPLVLALGRNRRAGGLSGSRGAVTTTGETVDVGAASRSPASSTAGNSGGEQGLQRASDDGAAPVSGERRERGEGAGEGGGTGTGSMGLGVSFIERREDRERRGRGRAGRRLQKPLMVSVSWQRKKKKTRLV

SEQ ID NO: 216486 - protein, 1330 aa, Zea mays
  unsure (1)..(1330): unsure at all Xaa locations
  Clone ID: MRT4577_129036C.1.pep
METGDKPTTSHGKASSEESRKKGKGKEKKASSHKSHQSGDKKKKMRKVVYYETDTSSPSTSGSDAPSVTSKRHERKKFRDEDYDEDEVAQIEHFNSQATTILLASLSREEYNKVQGLKSAKEVWDVLKTAHEGDELTKITKRETIEGELGRFRLRKGEETQDMYNRLKTLVNQVRNLGSKKWDDHEMVKVILRSLIFLNPTQVQLIRGNPRYTLMTPEEVIGNFVSFEYMIKGSKKINELDDPSTSEAQPVAFKATEEKKEESTSSRQPIDASKLDNEEMALVIKSFRQILKQRSGKDYKPRSKKVCYKCGKPGHFIAKCPISSVSDRGDDKKGRRKERKKYYKNKGGDTHVCREWDSDESSSDSSSKEDVANIAVTKGLLFPNVGHKCLMAKDGKKKKVYASGGSSWIIDSGCTNHMTGEKKMFSSYEKNQDPQRAITFGDGNQGVTVFRRSDDSVAFKGVLEGQLYLVDFDRAELDTCLIAKTNMGWLWHRRLAHVGMKNFHKLLKGEHILGLTNVHFEKDGICSACQAGKQVGAHHPHKNIMTTNRPLELLHMDLFGPIAYISIGGXEKSQTQETLKGFLRRAQNEFGLRIKKIRSDNGTEFKNSQIEGFLEEEGIKHEFSSPYTPQQNGVVERKNRTLLDMARTMLDEYKTPDRFWAEAVNTACYAINRLYLHRILKKTSYELLTGKKPNISYFRVFGSKCFILVKRGRKSKFAPKTVEGFLLGYDSNTRAYRVFNKSTGLVEVSCDVVFDETNGSQVEHVDLDEIGEEQAPCIALRNMSIGDVCPKESEEPPNAQDQPSSSMQASPPTQNEDEAQVDEGQNQEDEPPQDDGNDQGGDAIDQEKEDEEEPRPPHPRVHQAIQRDHPVDTILGDIHKGVTTRSRVAHFCEHYSFVSSIEPHRVEEALQDSDWVVAMQEELNNFTRNEVWHLVPRPNQNVVGTKWVFRNKQDEHGVVTRNKARLVAKGYSQVEGLDFGETYAPVARLESIRILLAYATYHGFKLYQMDVKSAFLNGPIKEEVYVEQPPGFEDSEYPNHVYRLSKALYGLKQAPRAWYECLRDFLISNGFKVGKADPTLFTKTLENDLFVCQIYVDDIIFGSTNESTCEEFSRIMTQKFEMSMMGELKYFLGFQVKQLQEGTFISQTKYTQDILTKFGMKDAKPIKTPMGTNGHLDLDTGGCKINRKSTSGTCQFLGRSLVSWASKKQNSVALSTAEAEYIAAGHCCAQLLWMRQTLRDYGYKLTKVPLLCDNESAIKMADNPVEHSRTKHIAIWYHFLRDHQQKGDIEISYINTKEQLADIFTKPLDEQSFTRLRHELNILDSRNFFC

SEQ ID NO: 216487 - protein, 557 aa, Zea mays
  unsure (1)..(557): unsure at all Xaa locations
  Clone ID: MRT4577_129037C.1.pep
MSGDHAKKEMETGEKPTTSHGSTSSEESRTKRREKKKSSSNKGKEKKSSSHHKEKKEKSSSHKPHRSGDKQKRMRKVVYYETDTSSTSTSDSDAPSVTSKRQERKKFSKIPLHYSRISKHAPLLSVPLGKPPXFDGEDYARWSDLMRFHLTSLHKSIWDVVEFGAQVPSVGDKDYDEDEVAQIEHFNSQATTILLASLSREEYNKVQGLKSAKEVWDVLKTAHEGDELTKITKRETIEGELGRFRLGKGEEPQHMYNRLKTLVNQVRNLGSIKWDDHEVVKVILRSLIFLNPTQVQLIRGNRRYTKMTPEEVIGHFVSFECMIEGSRKINELDDPSTSEAQPVAFKATEDKKEESTPSRQPIDASKLDNEEMALVIKSFRQILKQRRGKDYKSRSKKVCYKCGKPGHFIAKCPLSSDSDRGDDKKGRRKEKKRYYKKKGGDAHVCREWDSDESSSDSSDDANIAVTKGLLFPNVGHKCLMAKNGKKKKVKSNSSTKYESSSDDNASGEEDNLRTLFANLNMEQKEKLNELISAIHEKDDLLDSQEDFLIKENKKHVK

SEQ ID NO: 216488 - protein, 1773 aa, Zea mays
  Clone ID: MRT4577_129038C.1.pep
MSGDHAKKEMETGEKPTTSNEKALSGESRNKEKKKEKKKEKKTSSHKSHRSGDKIKKMRKVVYYETDTSSPSTSGSDAPSMTSKRHERKKFSKIPLHYPRTSKHTPLLSVSLGKPPTFDGEDYARWSDLMKFHLTSLHKSIWNVVEFGAQVPSIGDEDYDEDEVAQIEHFNSQATTILLTSLSREEYNKVQGLKSAKEVWDVLKTAHEGDELTKITKRETIEGELGRFRLRQGEEPQDMYNRLKTLVNQVRNLESKKWDDHEVVKVILRSLIFLNPTQVQLIRGNPRYTLMTPEEVIGNFVSFEFMIKGSRKINELDGPSTSEAQPVAFKATEEKKEEPTPSRTPIDASKLDNEEMALVIKSFRQILKQRRGKDYKPRSKKVCYKCGKPGHFIAKCPISSDRGDDKKGRRKEKKRYYKKKGGDAHVCREWDSDESSSDSSDDEDAANIAVTKGLLFPNVGHKCLMAKDGKKKKVKSKSSTRYESSSDENASDEEDNLRTLFVNLNIQQKEKLNELISAIHEKDDLLDSQEDFLIKENKKHVKIKNAYALEVEKCEKLSSELSTCHETIDNLRNENANLLAKVDSNVCDTSIPNLKNDNDDWLAKIEELNISLASLRIENEKLLAKAKDFDVCNATISDLRTKNDILHAKHTSICTRCRDVDVNVIHDHMTLIKQQNDHIAKLDARIAEHDLENEKFKFTRSMLYRGRRPGIKDGIGFQQGGNVKLNAPPKKLSNFVKGKTPMPQDNEGYILYPAGYPESKIRRIHSRKSHSGPNHAFIYKGETSSSRQPTHAKLPKKKTPSASNEHDISFKTLDASYVLTNKSGKVVAKYVGGKHKGSKTCVWVPKVLVSNAKGPKTIWVYASGGSSWIIDSRCTNHMTGEKKMFSSYEKNQDPQRAITFEDGNQGLVKGVTFFRRSDDSVAFKGVLEGQLYLVDFDRAELDTCLIAKTNMGWLWHRRLAHVGMKNLHKLLKGEHILGLTNVHFEKDRICSACQAGKQVGAHHPHKNIMTTDRPLELLHMDLFGPIAYISIDGSKYCLVIVDDYSRFTWVFFLQEKSHTQETLKGFLRRAQNEFGLRIKKIRSDNGTEFKNSQIEGFLEEEGIKHEFSSPYTPQQNGVVERKNRTLLDMARTMLDEYKTSDRFWAEAVNTACYAINRLYLHRILKKTSYELLTGKKPNISYFRVFGSKCFILVKRGRKSKFAPKTVEGFLLGYDSNTRAYRVFNKSSRQVEVSCDVVFDETNGSQVEQVDLDEIGIEEAPCIALRNMSIGDVCPKESEEPPNAQDQPSSSTQASPPTQNEDEAQVDKGEDQANEPPQDDDNDQGGDANDQDKEDEEPRPPHPRVHQAIQRDHPVDTILGDIHKGVTTRSRVAHFCEHYSFVSSIEPHRVEEALQDSDWVVAMQEELNNFTRNEVWHLVPRPNQNVVGTKWVFRNKQDEHGVVTRNKARLVAKGYSQVEGLDFSETYAPVARLESIQILLAYATYHGFKLYQMDVKSAFLNGPIKEEVYVEQPPGFEDSEYPNHVYKLSKALYELKQAPRAWYECLRDFLITNGFKVGKADPTLFTKTLENDLFVCQIYVDDIIFGSTNESTCEEFSRIMTQKFEMSMMGELKYFLGFQVKQLQEGTFISQTKYTQDVLTKFGMKNAKPIKTPMGTNGHLDLDTGGKSVDQKSISNQVIGILKGNWSLRRRKRLPLRNSYFAITPSNSLFFGGEMSIKEKDFILGGESKSSKAKGPDFVFGIILTHLLMTKGEETTPRALMISFLAIHAKKGEK

SEQ ID NO: 216489 - protein, 1188 aa, Zea mays
  Clone ID: MRT4577_129039C.1.pep
MSGNHAKKEMETGDKPATSHGKVSSEESRNKKKGKEKKASSHKSHRSGDKKKKMRKVVYYETDTSSPSTSGSDAPSITSKRHERKKFSKIPLHYPRTSRHTTLLSVPLGKPPTFDGEDYARWSDLMKFHLTSLHKSIWNVVEFGAHVPSVGDEDYDEDEVAQIEHFNSQATTILIASLSREEYNKVQGLKSAKEVWDVLKTAHEGDELTKITKRETIEGELGRFRLCQGEEPQDMYNRLKTLVNQVRNLGSKKWDDHEVVKVILRSLIFLNPTQVQLLHGNPRYTLMTPEEVIGNFVSFEFMIKGSRKINELDSPSTSDAQPVAFKATEEKKEESTPSRTPIDTSKLDNEEMTLVIKSFRQILKQRRGKYYKPRSKKVCYKCGKPGHFIAKCPISSDSDRGDDKKGRRKEKKRYYKKKGGDAHVCREWDSDESSSDSSDDEDTANIAVTKGLLFPNVGHKCLMAKDGKKKKVKSKSSTRYESSSDDNASDEEDNLRTLFANLNMQQKEKLNELISAIHEKDDLLDSQEDFLIKENKKHVKVKNAYSLEVEKCEKLSSELSTCHETIDNLRNENANLLAKVDSIACNISISNPRNDNDDLLARIEELNISLASLRDENEKLLAKAKELDVCNVTISDLRTKNDILHAKVVELKSCKPSTSTVEHTTICTRCRDVDINAIHDHMALIKQQNDHIAKLDAKIAEHEIENEKFKFARSMLYNGRGHGIKDGIGFQQGGNVYASGGSSWIIDSGCTNYMTGEKKMFSSYEKNQDPQRAITFGDGNQGIIVFRRSDDSIAFKGVLEGQLYLVDFDRAELDTCLIAKTNMGWLWHRRLAHVGMKNLHKLLKGEHILGLTNVHFEKDRICSACQAGKQVGAHHPHKNIMTTDRPLELLHMDLFGPIAYKSIDGSKYCLVIVDDYSRFTWVFFLQEKSHTQETLKGFLRRAQNEFGLRIKKIRSDNGTKFKNSQIEGFLEEEGIKHEFSSPYTPQQNGVVERKNRTLLDMARTMFDEYKTSDRFWAEAVNTACYAINRLYLHRILKKTSYELLTGKNPNISYFRVFGSKCFILIKRGRNYKFAPKTVEGFLLGYDSNTRAYRVFNKSSRQVEVSCDVVFDETNGSQVEQVDLDEIGDEEAPCIALRNMSIGDVCPKESKEPPNAQDQPSSSTQASPPTQNEDEAQVDEGEDQANEPS

SEQ ID NO: 216490 - protein, 37 aa, Zea mays
  Clone ID: MRT4577_12903C.1.pep
YLWKLFRNFKKYSNCLCSQQTWKLIIIHLKDKKKKKE

SEQ ID NO: 216491 - protein, 602 aa, Zea mays
  Clone ID: MRT4577_129040C.1.pep
MAYISIGEKKSQTQETLKGFLRRAQNEFGLRIKKIRSDNGTEFKNSQIEGFLEDEGIKHEFSSPYTPQQNGVVDRKNRTLLDMARTRLDEYKTPDRFWAEAINTACCSINRLYLHRILKKTSYEPLTSCRRFLLGYDSNTRAYRVFNKSTGLVEVSCDIVFDEINGSQVEQVDLDELDDEEAPCVTLRNMSIGDVCPKESKELTQAQDQLSSCMQACPPTQDEDQAQDNEDQEDDPPQEEDNDQGGDEDKEDEQEIQGQRPPHPRIHQAIQRDHPVNSILGDIHKGVMTRSRVAHFREHYSFVSSIEPYRVEDALRDPDWVLAMQEELNNFTRNEVWHLVPCPNQNVVGTKWIFRNKQDEHGVVTRNKARLVAKGYSQVECLDFDETYAPVARLESFRILLAYATYHGFKLYQMDMKSAFLNGPIKEEVYVEQPLGFEDSEYPNHVYKLSKALYGLKQTPRAWYECLRDFLITNGFKVGKADPTLFTKTIAKDLFVCQIYVDDIIFGSTNKSTCEEFSRIMIQKFEMSMMGEFKYFLGFQVKQLQDGTFISQTKYIQDILNKFGMNDAKPIKTPMGTNGHLDLNTGGVQGSKPILRKFTLGP

SEQ ID NO: 216492 - protein, 1519 aa, Zea mays
  unsure (1)..(1519): unsure at all Xaa locations
  Clone ID: MRT4577_129041C.1.pep
MALVIKSFRQILKQRRGKDYKSRSKKVCYKCGKPGHFIAKCPISSDSDRGDDKKGRRKEKKRYYKKKGGDAHVCREWDSDESSSDSSDDEDAANIAVTKGLLFPNIGHKCLMAKDGKRKKVKSRSSTKYETSSDENASDEEDNLRILFANLNMEQKEKLNELISAIHEKDDLLDSQEDCLIKENKKHVKVKNAYALEIEKCEKLSSELSTCREMIDNLRNENANLNTKVDSHVCNVSIPNPKDNNDDLLSRIEELNISLASLRVENENLIAKAKELDVCNATISNLRDKNDILHAKIVELNSCKPSTSIVEHVSICTRCRDVDVNAIHDHMALIKQQNDHIAKLDAKIAEHNLENEKFKFARSMLYSGRRPGIKDGIGFQRGDNVKLSAPPKRLSNFVKGKAPMPQDNEGYILYPAGYPESKIRRTHSRKSHSGPNHAFMYKGETSSSRQPTRAKLPRKKTPSASNDHDISFNTFDASYVLTNKSGKVYASGGSSWILDSGCTNHMTGEKKMFSSYEKNQDPQRAITFGDGNQGVTVFRRSDDSIAFKGVLEGQLYLVDFDRAELDTCLIAKTNMGWLWHRRLAHVGMKNLHKLLKGEHILGLTNVHFEKDRICSACQAGKQVGSHHPHKNIMTTDRPLELLHMDLFGPIAYISIGGSKYCLVIVDDYSRFTWVFFLQEKSQTQETLKGFLRRAQNEFGLRIKKIRSDNGTEFKNSQIESFLEEEGIKHEFSSPYTPQQNGVVERKNRTLLDMARTMLDEYKTSDRFWAEAVNTACYTINRLYLHQILKKTSYELLTGKKPNISYFRIFGSKCFILVKRGRKTKFAPKTVEGFLLGYDSNTRAYRVFNKSTGLVEVSCDVVFDETNGSQVEQVDLDEIGDEEAPCIALRNMSIGDVCPKESKESPRAQDQTFSSMQASPPTQNEEEAQVDEEEDQSSEPPQDDGIDQGGDVNDQDKEDEEQRPPHPRVHQAIQRDHPVDTILGDIHKGVTTRSRIAHFCEHYSFVSSIEPHRVEEALQDSDWLVAMQEELNNFTRNEVWHLVPRPNQNVVGTKWVFRNKQDEHGVVTRNKARLVAKGYSQVEGLDFGETYAPVARLESIRILLAYATYHGFKLYQMDVKSAFLNGPIKEEVYVEQPLGFEDSEYPNHVYKLSKALYGLKQAPRAWYECLRDFLIANGFKVGKADPTLFTKTLENDLFVCQIYVDDIIFGSTNESTCEEFSRIMTQKFEMSMMGELKYFLGFQVKQLQEGTFISQTKYTQDILTKFGMKDAKPIKTPMGTNGHLDLDTGGKSVDQKVYRSMIGSLLYLCASRPDIMLSVCMCARFQADPKEAHLTAVKRILRYLAYTPKFGLWYPWGSTFDLIGYSDADWAGCKINRKSTSGTCQFLGRSLVSWAXKKQNSVALSTAEAEYIAAGHCCAQLLWMRQTLRDYGYKLTKVPLLCDNESAIKMADNPVEHSRTKHIAIRYHFLRDHQQKGDIEISYINTKDQLADIFTKPLDEQSFNKLRHELNILDSRNFFC

SEQ ID NO: 216493 - protein, 65 aa, Zea mays
  unsure (1)..(65): unsure at all Xaa locations
  Clone ID: MRT4577_129042C.1.pep
LLQILGLSQKITKRGXVSWCSMSLRERSLVTFSCFQDHLISYLWLGWSGVLNLPLPLWVKRGGGK

SEQ ID NO: 216494 - protein, 1863 aa, Zea mays
  unsure (1)..(1863): unsure at all Xaa locations
  Clone ID: MRT4577_129043C.1.pep
MSGDHTKREMETGDKPTTSHGNTSSEESRTKRKEKKKDSSNKGKGKEKKSSSHKSHRRGDKHKRMRKVVYYETDSSSPSTSDSDAPSVTSKRQERKKYSKIPLRYPHISKRTPLLSVPLGKPPVFDGEDYNMWSDKMRHHLTSLHTSIWNVVEFGVQVPSVGDEDYDSDEVAQIHHFNSQATTILLASLSREEYNKVQGLKSAKEIWDVLKTAHEGDEVTKITKRETIEGELGRFMLHQGEDPQAMYNRLKTLVNQVRNLGSEKWDDHEMVKVILRSLVFLNPTQVQLIRGDPRYKLMSPEEVIVKFVSFELMIKGSNKIIEQGTSSTPEAQPVAFKATEEKKEEATPSRTPIDASKLDNEEMALIIKSFRQILKQRRGKDYKPRSKKVWYKCGKPDHFIAKCPLSSDSDRGDDKKGRRKEKKRHCKKKGGDAHVCREWDSDESSTDSSSDEDAANIAVTKGLLFPNVGHKCLMAKDGKKKKVKSKSSTKYESSSDDNASDEEDNLRTLFADLNMQQKEKLNELISAIHEKDDLLDSQEDFLIKENKKHVKVKNAYALEIEKCEKLSSELSTCHETIDNLKNENARLTAKVDSHVCDVSIPNLRNDNVDLHAKIKELNDSLASLRIENEKLMXKAKDFDVCNVTISNLRNENDILHAXRCRDVDINAIHDHMVLIKQQNDHIAKLDAKIAEHNLENEKFKFARSMLYNGRRPGIKDGIGFQRGENVKLSAPPKRLSNFVKGKAPMPQDNEGYILYPAGYPESKIRRIHSRKSHSGPNYAFMYKGETSSSRQPTHAKLPKKKTPSASNDHDISFKTFDASYVLTNKSGKVYASGGSSWIIDSECTNHMTGEKKMFSSYEKNQDPQRAITFGDGNQGLVKGVTVFRRSDDSIAFKGVLEGQLYLVDFDRAELDTCLIAKTNMGWLWHRRLAHVGMKNLHKLLKGEHILGLTNVHFEKDSICSACQAGKQVGTHHPHKNIMTSDRPLELLHMDLFGPIAYISIGGSKYCLVIVDDYSRFTWVFFLQEKSHTQETLKGFLRRAQNEFGLRIKKIRSDNGTEFKNSQIEGFLEEEGIKHEFSSPYTPQQNGVVERKNRTLLDMARTMLDEYKTPDRFWAEAVNTACYAINRLYLHRILKKTSYELLTGTKPNISYFRVFGSKCFILVKRGRKSKFAPKTVEGFLLGYGSNTRAYRVFNKSSGLVEVSCDVVFDETNGSQVEQVDLDEIGEEQAPCIVLRNMSIRDVCPKESEEPPHAQDQPSSSTQASPPTQNEDEAQVDEGEDQRDEPPQDDSNDQGGDANDQDKEDEETRPPHLRVHQAIQRDHPVDTILGDIHKGVTTRSRVAHFCEHYSFVSSIEAHRVEEALQDSDWVMAMQEELNNFTRNEVWHLVPHPNQNVVGTKWVFRNKQDKHGVVTRNKARLVAKGYSQVEGLDFGETYAPVARLESICILLAYATYHGFKLYQMDVKSAFLNGPIKEEVYVEQPPGFEDSEYPNHVYRLSKALYGLKQAPRAWYECLRDFLIANGFKVGKADPTLFTKTLDNDLFVCQIYVDDIIFWSTNESTCEEFSRIMTQKFEMSMMGELKYFLGFQVKQLQEGTFISQTKYTQDILTKFGMKDAKPIKTPMGTNGHLDLDTGGKSVDQKVYPSMIGSLLYLCASRPDIMLSVCMSARFQADPKEAHLTAVRILRYLAYTPKFGLWSPRGSTFDLIGYSGADWAGCKINRKSTSGTCQFLGRSLVSWASKKQNSVALSTTETEYIAAGHCCAQLLWMRQTLRDYGYKLTKVPLLCDNESAIRMADNPVEHSRTKHIAIRYHFLRDHQQKGDIEIAYINTKDQLADIFTKPLDEQTFTKLRHELNILDSRNFFC

SEQ ID NO: 216495 - protein, 38 aa, Zea mays
  Clone ID: MRT4577_129044C.1.pep
MAIGIVGDAGVRAIAQHPKLRAGMILINSKQKHQPSMV

SEQ ID NO: 216496 - protein, 133 aa, Zea mays
  unsure (1)..(133): unsure at all Xaa locations
  Clone ID: MRT4577_129045C.1.pep
HTPASLPSNHHIQPANKNVARHSLRSSSTSSPLLPSARPRPRQXHLRFRWPDSVQEXAKRSGXPAAPPEGGPTPPVFVAPWPRSRKSGPATAPATASTPPSSTDEELSPFPPASTVVVFSAAEGPAADDFDGA

SEQ ID NO: 216497 - protein, 708 aa, Zea mays
  Clone ID: MRT4577_129046C.1.pep
MGYNCLFTDISVTVFRRSDDSVAFKGLLEGQLYLVDFNRAERDTCLIAKTNMGWLWHHRLAHVGMKNLHKLLKGEHILGLTNVHFEKDRICSACQAGKQVGAHHPHKNIMTTDRPLELLHMDLFDPIAYISISGSKYCLVIVDDYSRFTWVFFLQDKSQTQGTLNGFLRRARNEFGLRIKKIRSDNGTEFKNSQIEGFLVDEGIKHEFSSPYTPQQNGVVERKNRTLLDMVRTMLDEYKTSNRFWAEAINTACYAINRLYLHRILKKTLYELLTGKKPNVSYFIVFGSKCFILVKRGRKSKFSPKAIEGFLLGYDSNTRAYRVFNKSTGLVEVSCDIVFDETNGSQVEQVDLDELDDEEAPCVALRNMSIGDVCPKESEEPPQAQDQPSSSNQASPLTQDEDQAQDDENEDQEEPPQEEDNDQGGDVNDQDKEDDQGPRPPDPRVHQAIQRDHPMNSILGDIHKGVTTRSRVAHFCEHYCFVSSIEPYWVEDALRDSDCVLAMQEELNNFMRNEWVFRNKQDEHGVVTRNKARLVAKGYSQVEGLDFGETYAPVARLESIRILLAYASYHGFKLYQMDVKSDFLNGPINEEVYVEQPPGFEDSEYPNHVYKLSKALYGLKQAPRAWYECLRDFLITNGFKVGKTDPTLFTKTIANDLFVCQIYVDDIIFGSTNISTCEEFSRIMIQKFEMSMMGELKYFLGFQVKQLQ

SEQ ID NO: 216498 - protein, 1640 aa, Zea mays
  unsure (1)..(1640): unsure at all Xaa locations
  Clone ID: MRT4577_129047C.1.pep
MSREHAKKEMETGNKPATSHGKASSEESRNKGKGKEKKPSSHKSHRSGDKKKKMRKVVYYETDTSSPSTSGSDAPSVTSKRHERKKFSKIPLHYPRTSRHTPLLSVPLGKPPTFDGEDYARWSDLMKYHLTSLNKSIWNVVEFGAQVPSVGDEDYDEDEVAQIEHFNSQATTILLASLSREEYNKVQGLKSAKEVWDVLKTAHEGELGRFHLRQGEEPQDMYNRLKTLVNQVRNLGSKKWDDHEVVKVILRSLIFLNPTQVQLIRGNPRYTLMTPEEVIGNFVSFEFMIKGSRKINELDGPSTSEAQPVAFKATKEKKEESTPSRTPIDAFKLDNEEMALVIKSFRQILKQRRGKDYKPRSKNVCYKCGKPGHFIAKCPISSDSDRGDDKKGRRKEKKRYYKKKGGDAHVCREWDSDESSSDSSSDEDAANIAITKALXNVGHKCLMAKDGKKKKXAIHEKYDLLDSQEDFLIKENKRHVKVKNAYALEVEKCEKLSSELSTCHETIDNLRNENANLLAKVDSIACNVSIPNLRNDNNDLLAKIEELNISLASLRDENEKLLAKAKDFDVCNATISDLRSKNDILHAKVVELKSCKPSISTVEHTTICTRCRDVDINAIHDHMALIKQQNDHIAKLDAKIAEHEIENEKFKFARSMLYSGRRPGIKDDIGFQQGGNVKINAPPKKLSNFVKGKAPMPQDNEGYFLYPVGYPENKIRRIHSRKSHSGPNHSFMYKGETSSFRQPTRAKLPKKKTPSASNDHDISFKTFDASYVLTNKSGKVYASGGSSWIIDSGCTNHMTGEKKMFSSYEKNQDPQRAITFGDGNQGVTVFRRSDDLIAFKGVLEGQLYLVNFDRAELDTCLIAKTNMGWLWHRRLAHVVMKNLHKLLKGEHILGLTNVHFEKDRICSACQAGKQVGAHHPHKNIMTTDRPLEVLHMDLFGLIAYISIGGSKYCLVIVDDYSRFTWVFFLQEKTHTQETLKGFLRRAQNEFGLRIKKIRSDNGTEFKNSQIEGFLEEEGIKHEFSSPYTPQQNGVVERKNRTLLDMARTMLDEYKTSDRFWAEAVNTACYAINRLYLYRILKKTSYELLTGKRPNISYFRVFGSKCFILVKRGRKSKFPPKTVEGFLLGYDSNTRAYRVFNKSSGLVEVSCDVVFDETNGSQVEQVDLDEIGDEEAPCISLRNMSIGDVCPKEFEEPPNAQDQPSPSTQASPPTQNEVEAQVDEGEDQANEPPQDDGNDQGGDANDQDKEDDEEQRPPHPRVHQAIQRDHPVDTILGDIHKGVTTRSRVAHIYEHYSFVSSIEPHRVEEALQDSDWVVAMQEELNNFTRNEVWHLVPRPNQNVVGTKWVFHNKQDEHGVVTRNKARLVAKGYSQVEGLDFGETYAPVARLESIRILLAYATYHGFKLYQMDVKSSFLNGPIKEEVYVEQPPAFEDSEYPNHVYKLSKVLYGLKQAPRAWYECLRDFLITNGFKVGKADPTLFTKTLENDLFVCQIYVDDIIFGSTNESTCEEFSRIMTQKFEMSMMGELKYFLGFQVKQLQEGTFLSQTKYTQDILSKFGMKDAKPIKTPMGTNGHLDLDEGDKSVDQKGVRLIERAHRGLASSWEDPWCLGLQRSKIRSLFLPPKPSILPQAIVARNYFG

SEQ ID NO: 216499 - protein, 259 aa, Zea mays
  unsure (1)..(259): unsure at all Xaa locations
  Clone ID: MRT4577_129048C.1.pep
MTIPDEVDIIVCGGGSCGCVVAGRLANLDHNLQVLLIEAGENNLNNPWVFRPGIYPRNMKLDSKTASFYYSRPSEWLDGRRAVVPCAHILGGGSSINFMMYTRASASDYDDFQAKGWTTKELLPLMKKHETYQRACNNRDIHGFEGPIKVSFGNYTYPIKEDFLRATESQGIPTTDDLQDLVTGHGAEHWLKWINRDTGRRSDSAHGYIHSTRAVHQNLHLLTSNKVEKXILEGDRAVGVKXVPTSXCSPGQVXSRTLR

SEQ ID NO: 216500 - protein, 93 aa, Zea mays
  Clone ID: MRT4577_129049C.1.pep
PPHKPPRVYPLSLRVGRWGGMVTEYHFPPGTTNAHDSPKLGPKPGSPSTAPQGVGIAPFNGPPGKDQAFFFFLDQAFFFFFFFRIWKCNFLFL

SEQ ID NO: 216501 - protein, 67 aa, Zea mays
  Clone ID: MRT4577_12904C.1.pep
GKRGSFAKRVKLGKDKGFPTTTMLKNGQWIKLGRPYKRRGPKEEGGGKNGSLKRPHPFYFFFFPFFF

SEQ ID NO: 216502 - protein, 96 aa, Zea mays
  Clone ID: MRT4577_129050C.1.pep
QPSPSCAVMGTSAAAPRTGMISVVLGSDDVHQDVDKVGDAHVVLAVDDGERVGHLVWRRGGCNSRRRHGTLCESMRHLESLISSSCIRRVQDDLSE

SEQ ID NO: 216503 - protein, 105 aa, Zea mays
  Clone ID: MRT4577_129051C.1.pep
YPWGIPAIRTPSLKSSVFSGPLAIVEGEPAPAPSSVRIHFALDPPRCVLLWTSSAVKRQEEQTAARRIDSSRPLAIQRVGSGGDGRGGTRVGKTGDDGSARTRGL

SEQ ID NO: 216504 - protein, 172 aa, Zea mays
  Clone ID: MRT4577_129052C.1.pep
SRRKASARWLREHQRRALPQPGPGAAIYRTLTRRMPRSPSQGGSFLLSEAFSLCAAGKLCAFALSSSSRLYAFHTALDVRGDPPPPPPPPPLAPPVHHPSSPIAAFPPQLEDGGPTAPNLLLAGLAAQPCSSTSDGSPALSSILLLLLLHRFRPRGDGTRAGARRQETRRGA

SEQ ID NO: 216505 - protein, 133 aa, Zea mays
  unsure (1)..(133): unsure at all Xaa locations
  Clone ID: MRT4577_129053C.1.pep
PASPRATPSTRACKHALYDEDLAALPNNISLVKTSTVSSTRKTLPRRKSPSPVYAVWMMHFNPDDPTXRAIDSXPHAIAHLVGHTLCKKVRNVNLVSNLVSPNIVTDVADVAQEVDLAHSVCNNGGKLRRHPA

SEQ ID NO: 216506 - protein, 65 aa, Zea mays
  unsure (1)..(65): unsure at all Xaa locations
  Clone ID: MRT4577_129054C.1.pep
CSVWPAEWDLFHXGVSIMGXPSDSRYTSXVMXINIDFTDDYRFKAAKVNCQTQVYNTNINSNGSI

SEQ ID NO: 216507 - protein, 41 aa, Zea mays
  Clone ID: MRT4577_129055C.1.pep
MNQDLQHRTGCVVGCFRQLQRWCRTSIFDEYQRVAACQNKS

SEQ ID NO: 216508 - protein, 101 aa, Zea mays
  Clone ID: MRT4577_129056C.1.pep
KKRNTEKQGGPKPRPPFLNYSTPKNHGGGKKPLTGRANQKKVSTPSGGANPPEGANPEGVNPTETGPNPRETGEGESPKRGGPGQQKRETATCKSLGWGGP

SEQ ID NO: 216509 - protein, 66 aa, Zea mays
  unsure (1)..(66): unsure at all Xaa locations
  Clone ID: MRT4577_129057C.1.pep
TLGNACGPPNDEGGCSLGPRFLCWETSGVNYQFCPSASFPGLCPSWSSFLHCFXXLRRPGGWLCLW

SEQ ID NO: 216510 - protein, 33 aa, Zea mays
  Clone ID: MRT4577_129058C.1.pep
FLHSISLILTFSNLKFRHAINNVLYPLNHSFKS

SEQ ID NO: 216511 - protein, 215 aa, Zea mays
  Clone ID: MRT4577_129059C.1.pep
MTGLGSPCGACKFLRRKCVKGCVFAPYFCHEHGAAHFAAIHKVFGASNASKLLMHLPISDRCEAAVTMSYEAQARLQDPIYGCVAHIFSLQQQVVRLQAELESFKALAIQGCGDGSLTSNPQKENCERLAPYIQDGQLFYQPTMANNSSVKSERQLYFANDCFTSTSTQHSEGYEPDICMPDYYNNSNPSWTTQGSGYHDIDELQSVAFAYLDNA

SEQ ID NO: 216512 - protein, 65 aa, Zea mays
  Clone ID: MRT4577_12905C.1.pep
KRIFNTLVFVSHVNSASCIFCPAVCNSSLFCDHMLILSEGRKKAWESVTRIKWDIKNKKKPPPPF

SEQ ID NO: 216513 - protein, 82 aa, Zea mays
  unsure (1)..(82): unsure at all Xaa locations
  Clone ID: MRT4577_129060C.1.pep
MAQRISTVPMLDAARGAVGIQTXAPRRLTGXAPPGYGVTGVSRQHLRPDALSAVDDLTLDVFHLHMLLSHYIHKGLFFQAPD

SEQ ID NO: 216514 - protein, 75 aa, Zea mays
  Clone ID: MRT4577_129061C.1.pep
VVPGSVTIGGTFRCFSTDGLLRLKRQIEEVVMAQSMVHRSSAIVDFYATGSLLFILTANSIVIHTHFDTDTGHTD

SEQ ID NO: 216515 - protein, 44 aa, Zea mays
  Clone ID: MRT4577_129062C.1.pep
DWFFLQFSKQLVNLKKLSRNVVFNSPFQWKHRISMFPPHIKGLS

SEQ ID NO: 216516 - protein, 247 aa, Zea mays
  unsure (1)..(247): unsure at all Xaa locations
  Clone ID: MRT4577_129063C.1.pep
MAGVSTNAIALVLVTLLSVLVTSVRSAANYDTAAARSYNSGWLPAKATWYGAPTGAGPMDNGGACGFKNVNKYPFSSMASCGNEPLFDGGAGCGSCYEIRCIAANNPSCSGQPRTVVITDMNYYPVARYHFDLSGTAFGAMAKYGLNDKLRHAGIIDMQFRRVRCNFPGMKVTFHVQRGSNPNYLAVLVEYANVDGTVVRMELMQTRNGRPTXSWEPMRRSWGSIWRMDTSRPLQGPFSMRITATPG

SEQ ID NO: 216517 - protein, 66 aa, Zea mays
  unsure (1)..(66): unsure at all Xaa locations
  Clone ID: MRT4577_129064C.1.pep
GTSRYCYLQRRGCMHGXAQHQQKQGAMMTALKAATAATFSGSMLVLSGLILAGTVIALXEATPVLV

SEQ ID NO: 216518 - protein, 106 aa, Zea mays
  Clone ID: MRT4577_129065C.1.pep
RPRGGRAIKFFPLSPVLKKNPPGAPKAKSPSPGVGGFPYFPRGRGFPSVKREFCPTHFTWVCPLFFPPRLFSFFFPLVCGVLFWAETPFPPGTRFSFFTPSFKCPL

SEQ ID NO: 216519 - protein, 91 aa, Zea mays
  Clone ID: MRT4577_129066C.1.pep
CHFGQQNYFKKNTFGRKLPFLQKVSLNLMFGLSEDPDQIRVLCEVKKVPLELGKIFVPKAPAPRARQIFAVVFLKVQAFVKIPHPHLFVFK

SEQ ID NO: 216520 - protein, 106 aa, Zea mays
  unsure (1)..(106): unsure at all Xaa locations
  Clone ID: MRT4577_129067C.1.pep
MSLLAAAEPKNDGEVVHAADGMLLPEFKDNHLVLCDEPRNARLALSAIGVNPLAEWSXSIAQWXVIXLTIYNLASWXCXKRKYILVTILIIGPTQPAVDMWLLLAP

SEQ ID NO: 216521 - protein, 53 aa, Zea mays
  Clone ID: MRT4577_129068C.1.pep
RAHQEPAHLQPTNFFSTNHTQPTGGGVKFTNYIKHSLVKKKKHNTTRDHEELT

SEQ ID NO: 216522 - protein, 124 aa, Zea mays
  unsure (1)..(124): unsure at all Xaa locations
  Clone ID: MRT4577_129069C.1.pep
PPPGAPPPPPPPRXPPPPRPPPPPPHXDPATPPPRPPPAPPTPPPPPPPRRPPXPPRPPPPPPAAPTHPTQRHPRTQGPNPAXXXKPHRXPGPXPXPGTXXXPNPXKHTEIEKKTPPQAGEKEE

SEQ ID NO: 216523 - protein, 122 aa, Zea mays
  unsure (1)..(122): unsure at all Xaa locations
  Clone ID: MRT4577_12906C.1.pep
RVGWRAHRADPDKVXFFRYEEMQRDPAAHVRRLAEFVGLPFSSEEEDGGVVDAVVGLCSFERMRGMAPTKGGRTEFPIGVVPNSSFFRQGVVGDWVNHLSPEMARRIDAITADKFRGSGLVV

SEQ ID NO: 216524 - protein, 55 aa, Zea mays
  Clone ID: MRT4577_129070C.1.pep
RAEGLVSHFFFYGREILSGFFLFKGPPLTGKMGFFALGKCLRFVAIMFFRGGPVC

SEQ ID NO: 216525 - protein, 1341 aa, Zea mays
  Clone ID: MRT4577_129071C.1.pep
MSGASAKREIGTGEKPATSHGKAPSGESANRVKGSPSHDKSRRSGDKKKKMKKVVYYETDSSSPSTSGFDTPSVTSKRHEHKKFSKIPLRYPHISKRTPLLSVPLGKPPMFDCEDYNMWSDKMRHHLTSLHTSIWDVVEIGVQVPSPGDEDYDSDEVAQIRHFNSQATTILLASLSREEYNKVQGLKSAKEIWDVLKTAHEGDEVTKITKQETIEGELGRFRLRQGEEPQDMYNRLKTLVNQVRNLGSKKWDGHEMVKVILRSLVFLNPTQVQLIRGDPRYTLMSPEEVIGKFVSFELMIKGSKKIIEQDGPSTPEAQPVAFKATEEKKEESTSSRLPIDASKLDNEEMALIIKSFRQILKQRRGKDYKPRSKKVCYKCGKTGHFIAKCPLSSDSDRGDDKKGKRREKRRYYKKKGSDAHVCREWDSDESSSDEDAAHIAVTKGLLFPNVGHKCLMAKDGKRKKVKSRSFTKYASSSDEDHFSDEEDNLRILFANLNMQQKEKLNELISAIHEKDELLDSQEDFLIKENKKHVKVKDAYALEVEKCEKLSSELSKCHDIITNLRNKNASLIAKIDSNVCDNSISNLRDDNANLLARIEKLNDSLTSLRNENENENLITKAKDLDVCNVTISNLRSENDILHAKKMKKIKFARSILYSGRRPGIKDGIGFQRGDNVKVNAPPKRLSNFVKGKAPMAQDNEGYILYPVGYPEHKIRRIHSRKSHSGPNHAFMYKGETSSSRQSTRAKLPKRKTPIASNDSNISFKTFDASYVLTNKSGKVYAFGGSSWIIDSGCTNHMTGEKKMFSSYEKNQDPQRAITFGDGNQGVTVFRRSDDSIAFNGVLEGQLYLEKSHTQETLKGFLRQAQNEFGLRIKKIRSDNGTEFKNSQIEGFLEEKGIKHEFSSPYTPQQNGVVERKNRTLLDMARTMLDEYKTSDRFWAEAVNTACYAINRVFGSKCFILVKKGRKSKFAPKVVEGFLLGYDSNTRAYRVFNKSSGQVEVSCDIVFDETNDSQVEQVDLDEIGDEEAPCVALRNMSIGDVCPKESEEPPHAQDQPSSSMQASPPTQDEDEAQDNEGEDQEVEPPQEESNNQGGDAHDQDEEDEQAPRPPHPRVHQAIQQDHPVNTILGDIQKGVTTRSRVAHFCEHYSFVSSIEPHRVEEELQDSDWVVAMQEELNNFTRNEVCHLVPRPNQNVVGTKWVFRNKQDEHGVVTRNKARLVAKGDSQVKGLDFGETYAPVARLESIRILLAYATYHGFKLYQMDVKSAFLNGPIKEEVYVEQPPGFEDSEYPNYVYKLSKALYGLKQAPRAWYECLRDFLITNGFKVGKVDPTLFTKTLDNDLF

SEQ ID NO: 216526 - protein, 1796 aa, Zea mays
  unsure (1)..(1796): unsure at all Xaa locations
  Clone ID: MRT4577_129072C.1.pep
MSGDHAKKEMETGDKPTPSHGKASSEESRNKGKGKEKKPSSHKSHRSGDKKKKMRKVVYYETDTSSPSTSGSDAPSITSKRHEHKKFSKIPLRYPRIPKHTPLLSVPLGKPPTFDGEDYARWSDLMRFHLTSLHKSIWDVVEFGVQVPSVGDEDYDEDEVAQIEHFNSQATTILLASLSREEYNKVQGLKSAKEVWDVLKTAHEGDELTKITKRETIEGELGRFRLRQGEEPQDMYNRLKTLVNQVRNLGSKKWDDHEMVKVIFRSLIFLNPTQVQLVRGNPRYTLMTPEEVIGNFVSFEFMIKGSRKINELDGPSTSEAQPVAFKAMEEKKEESTSTRTPINASKLDNEEMSLVIKSFRQILKQRRGKDYKRRSKKVCYKCGKPGHFIAKCPLSSDSDRGNDKKGRKKEKKKYYKKKGGDAHVCREWDSDESSSDSSSDEDAANIAINKGLLFPNVGHKCLLAKNGKKKKVKSKSSTRYESSSDDNASDEEDNLRTLFANLNMQQKEKLNELISAIHEKDDLLDTQEDILIKENKKHVKVKNVYALEVEKCEKLTSELSTCHDVINNLRNENASLIAKVDSNACDVPIPNLRNDNDDLLAKIEELNISLASLRNENEKLIAKAKDFDVCNATISDLRSKNDILHAKVVELKSCKPSTSTIEHTSICTRCRDVDIDAIHDHMVLIKQQNDHIAKLDAKIAEHELENEKFKFARSMFYNGRRPGIKDGIGFQQGGNVKLNAPPKKLSNFVKGKAPMPQDNEGYILYPVGYPESKIRRIHSRKSHSGPNHAFMYKGETSSSRQPTRAKLSKKKTPRASNDSNISFKTFDASYVLTNKSGNVVAKYVGGKHKGSKTCVWVPKVLVSNAKGPKTIWVYASGGSSWVIDSGCTNHMTGEKKMFSSYEKNHDPQRAITFGDGNQGVTVFRRSDDSIAFKGVLEGQLYLEKSHTQETLKGFLRRAQNEFGLRIKKIRSDNGMEFKNSQIEGFLEEEGIKHELSSPYTPQQNGVVERKNRTLLDMARTMLDXGLRGGYASAKQNFQPHKTKNYCGYRSWXPLDAQSSGRRLDVDERVEQCRAVIDVLHVLARFVLVLQMQHLRGIHTYREEAPRTELLGSRRRLXGREASGYSFVGGKLGVFGSKCFILVKRGRKSKFAPKTVEGFLLGYDSNTRAYRVFNKSTGQVEVSCDVVFDETNGSQIEQVDLDEIGDEEAPCIALRNMSIGDVCPKQYEEPPNAQDQPSSSTQASPSTRNEDEAQVDEGEEQRDEPPKDDANDQGGDANDQDKEDEEPRPPHPRVHQAIQRDHPVDTILGDIHKGXVEEALQDSDWVVAMQEXLNNFTRNEVWHLVPRPNQNVVGTKWVFRNKQDEHGVVTRNKARLVAKGYSQVEGLDFGETYAPVARLESIRILLACATYHGFKLYQMDVKSAFLNGPINEEVYVEQPPSFEESEYPNHVYKLSKALYGLKQAPRAWYECLRDFLITNGFKVGKADPTLFTKTLENDLFVCQIYVDDIIFGSTNESTCEEFSRIMTQKFEMSMMGELKYFLGFQVKQLQEGTFISQTKYTQDILNKFGMKDAKPIKTPMGTNEHLDLDTEDIMLSVCMCARFQANPKEAHLTAVKRTLRYLVYTPKFGLWYPRGSTFDLIGYSDANWEGCKINKKSTSGTCQFLGRSLVSWASKKQNSVALSTAEAEYIAAGHCCAQLLWMRQTLRDYGYKLTKVPLLCDNESAIRMADNPVEHSRTKHIAIRYHFLRDHQQKGYIEIAYINTKDQLADIFTKPLDEQSFNKLRHELNILDSRNFP

SEQ ID NO: 216527 - protein, 103 aa, Zea mays
  unsure (1)..(103): unsure at all Xaa locations
  Clone ID: MRT4577_129073C.1.pep
ASYLLRTAQQFLPFMQLAALNYHDYCQQQQLVPIRQLAGVNRSTFXTQPQVCRCCRHAAPAAGTLFQGQQCQPXNQRAMTNPAAVLXQPIIAWCPPVRFEYEG

SEQ ID NO: 216528 - protein, 79 aa, Zea mays
  Clone ID: MRT4577_129074C.1.pep
PSLFQIFRSTQNLEQFHPRKTSLILLHQMLVLSHLIHPLQIQLIQPRTFQLYIYIIPLPLDRHYPLQQAYAALTLICLT

SEQ ID NO: 216529 - protein, 1312 aa, Zea mays
  unsure (1)..(1312): unsure at all Xaa locations
  Clone ID: MRT4577_129075C.1.pep
MSGDHAKKEMGTGEKPIISHGKAPSGESYNKGKGKEKESSSHKSRRSGDKKKKMRKVVYYETDSSSPSTSGSDTLSVTSKRHERKKFSKIPLRYPRIPKHTPLLSVPLGKPPMFDGEDYARWSDMMRYHLTSLHKSIWDVVEFGVQVPSVGDEDYDEDEVAQIVHFNSQATTILLTSLSREEYNKVQGLKSAKEIWDMLKTXHEGDEXNPRYTLMTPEEVIGNFVSFELMIKGSKKINELDGPSTPEAQPVAFKATEEKKEESTSSRQPIDASKLDNEEMSLIIKSFRQILKQMRGKDYKSRSKKKGKRREKKRYHKKRGGDAHVCREWDSDESSSDSSSDEDAANIAITKGLLFPNVGHKCLMAKDDKRKKVKSKSSTKYETSSDEEDNLRILFANLNMQQKEKLNELISAIHEKDELLDTQEDFLIKENKKHVNVKNAYALEVEKCEKLSSELSTCHDTIANLKNENAKLIAKVDSNTYDVSIPNLRDDNVNLLAKIEELNVSLASLKNENEQLIAEAKDFDVCNVTISNLRSENDILHAKVVELKSCKPSTSTVEHTSICTRCRDINIDAIHDHMALIKQQNDHIAKLDAKIAEHDLENEKFKFARSMLYSGRHPSIKDGIGFQKGDNVKLNAPPKRLSNFVKGKAPMPQDNEGYILYPANYSESKIRRIHSRKSHSGPNHAFMYKGETSSSRQSTHAKLPKKKTPKASNDSNISFMTFDASYVLTNKSGKVVAKYVGGKHKGSKTCVWVPKVLVSNAKGPKTIWEKSHTQEILKGFLRRAQNEFGLRIKKIRSDNGTEFKNSQIEGFLEEEGIKHEFSSPYTPQQNGVLERKNRTLLDMARTMLDEYKTSDRFGPRRVFGSKCFILVKRGRKSKFAPKTVEGFLLGYDLNTRAYRVFNKSSGLVEVSCDVVFDETIGSQVEQVDLDEMGDEEAPCVALRNMSIGDVCPKESEEPPNAQDQPSSSTQASPRTQNVDEAQVDEGEDQRDEPPQDDDNDQGGNANDQDKEDEEPRPPHPRVHQAIQQDHPIDTILGDIHKGVTTRSRVAHFCEHYSFVSSIEPQKVEEALKDSDWVVAMQEELNNFTRNEVWHLVPRPNQNVVGTKWVFRNKQDEHGVVTRNKAQLVAKGYSQVEGLDFGETDALIARLESIRILLAYATYHGFKLYQMDVKRAFLNGPIKEEVYVEQPPGFEDSEYPNHVYKLSKALYGLKQAPRAWYECLRDFLITNGFKVGKAGPTLFTKTLDNDLFVCQIYVNDIIFGSTNESICEEFSRIMTQKFEMSMMGELKYFLGFQVKQLQEGTFISQTKYI

SEQ ID NO: 216530 - protein, 39 aa, Zea mays
  Clone ID: MRT4577_129076C.1.pep
KKNGWPDKNNANVFTFLKPVDRGNFNVIKKNKVPYKGQG

SEQ ID NO: 216531 - protein, 895 aa, Zea mays
  Clone ID: MRT4577_129077C.1.pep
MKQLTSGAILPEGASARERGRLMGGDTLPAREVRGEERAGARAWRQAEDGPKAEERGRVGKGEGFLRRAQNEFGLRIKKIRSDNGTEFKNSQIESFLEEEGIKHEFSSPYTPQQNGVVERKNRTLLDMARTMLDEYKTSDRFWAEAVNTACYAINRLYLHRILKKTSYELLTGKKPNISYFRVFGSKCFILVKRGRKSKFAPKTVEGFLLGYDSNTRAYRVFNKSTGHVEVSYDVVFDETNGSQVEQVDLDEIGIEEAPCIALRNMSIGDVCPKESEEPPNAQDQPSFSTQASSPTQNEEEAQVDEEEDQSNESPQDDGIDQGGDTNEQEKEDEQEPRPPHPRVHQAIQRDHPVDTILGDIHKGVTTRSRVAHFCEHYSFVSSIEPHRVEEALQDSDWVVAMQEELNNFTRNEVWHLVPRPNQNVVGTKWVFRNKQDEHGVVTRNKARLVAKGYSQVEGLDFGETYAPVARLESIRILLAYATYHGFKLYQMDVKSAFLNGPIKEEVYVEQPPGFEDSEYPNHVYKLSKALYGLKQAPRAWYECLRDFLIANGFKVGKADPTLFTKSLENDLFVCQIYVDDIIFGSTNESTCEEFSRIMTQKFEMSMMGELKYFLGFQVKQLQEGTFISQTKYTQDILNKFGMKDAKPIKTPMGTNGHLDLDTGGKSVDQKVYRSMIGSLLYLCASRPDIMLSVCMCARFQADPKEAHLTAVKRILRYLAYTPKFGLWYPRGSTFDLIGYSDADWAGCKINRKSTSGTCQFLGRSLVSWASKKRNLVALSTAEAEYIAAGHCCAQLLWMRQTLRDYGYKLTKVPLLCDNESAIKMADNPIEHSRTKHIAIRYHFLRDHQQKGDIEISYINTKDQLADIFTKPLDEQTFNKLRHELNILDSRNFFC

SEQ ID NO: 216532 - protein, 207 aa, Zea mays
  Clone ID: MRT4577_129078C.1.pep
EEMDIICTHPMFGPESSHSDWTGLPFVFDRVRVGDSCPARRARAEAFLGVFAREGCRMVEMSCAEHDAHAAETQFLTHTVGRMLAALELRATPVDTRGYETLLRLVDNTCRDSFDLYNALFMYNDNSTELLHRLDWALGAVKRRLFDGLHGVLRRQLFGVEDGEGPAERTELLAVVPGGGPPDTDDQGGDGRDGDGDGDESGEQKND

SEQ ID NO: 216533 - protein, 1609 aa, Zea mays
  unsure (1)..(1609): unsure at all Xaa locations
  Clone ID: MRT4577_129079C.1.pep
MSGDHAKKEMETGEKPTTSHRKASSEESRKKGKGKEKKASSHKSHRSGDKIKKMRKVVYYETDTSSPSTFGSDAPSVTSKRHERKKFSKIPLRYPRISKHTPLLFVPLGKPPTFDGEDYARWSDLMRFHLTSLHKSIWDVVEFGVQVPSVGDEDFDVDEVAQIEHFNSQATTILLASLSREEYNKVQGLKSAKEVWDVLKTAHEGDELTKITKRETIEGELGRFRLRQGEEPQDMYNRLKTLVNQVRNLGSKKWDDHEVVKVILRSLIFLNPTQVQLIRGNPRYTLMTPEEVIGNFVSFEFMIKGSRKINELDDPSTSEAQPVAFKATEEKKESTPSRTPIDASKLDNEEMALVVKSFRQILKQRRGKDYKPRSKKVCYKCGKPGHFIAKCPISSDSDRGDDKKGRRKEKKRYYKKKGGDAHVCREWDSDESSSDSSDDEDAANIAVTKGFLFANVGHKCLMAKDGKKKKVKSKSSTRYESSSDDNASDEEDNLRTLFANLNMQQKEKLNELISAIHEKDDLLDSQEDFLIKENKQHVKGKALMPQDNEGYILYPAGYPESKIRRIHSRKSHSGPNHAFMYKGKTSSSRQPTRAKLPKKKTPNASNDHDISFKTFDASYVLTNKSGKVYASGGSSWIIDSGCTNHMTGEKKMFSSYEKNQNPQRAITFGDGNQGVTVFRRSDDSIAFKGVLEGQLYLVDFDRAKLDTCLIANTNMGWLWHRRLAHVGMKNLHKLLKGEHILGLTNVHFEKDRICSACQAGKQVGAHHPHKNIMTTDRPLELLHMDLFGPIAYISIGGKTLKGFLRRAQNEFDLRIKKIRSDNGTEFKNSQIEGFLEEESIKHEFSSPYTPQQNGVVERKNRTLLDMARTMLDEYKTSDRFWAEAVNTACYAINRLYLHRILKKTSYELLTGKKPNISYFRVFGSKCFILVKRGRKSKFAPKTVEGFLLGYDSNTRAYRVFNKSSGQVEVSCDVVFDETNGSQVEQVDLDEIGDEEAPCIALRNMSIGDVCPKESEEPPNAQDQPSSSTQASPPTQNEDEAQMDEGEDQANEPPQDDGNDQGGDANEQDKEDEEQRPPHPRVHQAIQQDHPVDTILGDIHKGXVEEALQDSDWVMAMQEELNNFTRNVVWHLVPRPNQNVVGTKWVFRNKQDEHDVVTRNKARLVAKGYSQVEGLDFGETYAPVARLESIRILLAYATYHGFKLYQMDVKSAFLNGPIKEEVYVEQPPGFKDSEYPNHVYKLSKALYGLKQAPRAWYECLRDFLIANGFKVGKADPTLFTKTLDNDLFVCQIYVDDIIFGSTNESTCEEFSRIMTQKFEMSMMGELKYFLGFQVKQLQEGTFIRQTKYTQDILTKFGMKDAKPIKTPMGTNGHLDLDTGGKSVDQKVYRSMIGSLLYLCASRPDIMLSVCMCARFQADPKESHLTAVKRILRYLVYTPKFGLWYPRGSTFDLIGYSDADWAGCKINRKSTSGTCQFLGRSLVSWASKKQNSVALSTAEAEYIAAGHCCAQLLWMRQTLRDYGYKFTKVPLLCDNESAIRMADNPVEHSRTKHIAIRYHFLRDHQQNGDIEIAYINTKDQLADIFTKPLDEQTFTKLRHELNILDSRNFFC

SEQ ID NO: 216534 - protein, 100 aa, Zea mays
  unsure (1)..(100): unsure at all Xaa locations
  Clone ID: MRT4577_12907C.1.pep
MAPGATNISLVVGLNKRIVSTKLQLAPRPGHRKVKLTKSVYMDTGLDIDSVGTAAYNKRISVLVMGAKDKHDLKLVXIKPDTHKMANNNREEMAGVLTKM

SEQ ID NO: 216535 - protein, 246 aa, Zea mays
  unsure (1)..(246): unsure at all Xaa locations
  Clone ID: MRT4577_129080C.1.pep
MKNFLRKLHIGDSAAGDGASSPSARPEAPTKKGGGIEHRHASGLSGWLSSVTSRPHPPTPLSASAAPAAAAPEVEESALTTALASSVEEKRVAEEDEERARRESRKEAEMEKKEKQQAELENYHMQLALEMSVREDPEAMQIEVAKQISLGSCPIQSSPAEVIAFRYWSFNALSYDDKILXDGFYDICXLXDELAMSTIPSLMDLQALPFSHGGKTDAXXLVDRALDSELVALDRRLLSWAVEFRS

SEQ ID NO: 216536 - protein, 1800 aa, Zea mays
  Clone ID: MRT4577_129081C.1.pep
MSGDHAKKEMETGDDKPTTSQGSTSSSSEESRTKRREKKKKSSKRKEKRSSSSHHKEKKEKSSHKPHRSGDKHKRMRKVVFYETDTSSTSTSGSDAASVTSKRQERKKYSKIPLRYPRVPKHTPLLSVPLGKPPTFNGEDYAMWSNLMQFHLISLHKRLWDVVEYGVQVPSVGDEDYDTDEVAQIEHFNSQATTILLASLSKEEYNKVQGLKNAKEIWDLLKTAHEGDELTKITKRETIEGELGRFRLRQGEEPQDMYNRLKTLVNQVRNLGSTKWDDHEVVKVILRALIFLNPTQVQLIRGNPRYTQMTPEEVIGNFVSFECMIKGSKKINELDEPSTSEAQPVAFKATEEKKEESTPSRQPIDASKLDNEEMTLIIKSFRQILKQRKGKDYKSRSKKVCYKCGKPGHFIAKCPLSSDSDRDNDKRGKRKEKKKYYKKKGGDAHVCREWDSDESSSDSSDDEDAANIAVTKGLLFPNVGHKCLMAKDGKKKVKSKSSTKYETSSDEDDKNEEDNLRILFANLNMEQKEKLNELISAIHEKDDLLDSQEDFLIKENKKHVKVKNAYALEREKCEKLSSELSTCHEILDNLRNENANLLAKVDSHVCIDPRNDDVDLLARIDELNASIASLRNENEKLIAKAKDFDVCNTTISDLRTKNDLLHAKVIELKSCKPSTSTIEHVSICTRCRDINVDAIHDHLALIKKQNDHIAQLNAKIREHDLENEKFKLARSMLYNGRRPGIKDGIGFQRGNNVKINAPPKNLSNFVKGKAPMPQDNEGYILYPAGYPENKIKKIHSRKSHSGPNYAFMYKGETSRSRQPTHAKLPRKKTINASNDHAISFKTFDASYVLTSKSGKVYASGGSSWILDSGCTNHMTGEKRMFSSYEKNKDPQRAITFGDGNQGLVKGVTVFRRSDDSIAFKGVLEGQLYLVDFDRAELDTCLIAKTNMGWLWHRRLAHVGMKNLHKLLKGEHILGLTNVHFEKDRICSACQAGKQVGTHHPHKNIMTTDRPLELLHMDLFGPIAYISIGGSKYCLVIVDDYSRFTWVFFLQEKSQTQETLKGFLRRAQNEFGLRIKKIRSDNGTEFKNSQIESFLEEEGIKHEFSSPYTPQQNGVVERKNRTLLDMARTMLDEYKTPDRFWAEAVNTACYAINRLYLHRILKKTSYELLTEGFLLGYDSNTRAYRVFNKSTGLVEVSCDVVFDETNGSQVEQVDLDEIGEEQAPCIALRNMSIGDVCPKESEEPSNTQDQPSSSTQASPPTQNEDEAQVDEGQNQEDEPPQDDGNDQGGDANDQEKEDEEEPRPPHPRVHQAIQRDHPVDTILGDIHKGVTTRSRVAHFCEHYSFVSSIEPHKVEEALQDSDWVVAMQEELNNFTRNEVWHLVPRPNQNVVGTKWVFRNKQDEHGVVTRNKARLVAKGYSQVEGLDFGETYAPVARLESIRILLAYATYHGFKLYQMDVKSAFLNGPIKEEVYVEQPPGFEDSEYPNHVYRLSKALYGLKQAPRAWYECLRDFLIANGFKVGKADPTLFTKTLENDLFVCQIYVDDIIFGSTNKSTCEEFSRIMTQKFEMSMMGELKYFLGFQVKQLQEGTFISQTKYTQDILAKFGMKDAKPIKTPMGTNGHLDLDTGGCKINRKSTSGTCQFLGRSLVSWASKKQNSVALSTAEAEYIAAGEESTSRALMIPFLAIHANKGEKCQKFIYNYAKSTVRNTVDYSGQEKLFGKTGQARTVRALAADRPRHKNNPRTEPMQKSKSVLWTVRRKSKDRPSPCADRPASGADRPGRTVRTRRADRPRSAEWPNG

SEQ ID NO: 216537 - protein, 103 aa, Zea mays
  Clone ID: MRT4577_129082C.1.pep
GSSEKMVMQKSRLSLPYIVLAQIYGARCKWEKMAGVWRSMENQRAKKVQSCSWLCIKNHIYVFTSEQILHHGKGATYEVLDLLFWDMMNHKYAPSFVEPNNLD

SEQ ID NO: 216538 - protein, 1655 aa, Zea mays
  unsure (1)..(1655): unsure at all Xaa locations
  Clone ID: MRT4577_129083C.1.pep
MSGAHAKKEMVTGEKPATSHGKAPSGESDNKKREESPPRVKSHRSGDKKKKMKKVVYYKTDSSSPSTSSSDASSVTSKRHERKKFSKIPLRYPRISKRTPLLYVPLGKPPEPSVGDEGYDSDEVAQIRHFNSQATTILLASLSREEYNKVQGLKSAKEIWDVLKTAHEGDEVTKITKRETIEGELGRFMLHQGEEPQAMYNRLKTLVNQVRNLGSTKWDDHEMVKVILRSLVFLNPTQVQLIRGDPRYKLMSPEEVIGKFVSFELMIKGSKQIIERGATSTPEVQPVAFKATEEKKEESTSSRLPIDASKLDNEEMALIVKSFRQIRKQRRGKDYKPRSKNVCYKCGKHGHFIAKCPLSSDSDRGDDKKGRRQEKKYYKKKGGDAHVCREWDSDESSTDSSSDEDAANITVNKGLLFPNVGHKCLMAKDGKKKKVKSRASTKYATSSDEASSSDDGDDLLTLFANLNMQQKEKLNELISAIHEKDELLDSQEDFLIKENKKHVKVKNAYAQEIEKCEKITSEQSTCHNTISNLRFENDKLIAKVEKLNDSDDSLVNLRNDNANLIAKIDKLNASLSSLKIENEKLISKPKDSNVCNVSISNLRDENAILHAKIVELNTCKPSTSTVSHVSICTRCRDVNVDAIHDHIAMIKKQNDHIAKLDAKVAEHELENENFKFARSMLYSGRRPGINDGIGFQQGGNVKLNAPKRLSNFVKGKAPMPQDNEGYILYPAGYPKDKIRRIHAKKTHSVSHHAFIYKNEASSSRRSTHVKMPKKKSPIALNDHNISFKTFDASYVLTNKSGKVVAKYVGAKHKGSKTCVWVPKVLVSNVKGPKTVWVYASGGSSWIIDIGCTNHMNGGKRMFSSYEKNHDPQRAITFGDGNQGVTIFRRSDDSVAFKGVLEGQLYLIDFNRAELDTCLIAKTNMSWLWHRRLAHVGMKNLHKLLKGEHILGLTNVYFEKDRICSTCQAGKQVGVHHPHKNIMTTDRPLELLHMDLFGPIAYISIGGKTLKRFLRRAQNEFGLRIKKIRSDNGTEFKNSQIEGFLEDEGIKHEFSSPYTPQQNSVVERKNRTLLDMARTMLDEYKTSDRFWVEAVNTACYAINRLYLHRILKKTSYELLTGKKPNVSYFRVFGSKCFILIKRGRKPKFAPKAVEGFLLGYDSNTRAYRVFNKSTRLVEVSCDIVFDETNDSQVEQVDLDELDDEEAPCVALRNMSIGDVCPKESEEPPHAQDQPSSSNQASPPTQDEDQAQDDENEDQEEPPQEEDNNQGGDANDQYKEDDEGPAPPHRRVHQAIQRDHPVNSILGDIHKRRVEDALRDSDWVLAMQEELNNFTRNEVWHLVPRPNQNIVGTKWVFHNKQDEHGVVTRNKARHVAKEYSQVEGLDFGETYAPVARLESICILLAYATYHGFKLYQMDMKSAFLNRPIKEEVYVEQPPGFEDSEYPNHVYKLSKALYGLKQAPRAWYECLRDFLIANGFKVGKTDPTLFTKTIANDLFXIMVQKFEMSMMGELKYFLGFQVKQLQXGTFISQTKYIQDILTKFGMKDAKPIKTPMGTNGHLDLDMGGCKIDRKSTSETCQFLERSLVSWASKKQNFVALSTAEAEYIAAGHCCTQLLWMRQTLRDYDYKLIKVPLLCDNESAIRMADNPVSTATLST

SEQ ID NO: 216539 - protein, 1687 aa, Zea mays
  Clone ID: MRT4577_129084C.1.pep
METGEKPTTSHGSTSSEESRTKRKEKKNISSNKGKEKKSSSHHKEKKEKSSSLKPHRSGNKQKRMRKVVYYETDTSSTSTSDSDVPSVTSKRQERKKFSKIPLHYPRISKHAPLLSVPLGKPPTFDGEDYARWSDLMRFHLTSLHKSIWDVVEFGAQVPSVGDKDYDEDDVAQIEHFNSQATTILLASLSREEFNKVQGLKSAKEIWDVLKTAHEGDELTKITKRETIEGELGRFRLRKGEEPQHMYNRLKTLVNQVRNLGSVKWDDHEMVKVILRSLIFLNPTQVQLIRGNPRYTKMTPEEVIGHFSFRQILKQRRGKDYKSRSKKVCYKCGKPGHFIAKCPISSDSDRGDDKKGRRKEKKRYYKKKGGDAHICREWDSDESSSDSSDDEDAANIAVTKGLLFPNVGHKCLMAKDGKRKKVKSRSSTKYETSSDENASDEEDNLRTLFANLNMEQKEKLNELISAIHEKDDLLDSQEDCLIKENKKHVKVKNAYALEIEKCEKLSSELSTCREMIDNLRNENASLNAKVDSHVCNVSIPNPRDNNDDLFARIEELNISLASLRVENENLIAKAKELDVCKVTISDLRDKNDILHAKIVELNSCKPSTSTIEHVTICTRCRDIDVNAIHDHMALIKQQNDHIAKLDAKIAEHNLENEKFKFARSMLYNGRRPGIKDGIGFQRGDNVKLSASPKRLSNFVKGKTPMPQDNEGYILYPAGYPESKIKKIHSRKSHSGSNHAFMYKSETSSSRQPTRATLPKKKIASASNEHDISFKTFDASYVLTNKSGKVVAKYVGGKHKGSKTCVWVPKVLVSNAKGPKTIWDYASGGSSWILDSGCTNHMTGEKRMFSSYEKNQDPQRAITFGDGNQDYNLLSVSQLCQMGYNCLFTDIGVTVFRRSDDSIAFKGVLEGQLYLVDFDRAELDTCLIAKTNMGWLWHRRLAHVGMKNLHKLLKGEHILGLTNVHFEKDRICSACQAGKQVGTHHPHKNIMTTDRPLELLHMDLFGPIAYISIGGSKYCLVIVDDYSRFTWVFFLQEKSQTQETLKGFLRRAQNEFGLRIKKIRSDNGTEFKNSQIEGFLEEEGIKHEFSSPYTPQQNGVVERKNRTLLDMARTMLDEYKTSDRFWAEAVNTACYAINRLYLHRILKKTSYELLTDCRRFLLGYDSNTRAYRVFNKSTGLVEVSCDVVFDETNGSQVEQVDLDEIDEEEAPCIALRNMSIGDVCPKESEEPSNTQDQPSSSMQASPPTQNEDEAQIDEGQVQEDEPPQDDGNDQGGDANDQEKEDEQEPMPPHPRVHQAIQRDHPVDTILGDIHKGVTTRSRVAHFCEHYSFVSSIEPHRVEEALQDSDWVVAMQEELNNFTRNEVWHLVPRPNQNVVGTKWVFRNKQDEHGVVTRNKARLVAKGYSQVEGLDFGETYAPVARLESIRILLAYATYHGFKLYQMDVKSAFLNGPIKEEVYVEQPPGFEDCEYPNHVYKLSKALYGLKQAPRAWYECLRDFLIANGFKVGKADPTLFTKTLENDLFVCQIYVDDIIFGSTNESTCEEFSRIMTQKFEMSMMGELKYFLGFQFKQLQEGTFISQTKYTQDILTKFGMKDAKPIKTPMGTNGHLDLDTGGKSVDQKEEHIGDLPVLGKILGVLGFKEAKFGRSFHRRSRVYCRRPLLRAIALDEANPAGLRLQINQSPFAM

SEQ ID NO: 216540 - protein, 70 aa, Zea mays
  Clone ID: MRT4577_129085C.1.pep
GASFQQLLTEVISVVQHPTGHHAFKVQHATGRIERIVFLYESIDLPDLVRLQQPHVLPLPALMPSPRHPG

SEQ ID NO: 216541 - protein, 1474 aa, Zea mays
  unsure (1)..(1474): unsure at all Xaa locations
  Clone ID: MRT4577_129086C.1.pep
MSGDHAKKEMETGEKPTTSHGSTSSEESRTKRREKKSSSSNKGKEKKSSSHHKEKKERSSSHKPHRSGDKHKRMRKVVYYETDTSPTSTSGSDAPSVTSKRQERKKFSKIPLHYPRTSRHTPLLSVPLGKPPTFDGEDYARWSDLMRFHLTSLHKSIWDVVEFGAQVPSVGDEDYDEDEVAQIEHFNSQATTILLASLSREEYNKVQGLKSANEVWDLLKTAHEGDELTKITKRETIEGELGRFRLRQGEEPQHMYNRLKTLVNQVRNLGSVKWDDHEVVKVILRSLIFLNPTQVQLIRGNPRYTQMTPEEVIGHFVSFECMIEGSRKINELDDPSTSEAQPVAFKATEEKKEESTPSRQPIDASKLDNEEMALVIKSFRQILKQRRGKDYKSRSKKVCYKCGKPGHFIAKCPLSSDSDRGDDKKGRRKEKKRYHKKRGGDAHVCREWDSDESSTDSSADEDAANIAVTKGLLFPNVGHKCLMAKDGKRKKVKSRSSTKYESSSDDNASDEEDNLRTLFADLNMQQKEKLNELISAIHEKDDLLDSQEDCLIKENKKHVKVKNAYALEVEKCEKLSSELSTCRETIDNLRNENASLNAKVDSHVCDVSIPNPRDNNDDLLARIEELNISLASLRVENENLIAKAKDLDVCNATISDLRDKNDILRAKIVELNSCKPSTSTVEHVSICTRCRDVDVNAIHDHMALIKQQNDHIAKLDAKIAEHNLENEKFKFARSMLYSGRRPGIKDGIGFQRGDNVKLSAPPKRLSNFVKGKAPMPQDNEGYILYPAGYPESKIRRTHSRKSHSGPNHAFMYKGETSSARQPARPLVPRXKTPSASNDHDISFNTFDASYVLTNKSGKVYASGGSSWILDSGCTNHMTGEKKMFSSYEKNQDPQRAITFGDGNQGVTVFRRSDDSIAFKGVLEGQLYLVDFDRAELDTCLIAKTNMGWLWHRRLAHVGMKNLHKLLKGEHILGLTNVHFEKDRICSACQAGKQVGAHHPHKNIMTTDRLLELLHMNLFGLIAYISIGGSKYCLVIVDDYSRFTWVFFLQEKSHTQETLKGFLRRAQNEFGLRIKKIRSDNETEFKNSQIEGFLEEEGIKHEFSSPYTPQQNGVVERKNRTILDMARTMLDEYKTSDRFWAEAVNTACYAINRLYLHQILKKTSYELLTRKKPNISYFRVFGSKCFILVKRGRKSKFAPKTVEGFLLGYDSNTRAYRVFNKSSGQVEVSCDVVFDETNGSQVEQVDLDEIGDEEALCIALRNMSIGDVCPKESEEPPNAQDQPSSSTQASPPTQNEDEAQVDEGEDHRDEPPKDDDNDQGGDANDQDKEDDEPRPPHPRVHQAIQRDHPIDTILGDIHKGVTTRSRVAHFCEHYSFVSSIEPHRVEEALQDSDWVVAMQEELNNFTRNEMSMMGELKYFLGFQVKQLQEGTFLSQTKYTQDILSKFGMKDAKPIKTPMGTNGHLDLDTEGDPLLI

SEQ ID NO: 216542 - protein, 1817 aa, Zea mays
  Clone ID: MRT4577_129087C.1.pep
MGIDSHLSTCVGTQSPKYLEMAQGHISLSERGRGELTSADERRRSGGTWLRRRFGEVYASGGSSWIIDSGCTNHMTGEKKMFTSYVKNKDSQDSIIFGDGNQGKIDLVQLVKQDKSVTQGTLKRFLRRAQNEFELKVKKIRSNNGSEFKNLQVEEYLEEEGIKHEFNAPYTPQQNGVVERKNRTLIDMARMMLGEFKTPERFWSEAVNTACHVINRVYLHRLLKKTSYELLTGNKPNVSYFRVFGSKCYILVKKGRNSKFAPKVVEGFLLGYDSNTKAYRVLNKSSGLVEVSSDVVFDETNGSPREQVDLDEIDEDDVPTTAIRTMAIGDVRPEEQQEQDQPSSSTMVHPPTQDDGQVPQEEACDQGGAQEEPAMEEEAPQAPPTQVRAMIQRHHPIDQILGDISKGVTTRSRLANFCEHYSFVSSIEPFRVEEALQDPDWVLAMQEELNNFKRNEVWTLVPRPKQNVLGTKWVFHNKQDEHGVVTRNKARLVAKGYAQVAGLDFEETFAPVARLESIRILLAYATHHSFRLFQMDVKSSFLNGPIKEEVYVEQPPGFENERHPDHVVGKADLTLFTKTCDGDLFVCQIYVDDIIFGSTNQKSCEEFSRVMTQKFEMLMMGKLNYFLGFQVKQLKDGTFISQMKYTQDLLKRFGMKDAKPAKTPMGTDGHVDLNKGDKSVDQKAYRSMIGSLLYLCASRPDIMLSVCLCARYQSDPRECHLVVVKRILRYLVATPCFGIWYPKGSTFYLIGYSDSDYAGCKIDRKSTSGMCQFLGRSLVSWSSKKQTSVALSTAEAEYVAAGQCCTQLLWMRQTLRDFGYNLSKVPLLCDNESAIRMADNPVEHSRTKHIDIRHHFLRDHQQKGDIEVFYISTENQLADIFTKPLDEKTFCRLRMLETGEKRLEMSCQLLLSLSALDCPVRQTSLSEQATLRTRWRRMAINHGTVRCRDINVETIDDHIAMIKQQNDHIAKLTAKINEHELENEKFKFARSMLYNGRRPSIKDDIGFQQGSNVKLNAPKRWSSFVMGKAFMVQDNEGYILYPANYPEHKIRRIHARKPHNISHHAFMYKNEASSSRHSTDVKIPKKKTPAASNEHYISFKTFDASYVLTNKSGKVYASDGSSWIIDSGCTNHMTGEKRMFSSYEKNEDPQRAITFGDGNQGVTVFRRSDDSIAFKGVLEGQLYLVDFNQVELDTCLIAKTNMGWLWHHRLAHVGTKNLHKLLKGEHILGLTNVHFEKDREKSQTQETLKGFLRRAQNEFGLRIKKIRSDNGTEFKNSQIEGFLEDEGIKHEFSSPYTPQQNGVVERKNRTLLDMARTMLDEYKIPDRVFGSKCFILIKRGRKSKFAPKAVEGFLLGYDSNTRAYRVFNKSTGLVVVSCDIVFDETNGSQVEQVNLNELDDEEAPCVALRNMSIGDVCPKESEEHSQAQDQPSSSNQASPPTQDEDQAQDEDQEDKPPQEEDNDQGGDEDNKDEEDDQEIQVPRPNQNVVRTKWVFRNKQDEHGVVTRNKARLVAKGYSQVEGLDFGETYAPVARLESIRILLTYATYHGFKLYQMDVKSAFLNGPIKEEFYVEQPPGFEDSEYPNHVYKLSKALYGLKQAPRPWYECLQDFLITNGFKVGKADPTPFKTIAKDLFVCQIYVDDVIFGSTNKSTCEEFSRIMIQKFEMSMMGELKYFLGFQVKQLQEGTFISQTKYIQDILNKFGMKDAKPIKTPMGTNGHLDLDTGGKFVDQKVYRSMIGSLLYLCASRLDIMLSVCMCARFQADPKEVHLGAIKIIMRYLVYTPKFGLWYPKGSTFNLIGYSDADWVGCKIDRKST

SEQ ID NO: 216543 - protein, 40 aa, Zea mays
  Clone ID: MRT4577_129088C.1.pep
GTATCMGENSELVARKQGAHLADVKLEPALRRSWRFGPFR

SEQ ID NO: 216544 - protein, 116 aa, Zea mays
  Clone ID: MRT4577_129089C.1.pep
MSHQKNEKDVGDAPKSHRIRITLTSRKVQSLEKVSAELIERARSKGLTIKGPVRLPTKNLKITTRKTPCGEGSKTWDSYELRVHKRLIDLHAPTEVVKSVIVNIEAGVEVEVTIAA

SEQ ID NO: 216545 - protein, 143 aa, Zea mays
  unsure (1)..(143): unsure at all Xaa locations
  Clone ID: MRT4577_12908C.1.pep
DSVSWPFLIEVMHKWGFGQLWRDIICELLGSSTTQVLLNECPGKRIXNRGLRQXDPLSPMLFILAMDMLGLLXSKAEDAGLLQQLSRKKKLHMISIYADDVALFLHPSAADISTTIDILNLFGDASGLWWKRLQIASQAGKLI

SEQ ID NO: 216546 - protein, 118 aa, Zea mays
  unsure (1)..(118): unsure at all Xaa locations
  Clone ID: MRT4577_129090C.1.pep
LDLCENVFLXNTRGLSYRVEFFLHQVIMLLVPRFPFKITFAVLLFVLHIIYYLAPNVSTICGRNLGIILKIRTHYEGDLGMVSVCPNRRQQVYYIEKPYGLQITQKVSASTSINHSSP

SEQ ID NO: 216547 - protein, 63 aa, Zea mays
  unsure (1)..(63): unsure at all Xaa locations
  Clone ID: MRT4577_129091C.1.pep
MRECISIHIGQPALHAGNACWELHCPEKGIHADGQMPGDETIAGGDDDFNTSLXETGAVKHVP

SEQ ID NO: 216548 - protein, 264 aa, Zea mays
  Clone ID: MRT4577_129092C.1.pep
PNQARTLEIQDADPNQRPLPALPHHTTAYRHVGARYGRGRGGGAPPGAAGEAREEAALRGGRKRARRRRPGPLRRRLSSPPPPAWLVAQNLTRELSILTESSGDQDGSNNRTVPRAEEITPAIMNLLETISGDRDLETALEESLQGIIEHPQRAPPASKEVVANLPVIAVTEEVMSRLGSETECAVCRENLVVDDKMQELPCKHLFHPLCLKPWLDENNSCPICRHELRTDDHVYESRKEREREEEEDRRGAANAVRGGEFIYI

SEQ ID NO: 216549 - protein, 56 aa, Zea mays
  Clone ID: MRT4577_129093C.1.pep
QNLRLGKDRSTLHGCGALSTIDNVKATIQDKEGIPPDQQRLIFAGKQQEDGRTLAD

SEQ ID NO: 216550 - protein, 71 aa, Zea mays
  Clone ID: MRT4577_129095C.1.pep
CETQKISKNKNILCTDVFKNILYFAKSILSKNIMNFFQYYIKIPCTKPSKYFSSFPLIFLFKNSNSTSRPP

SEQ ID NO: 216551 - protein, 118 aa, Zea mays
  unsure (1)..(118): unsure at all Xaa locations
  Clone ID: MRT4577_129096C.1.pep
STTLFFYRLHKYYYSLSGRLLAAFLRSTSTSRFIICTFAYLAPSSXMPELLSPLTXIDYEHPSALAYRLLHATAASDLHQPSALLLQLCADHLSIPTIATKQLPQLHPAFRHPSLVNP

SEQ ID NO: 216552 - protein, 65 aa, Zea mays
  Clone ID: MRT4577_129097C.1.pep
LGYRHTTSLLHKFRSDRNKRSMASGSVLKSSVLRKTSRRGRHEASRRAQAAQRLQGRPRLPLRGR

SEQ ID NO: 216553 - protein, 54 aa, Zea mays
  Clone ID: MRT4577_129098C.1.pep
PVNKLCSLEYPPPPTSLAAIDVHLQGSRHRNLRVIKLRIRELRYCPLVFPIPFG

SEQ ID NO: 216554 - protein, 92 aa, Zea mays
  Clone ID: MRT4577_129099C.1.pep
YWNLEHSLSSSGVQQQASSSSDSGTELCAVVAISEIAIWRFRQRGKTERAGAWRMRPAVCPSTAAAARTQDWAKEGDRIPPGCGDSFPLYVA

SEQ ID NO: 216555 - protein, 184 aa, Zea mays
  unsure (1)..(184): unsure at all Xaa locations
  Clone ID: MRT4577_12909C.1.pep
MAAGGRGKLAPAEVAPAAFPSRGLAVAGAAAGEVVRRVRPTEASERRRAEVVDYARRLVGSALGCEVFAFGSVPLKTYLPDGDIDLTVLGNTSYDSTLVNDVFCILESEEQNSDAEFVVKDLERIDAEVRLIKCTIGNIIXDISFNQTGGICALCXLELVDPEGGKNHLFKRSIILVKAWCYYE

SEQ ID NO: 216556 - protein, 177 aa, Zea mays
  unsure (1)..(177): unsure at all Xaa locations
  Clone ID: MRT4577_1290C.1.pep
SIYLDLLSGDELLWYSFSYNELYNDVLWEAEAKRITPGPADVDIAXSPIHLSXGEDQMVDDTAAXVARILSDTFTLDDEPPXDNKAFETDIDKYFKXLTAVPHADKTDEFLKDAKDATEVLPSKXKELQFFVCDPMKNDAXVVFTYYKDGDAIPTLLYLYHVLTETGARRASKLFTH

SEQ ID NO: 216557 - protein, 2413 aa, Zea mays
  unsure (1)..(2413): unsure at all Xaa locations
  Clone ID: MRT4577_129100C.1.pep
MVIGGKKSATSHRKAPSRESANNKKDGSPSRIRSHKSGEKKKKMKKVVYYETDSSSPSTSGSDAASVTSKRQERKKYRDEDYDEDEVAQIVHFNSQATTILLTSLSREEYNKVQGLKSAKEIWDVLKTAHEGDEVTKITKQETIEGELGCFRLRQGEEPQEMYNRLKTLVNQVRNLGSKKWDDHEMVKVILRSLVFLNPTQVQLIRGDPRYTLMSPEEVIRKFVSFELMIKVSKKIIEQDAPSTSEAQPVAFKATEKKKEESTSSRLPIDASKLDNEEMVLIIKSFRQILKQRRGKDYKSRSKKVCYKCGKPGHFIAKCPLSSNNDRGEDKKGKRREKKTYYKKKGGDAHVCREWNSDESSTDSSDDEDAANIAVTKGLLFPNVGHKCLMAKDDKRKKVKSRSSTKYASSSDEDNSSDEEDNLRTLFANLNMQQKEKLNELISAIHEKDELLDSQEDFLIKENKKHVKVKNAYALEVEKCEKLSSELNTCHDIIANLRNENAKIIAKVDSNACDVSIPNLRDDNVSLLAKIEELNVSLASLKNENEKLIAKAKDLDVCNVTISNLRSENDILHAKIVELKSCKPSTSTVEHVSICTRCRDINVDAIHDHLALIKKQNDHIAQLNAKINEHDLENEKFKFARSMLYSGRRPGIKDDIGFQKGDNVKLNAPSKRLSNFVKGKAHMPQDNEGYILYPAGYPEHKIRXIHSRKSHSGPNHAFMYKXVYASGGSSWIIDSGCTNHMTGEKKMFSSYEKNQDPQRAITFGDGNQGVTVFRRSDDSIAFKGVLEGQLYLVDFDRAELDTCLIAKTNMGWLWHRRLAHVGMKNLHKLLKGEHILGLTNVHFEKDREKSHTQETLKGFLRRAQNEFGLRIKKIRSDNGTEFKNSQIEGFLEEEGIKHEFSSPYTPQQNGVVERKNRTLLDMARTMLDEYKTSDRFWAEAVNTACYAINRVFGSKCFILVKRGRKSKFAPKAVEGFLLGYDSNTRAYRVFNKSSGLVEVSCDIVFDEANGSQVEQVDLDELDDEEAPCVALRNMSIGDVCPKESEEPPQAQDQPSSSMQASPPTQDKDEAQNDEGEDQEVEPPQEESNDQGGDAHDQDKEDEQVPRPPHPRVHQAIQRDHPVNTILGDIQKGVTTRSRVAHFCEHYSFVSSIEPHRVEEALQDSDWVVAMQEELNNFTRNEAWHLVPRPNQNVVGTKWVFRNKQDEHGVVTRNKVRLVAKGYSQVEGLDFGETYAPVARLESIRILLVYATYHGFKLYQMDVKSAFLNGPIKEEVYVEQPPGFEDSEYPNHVYKLSKVLYGLKQAPRAWYECLRDFLIANGFKVGKADPTLFTKTLANDLFVCQIYVDNIIFGSTNESTCEEFSRIMTQKFEMSMMGELKYFLGFQVKQLQEGTFISQTKYIQDILSKFGMKDAKPIKTPMGTNGHLDLDMGGCKINRKSTSGTCQFLATFRLPAHRFVAEVLQRFGVQIHQFTPNAVVALAKYVWAVTSYGGQPSVEVFAKNYCLHWQKRKVGNKIAQFGSCTFTLRTGKTSAEVVELVPCVHNKWGNWWDFWFYAFESGVENHPGLPVALMCSHYYVAYPQFEVVEDDENEGALRCAPRMSSGRDLVEEFIGYGVWPLAHGWALGEVCPREMPSLGGQRVRSPAFALDLRGRDPAAFVREVEDGATRIVGRYVPRTEGLRSWNIRGSNVRLNRVFELNCLPYGGYPGDDAVDRRGKRLVAATEEGPSQEAAPAAKKRKIVMEKDRQDATQKHRAFVRLADPFHEVKKARAAAKSAAPGSSKPLPAAKPVAPGHDKASVGAKAAGTGASKPPPGGPVKGRRLPSPARTGGAAARVADFDTDISVADYFVGSNGGQLAVVPPPVVATSPTVVVGAKGAPRDSWATFCVSGEILSAATAKDMAGSMAQQLRQASQQLSQQLKHAADFADHVASGALTVDFAAKVESLRTQHADAVREKSAAESKIRRLSEKKELGVLPTIVTGLMSFASLVTCEGAVNALSRKGCRHFEVFDQSNENFECEIFKMVHAEGVEDLGGLDGALPEAPEVDPEPQSDAGEGPSTTPAPTAADEDSAPVPAPPCEDASKAVVEPATEDPTAAAEPSQVPTFGPAHATATDNTIFVAASTVAADDDSFGSVSKCFEADDSGSSIAWTEESSDEDLDYFTALDVVVAEALPRVEGSEGLPGASTGYRRRRAVAKWRVSELSRGGRRHRSEMESGRLRMDGTGKQELLSSPFGGDGETGDEFLLVLRSQVFAYDDRLLGHCLVLACHTVVDYHGVNVGCAAQIDIPGVEGQRHMGPLRLHEWASDGDVVDASVVVPLLSLRVEVDAGPPSDHVNDSAIRLISEVFLFWCLGVIWVVDVWLMRVRRREWGWYNLHLLVVLVCVVRWMLSGAVVVWLWEVMLICVHNNSWVVG

SEQ ID NO: 216558 - protein, 1200 aa, Zea mays
  unsure (1)..(1200): unsure at all Xaa locations
  Clone ID: MRT4577_129101C.1.pep
MSYGAKDAFARCLVSVGPTTTAKASSGGWRLRLRPNSLIEKDGKRKKVKSRSSTKYETSSDEDNCSDEEDNLRTLFANLNMQQKEKLNELISAIHEKDDLLDSQEDFLIKENKKHVKVKNAYALEVEKCEKLSSELSTCHDTIANLRNENAKLIAKVDSNFCDVSIPNLRDDNVNLLAKIEELDVSLASLRIENEQLIAKAKDFDVCNVTISNLRNENDILHAKVVELKSCKPSTSTVEHTSICTRCRDINVDAIHDHQALIKKQNDHIAQLNAKINEHDLENEKFKFARSMLYSGRRPGIKDGIGFQKGDNVKLNAPPKRLSNFVKGKAPMPQDNEGYILYPVGYPESKIRRIHSRKSHSGPNHAFMYKGETSSSRQSTHAKLPKKKTPNASNDSNFSFKTFDASYVLTNKSGKVYASGGSSWIIDSGCTNHMTGEKKMFSSYEKNQDPQRAITFGDGNQDVGVTVFRRSDDSIAFKGVLEGQLYLVDFDRAELDTCLIAKTNMGWLWHRRLAHVGMKNLHKLLKGEHILGLTNVHFEKDRICSACLAGKQVGVHHPHKNIMTTDRPLELLHMDLFGPIAYLSIGXEKSHTQETLKGFLRRAQNEFGLRIKKIRSDNGTEFKNSQIEGFLEEEGIKHEFSSPYTPQQNGVVERKNRTLLDMTRTMLDEYKTSDRFWAEAVNTACYAINRLYLHRILKKTSYELLTDKKPNISYFRVFGSKCFILVKRGRKSKFAPKTVEGFLLGYDSNTRAYRVFNKSTRQVEVSCDIVFDETNGSQIEQVDLDEIGNEEAPCIALRNMSIRDVCPKESEEPPNAQDQLSSSTQASPPTQNEDEAQVDEVEDQAKEPPQDDGNDQGGDTNDQDKEDEEQRPPHPRVHQAIQRDHPIDTILGDIHKGVTTRSRGAHFCEHYSFVSSIEPHTVEEALQDSDRVVAMQEELNNFTRNEVWHLVPRPNQNVVGTKWVFRNKQDEHGVVTRNKARLVAKGYSQVEXAFLNGPIKEEVYVEQPPGFEDSEYPNHVYKLSKALYGLKQAPRAWYECLRDFVITNGFKVGKADPTLFTKTLEXNDLFVCQIYVDDIIFGSTNESTCEEFSRIMTQKFEMSMMGELKYFLGFQVKQLQEGTFISQTKYTQDILNKFGMKDAKPIKTPMGTNGHLDLDTGGKSVDQKEEHIGDLPVLGKILGVLGFKEAKFGRSFHRRS

SEQ ID NO: 216559 - protein, 40 aa, Zea mays
  Clone ID: MRT4577_129102C.1.pep
KTAEFRACPLGLLVLPTGTELVTNGSDSAVLGFLLLLTWS

SEQ ID NO: 216560 - protein, 64 aa, Zea mays
  Clone ID: MRT4577_129103C.1.pep
INTVTPMYLKNQSRLSASTSEDCKPAWTLPARGGGKVVVCLKSAYSYYIGGNPACFFTNKRTKF

SEQ ID NO: 216561 - protein, 1470 aa, Zea mays
  Clone ID: MRT4577_129104C.1.pep
MKKVVYYETDSSSPSTSESDAASVTSKRQERKKYSKPPMFDGEDYNMWSDKMRHHLTSLHTSIWDVVEIGVQEYNKVQGLKSAKEIWDVLKTAHEGDEVTKITKRETIEGELGRFRLRQGEEPQDMYNRLKTLVNQVRNLGSTKWDDHEMVKVILRSLVFLNPTQVQLIRGDPRYMLMSPEEVIGKFVSFELMIKGSKKIIEQDGPSMPEAQPVAFKATEEKKEESTSSRVSIDASKLDNEEMALIIKSFRQILKQRRGKDYKSRSKKVCYKCGKPGHFIAKCPLSSDSDRGDDKKGKRREKKRYHKKRGEDAHVCREWDSDESSTDEDAANIAVTKGLIFPNIGHKCLMAKDDKRKKVKSKSSTKYETSSDEDNLRTLFANLNMQQKEKLNELISAIHEKDEHLDSQEDFLIKENKKHVKVKNAYALEVEKCEKLSSELSKCHDIIINHRNENASLIAKVDSNVCDDSISNLRDDNPNLLARIEKLNDSLASLRNENENLIAKAKDLDVCNVTIFNLRSENDILHAKIVELKSCKSSTSTTEHVSNCTRCRDINVDAIHDHLALIKKQNDHIAQLNAKINEHDLENEKFKFARSMLYSGRRPDIKDGIGFQKGDNVKLNAPPKRLSNFVKGKALMPQDNEGYILYPAGYPEHKIRRIHSRKSHSGPNHAFMYKGETSSSRQSTRAKLARKKTPIASNDSNISFKTFDASYVLTNKSGKVYASGGSSWIIDSGCTNHMTGEKKMFSSYEKNQDPQRAITFGDGNQGLVKGVTVFRRSDDSISFKGVLEGQLYLEKSQTQETLKGFLRRAQNKFGLRIKKIRSDNGTEFKNSQIEGFLEEEGIKHEFSSPYTPQQNGVVERKNRTLLDMARTMLDEYKTSDRFWAEAVNTACYAINRLYLHRILKKTSYELLTGRKSKFAPKTVEGFLLGYDSNTRAYRVFNKSTGQVEVSCDVVFDETNGSQVEQVDLDEIGNEEAPCIALKNMSIGDVCPKESEEPPNAQDQPSSSTQASPPTQNEDEAQVDEIEDQAKEPSQDDGNDQGGDTNDQDKEDEEQRPPHPRVHQAIQRDHLVDTILGDIHKGVTTRSHVAHFCEHYSFVSSIEPHRVEEALQDSDWVVAMQEELNNFTRNEVWHLVPCPNQNVVGTKWVFCNKQDEHGVVTRNKARLVAKGYSQVEGLDFGETYAPVTRLESIRILLAYATYHGFKLYQMDVKSAFLNGPIKEEVYVEQPPGFEDSEYPHHVYKLSKALYGLKQAPRAWYECLRDFLIANGFKVGKADPTLFTKTLENDMFVCQIYVDDIIFGSTNESTCEEFSRIMTQKFKMSMIGELKYFLGFQVKQLQEGTFISQTKYTQDILNKFGMKDAKPIKTPMGTNGHLDLDTGASQMGRRSGSPWPESARGRVMMAPPVDVAGLRPRLGDAEAPPKPRSSLSSVAEAEFEPLGRARRRSSAEARAESEPWGRAKRSSSSSGT

SEQ ID NO: 216562 - protein, 37 aa, Zea mays
  unsure (1)..(37): unsure at all Xaa locations
  Clone ID: MRT4577_129105C.1.pep
XGRCRHALAPDARFCPRLYLPGYRSPTPPLRLLLWGG

SEQ ID NO: 216563 - protein, 1923 aa, Zea mays
  Clone ID: MRT4577_129106C.1.pep
MSGDHAKKEMETGEKPTTSQGSTSSEESHTKRKEKKKDSSKRKEKKSSSSHHKEKKEKSSSHKPHRRGDKHKRMRKVVYYETDTSSTSTSDSDAPSVTSKRQERKKYSKIPLRYPGISKHTPLLSVPLGKPPTFDGEDYARWSDLMRFHLISLHKSIWDVVEFGAQVPSVGDENYDEDEVAQIEHFNSQATTILLASLSREEYNKVQGLKSAKEIWDVLKTAHEGDELTKITKRETIEGELGRFRLRKGEEPQHMYNRLKTLVNQVRNLGSKKWDDHEVVNVILRSLIFLNPTQVQLIRGNPRYTKMTPEEVIGHFVSFECMIEGSRKINELGDPSEAQPVAFKATEEKKEESTPSRQPIDASKLDNEEMALVIKSFRQILKQRRGKDYKSRSKKVCYKCGKPGHFIAKCPISSDSDRGDDKKGRRKEKKRYYKKKGGDAHVCREWDSDESSSDSSDDEDAANIAVTKGLLFPNVGHKCLMAKDGKKKKVKSNSSTKYESSSDDNASDEEDNLCSLFANLNIAQKEKLNELVSAIHEKDDLLDAQEDCLIKENKKHVKVKNAYALEVEKCQKLSSELSTCREMIDNLRNENAILNAKVDSHVCNISIPNLRDDNVDLLAKIDELNVSLASLRLENEDLIAKAKDFDICKVTISDLSDKNDILHAKIVELNSCKPSTSIVEHVSICTRCRDVDIHAIHDHMALIKQQNDHIAKLDAKIAEHNLENEKFKFARSMLYNGRRPGIKDGIGFQRGDNVKINAPPKNLSNFVKGKAPMPQDNEGYILYPAGYPESKIRRIHSRKSHSGPNHAFMYKGETSSSRQPTRAKLPRKKTPNASNDHAISFKTFDASYVLTNKSGKVVAKFVGGKHKGSKTCVWVPKVLVSNAKGPKTVWVYASGGSSWILDSGCTNHMTGEKRMFSSYEKNQDPQRAITFGDGNQGVTVFRRSDDSIAFKGVLEGQLYLVDFDRAELDTCLIAKTNIGWLWHRRLAHVGMKNLHKLLKGEHILGLTNVHFEKDRICSACQAGKQVGVHHPHKNIMTTDRPLELLHMDLFGPIAYISIGGSKYCLVIVDDYSRFTWVFFLQEKSQTQETLKGFLRRAQNEFGLRIKKIRSDNGTEFKNSQIEGFLEEEGIKHEFSSPYTPQQNGVVERKNRTLLDMARTMLDEYKTPDRFWAEAVNTACYAINRLYLHRILKKTSYELLTGKKPNISYFRVFGSKCFILVKRGRKSKFAPKTVEGFLLGYDSNTRAYRVFNKSTGLVEVSCDVVFDETNGSQVEQVNLDEIGDEEAPCIALRNMSIGDVCPKESEESPNTQDQPSSSTQASPPTQNEDETQVDEGQNQEDEPPQDDGNDQGGDANDQEKEDEEEPRPPHPRVHQAIQRDHPVDTILGDIHKGVTTRSRVAHFCEHYSFVSSIEPHRIEEALQDSDWVVAMQEELNNFTRNEVWHLVPRPNQNVVGTKWVFRNKQDEHGVVTRNKARLVAKGYSQVEGLDFGETYAPVARLESIRILLAYATYHGFKLYQMDVKSAFLNGPIKEEVYVEQPPGFEDSEYPNHVYRLSKALYGLKQAPRAWYECLRDFLISNGFKVGKADPTLFTKTLENDLFVCQIYVDDIIFGSTNESTCEEFSRIMTQKFEISMMGELKYFLGFQVKQLQEGTFICQTKYTQDILTKFGMKDAKPIKTPMGTNGHLDLDTGGKSVDQKVYRSMIGSLLYLCASRPDIMLSVCMCARFQSDPKESHLTAVKRILRYLAYTPKFGLWYPRGSTFDLIGYSDADWAGCKINRKSTSGTCQFLGRSLVSWASKKQNSVALSTAEAEYIAAGHCCAQLLWMRQTLRDYGYKLTKVPLLCDNESAIKMADNPVEHSRTKHIAIRYHFLRDHQQKGDIEISYINTKDQLADIFTKPLDEQSFTKLRHELNILDSRNFFC

SEQ ID NO: 216564 - protein, 94 aa, Zea mays
  unsure (1)..(94): unsure at all Xaa locations
  Clone ID: MRT4577_129107C.1.pep
FSEPSLSNAQLMDKCFXKRQDHIIGYGGGVKARHLXSPSVSKAELLEKLKQSEDEKRAMLEENRELREENRATNSRVSQMEKEWAELKKQISSS

SEQ ID NO: 216565 - protein, 1056 aa, Zea mays
  unsure (1)..(1056): unsure at all Xaa locations
  Clone ID: MRT4577_129108C.1.pep
MSPEEVIGKFVSFELMIKGSNKIIEQDGPSTPEAQPVAFKATEEKKKESTSSRLPINASKLDNEEMALIIKSFRQILKQRRGKDYKSRTKKVCYKCGKPGHFIAKCPLSSDSDRGNDKKGKRREKKRYYKKKGGDAHVCREWDSDESSSDSSSDEDAANIVVTKGLLFPNVGHKCLMAKDDKRKKVKSRSSTKYASSSDEDNSSDEEDNLRTLFANLNMQQKEKLNELISAIHEKDELLDSQEDFLIKENKKHVKVKDAYALEVEKCEKLSSELSKCHDIITNLRNENTSLIAKVDSNLCDDSISNLRDDNANLLAKIEKLNDSLASLRNDNEKLIAKAKDLDVCNVTISNLRSENDILHAKIVELKSCKPSTSTVEHVSINVDAIHDHLALIKKQNDHIAQLNAKINEHDLENEKFKFARSMLYSGRRPGIKDGIGFQKGDNVKLNASPKRLSNFVKGKAPMPQDNEEEFTLGSLTLALTMLDEYKTSDRFWAEAVNTACYAINRLYLHRILKKTSYELLTGKKPNVSYFRVFGSKCFILVKRGRKSKFAPKAVEGFLLGYDSNTRAYRVFNKSTGLVEVSFDIVFDETNGSQVEQVDLDELDDEEALCIALRNMSIGDVCPKESEEPPQAQDQPSSSMQASLPTQDEDEAQDDEGEDQEDEPPQEEDNDQGGDVHDXGKEDEQVPRLPHPRVHQAIQRDHPVNTILGDIQKGVTTRSRVAHFCEHYSFVSSIEPHGIEEALQDSDWVVAMQEDLNNFTRNEVFRNKQDEHGVVTRNKARLVAKGYSQVEGLDFGETYAPVARLESIRILLAYATYHGFKLYQMDVKSAFLNGPIKEEVYVEQPPGFEDTEYPNHVYKLSKALYGLKQAPRAWYECLRDFLITNGFKVGKTDPTLFTKTLENDLFVCQIYVDDIIFGSTNESTCEEFSRIMTQKFEMSMMGELKYFLGFQVKQLQEGTFISQTKYIQDILNKFEMKDAKPIKTPMGTNGHLDLDTGGKSVDQXRKSTSGTCQFLRRSLVSWASKKQNSVALSTAEAEYIAAGHCCAQLLWMRQTL

SEQ ID NO: 216566 - protein, 1556 aa, Zea mays
  Clone ID: MRT4577_129109C.1.pep
MSGELTKKEMETGDKPATSHGKASSGESHNKEKKKKEKKTSSHKSHRSGDKIKKMRKVVYYETDTSSPSTSGSDAPSITSKRHERKKFSKPPTFDGEDYARWSDLMKFHLTSLHKSIWNVVEFGAQVPSVGDEDYDEDEVAQIEHFNSQATTILLASLSREEYNKITKRETIEGELGRFRLRQGEEPQDMYNRLKTLVNQVRNLGSKKWDDHEVVKVILRSLIFLNPTQVQLIRGNPRYTLMTPEEVIGNFVSFEFMIKGSRKINELDGPSTSEAQPVAFKATEEKKEESTPSRQPIDASKLDNEEMTLVIKSFRQILKQRREKDYKPRSKKVCYKCGKPGHFIAKCPISSDSDRGDDKKGRRKEKKRYYKKKGGDAHVCREWDSDESSSDSSDDEDAANIAVTKGLLFPNVGHKCLMAKDGKKKKVKSKSSTRYESSSDDNSSDEEDNLRTLFANLNMQQKEKLNELISAIHEKDDLLDSQEDFLIKENKKHVKVKHAYALEVEKYEKLSSELSTCHETIDNLRNENANLLAKVDSNVCNASISNLRNDNDDLLTKIEELNISLASLRIENEKLLAKAKDFDVCNATISDLRTKNDILHAKVVELKSCKPSTSTIEHTSICTRCRDVDVNAIHDHMALIKQQNDHIAKLDAKIAEHDLEDEKFKFARSMLYRGRRPGIKDGIGFQQGGNVKINAPPKRLSNFVKGKALMPQDNEGYILYPAGYPESKIRRIHSRKSHSGPNHAFMYKGETSSSRQPTRAKLPKKKTPSASNDHDISFKTFDASYVLTNKSGKVYASGGSSWIIDSGCINHMTGEKKMFSSYEKNQDPQRAITFGDGNQGVTVFRRSDDSIAFKGVLEGQLYLVDFERAELDTCLIAKTNMGWLWHRRLAHVGMKNLHKLIKGEHILGLTNVHFEKDREKSHTQETLKGFLRRAQNEFGLRIKKIRSDNGTEFKNSQIEGFLEEEGIKHEFSSPYTPQQNGVVERKNRTLLDMARTMLDEYKTSDRFWAEAVNTACYAINRLYLHQILKKTSYELLTGKKPNISYFRVFGSKCFILIKRGRKSKFAPKTVEDFLLGYDSNTRAYRVFNKSTGQVEVSCDVVFDETNGSQVEQVDLDEIGIEEAPCIALRNMSIGDVCPKEFEEPPNAQDQPSSSTQASPPTQNEDEAQVDEIEDQANEPPQNDDNDQGGDTNDQDKEDEEQRPPHPRVHQAIQRDHPVDTILGDIHKGVTTRSRVAHFCEHYSFVSSIEPHRVEEALQDSDWVVAMQEELNNFTRNEGYSQVEGLDFDKTYAPVARLESIRILLAYATYHGFKLYQMDVKSAFLNGPIKEEVYVEQPPGFEDSEYPNHVYKLSKALYGLKQAPRAWYECLRDFLITNEFKVGKADPTLFTKTIENDLFVCQIYVDDIIFGSTNESTCEEFSRIMTQKFEMSMMGELKYFLGFQVKQLQEGTFISQTKYTQDILNTFGMKDAKPIKTPMGTNGHLDLNTGGEESTSRALMIPFLAIHAKGGESKSPKQKDRTTTNFKILSVEYFQLVSYCVKKGEKVVFQNDISKPS

SEQ ID NO: 216567 - protein, 83 aa, Zea mays
  Clone ID: MRT4577_129110C.1.pep
MILVGSLFMIAIFSFYFLSLLFVLFLSFFFFFYFFLWFFDFFLFLFFDYFFYFFFSFFFYFIFFILFFIFFVFFFFFFFFFII

SEQ ID NO: 216568 - protein, 133 aa, Zea mays
  Clone ID: MRT4577_129111C.1.pep
LPPVGPVPSPPRGGSLRVKVSNLLIEALIVGGGVREGARVSRFFCCRARKISGGFMPFKSGVQCGMGKSLLKKLPRLGLVWPQKDGLGLKFLDLIFVNCPKKDFSLRRLYVYLNKKCIQKKQHVRAKGRAPAK

SEQ ID NO: 216569 - protein, 53 aa, Zea mays
  Clone ID: MRT4577_129112C.1.pep
PRRARPGRSRYKVAASSPPEPQQSLQQGHASQQRCRSPRNCQDPKAFRVSCAT

SEQ ID NO: 216570 - protein, 366 aa, Zea mays
  Clone ID: MRT4577_129113C.1.pep
MAASPSSPHAAPGVSGQSLSPSAPSPHLPNYFMWREFVWGGIAGAFGEGMMHPVDTLKTRLQSQAIMTGAKAQKNIFQMVRTVWASDGLRGFYRGISPGVTGSLATGATYFGIIESTKAWLEIANPNLSGHWSHFIAGAIGDTLGSFVYVPCEVMKQRMQIQGTQKSWASAVAKGNISQTHGIEMYGYYNGMFHAGCSIWRDHGLKGLYAGYWSTLARDVPFAGLMVTFYEAMKKMSEYGKTKYLPHSDLHVSNSFEGLVLGGLAGGCSAYLTTPLDVIKTRLQVQGSTSRYNGWLDAITKTWTSEGVRGLFKGSVPRIIWYVPASAFTFMAVEFLRDHFNDKVDADAHEVTSLSIDTKSEVEKSA

SEQ ID NO: 216571 - protein, 144 aa, Zea mays
  Clone ID: MRT4577_129114C.1.pep
MVFQVTFYEAMKKMSEYGKTKYLPHSDLHVSNSFEGLVLGGLAGGCSAYLTTPLDVIKTRLQVQGSTSRYNGWLDAITKTWTSEGVRGLFKGSVPRIIWYVPASAFTFMAVEFLRDHFNDKVDADAHEVTSLSMDTKSEVEKSA

SEQ ID NO: 216572 - protein, 43 aa, Zea mays
  Clone ID: MRT4577_129115C.1.pep
TRLNMLLLCPLKMLLFIFLCYVFLPRCPITLPCFIGSNKKKKE

SEQ ID NO: 216573 - protein, 125 aa, Zea mays
  Clone ID: MRT4577_129116C.1.pep
LQGAQNIGFSHCIEQHSHVPMEIPPADIAVMQFKIEADEESERSPLLSPREPTGGDFRIANHSARFKKPFESLLMQSEAGIWSPLKEPEPQTRRTTMVSSPRSKEKQKARSSLFTSCMCCTPATN

SEQ ID NO: 216574 - protein, 37 aa, Zea mays
  Clone ID: MRT4577_129117C.1.pep
FNNYVECFFVLIFYLLYFPFFFFFFFSSITISTCIVI

SEQ ID NO: 216575 - protein, 779 aa, Zea mays
  Clone ID: MRT4577_129118C.1.pep
LDHLESVLANEPVSVKSGQFIVEVKPQGISKGIVAERILASVKERGKQADLLFCTGDDGSDDATFANIADNGGCDLGAPGAALFACTVGLEPVVEVINPEDDYVWVHDYHLMALPTFLRRCFNRLRIGFFLHSPFPSSEIYRTLPVREEILKALLNCDLIGFHTFDYARHFLSCCSRMLGIEYQSKRGYIELDYFGRTVGIKIMPVGVHMGQLESGLRLPDKEWRLSELQRQFQGKTVLLGVDDMDIFKGINLKLLAFENMLRTHPKWQGRAVLVQIANPARGRGKDLEAIQAEIEESCQRINGDFGQSGYSPVVFIGRDVSSVEKIAYYTIAECVVVTAVRDGMNLTPYEYVVCRQGAPGSQSVSEVSGPKKSMLVVSEFIGCSPSLSGAIRVNPWNIEATAEAMNEAISMPEQEKQLRHEKHYRYVRSHDVAYWSKSFIIDLERACKDHFKRTCWGIGLGFGFRVVALDPHFTKLNMDSIINAYEISESRAILLDYDGTLVPQTSLNKEPSPQVLSIINTLCSDSRNIVFLVSGRDKDTLGKWFSSCPRLGIAAEHGYFLRWSREEEWQTCTQALDFGWMQMAKPVMNLYTEATDGSYIEAKESALVWHHQDADLGFGSSQAKEMLDHLESVLANEPVSVKSGQFIVEVKPQGISKGIVAERILASVKERGKQADFLLCIGDDRSDEDMFENIADIIGRNLVAPRTALFACTVGQKPSKAKFYLDDTFEVVTMLSALADATGPELETDSADESVAYISSLDIGDEQSESSDKPVEGS

SEQ ID NO: 216576 - protein, 62 aa, Zea mays
  Clone ID: MRT4577_129119C.1.pep
EVEAYWSLVLWPLWREFVWGGIAGAFGEGMMHPVDTLKTRLQSQAIMTGAKAQKNIFQMVRT

SEQ ID NO: 216577 - protein, 89 aa, Zea mays
  Clone ID: MRT4577_12911C.1.pep
KLWPENFKNLPKFGHHRGALFQTKKKINVTKFFALLKYPGELKKIFGKCSLKNSFGGKLFLKKKWALPKIGTFLLFCPGGFKIFFQNFF

SEQ ID NO: 216578 - protein, 698 aa, Zea mays
  Clone ID: MRT4577_129120C.1.pep
YVLANKFFFEKVVEVINPEDDYVWVHDYHLLALPTFLRRRFNRLRIGFFLHSPFPSSEIYRTLPVRDEILKALLNCDLIGFHTFDYARHFLSCCSRMLGIEYQSKRGHIGLDYFGRTVGIKIMPVGVHMGQLESGLRLPDREWRLSELQQQFQGKTVLLGVDDMDIFKGINLKLLAFENMLRTHPKWQGRAVLVQIANPARGRGKDLEAIQAEIEESCQRINGDFGQSGYSPVVFIDRDVSSVEKIAYYTIAECVVVTAVRDGMNLTPYEYIVCRQGAPGSESVSEVGGPKKSMLVVSEFIGCSPSLSGAIRVNPWNIEATAEAMNEAISMPEQEKQLRHEKHYRYVSSHDVAYWSKSFILDLERACRDHFKRTCWGIGLGFGFRVVALDAHFRKLNMDSIVNAYEISGSRAILLDYDGTLVPQTSINKEPSPEVLNIINTLCSDSRNIVFLVSGRDKDMLGKWFSSCPKLGIAAEHGYFLRWSSEEEWQTCTQAMDFGWMQMAKPVMNLYTEATDGSYIETKESALVWHHQDADPGFGSSQAKELLDHLESVLANEPVSVKSGQFIVEVKPQGVSKGIVAERILASVKERGKQADFVLCIGDDRSDEDMFENIADIIKRNMVAPRTSLFACTVGQKPSKAKFYLDDTFEVVAMLSALADATGAELESDSADELAASISSLDIGDEQSETSDTPIGGS

SEQ ID NO: 216579 - protein, 55 aa, Zea mays
  Clone ID: MRT4577_129121C.1.pep
NCDNNGVSRRQSAEHAPGLTKQILIAVGHVRRRELVARMQEDPQVTAAHSLEDDE

SEQ ID NO: 216580 - protein, 52 aa, Zea mays
  Clone ID: MRT4577_129122C.1.pep
NQVHCSKRPIHRGGLPNPLTLALKMLCTDQYSNVRSTNGVPTNGINFQVPHM

SEQ ID NO: 216581 - protein, 320 aa, Zea mays
  unsure (1)..(320): unsure at all Xaa locations
  Clone ID: MRT4577_129123C.1.pep
LCLQVGLRIEHPQGLINSIQYSELAAEVQRGRGRIPVADYKIVKSVGERDAENELDIAEPTRSCYSFCMCPGGQARHSLSLSLSDTPFCNIMIFLQIFEKAXVVLTSTNPSELCINGMSFSRRASKWANSALVVTVSSHDFKPFQSHGPLAGVEFQRQFERRAAMMGGGNFVVPAQCVTDFISNRLSVTTLPPSSYRLGVRPSNLHELFPPYITEALQESLIMIDREMPGFVSSKALLHGVETRTSSPLQISRHGETYESTSLRGLYPTGEGAGYAGGILSAAVDGMYCGFALAKQLSLFHGDIEPFLGKTQKQTGFIKY

SEQ ID NO: 216582 - protein, 144 aa, Zea mays
  Clone ID: MRT4577_129124C.1.pep
FPEGKAPHVLGFPPFWGCWGEISFRGQLKLIFGAPPQSPSLKWAFCRELVFPFLLVGACRNPNVAGVVSPWDNPNYFSFFSIFFPLPGRPAFGFFVSFQGPPMWAVSVCPPPPWGPPGLFFFGGLPRAPWFLPQIFAVGGPLLT

SEQ ID NO: 216583 - protein, 138 aa, Zea mays
  Clone ID: MRT4577_129125C.1.pep
GRWVMYLAQGSEAGPVPTLLECTSCPLKQNPPAGWKWKWVSSATRKVKLGRFPSPSCKPGLASGKKVFFCRALSPGLRSKVFKFVWIGLCASFLLKGSYFVFLCVFPPPPPLEYVCVFPIPNKKKKQKIHIKKKKKQF

SEQ ID NO: 216584 - protein, 61 aa, Zea mays
  Clone ID: MRT4577_129126C.1.pep
GGGFFFFFCFFFFFFFFFFFFEKKNIPPAKMGYSLDGTLAVQPRALVGFADKPNITPFLMA

SEQ ID NO: 216585 - protein, 212 aa, Zea mays
  Clone ID: MRT4577_129127C.1.pep
MASSPASSYDCSFKVLLIGDSAVGKSSLLVSFVSAAHIDDDIAPTIGVDFKINFLSVGGKKLKLTIWDTAGQERFRTITSSYYRGAHGIILVYDVTKRESFTNLADVWTKEIELHSTNKECIKMLVGNKVDKDEDRMVTKEEGLAFAQERGCLFVESSAKTRENVEKCFEELALKILQVPSLLEEGSSVVKRNTLTLKQKQENANRSGGCCQ

SEQ ID NO: 216586 - protein, 48 aa, Zea mays
  Clone ID: MRT4577_129128C.1.pep
LLRLFLPNSSRSAIIGRGAYKIMVNSPTGSSASNQFVRSPSEALMPPH

SEQ ID NO: 216587 - protein, 95 aa, Zea mays
  unsure (1)..(95): unsure at all Xaa locations
  Clone ID: MRT4577_129129C.1.pep
MAPLLAAAMNHXAVHPGLRSPLVGTNHDSFSRHHLPTSSPQSSKRRSNLSFTTPSDRVGSQNGEQMPTPSQIPXRDCLPPDFTSAHPTHPNQIEG

SEQ ID NO: 216588 - protein, 116 aa, Zea mays
  unsure (1)..(116): unsure at all Xaa locations
  Clone ID: MRT4577_12912C.1.pep
MRRRKAXKNRKIALQQDVDKLRKKLRHEENVHRALERAFTRPLGALPRLPSFLPSQTLELLAEVAVLEEEVVRLEEQVGNFRQGLYREAVITTFMAAKSAYFLDGYRSTPVRHKPF

SEQ ID NO: 216589 - protein, 184 aa, Zea mays
  unsure (1)..(184): unsure at all Xaa locations
  Clone ID: MRT4577_129130C.1.pep
WVYPRVRNKRICLGKRGGKKKTFYPFYKKDWGDIKAPVVFSVRNIGKTLXVCRTQGPRIASEGLKHTVCEGCLADLYGDXDQAYRKIRLLAEDVHGKIVLTYLWGLNYTTDALTSASEXKWLDILLDSANVXVQRSYRTYYIVAVRFCIXGFTXRRPNQVKRTCFAQAFQNRPIPRKMVDIMIN

SEQ ID NO: 216590 - protein, 163 aa, Zea mays
  unsure (1)..(163): unsure at all Xaa locations
  Clone ID: MRT4577_129131C.1.pep
SFLTPVLLRGSGLRNRHIGKNLHLHPTALVWGYFPDTVPDLRGRMYEGGIITSLHKVEGGGPGAPARAILEAPAMGLAGAGTQFPWVSGRDMKERMLRYGRTVHLFSMARDRGSGTVHGERRLAYHLDATDRENMRDGMRRALRVLAXAGAAEXIGTHRSDGQ

SEQ ID NO: 216591 - protein, 48 aa, Zea mays
  Clone ID: MRT4577_129132C.1.pep
KAGTDLGSCQWIACFFGSGFQATICSFGGINGFSSHIRAFSLPFIQLR

SEQ ID NO: 216592 - protein, 65 aa, Zea mays
  Clone ID: MRT4577_129133C.1.pep
ELQHVTTGMAFTAVLRIVKKVSRKSADYGTFTALSSKAVQDMAMPLPAIPAAFFITIKRSKTCRS

SEQ ID NO: 216593 - protein, 63 aa, Zea mays
  unsure (1)..(63): unsure at all Xaa locations
  Clone ID: MRT4577_129134C.1.pep
GKVIAGKNSWSEFKGTNGEYATVVIXKXNYTVNTTVILDGSXVFXELRCVRVRVFVNENSIVV

SEQ ID NO: 216594 - protein, 185 aa, Zea mays
  unsure (1)..(185): unsure at all Xaa locations
  Clone ID: MRT4577_129135C.1.pep
WDSRGRPGTMFTCVGFVMGVRFNHASAKGMCATQVINTEEDMARRVRQLRRLPVRHREKFPCPSIKXGPLPXCPSLALDYDELDFSTGYFDGVPAXQYQEHTARFCSGFHVLTCKLCQXRSRHLALDPRAEGKLCFFDSVRHLLKLHREYYGHYIFXVKMCAPADTELAYSVEEVVDIIQKAKDG

SEQ ID NO: 216595 - protein, 128 aa, Zea mays
  unsure (1)..(128): unsure at all Xaa locations
  Clone ID: MRT4577_129136C.1.pep
ARGQHAGAPNGSADENDGVATGDGTAAQPDAEEPESGHAQPAGEQTTPGTRRKSPSXRHTPPPTKGGCXPQRKKKHEPPAGHRQTSRARSPGRPTDAPRGAGRPASERGPPTPRGRPDAGRKKGSNKE

SEQ ID NO: 216596 - protein, 224 aa, Zea mays
  unsure (1)..(224): unsure at all Xaa locations
  Clone ID: MRT4577_129137C.1.pep
MYANHRVRATRSMALRLPISSIHGMDSCARDHLLHHYLGGRATTSRACIPSAALILVDIRWASTDGTTIDSLLLNDRDVWVSLADDDEGDQHDYNLIXLRSTSXQGNKGLTRFRLMHLTSHKLKCLRNKREKLMERHVDGDTSDDYMQGLYYIGLTDTRPELHKRTXCSRMTYSXKSRRKMHDTMINQGSTCDLKELDSKFIPERIDKQIEKSTSSIFTHSNVF

SEQ ID NO: 216597 - protein, 236 aa, Zea mays
  Clone ID: MRT4577_129138C.1.pep
MAPAARWSTSPVLFLLLLLAAATATTTTTTAKHGHPSPTPWPERFHAVLFTNLTNYTEASTGPPLRVTDLYYDWPRRRNLNLVRHQLSDDPLYDVEWNNGTGFYFDSKACRVEQFPVGVLPPWWLSGGGAEYVGRRVAGGIDCHVWGKAGFIFYYEEARTGRPVRWDFVDVTGIQQFVMSFEPGAALEDDAQWQAPAYCFPDDDDAARSSGEEEAGDGLEAATRLLRKLAGAAATH

SEQ ID NO: 216598 - protein, 56 aa, Zea mays
  Clone ID: MRT4577_129139C.1.pep
NLQTSFIKLKKEHEVQGISHSVYMFTIRLYCVILWLFPISVDEYIEAHKSHKYPDE

SEQ ID NO: 216599 - protein, 366 aa, Zea mays
  Clone ID: MRT4577_12913C.1.pep
MHAPLEAMNGRARRPAAARGAAPRNEKAMEKEQRRPPSSKTAPVSMKASPANATPQCMKNRKIALQQDVDKLRMKLRHEENVHRALERAFTRPLGALPRLPPFLPSQTLELLAEVAVLEEEVVRLEEQVVNFRQGLYRETVITTSMAAKSVYFPDGYRSTPARHKPPAQPQSPELSTSTRQGSDQDAADWPPSLRRSTNAMRTPRRPGLSLSQGDCPGKENQSFGSGTNSCREFGLAPLSNVPGCRVQVGAETRAGFQTTSAVEDHKAVEGSNGTGQGKASTAANEVSEELLACLLGIFSQKSASSGQDEEQLSPPSVSGSCGSSSADPYGVPEFGWRDIGRYKQFQSVDTNISAGDDSALDQRLK

SEQ ID NO: 216600 - protein, 149 aa, Zea mays
  Clone ID: MRT4577_129140C.1.pep
FMWAMLCALGLSNLRHSATGSSRNSIIVGLALFLSLSVPSYFQQYGVHPSANSSVPTYFQPYVVASHGPVHTGSGGVNYVLNTILSLNMAIAFLVALVLDNTVPGGRQERGLYVWSEAEAAMRESTFMKDYELPFKIGRPFRWVKCVGL

SEQ ID NO: 216601 - protein, 62 aa, Zea mays
  Clone ID: MRT4577_129141C.1.pep
SCFRDPAIHTGGLFSVHGGDTTRLIYGRPRTFVWGPGVTLTPHCGEQRADRLETACPRLRGS

SEQ ID NO: 216602 - protein, 45 aa, Zea mays
  Clone ID: MRT4577_129142C.1.pep
SGLRIYISVVRSYVAPWLDSMTLSRPHRRIDDASDIRQEHEERAT

SEQ ID NO: 216603 - protein, 202 aa, Zea mays
  Clone ID: MRT4577_129143C.1.pep
GGEVRCCQILVSRGADRAAVNCNGWLPVDVARTWGCHWLEHVLSPKSLLPIPRFPPSAYLSSPLASVITLARDCGLALNMSSLPMDTMDGGADDGDACAVCLERPCNVAAEVCGHELCVKCALDLCSVIRSYDAPGIAGTIPCPLCRSGIASFRRRAAAAEAEPDANAGDRQASSSPHKKRSTESDQDGLPLVCAPPVFLSS

SEQ ID NO: 216604 - protein, 259 aa, Zea mays
  unsure (1)..(259): unsure at all Xaa locations
  Clone ID: MRT4577_129144C.1.pep
ISVEDLLCEXQTRREQVEQYGFQSFEEILRKRQAELLERNTEVQSDSNRSEIDAISAVLKKLHTSHFGYDDAFSGMAPRLFDLDGVEDEWRLHDFIHPNDSMVHTVISKMKEKVTVEISKIDAQIMRNLSVMRHLEHKLGPASALDYRMILLPLMRSFLQSHLGELVDKDAKERSDAAREAFLAELSLDAKKNASKGADMKQSHEKSKDKKKFKDSRKSKELKDSSWSNQSLIHQDSTDEGTSETSQMLADCDDLVCKC

SEQ ID NO: 216605 - protein, 107 aa, Zea mays
  unsure (1)..(107): unsure at all Xaa locations
  Clone ID: MRT4577_129145C.1.pep
RPFFFFFFLFTSLLVAFKKXGLLKKPNSTKXAPPILTYTKTYNSLHPFSPFFLPFLQLSKKTFIPPNFKKSFHTLFKRSLILPTLPPQKIFIFISFPTPHIFKPIHA

SEQ ID NO: 216606 - protein, 73 aa, Zea mays
  unsure (1)..(73): unsure at all Xaa locations
  Clone ID: MRT4577_129146C.1.pep
ATNPRLGVHGYLNSXRLPELAAGYVPVCTYDGXDNVVVLEQVARILMKTVSELASGKQPVGTMAYMGKVQYLM

SEQ ID NO: 216607 - protein, 95 aa, Zea mays
  Clone ID: MRT4577_129147C.1.pep
MAGPKAAEDGSAAPLLPAQAGERSSGGVGGGATSAQTLGNVVVSIVGTGVLGLPYAFRAAGWVAGSIGVAAAGSATLYCMLLLVSTLARPPIPPY

SEQ ID NO: 216608 - protein, 70 aa, Zea mays
  Clone ID: MRT4577_129148C.1.pep
PRDPNVFFAGYRLPPPLRYKFFVGVPPRGRSSPRGAYPRAINVLDKGLGSLKQAFGVEKTGSGAGMKRGF

SEQ ID NO: 216609 - protein, 82 aa, Zea mays
  unsure (1)..(82): unsure at all Xaa locations
  Clone ID: MRT4577_129149C.1.pep
ALSXVRRSRARRGRPPRRRFXPRXLRPXRGCGWXXRPGAXGVRRRXCPPCPRPRPAPVPPPAVLVAPPPCGFXVSARRXRGS

SEQ ID NO: 216610 - protein, 121 aa, Zea mays
  unsure (1)..(121): unsure at all Xaa locations
  Clone ID: MRT4577_12914C.1.pep
MRGWGHQAKNGGAFPRPTRPRAGNPVTLPHSAPXVPAPQPKPTKLRSSIRXWTVLILLAGRXMGKRVVVLKQLXSGLLLISGPFRISGGPPRRGNRTYVIGTSTRGAISGGAVARFVDRVL

SEQ ID NO: 216611 - protein, 101 aa, Zea mays
  Clone ID: MRT4577_129150C.1.pep
KKKRRAPFIPWGHLVCFSEWPLTIRGPPHPLGPMGGQALKNMRRVYSPWGNGKTPLLGGVWEQSFFHVFNQSWSFKQFSRIKNFGGFGTPLETPVNKTEVL

SEQ ID NO: 216612 - protein, 610 aa, Zea mays
  Clone ID: MRT4577_129151C.1.pep
RERGDPQWDDGDEEHNEMVKEHRKRKEFEIFVGGLDKDATENDLMKVFGEVGEITEVRLMMNPVTKKNKGFAFLRYATVEQARRAVSELKNPLVRGKQCGVAPSHDNDTLFVGNICKTWTKEHLKDKLKSYGVESFDDLLLAEDTNNPGMNRGYALLEFSTRPEAMDAFRTLQKRDVVFGVDRSAKVSFADSYPQVDDEIMAQVRTVFLDGLPPSWDEDSVKKYLKKYGAIEKVELARNMPAAKRKDFGFVTFDTHDNAVACTEGMSNSEIGEGEHKAKVRARLSRPLQRPPRMKHGLRGNFRVGHGAPRGGRLPYSRAPPPRRPPPRLIRPAVSRLPSIRSHPLKRPIDIRDRRPAMSMPDRARRFPPERSYDRRPPAPVYLKRSPRREYGRRDELPPPRSRATTDYITRVPVDRRPSLRDDYSPRGSGYSDLGPRSAPRLSDRRAYADDSYGEKFDRPLVAYREGRGRDYDTISGSKRPYADMDDVPRYQEIGVRQSKARLDYDIGGSSARYGDTYSERSGRPHAGYSSSRSIPVHDSAYGSSRHGMSYGGSASSADAGGMYPPSYSGSYGSRGSDVGGSSYSSLYSGRNLGTSSGGYYGGSGSSSYY

SEQ ID NO: 216613 - protein, 82 aa, Zea mays
  Clone ID: MRT4577_129152C.1.pep
YSSSRSIPVHDSAYGSSRHGMSYGGSASSADAGGMYPPSYSGSYGSRGSDVGGSSYSSLYSGRNLGTSSGGYYGGSGSSSYY

SEQ ID NO: 216614 - protein, 59 aa, Zea mays
  unsure (1)..(59): unsure at all Xaa locations
  Clone ID: MRT4577_129153C.1.pep
GGGAGPGVGEFLXWAWFLFCFWPFVRGLVGGRGNYGIPWRVRIKAALFVAAFVHLSTRK

SEQ ID NO: 216615 - protein, 47 aa, Zea mays
  Clone ID: MRT4577_129154C.1.pep
TPHASANYAHAIQSSLHHISVDNWDGVSSSLTRDPNTDLRATHCHSK

SEQ ID NO: 216616 - protein, 105 aa, Zea mays
  unsure (1)..(105): unsure at all Xaa locations
  Clone ID: MRT4577_129155C.1.pep
VGNLPYDVYRQGLAQIFDHVVVAEAFEVIXEKQPAQSRDLAXVTMSTVDEADKGIEMFNRYDITATMQNANKVSSMCTRMESTHREFTPDFRAYGGNLPWQVDDS

SEQ ID NO: 216617 - protein, 89 aa, Zea mays
  unsure (1)..(89): unsure at all Xaa locations
  Clone ID: MRT4577_129156C.1.pep
YKRNIAAIEGGWSGSWXIEXMLWDHITDKPLRALLAGRVTLALCGGAPMPSDTQRFTAFTIAAAITHRYGLTEACAGAAPTAWDDTIVA

SEQ ID NO: 216618 - protein, 71 aa, Zea mays
  Clone ID: MRT4577_129157C.1.pep
LLMWFRMLCIHVVGVNGRSNKIRAFLEFNLDNLGAMPRIMQSRFRLDWVGCRRAPCRAFPSSLSLFLCKVH

SEQ ID NO: 216619 - protein, 77 aa, Zea mays
  unsure (1)..(77): unsure at all Xaa locations
  Clone ID: MRT4577_129158C.1.pep
MSRTKHTARKSTGDKAPMKHLSTKAVRKSAPATVGVNKPHRFRPVTVALRXIRKFHXSTELLIHMLPFQRLVLEICP

SEQ ID NO: 216620 - protein, 59 aa, Zea mays
  unsure (1)..(59): unsure at all Xaa locations
  Clone ID: MRT4577_129159C.1.pep
MEPLYTEPTLTKNAGIGADLTXSYADMNTKRXSIDKNTIFSAMPAMYSSPRPPPXAWKP

SEQ ID NO: 216621 - protein, 51 aa, Zea mays
  Clone ID: MRT4577_12915C.1.pep
FAESTSYSILHQTWTSLRLRTTHEDDEGGPLQRNQSFLLSSGTGYLFHGGP

SEQ ID NO: 216622 - protein, 67 aa, Zea mays
  Clone ID: MRT4577_129160C.1.pep
GVPPLFWGVLCFFFLPAFRRAGGSKKKRFFSPPPKKKKKKKKKKKKKKKKKKKKKKKKKKPRRGAVP

SEQ ID NO: 216623 - protein, 135 aa, Zea mays
  Clone ID: MRT4577_129161C.1.pep
PEPFFNQASPFSVFVCYTCRFNSVKKLEILLIDASCHQCRPHERSNGERPSSSARFSTIHSSTVSRIAVRAAQCAVSCWESFICRPHERIQRTARAVARHGGDEQHEGRGVAGLWKRRRARVWCPDFQEPPAGSR

SEQ ID NO: 216624 - protein, 96 aa, Zea mays
  Clone ID: MRT4577_129162C.1.pep
PSTARMPLHIESAPLLYANDYWDPTPAPLWHTLGDDHVNDAPPADRLTGVHNCSSIYITRATTIETHEPHSTDTSTDTTQSDAAKASSKSSVSSVT

SEQ ID NO: 216625 - protein, 174 aa, Zea mays
  Clone ID: MRT4577_129163C.1.pep
MGSSTDHGGAGWRGKKQGSQLWKKALLHSSLCFVMGFFTGFAPSSVSDWTSAAAAAGSSSSSSHVVRALPAGGALNRSLLAHGAGPGYDRAASPRPLLVVVTTTESTPVASGERAAALTRTAHALRLVAPPLLWVVVEAAPDAPATARQLRATGLMYRHLTYRDNFTAAGAGKE

SEQ ID NO: 216626 - protein, 110 aa, Zea mays
  Clone ID: MRT4577_129164C.1.pep
TSTDLSSSISFRIILCNAAPDGSNLAPGLFRVIHWGGRSSCVVDTGRTNIFLHHRCGTSSLIYSWNNTHVCLSTLRFAISINAPYRARTGPWFMACISTPTVWLSIPRAE

SEQ ID NO: 216627 - protein, 104 aa, Zea mays
  Clone ID: MRT4577_129165C.1.pep
LSLGIPRTYCSGPLSTCSYYPQISIRSTSQKDQSPEHQNTQVSWFLPTLHVLCSQGLPYPHIHKSIARLFKPPLDRGIYEPETLCLCSFLIRDIVSLDRVWGAA

SEQ ID NO: 216628 - protein, 513 aa, Zea mays
  Clone ID: MRT4577_129166C.1.pep
SLSGMSQMNLSHNQLTGGIPAGLGSMPELTLLDLSSNQLSGAIPPALGTLRVNQLNLSSNQLTGEVPDALARTYDQSFMGNPGLCTAPPVSGMRSCAAPSTDHVSPRLRAGLLAAGAALVVLIAALAVFVVRDIRRRKRRLALAEEPWKLTAFQPVDFGEASVLRGLADENLIGKGGSGRVYRVTYTSRSSGEAAGTVAVKRIWAGGSLDKKLEREFASEVDILGHIRHSNIVKLLCCLSRAETKLLVYEFMGNGSLDQWLHGHSRLAGTGTAMARAPSVRREPLDWPTRVKVAVGAARGLYYMHHECSPPIVHRDVKSSNILLDSELNAKVADFGLARMLVQAGTTDTMTAVAGSFGYMAPESVYTRKVNEKVDVYSFGVVLLELTTGRLANDGGEHGSLADWAWRHLQSGKSIAEAADKSIADAGYGDQVEAVFKLGIICTGRQPSSRPTMKGVLQILQRCEQAHQRTFDEKVADYDAAPLLQVHGGSRRKQLSDAEVIDDDGKGGFDCNV

SEQ ID NO: 216629 - protein, 85 aa, Zea mays
  Clone ID: MRT4577_129167C.1.pep
NKTYKKKKEGFIKKGRRLYTSPTRLPYLAFPSFSPTVHVPTYPTRLTTTQDLINSFNFSAFNNFSSQPPFPNFLTNAITCIISHF

SEQ ID NO: 216630 - protein, 80 aa, Zea mays
  Clone ID: MRT4577_129168C.1.pep
WRPCTPGTAPRRRSSPPSAACASAGRRSGGPSSRAGRRRRRAHPCGAAGVRGLVRHGDVLVEGLRADPLLQPAPALVVQR

SEQ ID NO: 216631 - protein, 74 aa, Zea mays
  Clone ID: MRT4577_129169C.1.pep
IGGSIPGGWGVLNDSLGRKKIPCLKRGLFKIYNPFFGTLGHPTFFFWNPSGAFFPPFFSGGGGPREGVFFRPGG

SEQ ID NO: 216632 - protein, 82 aa, Zea mays
  Clone ID: MRT4577_12916C.1.pep
YTLVSVYSDDRVGRRMLLLEDGVQMCLSQVAIVVELGIKVTDHSDNLGHGWAIMVVGMGCTFGYYFGWSWRPLGWIIPSETF

SEQ ID NO: 216633 - protein, 86 aa, Zea mays
  Clone ID: MRT4577_129170C.1.pep
IRRNRDHYPTERPSHITWLRKRLSLFIVRYRQYGGGLECLCIQPFKENDLCCECCEFMGLLSWPDMVTFKGPFMARILPEARTSSS

SEQ ID NO: 216634 - protein, 121 aa, Zea mays
  Clone ID: MRT4577_129171C.1.pep
NLTPARRRPPFFLTNHSPFPPGGFNDGGQNKIYPPPGDDRGPLFFFFVLLKKISPCGPGPFLLHGSIFFPPPPFFFFFRFAPKKKKKKKKPGFFKKRSGPFGCLVFSPPPSLGGTQFFFLA

SEQ ID NO: 216635 - protein, 148 aa, Zea mays
  unsure (1)..(148): unsure at all Xaa locations
  Clone ID: MRT4577_129172C.1.pep
HASPQVFKKGINPPPVIQFNKGPFHKYNFFQLYFFPAGNGTFIXFPPPQQYTFSKEILFPPFKKLILKQQFNQGGDPFQLPGVPIDKXTPDRRLFFRFFQICMEKNFNFFSSPAMPFYFIPPQKKSPSLLFDFPPFPFGKKPIINLFF

SEQ ID NO: 216636 - protein, 111 aa, Zea mays
  unsure (1)..(111): unsure at all Xaa locations
  Clone ID: MRT4577_129173C.1.pep
MLSLYLPPSLPPSPSSETSPFRHGLLLVASSRRNASQIPDAACRTPRRPARDMGGCHAKPLTHDADRSPPHAAPATPPPGSATPXTPXPGKKHWAAPPVLXSLTPSPSPAH

SEQ ID NO: 216637 - protein, 273 aa, Zea mays
  unsure (1)..(273): unsure at all Xaa locations
  Clone ID: MRT4577_129174C.1.pep
SRPAGSDDDRSVAADSWSIKSDYGSTLDDDQRYSDTAEVLLASSSASSVAAPSTTVAVHPSSDFSFDKDVHDSSYXASLAGLXNFQDGAYAEDLANFHERSHADDWFGTDIMDIRVCWTKNLCSSRDLPSCSVLDIGTGSGRLLQQLAKQGFSDLTGIDYSESAIELARSLAIGDGFEHINFLVDDVLESKLERRFELVMDEGTLDAIGLHPDGPVKRMMYWQSVDSLVSRGGILXRTKDELVQEVENFNQRKLGAVGSGSEGLPASEAAVVS

SEQ ID NO: 216638 - protein, 308 aa, Zea mays
  Clone ID: MRT4577_129175C.1.pep
MAAAPPGEMASDDDRSVAADSWSIKSDYGSTLDDDQRYSDTAEVLLASSSASSVAAPSTTVAVHPSSDFSFDKDVHDSSYVEPPLLGLQNFQDGAYAEDLANFHERSHADDWFGTDIMDIRVGWTKNLCSSRDLPSCSVLDIGTGSGRLLQQLAKQGFSDLTGIDYSESAIELARSLAIGDGFEHINFLVDDVLESKLERRFELVMDEGTLDAIGLHPDGPVKRMMYWQSVDSLVSRGGILVITSCSRTKDELVQEVENFNQRKLGAVGSGSEGLPASEAAVFSYLDHVQSYPSVDSSCITTVAFLHK

SEQ ID NO: 216639 - protein, 114 aa, Zea mays
  Clone ID: MRT4577_129176C.1.pep
SSGHAFDDFEFVLGKPQDPGEDKALATFTLSQQLLQSIKSAVAHEAARRGMVTPPRCSSILATYGFIWSCYCRARGAAAAAAERSYFLFSVDQRSRLKPAAVPEKYLGNCCCPV

SEQ ID NO: 216640 - protein, 332 aa, Zea mays
  Clone ID: MRT4577_129177C.1.pep
MAGIRWPPEDPEIFPSRMVSGGAWVPVAPPGEMASDDDRSVAADSWSIKSDYGSTLDDDQRYSDTAEVLLASSSASSVAAPSTTVAVHPSSDFSFDKDVHDSSYVEPPLLGLQNFQDGAYAEDLANFHERSHADDWFGTDIMDIRVGWTKNLCSSRDLPSCSVLDIGTGSGRLLQQLAKQGFSDLTGIDYSESAIELARSLAIGDGFEHINFLVDDVLESKLERRFELVMDEGTLDAIGLHPDGPVKRMMYWQSVDSLVSRGGILVITSCSRTKDELVQEVENFNQRKLGAVGSGSEGLPASEAAVFSYLDHVQSYPSVDSSCITTVALLHK

SEQ ID NO: 216641 - protein, 66 aa, Zea mays
  Clone ID: MRT4577_129178C.1.pep
QQRVTSTRNKVRITDRMWGRLLSSTNQPSFLSQKDIYPAKKADKAAPRIKTKKDPKNPSPPGLANG

SEQ ID NO: 216642 - protein, 102 aa, Zea mays
  unsure (1)..(102): unsure at all Xaa locations
  Clone ID: MRT4577_129179C.1.pep
EKAQPELLACSLLAPVAARNQFLFLNPASYLAQQILLPFNKLXSTSSSFLLDTAPLXLHHYKQIADHHITLLQLQHLAACVLLALTDXSLFYQRHIIECAPF

SEQ ID NO: 216643 - protein, 59 aa, Zea mays
  Clone ID: MRT4577_12917C.1.pep
NMNRLPLLIKSIAIPEGMKVSWDITVHISDANLIGESVELLREPCRWSEEKKVDQELDR

SEQ ID NO: 216644 - protein, 112 aa, Zea mays
  unsure (1)..(112): unsure at all Xaa locations
  Clone ID: MRT4577_129180C.1.pep
NITGGNRYPLPNXSAPXYITVGDGGNQEGRASMFXDPQPEYSAFREAXSYGHSTXLEIXNRTHAIYHWNRNDDGKKVPTDSXVLHNQYCGHNRRRRKLKHFLLKVIDEVASM

SEQ ID NO: 216645 - protein, 202 aa, Zea mays
  unsure (1)..(202): unsure at all Xaa locations
  Clone ID: MRT4577_129181C.1.pep
VAHTSXVLTRAQVTLGNILKESGQEGIPVNKTWRLNERHYGSLTGLNKSETAAKYGEAQVQIWRRSFDTPPPPMEPDHPYYNTIVKDPRYAEGPSEAEFPMFESLKLTIARTLPYWNDVIIPQLKEGKSIIIAAHGNSLRGIVKHLDNLSDDAIMALNLPTGIPFVYELDENFKPVVSMKFLGDEETVRKAIESVAAQGKAK

SEQ ID NO: 216646 - protein, 56 aa, Zea mays
  Clone ID: MRT4577_129182C.1.pep
RYTIFHPSLLSIVLGFVRKFQKGDIFCQCLAVLVTSRIGISIHILKGEPKHLGYKR

SEQ ID NO: 216647 - protein, 121 aa, Zea mays
  unsure (1)..(121): unsure at all Xaa locations
  Clone ID: MRT4577_129183C.1.pep
WDQAALRGYLGRGHAAAVRGADAEATRXERLLRRRETVDAVRGDERERAGGGGALMAXLXXLDAVPGRYPXMRDARXAVSRXXXGLGGVXXAVPQTCGVPVCLGVLVGIWGEGPVPVPSGL

SEQ ID NO: 216648 - protein, 109 aa, Zea mays
  unsure (1)..(109): unsure at all Xaa locations
  Clone ID: MRT4577_129184C.1.pep
PPVCLMSWNHTLLTLEVQTVVRPGFGALLASNLQEPAAVLHQAPWDHPVGHGIRAHLLQELALANLDAYAYNDQCRSFNQLTVSIYAAYLXQLLPLTQVVVEYPERFVP

SEQ ID NO: 216649 - protein, 196 aa, Zea mays
  Clone ID: MRT4577_129185C.1.pep
MDEVWCGLDLQLQADGIHAGPDLHGHDHDPFWSALAECAASFLAGDADDIGGLVASAGDVVHAKADGMDTSSFFADNDHHGLTLRRDEQQQQQPVHSSSSLSSKRSLSIDSGGSSSSTFIPPLDGAAAAAFSPAPPQPQDPFAGDDEAIMLAMMAVISSASPSSSESSSPPHRAAAAGAVQPRVHLHGGDEGTTDA

SEQ ID NO: 216650 - protein, 171 aa, Zea mays
  unsure (1)..(171): unsure at all Xaa locations
  Clone ID: MRT4577_129186C.1.pep
GSRVFNAPFWVFHNYVLGDFTGSARIVXALWLLCFFGLLYRGFXKTFGLPRSLGCFGSGGATDYTQWLFXQWLFCWPCVLAQXVRTGNLYDAKNGSFYEKVMDGDGVETDVGSVDTAELPISSGVEEANGTDVKLTVDGEMIPPTQSVIEFGEREGIDSEVVANGGVQLKS

SEQ ID NO: 216651 - protein, 71 aa, Zea mays
  Clone ID: MRT4577_129187C.1.pep
RGGKRWTPLKPVTACFPSRPAQTIAGWFLVGCNPHDCPPRVFVHQFLIWARSRPLCRMIACSATRNRFLVA

SEQ ID NO: 216652 - protein, 70 aa, Zea mays
  Clone ID: MRT4577_129188C.1.pep
PAGHVIKAPDLDVQGMEGVVKQYVGVWKGKRVTANLPFKVEVQLAVEGQPKPVRFFVHLREDEFEFVDGE

SEQ ID NO: 216653 - protein, 102 aa, Zea mays
  Clone ID: MRT4577_129189C.1.pep
MRVTSYQRLSSSQPEGGAARAWVSLRRAAAGVARLYAARRWRVSARRLWVARPLRAKAAAARYGYDSASYARNFDDGVWMAEEGVSWNARSFGACRLAAAQS

SEQ ID NO: 216654 - protein, 59 aa, Zea mays
  unsure (1)..(59): unsure at all Xaa locations
  Clone ID: MRT4577_12918C.1.pep
CGVISPRFDVRVKEILGGTARFFPFXQLVNLLLPPSAGIMDHEEARRKNVVGKCLGSFI

SEQ ID NO: 216655 - protein, 87 aa, Zea mays
  Clone ID: MRT4577_129190C.1.pep
GNKHSGTFFYFLFFLFFQGKLLSMPCARSLCIIIIVLGNLSATPPGYNLLVVVFVRVQLFEQGGANGLATNTTWEMSSSGVSLNSIV

SEQ ID NO: 216656 - protein, 252 aa, Zea mays
  unsure (1)..(252): unsure at all Xaa locations
  Clone ID: MRT4577_129191C.1.pep
MLKGFASVESLNLAKTMSPEEYRARKVALVTGVTGQDGSYLTEFLLEKGYEVHGIIRRSSSFNTGRIEHIYRDRHETGVKFFLHYGDLTDSTCLVHIVSKVLPTEIYNLAAQSHVKVSFDMSEYTGDVDALGTLRLLDAIRTCGLTDRVRFYQASTSELYGKVVETPQKETTPFYPRSPYGVAKLYGYWIVVNYRESYEMYTCNGILFNHESPRRGRTFVTRKITRAVADIHLXRQDCLYLGNIDAKRDGGH

SEQ ID NO: 216657 - protein, 141 aa, Zea mays
  Clone ID: MRT4577_129192C.1.pep
GGAMCGGPNPRARLGAPGENYIQTRGGGDNRGPRGGMFARLNRLARDEGGVKKYPYISRGGLANFYWAQFFCSFFSPGESKSEVKALFSQGIFCIRFKKKIGGGIWQTKCKFPPRKYERERERIPRMFYKRLYKSNPLLPP

SEQ ID NO: 216658 - protein, 84 aa, Zea mays
  unsure (1)..(84): unsure at all Xaa locations
  Clone ID: MRT4577_129193C.1.pep
GRVGALNVDVNEFQTNLVPYPRIHFMLSSYAPVISAENAYHEQLSVAENHNSAFEPSXMMASXGSRHGXYMXCCLMYRVMCPRM

SEQ ID NO: 216659 - protein, 83 aa, Zea mays
  unsure (1)..(83): unsure at all Xaa locations
  Clone ID: MRT4577_129194C.1.pep
MGLSTVYSPAGPRLVPAPLGRXRSGQPRRPRRAPLATVRCSADAAKQAQDGVATAVATEAPASQKESFGDYCTTYYLKAADKT

SEQ ID NO: 216660 - protein, 134 aa, Zea mays
  unsure (1)..(134): unsure at all Xaa locations
  Clone ID: MRT4577_129195C.1.pep
GWPPSPGVPPPKGEPPSPFFPPPGGXPIFFKTPPGKTPTLGGEGSGPPPHXGEDPGQRGGPPGPTGFYFFRPTPGGWAPPSRVPPPKRGPPPPFGPFPGGAVKXGGXPPMGPGCLGPPPKGGCPKIFCLGQGWV

SEQ ID NO: 216661 - protein, 421 aa, Zea mays
  Clone ID: MRT4577_129196C.1.pep
MDLLLRRRLLAVVATAAVLAVCAFTAAEGFDILQILGKHDEFSQFCKLLNETHLAGDINRDRTITVLAVANGDMGHLAAGHYSLGTIRHILELHVVADYYDDKKLKQLSHAATAASTLFQRSGFAPGMAGYVNITQHRGGKVSFIVDDAADSVKPVTYVKQIESHRYDYSVLQVSGVLSSPEAEAPVAPPAPVNLTDILSKKYCKSFAGLLAADPKVFDTLNGTKDTALTVFCPVDAAVAAFMPKFKNLTAKAKTAILLYHAVPDYYSMQFLKSNKGKVTTLATTSVAKKDYTYEAESKDDTVTLDTTVVTSTIQATVRDDDPLAVYACSKFLQPKELFKAKTADLAPAPAPQGPKKKSKKKPTGTSAASAPSDDESADGPSADDDSSDDAADKAAAAPSYLSARWVTAAVTTAVALALAA

SEQ ID NO: 216662 - protein, 64 aa, Zea mays
  Clone ID: MRT4577_129197C.1.pep
QIIFNSNLFLTRIFLAENFLFFSVIWKSIYHILFLCFDNFMLKNLFLNYCFSFYSITCKYMIIM

SEQ ID NO: 216663 - protein, 580 aa, Zea mays
  Clone ID: MRT4577_129198C.1.pep
NKDAPPIHTKLNPRSRHPRAVRPLRAHPHPPPSRAAHAPAFLFGAFLGLVRELAATAAAFSKLTVQDLRKLIPPEFYPSWVSFTQKQKLKWLNQELTKIWPFVNEAASELIKTSVEPIFEQYKSFILASLHFSKLTLGTVAPQFTGVSILESDDSAIIMELELQWDGNPNIVLDIQTTLGISLPVQVKNIGFTGVLRLIFKPLVSEFPCFGAVCCSLREKSKVEFTLKVIGGEMTAIPGISDAIEGTIRDTIEDTLTWPNRIIVPIVPGDYSDLELKPTGVLEVKLVEARDLKNKDLVGKSDPFALIYIRPLHDKTKKSKTINNDLNPIWNEHYEFVVEDISTQHLTVKIYDDEGLQSSEIIGCARVDLADIQPGKVKDLWLDLVKDLEIQRDKKPRGQVHLELLYYPYAKHEGVPNPFANQIQLTSLEKVLKTESNGYDINQRKNVIMRGVLSVTVISAEELPPMDIGGKADPFVVLYLKKGETKKKTRVVTDTLNPIWNQTFDFMVEDALHDLLMVEVWDHDTFGKDYIGRCILTLTRVILEGEFQDTFVLQGAKSGKLNLHFKWTPQPIYRDRDRDQ

SEQ ID NO: 216664 - protein, 608 aa, Zea mays
  unsure (1)..(608): unsure at all Xaa locations
  Clone ID: MRT4577_129199C.1.pep
RPPTRPGSWKWLLTEFALYYGVSDAYTRLRYLSYIMDVATPTADWLNLVHGLLLPILMKSDGTATLSHQENRILGEVEEQIEQTLAMVCENYKSLDDSIPLGLAEDFRPPTGLAAAALEPAIKLYSLLHDVLSPEAQLRLCGYFQAAARKRTRRYMIETDEYVSGNSEGFRVDLVTVTTAYQKMKSLCNNLRSEIFTDIEIHNQHILPSFVDLPNLAASIYSVELSNRLRAFLVACPPAGPASPVADLVVATADFQKDLASWNICNIKAGVDAKELFHLYIVLWIEDKRRMLLENCRLDKVKWSGVRTQHMTTPFVDEMYDLLKKTLTEYEVIICRWPEYIFVLENAIADVEKAVIESLEKQYADVLAPLKDCIAPKNLAXKVVQKLTKRNSTVPYTVPEDLGILLNTLKRLLEVLRPRIESHLKSWSSCIPNGGNSAAIGEKLSEVTVTLRAKFRNYMQAVVEKLSENTRMQNTTKLKKIIQDSKELVIESDIRSRMQALKDQLIEAINHVHKVSEVHVFLAICRGFWDRMGQDVLSFLENRKENKAWYKGARVAISVLDDTFASQLQQLLGNTVPPKDLEPPRSIVEVRSILCKDAPRQKNSSFYY

SEQ ID NO: 216665 - protein, 99 aa, Zea mays
  Clone ID: MRT4577_12919C.1.pep
EGPSGSPKGKTWGPINPRSHKGPPQFQTWERRVNQSPKSVGGRRPTPIFFKNGLCVPCNQTRLWVKVFKNWGGDFHFFFNGSRNVVLPNGCFCHGPFPI

SEQ ID NO: 216666 - protein, 110 aa, Zea mays
  Clone ID: MRT4577_1291C.1.pep
MQAEEDEQPDGQDHQEDVQQPASEPQEKAELEDTDGRESPLMSTSIARRVHMRTSSENLADGAEEGSPSKGKDYKRTLACKLYGERIQLKVCRDRAMAGRAPTTWKHRTI

SEQ ID NO: 216667 - protein, 122 aa, Zea mays
  Clone ID: MRT4577_129200C.1.pep
GVLEVKLVEARDLKNKDLVGKSDPFALIYIRPLHDKTKKSKTINNDLNPIWNEHYEFVVEDISTQHLTVKIYDDEGLQSSEIIGCARVDLTDIQPGKVKDLWLDLVKDLEIQRDKKPRGQVS

SEQ ID NO: 216668 - protein, 146 aa, Zea mays
  Clone ID: MRT4577_129201C.1.pep
KKKGGGAGAKPGPGNTGRDQKGERGGTGDRGGGGTRTNKGEKRGKKIERHIEKHPKNKHDQTEPKKGPKNALNTNQNKTQPSKPTQKGPPIKTNLAKRKIGKALGTGQRGQKACHQETLGKQAKQKPVKKDGWDKQHKGRGLIQPF

SEQ ID NO: 216669 - protein, 396 aa, Zea mays
  unsure (1)..(396): unsure at all Xaa locations
  Clone ID: MRT4577_129202C.1.pep
MAFLFGAFLGLVVGVAVVMAFARFENSRAEQRRELAATAAAFSKLTVQDLRKLIPPEFYPSWVSFTQKQKLKWLNQELTKIWPFVNEAASELIKTSVEPIFEQYKSFILASLHFSKLTLGTVAPQFTGVSILESDDSAIIMELELQWDGNPNIVLDIQTTLGISLPVQVKNIGFTGVLRLIFKPLVSEFPCFGAVCCSLREKSKVEFTLKVIGGEMTAIPGISDAIEGTIRDTIEDTLTWPNRIIVPIVPGDYSDLELKPTGVLEVKLVEARDLKNKDLVGKSDPFALIYIRPLHDKTKKSKTIVSAFSCLRQMNVILTYSSXNNDLNPIWNEHYEFVVEDISTQHLTVKIYDDEGLQSSEIIGCARVDLADIQXGKVKDLWLDLVRTXXYQRDKK

SEQ ID NO: 216670 - protein, 74 aa, Zea mays
  Clone ID: MRT4577_129203C.1.pep
TLEAVGAVMMFILMCWLGASVVRLTLDILHMDYVMEHLVSFLMRSYRPSRDKIVCPQRFAYGWSRRLVKGPPQT

SEQ ID NO: 216671 - protein, 73 aa, Zea mays
  Clone ID: MRT4577_129204C.1.pep
ATEGPNLCINHCIFLGSAGTMYMCWLCLTVMTTEQHQASLSMRSIDWVMIGHLPAMDPGSGCFTSVATVDEFV

SEQ ID NO: 216672 - protein, 35 aa, Zea mays
  Clone ID: MRT4577_129205C.1.pep
GHEYGLDGGVDFEYEFVAGGLAEAEALGHEPERLP

SEQ ID NO: 216673 - protein, 34 aa, Zea mays
  Clone ID: MRT4577_129206C.1.pep
PGRTKYAYFPLLLANNIINHRGSFITLTNCHLGL

SEQ ID NO: 216674 - protein, 72 aa, Zea mays
  Clone ID: MRT4577_129207C.1.pep
LLSCSEALVHSLELSNSLPNQSAPGCSMYMAVVMLPSPHLLISLSSGIFVQRTGAQICYELLWTILNLLCVH

SEQ ID NO: 216675 - protein, 92 aa, Zea mays
  unsure (1)..(92): unsure at all Xaa locations
  Clone ID: MRT4577_129208C.1.pep
HDARVGLTFRSPPFFCFVTAGIPHLKWFGVRGXYNVMXIDLLGPSLEDLFNFCSRKFSLRTVLMLADQMIXWVEYMHKRGFLHRDIKPGYFL

SEQ ID NO: 216676 - protein, 71 aa, Zea mays
  Clone ID: MRT4577_129209C.1.pep
KPNKTVGPQWNKLGTPFKRVPNLSPPPWAKTGGEAGDRGVEKSSFTKPLLSFWPKTPGGIYGKPKQRGLGP

SEQ ID NO: 216677 - protein, 81 aa, Zea mays
  Clone ID: MRT4577_12920C.1.pep
TPTSGELMHIIPHSTLSDEHVRANPCCAHTPPQENNTWFTRRHITRSSVLSMWRLPGDFMAPRMDSSLPIFTLYYSKTVRM

SEQ ID NO: 216678 - protein, 40 aa, Zea mays
  Clone ID: MRT4577_129210C.1.pep
NDEKSSMFSKSTELVFKSNQVCMSLCVSQGVRVGQVRYGV

SEQ ID NO: 216679 - protein, 54 aa, Zea mays
  unsure (1)..(54): unsure at all Xaa locations
  Clone ID: MRT4577_129211C.1.pep
AELRRRRRRCPIPQQRSHQHRRTSVDCPQIRLPAPRLPEXRGSDAAEPVHPTGP

SEQ ID NO: 216680 - protein, 116 aa, Zea mays
  Clone ID: MRT4577_129212C.1.pep
VNWERPPRSDQTPRCVAPLEPPVLLLALEIPVTRMILQILVTSPLALEIPVTPMILQILVTSPLTLEIPVTPMILQILVTSPQVRSTSTVAHGGLRRDGDSSTPPAKLPISDLANT

SEQ ID NO: 216681 - protein, 92 aa, Zea mays
  Clone ID: MRT4577_129213C.1.pep
SSRPFANTAGGGHFRKVDCEKLAASAISDYQREALVTWKQHARGAYEQLDKERNRPIVNDEAATELGLVPSVPLHGAHQDWIRYAERKLSFL

SEQ ID NO: 216682 - protein, 63 aa, Zea mays
  unsure (1)..(63): unsure at all Xaa locations
  Clone ID: MRT4577_129214C.1.pep
VQGYFVWFLMNNFEWLSGFTERYGXIVYVDRINNCTRYIKEFANWLKQFNAAKKPSKKILTPV

SEQ ID NO: 216683 - protein, 45 aa, Zea mays
  Clone ID: MRT4577_129215C.1.pep
MHCYCICMKKKKKKKKKKKKKKKKKKKKKKRKKKKKKKKNKGAPP

SEQ ID NO: 216684 - protein, 80 aa, Zea mays
  Clone ID: MRT4577_129216C.1.pep
RSAPDPISYAVFVCPPPHTNPDRSPYRRLLLHHRRIRLPSSPRYQGRYRRDRPHRGRRWLLCPRLLRLFLIDRSGCDPSP

SEQ ID NO: 216685 - protein, 155 aa, Zea mays
  unsure (1)..(155): unsure at all Xaa locations
  Clone ID: MRT4577_129217C.1.pep
AFEPSSMMAKCDPXHGKYKACCLMYRGDVVPKDVNSSVAPLKTKGPLPFVGWGPTGFKSGLNYQPPSVGPGGDLAKVQPPVCIISHSPSVVEVFFRLGPKFGLMFPKGAFVPWYFRXGMEEGEFXRPLXDLAALQKDFQEVGSXFIXGEEGDYGY

SEQ ID NO: 216686 - protein, 78 aa, Zea mays
  unsure (1)..(78): unsure at all Xaa locations
  Clone ID: MRT4577_129218C.1.pep
GRHRPXMSEVLEXMVRKIVENSETGTPEHPLISNSEELVSDERKRKRLGLKRRIADIKAGEGRWFAWQRWTPKLVRTQ

SEQ ID NO: 216687 - protein, 134 aa, Zea mays
  unsure (1)..(134): unsure at all Xaa locations
  Clone ID: MRT4577_129219C.1.pep
MKGAQDTRHRKKLDLQVLAPFPGCLGRMIDMFDLSNGVVATKMLTEKAHRDVSPAGKDRSNTFKMAIIPPAQTEDKQIDSQTRRNSPTKRSNSPTKRSGAAPVKMIMEQGMWKERMPDEEPLNVXARLMGLHDA

SEQ ID NO: 216688 - protein, 187 aa, Zea mays
  Clone ID: MRT4577_12921C.1.pep
LNHFTHSALLPEETMAEATPTMVFVYGTLKRGFPNHSLLVASATPFVGAASTAEPASLIIGPYSVPFLLPTPASASSGRVVSGELYAPSPAALAELDALEGTHIGVYERRPITVVVDGSGEVVQAEAYFAHPSYAEALWRRCGGEEAEIGEYTVDHAGEYVPKSERLADAAGLIDAIHKFVATATDN

SEQ ID NO: 216689 - protein, 54 aa, Zea mays
  Clone ID: MRT4577_129220C.1.pep
TSIITRKRNLLSYRQKFYFTGTPLILNQLTPTGRSCFGSCTLKSNQLFPFVHSP

SEQ ID NO: 216690 - protein, 74 aa, Zea mays
  unsure (1)..(74): unsure at all Xaa locations
  Clone ID: MRT4577_129221C.1.pep
LREHXYKSGKPALPWRQRLEITIGAARRLHYLHTAAIYTSIXLDVSATTILVDDNWVARVSDFGLSKTGPTAMN

SEQ ID NO: 216691 - protein, 76 aa, Zea mays
  Clone ID: MRT4577_129222C.1.pep
MSSGALLPKPQMRGLLAKRLRVHIVGAFVVALGVAAAYKFGVAEPRKKAYADFYRNYDSMKDSEEMRQAGVFQSAK

SEQ ID NO: 216692 - protein, 100 aa, Zea mays
  Clone ID: MRT4577_129223C.1.pep
KIFVRGSFSSSLKGEKILSKGEHSFRGSNNLVLQLVLIDKSFMRAVLFASYMLLMSSFSVVDAKGGEVVGTKAMKMLSNIKHHQIKKKFILQVFLAVWSK

SEQ ID NO: 216693 - protein, 33 aa, Zea mays
  Clone ID: MRT4577_129224C.1.pep
SSDVTPSALLTAARFSANLCSSARCPTEHRIVH

SEQ ID NO: 216694 - protein, 78 aa, Zea mays
  Clone ID: MRT4577_129225C.1.pep
AVRPSPRPPPLRGGGGGKKKKSAVARFSRNLLKHSLCSLAAVSLSILLSQLRNYHPYEITTLGYVVSETASCITVLAI

SEQ ID NO: 216695 - protein, 109 aa, Zea mays
  Clone ID: MRT4577_129226C.1.pep
SNITLFLDSYIVRSAQMSLHVAAASALLCAGPNRNGKLASCSGLSPNNQADCLTKSDVASLVLRKDQGQPEVDLAACVFFFNQQRSAVAPSREKDVPPPPGVPVEWRRK

SEQ ID NO: 216696 - protein, 518 aa, Zea mays
  Clone ID: MRT4577_129227C.1.pep
MAAGSIVVDFPSMGAALCFPSLDSLLRDSASGFLAAVSNAPAPGAADLTNFHRVFSRVLSAYPDPPLEAVWFFSALSFHDRPDDLRSLLQLLSAFTASSPGTAKPLALLAPVVSELFHADKPRRETETLVEAVLSYISICSNRSAPSSTVGATADAVRLLPAFGDLVKVWSVRYSRERCPFQVLFPLAGDEARRELMKEGCSVDYLAGVVLVEAFLLRLCLKVQNATGVPRSELQKELKIWAVSSIPVFQNHRFFGILLNMLLNSPLPVYSLVSADDEILLRDVLYDSLILVDYSFINNGVGVDLLPIYVLRLVITLDAVNDARRKGDQGRAVSFINAFSTSNVPNFLIKWATFQSGSGALSKPITNTPQSIIKWLVDLEVKGLKVFGDYSSCIMERFAYDGVKNGHGNMIHSDADLFFFDKQSGREFMDTKGSEDEAVEEMETAGNAFMAAAQSMKGVTDGMRKRKSCGYEDAAAVKFVKYKVEDSSLKDYLSAANGISSGSEVENPQSDDEMEESN

SEQ ID NO: 216697 - protein, 308 aa, Zea mays
  unsure (1)..(308): unsure at all Xaa locations
  Clone ID: MRT4577_129228C.1.pep
MSDTRPGVTPLLTEFCQWQFQFFLTHVICVVFGFLVTQSADDEILVRDVLYDSLILVDYSFINNGAGVDLLPVYVSRLIITLDAVNDARXKSXVTKLSWGGGVEISSHFISADRRKGDQGRAVSFINAFSTSNVPNFLIKWATCQSGSGALSKPISNTPQSILKWLIDLEVKGLKVFGDYSSWVMRRFAYDGVKNGHGNMIHSDADLFFFDKQSGREFMDTKGSEDEAVEEMETAGNAFMAAAQSMKGVTDGMRKRKSCGNEDAAAVKFVKYKVEDSSVKGYLLAANGMSSGSEVENPQSEDEMEESD

SEQ ID NO: 216698 - protein, 111 aa, Zea mays
  Clone ID: MRT4577_129229C.1.pep
MVHNQVKKLYPLNSKLLRRNEQAAFLGISNHSSQQVDHFFFLESGWGISSSSSSSSDSSSSSSLPWSPSSSRRHNLFILSTMIFVVIASAFAIGCRIIIMSIVFFFILMVI

SEQ ID NO: 216699 - protein, 102 aa, Zea mays
  Clone ID: MRT4577_12922C.1.pep
RKPMQGHACNKGILTPTKKNWKARDPGPGKKKKKGKGKEKPNPAKGPGTPKKNRTTKTTQGPSLLLAYAGTYICPGGGAGGPLLNLSRGLVGKKTPPPVFVF

SEQ ID NO: 216700 - protein, 59 aa, Zea mays
  Clone ID: MRT4577_129230C.1.pep
LLELPLPSALESHGISSSPWVWGLRKERIFNAFNFCDQVTTFPSFMTYTKYGPRFIQDI

SEQ ID NO: 216701 - protein, 396 aa, Zea mays
  unsure (1)..(396): unsure at all Xaa locations
  Clone ID: MRT4577_129231C.1.pep
MTPVTALLGGTGGPPASVPDPWPARHARHYSVNFSPLHGGDGAGPTMDGFARTRPNVDDVHVNISKPRIEAWNRDTLPIYNPGRHDAGKNGRWRNLFFSTDGEKHVAEDDIIFVSANTPTKTRGLGAGKAADLTYWESAARMIADVSKSDKIVVEKSTVPVKTAEGIEKILTHNSKGINYQILSNPEFLAEGTAIEDLFKPDRVLIGGRETPEGRKAVQALKDVYAHWVPEDRILTTNLWSAELSKLAANAFLAQRISSVXAISALCEATGANVTEVAYAVGKDTRIGPKFLNASCGFGGSCFQKDILNLVYICECNGLPEVANYWKQVIKINXYQKSRXXERXVXFNXQNXPXKKIAXXXXAXKKGNRETRXXPGIDXXKGXXXXKGQIXIXXPK

SEQ ID NO: 216702 - protein, 112 aa, Zea mays
  Clone ID: MRT4577_129232C.1.pep
MSPHKPTLQYVLSNYETNLHRKRLLDNIHGITKPTIPSLSHMCHLNLISVLIYKETCSVLKILLDNIIHDAVTYTQHARRKTDTSIHLFYPLNRHSQTLYTLTRSTRYLFSF

SEQ ID NO: 216703 - protein, 179 aa, Zea mays
  Clone ID: MRT4577_129233C.1.pep
RFGRDVKTNNILLDNSFHVKVADFGLSRLYPPEVTHVSTVPQGTPGYVDPVYHQCYKLTEKSDVYSFGVVLVELVSSKPAVDMGRSHSEINLANMALNRIQNHELERDSRPSMKEVVEALNRIRNGDSLENNKTDRSSSSPKEDARLLTSSSIQYSPDSVIHRFHSQSTTHSAASNASG

SEQ ID NO: 216704 - protein, 394 aa, Zea mays
  unsure (1)..(394): unsure at all Xaa locations
  Clone ID: MRT4577_129234C.1.pep
GGLLVXVSVGYFVGRKHKRSKQAMAPMACRRMQSSMQSYSKILEVGDSPHIFTYGDSLENNKTFRSSSSPGDGGFGTVYKGKLRDGRVVAVKRLYKNNYKRVEQFINEVDILSRLLHQNLVILYGCTSRSSRDLMLVYEFIPNGTVADHVHGSRASERGLTWPRRMSIAIETAEALAYLHAVEIIHRDVKTNNILLDNSFHVKVADFGLSRLYPPEVTHVSTVPQGTPGYVDPVYHQCYKLTEKSDVYSFGVVLVELVSSKPAVDMGRSHSEINLANMALNRIQNHEVGQLVDPELGYETDGETKRSIDLVAELAFRCLQLERDSRPSMKEVVEALNRIRNGDSLENNKTDRSSSSPKEDARLLTSSIQYSPDSVIHRFHSQSTTHSAASNASG

SEQ ID NO: 216705 - protein, 81 aa, Zea mays
  Clone ID: MRT4577_129235C.1.pep
SCVPCHLHFQCSELYYHVFRAKPVMKNPCQMQGVIVFSRIHFHKHVVPVFAYICAILCIGSLKSALFLDEFRTTTIEMHLV

SEQ ID NO: 216706 - protein, 78 aa, Zea mays
  unsure (1)..(78): unsure at all Xaa locations
  Clone ID: MRT4577_129236C.1.pep
RAVGAAAAKSAWCWCWACPVGWPLSCARTXXGARGGTSGKAGRRTRQRRGGHRTRWGPGAGTAKSLCVWISALGMRWT

SEQ ID NO: 216707 - protein, 86 aa, Zea mays
  Clone ID: MRT4577_129237C.1.pep
GKKKKKKKKKKKKKKKKKKKKKKKKKKKKKNLFSRRLPRAFALALIGPKPGARPQKNWLAPFKPGGNPGGGSSWKGGPVGPPRRTP

SEQ ID NO: 216708 - protein, 85 aa, Zea mays
  Clone ID: MRT4577_129238C.1.pep
VLEHNTSYLGKALYSRAGGEDDDGTHRPWAATATAFPTAYVRALMAPGILGPMSEDKAEDLTDQFPVNYKGDTVLLYCETETFAK

SEQ ID NO: 216709 - protein, 80 aa, Zea mays
  Clone ID: MRT4577_129239C.1.pep
VVFFFFFFFFFFFFFFFFFFFFGPEIGGIPRPSTQLGTTRFWVSPAIPKGGGVISWPLFPGGQPKRGGLTKGGYFGGAGL

SEQ ID NO: 216710 - protein, 141 aa, Zea mays
  unsure (1)..(141): unsure at all Xaa locations
  Clone ID: MRT4577_12923C.1.pep
GIISDYLPFQHLPIPSGSFHSSPLLAWKRSIATSHGCGTIQGEIGVRVPLHRQDVQLCPENXPYITTDYMTYMHQDHTLHGQXEHTHIXLEDSKRLLFRDKSXTACCIMNPDHIPXGEAGDDYVVEDTGEFTDNDKDGAHL

SEQ ID NO: 216711 - protein, 130 aa, Zea mays
  Clone ID: MRT4577_129240C.1.pep
IFRAPPRAAVPYSAWELGFAPLVGVELRRPSWCSGGHGRRPLPRPNRRGREAGRGEEEGGRRRGGRLLHLLRRWRPRRLRLEVRRRSARLLPDCSQCRRRLQAAESRSFPPVRFLSVRSIGMSLIYCVYF

SEQ ID NO: 216712 - protein, 163 aa, Zea mays
  Clone ID: MRT4577_129241C.1.pep
RGSRVGPPRGPPRRPPRRPPRRPPRRPARRSARRPARRPPRPSGGPPWGVVGKIGKVIGSLGTWTAPLAVPWGIFLAPLSFFLCACLVSSTAPLQQIWALALLFRRCFFLAGRLCLSVVPLFVPCFPPFRLPFVYLPVVFCSPLWLAFCPFLCDEVKPWCFDA

SEQ ID NO: 216713 - protein, 194 aa, Zea mays
  Clone ID: MRT4577_129242C.1.pep
FYSFFFFFFFFFFFFFFFFLGGAEKVYKFKKNKIFFPAANRGEGGRENPPKTQNPQILFIEIYQKKKGMRRGGQGHENKTGRDRTGAPLITSNKWAPLGRSFWRACSPSTGARMKKGRGPTKGPRGLGETSFSLPLPPKGRGPPGPSKNFWACSRNLPMPGVKKRQLFSMSPLPENRCLWGNVSNNRGKGRPCF

SEQ ID NO: 216714 - protein, 327 aa, Zea mays
  Clone ID: MRT4577_129243C.1.pep
MAAAADTSEASAAGIALAEANINWERLDKTRFHVIGAILFTAQQGALHPTAVVKTRMQVAEGGLAHMSGFAVFRRILRSDGIPGIFRGFGTAAVGALPGRVLALTSLEISKEMTFKYCEHFDLSEASRIAIANGIAGLMSSICSCSYFVPLDVICQRLMVQGLPGMATYRGPFDVINKVVRTEGIRGLYRGFGITMLTQSPASALWWSAYGGAQHAIWRSLGYGNDSQTKPSQSELVVVQATAGTIAGACSSIITTPVDTIKTRLQVMDNYGKGRPSVMKTTRLLLDEDGWRGFYRGFGPRFLNMSVWGTSMIVTYELIKRLSVKSE

SEQ ID NO: 216715 - protein, 519 aa, Zea mays
  Clone ID: MRT4577_129244C.1.pep
MRRALGRETLLRRHRGSALLWLAVTALVTGTICLWSSFSVGLLSTYRVQDVVANELWRTVDSNGWRASSAPRICWPPPPAESESNGYLRVWCNGGLTQQRSAICNAVVVARIMNATLVLPELDTNSFWHDESGFVDIYDVPHFINTLKYDVRIVMSIPKITAQGKTKKLKAYKILPPRDAPVTWYRTTALERLRKYGAIYLTPFSHRLAEKIDDPEFQRLRCRVNYHALRFKPSIMKTSSDIANKLHSEGHFMSIHLRFELDMLAYAGCFDIFTPEEQEILLRHRNKYFPLLLRYWGKYFPGNTPDYRERRLIGKCPLTPEEVGLILRATGFDNSTWIYLAPGKLFGGKHFMKPFKAMFPRLKNHSMIRSGKLEENIRGLAGSAVDYMVCLLSDIFIYDGPSNFADNLMGHRLYYGFRTTITPNKKALARIFMDREEGHTSAFEERVRQVMLTHFGAPHKRIHPESFYTNPWPECFCQTKARNHADRCPHNSVNDVLESWFHNKEDVEVEATNQTDSTS

SEQ ID NO: 216716 - protein, 134 aa, Zea mays
  unsure (1)..(134): unsure at all Xaa locations
  Clone ID: MRT4577_129245C.1.pep
SDSGSRVLPSLALHLREAIVGLILRATGFDNSTWIYLAPGKLFGGKHFMKPFKAMFPRLTNHSMIRSGKLEXISXGLAGSAVDYMVCLLSDIFIYDGPSNFADNLMGHRLYYGFRTTITPNKKALARIFMDREE

SEQ ID NO: 216717 - protein, 51 aa, Zea mays
  Clone ID: MRT4577_129246C.1.pep
RQASSRAGLWLYPTTISYIESELAYNSSTESIINLCYLRLLYKIDILSILY

SEQ ID NO: 216718 - protein, 155 aa, Zea mays
  Clone ID: MRT4577_129247C.1.pep
MRRALGRETLLRRHRGSALLWLAVTALVTGTICLWSSFSVGLLSTYRVQDVVANELWRTVDSNGWRASSAPRICWPPPPAESESNGYLRVWCNGGLTQQRSAICNAVVVARIMNATLVLPELDTNSFWHDESGFVDIYDVPHFINTLKYDVRIVM

SEQ ID NO: 216719 - protein, 89 aa, Zea mays
  unsure (1)..(89): unsure at all Xaa locations
  Clone ID: MRT4577_129248C.1.pep
ICNAVVVARIMNATLVLPELDTNSFWHDRSGXXDIFDVPHFINTLKYDVRIDMSIPKITAQGKTKKLKAYKILPPRESPGTWYRTTAWR

SEQ ID NO: 216720 - protein, 119 aa, Zea mays
  Clone ID: MRT4577_129249C.1.pep
AGCVNRLRFSWTEHQNCVTLVLCDPIVETSVLSVSEYRYHTRSGPMLLIDLNEYEQTDLVESDTVVADLHNLITFHCLEDCIYMAYVHKLQVEQYKHIHITETWYLLDTTTDGAVVPAR

SEQ ID NO: 216721 - protein, 424 aa, Zea mays
  unsure (1)..(424): unsure at all Xaa locations
  Clone ID: MRT4577_12924C.1.pep
MTRVNGATDALSIGPSAGHFSAGGFAAALKPSEPFDGTFYKRWRSKMILWLTAMNCYHAAQGKPEQFTPEEERMFDVADNLFRGAVIGALANKYVDSYLTCTSAKELWDALDEKFGVSDAGSELYIMEQLFDYKMVENRPVVEQAHEIQALAKELEQFPCVLPDKFVAGGIIAKLPPSWTDFATTLKHKRQEFSVAELIGSLDVEERARAKDTRGKGVETSSANMVQKKNSNASHNNKKKNKQQNATKPKQAASFKKKNKGAGCFVCGSTDHWASACPDRKFKQEKKPAQEKKTVNMVVSETAXNIGCKGTGALLMGNGSHARVLGVGTVILKFTSGKTVLLKNVQHVPSIKKNLVSGSQLCRDGYKIVFESNKCILSKYGTFVGKGYDSGGLFRLSLHDACNKSVNNVVSNESYIWHSRLCHI

SEQ ID NO: 216722 - protein, 65 aa, Zea mays
  Clone ID: MRT4577_129250C.1.pep
MVKIIYSTGMLDHIMVENASVKVALNRIAVVSVLDAHTLSVMSYEAWRLIHLFLLALSSYMQWSC

SEQ ID NO: 216723 - protein, 140 aa, Zea mays
  Clone ID: MRT4577_129251C.1.pep
MAGQSFLFTLESGNEGHPDQVGQQVSDPGLGGCLAQEPDRKGGWENCTKNNMGKGVGENTNKGNGDYQKNVPHTWRENRFNFHEVGLDPHRWKGLVNIEQQSPDIGQGVHRHFTKRAQENGAGQQGHMVRYPTDKNPELM

SEQ ID NO: 216724 - protein, 50 aa, Zea mays
  Clone ID: MRT4577_129252C.1.pep
QRLGCARACAGNRGGYVLERGLMTLNDGTRGTVYGSQKWACGRMNGASGC

SEQ ID NO: 216725 - protein, 101 aa, Zea mays
  Clone ID: MRT4577_129253C.1.pep
TSPVSRPPRQSPPCSCCRQWRWCRLSSVLTPPHPSGSGGPTPSDLAVSAPTAGRTRQGEPDATPRRATMPLPLAKARRGSSPQPSPQHAWSSCRSQLEQDV

SEQ ID NO: 216726 - protein, 118 aa, Zea mays
  Clone ID: MRT4577_129254C.1.pep
RNNFAVGYRTGDFQLHTNVNDGTEFGGSIYQKVCEDLDTSVNLAWTSGTNCTRFGIAAKYQLDPTASISAKVNNSSLIALASAQTLRPGVKLTLSALVDGKSINAGGHKVGLALELEA

SEQ ID NO: 216727 - protein, 188 aa, Zea mays
  unsure (1)..(188): unsure at all Xaa locations
  Clone ID: MRT4577_129255C.1.pep
PLSXSPXSTWGQYFRNAELEKXLNQDLSRLYPELGDFFQTSTCQSMLGRVXLVWSLRYPEFGYRQALQXQVRDLHEELLGDDFDGQTFPDRSKLNRSDRKNSVEGRTGKIRSLADLDPDTRDLFLINDAYGAEGELGIILSEKFMEHDAYSMFENLMNGAQGVVAITDFYSLSSAPESSMGLTPVREA

SEQ ID NO: 216728 - protein, 135 aa, Zea mays
  Clone ID: MRT4577_129256C.1.pep
PKTAENFRALCTGEKGFGYKGSTFHRVIPNFMCQGGDFTDHNGTGGKSIYGNKFEDENFTLKHLGPGTLSMANAGANTNGSQFFITTVKTSWLDQRHVVFGNIVEGMEVVKTIEGYGSQSGKPSKKIEVADCGQL

SEQ ID NO: 216729 - protein, 63 aa, Zea mays
  Clone ID: MRT4577_129257C.1.pep
NDSVPTLLDYDRSQFEIEVLPIHSVRVEHGWVFFFMLATIDSLAITSIQSPSRYGNKIFPCTR

SEQ ID NO: 216730 - protein, 459 aa, Zea mays
  Clone ID: MRT4577_129258C.1.pep
MTMPGSPARPSFSALRGARWRAYLGVIPGFAAVSTDELRRAAADSRRRYANLRRRLLIDPHLSKDEEGAPDLIVENPLSQSPGSTWGQYFRNAELEKMLNQDLSRLYPELGDFFQTSTCQSMLGRVLLVWSLRYPEFGYRQGMHELLAPLLYVLHADVQHFRQVRDLHEELLGDDFDGQTFPDRSKLNRSDRKNSVEGRTEKFMEHDAYSMFENLMNGAQGVVAITDFYSLSSAPESSMGLTPVREASSAIYHLLASVDSSLHSHLVELGVEPQYFALRWLRVLFGREFSLDSLLFIWDEIFSSPNHSYCTDIRSRADYQFKVLCSPRGALILSMAVSMMLHLRSSLLGSEHATSCLVRLLNFPEDIDLKSLIEKAKLLQSFALEANLPSSSSRGSSLLSTPNYWEETWKILQPSMDQKGGGVLKMKGRGFLRRSASAHASALSRMFPEARLLILKTTI

SEQ ID NO: 216731 - protein, 281 aa, Zea mays
  Clone ID: MRT4577_129259C.1.pep
MKGRGFLRRSLSSTESNVSRSKAANFENNDMTSTRQSTTDEFHNADVVPAELITSVPHMLIEKQKHHVGKGTAETIGSNSKNGCETGQHDGYCSTSGEIRDPLGAASGYLSRSSSITLSCGTEYDHDTHHLEEPCDPCDDRVVNEPDPLSVHNTRTDEAATTDRTSGIVDTYPVRQRRLCSVDGKLKIKTRNATSAKGDEKETLAICSISNVADKELSRTLRSLGESMVENIQDIELLLKPNSLSTSVEKLEEAIPGSTEQAKAVAALKELRKISDLLRQI

SEQ ID NO: 216732 - protein, 378 aa, Zea mays
  Clone ID: MRT4577_12925C.1.pep
MKATHDTSDDEPTILHEHFILVEHIEESHIHNLVKDDDVSTRKSKRARIAKLFGDDYIVYLVDDTPSTIEEAYFSPDADFWKEAIRSDMDSIMSNATWEVVEHPYRCKPIGSKWMFKKKFRPDGTIERYKARLVIKGYSQKEDKCVYYRYGGGEGAILCLYVDDILILGTSLDVIKETNDFLSNNFETKHLGEADVIVNIKLLKEGDSGITLVQSHYVEKVLSCFGYSECEHAPTPYEPSGYVFSLGGDAVSWKSCKQTILTRSTMEAELIALDTDSVEAEWRRELLMDLPVVKKPVPGISMNCDNQTVIIKINSSKDNMKSTKHIKRRLKSVRKLRNSRVIALDYVHTSKNLADQSTKGLSRSVIDSASREMGLRPT

SEQ ID NO: 216733 - protein, 47 aa, Zea mays
  Clone ID: MRT4577_129260C.1.pep
TPSSLKNSSSNTSRILIAFPLPLLAPIRFIFRICDFCINFLSLYFPL

SEQ ID NO: 216734 - protein, 579 aa, Zea mays
  Clone ID: MRT4577_129261C.1.pep
ESKSVREAASRKGSSDNFLYCPVATGIQDDDIVHFQMHWAKGEPVVVSDVLQLTSGLSWEPMVMWRALRERSKGKAEDEQFAVWAIDCLDWCEVEINIHRFFSGYTTGRTHARTHWPQMLKLKDWPPSSSFDKRLPRHGAEFISALPFREYTDPRYGPLNLAAKLPAGVLKPDLGPKSYIAYGFYKELGRGDSVTKLHCDMSDAVNILTHTAEVTCQTDIGLIEKIQKDMREQDLQELYGGLNSRSELKLSPAPTECRDESVDEGLKTSYSREGNCVNRDNYNGLDINALPPDDDGDIAKDKESSPGSEWQSELGQSSDHNNGVNTTDEMYNGAHYISHNQKSTGRKVGIKPQEEKSEKADCSGTCAYLKGSSEDNPEMPIVESSEEQSTGGALWDIFRRQDSDKLQDYLRKHCSEFRHIYCNPVKKVFHPIHDQSFYLTEEHKRKLKEEYGIEPWTFEQKLGEAVFIPAGCPHQVRNLKSCIKVALDFVSPENVGECVKLTEEFRRLPSFHKAKEDKLEIKKMAVHALNEAVNFLDPRSSEELKIGVGENICEDESVDEKELPPRRGVEVSGVDEKPK

SEQ ID NO: 216735 - protein, 135 aa, Zea mays
  unsure (1)..(135): unsure at all Xaa locations
  Clone ID: MRT4577_129262C.1.pep
PKLFFDPAYFTRHPPPDDRWCLPGLFQFLVLMDLSGGCSLCWASXXGRVGPGAPPRVGAVAGPLVPLARPPLGGIPLFCPPPAPGRAFLLGAPFGPLRGVFPVLGPPFPNLCPGKPRVFPPSFALGAFPFSPLLG

SEQ ID NO: 216736 - protein, 52 aa, Zea mays
  Clone ID: MRT4577_129263C.1.pep
RARAACILGMCRYQQLGVSRPTKKWKVQYQLVKGKPWAWLVDSPTSLNSWNL

SEQ ID NO: 216737 - protein, 81 aa, Zea mays
  Clone ID: MRT4577_129264C.1.pep
ADRNGGATNCSERKRVRASNQPMKTTTTRRLIVTLRPAVHRLLHYSHSSRSPYERSYRPSSSVVYDKRGATTRKEEKMPST

SEQ ID NO: 216738 - protein, 80 aa, Zea mays
  unsure (1)..(80): unsure at all Xaa locations
  Clone ID: MRT4577_129265C.1.pep
QRRVRGVNSCVVQYRFIPFCCSEPTQVRLCFMDNMYNIIYWNSNVDACALSSKKKKKKKKKKKKKKKKKKXKXPLRCYHC

SEQ ID NO: 216739 - protein, 99 aa, Zea mays
  Clone ID: MRT4577_129266C.1.pep
PHAEPTAKTKGLQYKNKKKTPCKPGTYNKSNGQKLHRERLAAGSYWSEPRSRIGCQNNQSHMETALPTRQQIETPNPSTLAPKAIHTSEPGLDTRDFTQ

SEQ ID NO: 216740 - protein, 98 aa, Zea mays
  unsure (1)..(98): unsure at all Xaa locations
  Clone ID: MRT4577_129267C.1.pep
KKGRGATHTTTKLQNTFSFKKKKKKTKWKKNVVRAPNXXPXQLYSTNKSPCLQPCKLNTFLLPLTPKPTLKMPKTLLNPSKSSTSYLKIPNHLQIHSK

SEQ ID NO: 216741 - protein, 127 aa, Zea mays
  Clone ID: MRT4577_129268C.1.pep
MDGLNYSKLRSSLRPRLQAFSGVLFSSLRSLDGLLHMASVAVLQFVHDPHDDPPVLGCVHLTLARVYALDRARSLSLVKDHFTTLGKDLTVIGYCCDDAEPRRRQLQFYVAESMFRVAASYYLAPFL

SEQ ID NO: 216742 - protein, 58 aa, Zea mays
  Clone ID: MRT4577_129269C.1.pep
LGLHAVKDRAVVVNGKVEVRPMMYLALTYDHRLLDGREAVQFLVKIKEYIEDPRKMLL

SEQ ID NO: 216743 - protein, 102 aa, Zea mays
  Clone ID: MRT4577_12926C.1.pep
FLDLHLHMMSQLNRAASHSTIMWQLSLIQKQQHAVGSSGCYQHVHNKCPTHDSHVWDIPVTVSQLLRLPLWCLQSHYALDVTHQIWGMSSTQPCLCISVIMQ

SEQ ID NO: 216744 - protein, 55 aa, Zea mays
  Clone ID: MRT4577_129270C.1.pep
CPPTNMGSQKKPSHKAKPAYTLILFEHLRGAQMSLMVALLSLHHFEASYFDHQHN

SEQ ID NO: 216745 - protein, 478 aa, Zea mays
  Clone ID: MRT4577_129271C.1.pep
MAMGAAAAASTCTRPASPGLARRRVRAQATSSWAGGAEALVRSGAVRAVRPRDAAEALGGEGFRLLDVRPEWERARASVRGSVHVPLFVGDDDMGPVTLLKKWVHLGYIGLWTGQAFTKMNERFVDDVAAAVDGSKDAKLLVACGEGLRSLIAVRMLHDDGYRNLAWLAGGFSKCADGDFADVEGESKLQYATIGGASYIFLQILLFLGVLPITLQICEPNDTQVSPTPLLIYSGTVIIRTLRCLSERLTSGIKATDSRALSCVEARTDAVGGTFVSDTFSAKASGDESRYVDRSQRNCVVDDRRLEVGKLSKNWECVVVEKFSLMPGVLAPALVAAECPPGGSTCNSPHGHCIDKHYWEDGFGSVTTLIPPSIKGMPPLPSPVSVPMLGEPREFPSEHHRRKWSCGGVQRPPSLGSISVLALLQEEVTTSTRRLDGCRLQLGWSGKPPSKGPFPLPQPPRGDKQPLPEESDKPVDNT

SEQ ID NO: 216746 - protein, 86 aa, Zea mays
  Clone ID: MRT4577_129272C.1.pep
RQHSRQERADLRGRQKKEEIAAIAPEDDALRLDTILTDIPMEEILRKQRMLANQNIKQAKQTAQPAEPRDALQQALNGQARKQTHA

SEQ ID NO: 216747 - protein, 67 aa, Zea mays
  unsure (1)..(67): unsure at all Xaa locations
  Clone ID: MRT4577_129273C.1.pep
MAPKKEKAPXXSSKPXKSGGGKQKKKKWSKGKQKEKVNNXVXXFDQXXYDKXFSXXPCYXXITXSIP

SEQ ID NO: 216748 - protein, 93 aa, Zea mays
  Clone ID: MRT4577_129274C.1.pep
PYARVSASQSVLHLHRAAGATHGRTHLDPDRRHEIALTRTGLADLAVMAQSVPLNIADIGSPIWVYNTLMSWVDETVRRASCNISLRFFGVRA

SEQ ID NO: 216749 - protein, 287 aa, Zea mays
  Clone ID: MRT4577_129275C.1.pep
MAKDVEQVTEQGEYSAKDYHDPPPAPLIDPDELTKWSLYRAAIAEFIATLLFLYITVLTIIGYKRQSDTKIPGNTECDGVGILGIAWAFGGMIFILVYCTAGISGGHINPAVTFGLFLGRKVSLVRALLYMIAQCAGAICGAGLAKGFQKSFYNRYGGGVNTVSDGYNKGTALGAEIIGTFVLVYTVFSATDPKRNARDSHVPVLAPLPIGFAVFMVHLATIPVTGTGINPARSFGPAVIFNNDKAWDDQWIYWVGPFVGAAVAAIYHQYILRGSAIKALGSFRSNA

SEQ ID NO: 216750 - protein, 120 aa, Zea mays
  unsure (1)..(120): unsure at all Xaa locations
  Clone ID: MRT4577_129276C.1.pep
GPDLIPGFFTPPVITPRKEALEGGGNPKAANDRATTARANEQNEPKEKADATXTREEASKTKDTPGDGTTTAPDQARETNKQGQQRETTGAKPESLKKGIDKTVQGLTQELEKKPRPVKG

SEQ ID NO: 216751 - protein, 127 aa, Zea mays
  unsure (1)..(127): unsure at all Xaa locations
  Clone ID: MRT4577_129277C.1.pep
ARRGRVRRRVLCSPVARQRHVDSAIRRRGASTARRASLILAIRLSRPAFVAPRIGCSGSMPKPLAGPPPVAGFMGRGLRSAIRSTSSTLADCGARSRVGACVSGATGPFLQPARPALPCFXXRXWGG

SEQ ID NO: 216752 - protein, 144 aa, Zea mays
  Clone ID: MRT4577_129278C.1.pep
QQHRFFPFTQRGALNSAAFLHPQFPFSRLVAASPQHFFPFTHLAALNFAAFLQQHQLLPFSRLVVVGPAAFLTHHRLLPFSRPAMPNAGPLLQLHQLVPFTPLVLPTPPVFSPPPLLGGAPFWMAFGLWSHNEVFWVRFGGPPK

SEQ ID NO: 216753 - protein, 143 aa, Zea mays
  Clone ID: MRT4577_129279C.1.pep
RPPACRAPSLKGTTGARGAGGCGSSCRSRSGTCHHSRALLQRNFSNDDEIDGDPISFTFQGTYNIEVSPMLSGGEDQSVLHVIASMPCSCGDLLVSRHPLFSPSRQFLCVTMFLTGRISFIECSSSYSFSMRKVYARPATRYP

SEQ ID NO: 216754 - protein, 92 aa, Zea mays
  Clone ID: MRT4577_12927C.1.pep
PAPVLVLEQYINLRLHLAFLCTPGNPLAPATMCICIETYRRSLIVCHHRCNISVSIVGAYSSFRSPVLYLGRRQCSVLLHLPPRSPEAHRMQ

SEQ ID NO: 216755 - protein, 155 aa, Zea mays
  Clone ID: MRT4577_129280C.1.pep
LKKKKNKEKTKNKQKKKKKKKKKKKKFNLIKYYFLNNKKKKIKFFPLAPLGGSPFRGVFSNFPSPGGPLALFFGGPISPFGGRFSISWAGFFQLWVGKTLGFPHFFAFGNIPLFPVWVFTKRPPPFPLSKNCPPFLGNGPPLFPLFYPGGVGGFP

SEQ ID NO: 216756 - protein, 27 aa, Zea mays
  unsure (1)..(27): unsure at all Xaa locations
  Clone ID: MRT4577_129281C.1.pep
NRMQESKLIKDXIEKKEKLFLIRMPTN

SEQ ID NO: 216757 - protein, 103 aa, Zea mays
  unsure (1)..(103): unsure at all Xaa locations
  Clone ID: MRT4577_129282C.1.pep
CVDLCGTEHAAVHKHERVARVHSTQQLDDPLKADKNQVGVAEYEASGSEDRTQIYPTMVLLSRTXGDLDFLLVLGDHTIGATEELLRREGVTKVPQFTFYKGP

SEQ ID NO: 216758 - protein, 106 aa, Zea mays
  Clone ID: MRT4577_129283C.1.pep
MGRREALVVLLAVVLAAAAAGEADAAKAKGKAKGKYRALFNFGDSLADAGNLIANGVPDILATARLPYGQTYFGKPTGRCSDGRLVIDHLEQEFGMILLSPKKDNL

SEQ ID NO: 216759 - protein, 75 aa, Zea mays
  Clone ID: MRT4577_129284C.1.pep
KTNLGGFFYTWGRNQPILKHKTPINPLKTLSATLALQWERPIQHFPEIRKRKLTYPRPQSVSVTAPKCQQPSVTN

SEQ ID NO: 216760 - protein, 330 aa, Zea mays
  unsure (1)..(330): unsure at all Xaa locations
  Clone ID: MRT4577_129285C.1.pep
SLSGCGKAQPVVVNFGGAARLSKDGNGLNPGFWGKTSLDRVTEAVRQNPCSVIILEGIDQVDAVVRGKIKRAMETGRLVDSRGREVSLGNVIFVLTTNWXLRNSGDQSXTLLQDEGRMLEVASSNWQLELSIEDKQVKHRADWLCDDARPAKVAKELSGGQGLSLDLNLAVGALDDTDGSRNSSDLSVEQEHEKGHLAVKCSTPAPDYDLLNLVDDAIVFRPVDFAPFRKTVTDCISAKFDSVIGSCNSFRIDEDTVDRMAGSIWLTDEKLEDWAEKVLMPSIERLWCNVKHYSGRAVVRLAAVTDKALPRLGWAREGLPATVPIAIDGM

SEQ ID NO: 216761 - protein, 98 aa, Zea mays
  Clone ID: MRT4577_129286C.1.pep
MEGAAWEVNAHLESKRMDEDYDSADRECFSCFYDLHLSAVSCQCRPNHFACLNHTNLLCSCGMDRKTVLFRYSMEELDTLVAALEGDPTAFYWWGHNH

SEQ ID NO: 216762 - protein, 50 aa, Zea mays
  Clone ID: MRT4577_129287C.1.pep
WEPQGPPQKMPQNSCEPKILPLSKARAFRPQKVFKGSLCQWVNVQAAPLC

SEQ ID NO: 216763 - protein, 76 aa, Zea mays
  Clone ID: MRT4577_129288C.1.pep
SIKLLGTLSSVPAIKIVMQPDYELAFFFHAQFDAACCIMLIAVLSLVQLAISCLLVGLYDFAGQCPAVAMRMVVFI

SEQ ID NO: 216764 - protein, 203 aa, Zea mays
  unsure (1)..(203): unsure at all Xaa locations
  Clone ID: MRT4577_129289C.1.pep
MEMARSPAHVALCSLALLLLLLLPAARSATFTLTNNCGYTVWPGLLSGAGTAPLPTTGFALARGASAAVDAPAGWSGRMWARTLCATDGATGRFACATGDCGSGGVQCGGAGAAPPATLAEFTLDGSGGLDFFDASLVDGYNVPMLIVPQARAXGGGGGNGSGGAESSKCMATGCLVDLNGACPADLRVMAASSSGGGGALAC

SEQ ID NO: 216765 - protein, 1310 aa, Zea mays
  unsure (1)..(1310): unsure at all Xaa locations
  Clone ID: MRT4577_12928C.1.pep
MTRVNGATDALSIGPSAGHFSAGGFAAALKPSEPFDGTFYKRWRSKMILKLTAMNCYHAAQGKPEQFTPEEERMFDVADNLFRGAVIGALANKYVDSYLTCTSAKELWDALDEKFGVSDAGSELYIMEQLFDYKMVENRPVVEQAHEIQALAKELEQFPCVLPDKFVAGGIIAKLPPSWTDFATTLKHKRQEFSVAELIGSLDVEERARAKDTRGKGVETSSANMVQKKNSNASHNNKKKNKQQNATKPKQAASFKKKNKGAGCFVYGSTDHWASACPDRKFKQEKKPAQEKKTVNMVVSETAEGTLGYGNLLPTVLSVCQSPEWWADTGANIHVCADISLFSSYQCKGTGALLMGNGSHARVLGVGTVILKFTSGKTVLLKNVQHVPSIKKNLVSGSQLCRDGYKIVFESNKCILSKYGTFVGKGYDSGGLFRLSLHDACNKSVNNVVSNESYIWHSRLCHINLIPKFDLVKGSKCQVCVQSKQPRKPHKAAEARNLAPLDLIHSDLCEMNGILTKGGKRYFITFIDDSTRFCYVYLLKSKDEALHYFKTYKAEVENQLERKIKRLRSDRGGEYFSGDFSDFCVEHGIIHERTPPYSPQSNGVAERKNRTLTDLVNAMLETSGLSKEWWGEAILTACHVLNKVPTKNKEITPFEEWEKKKLNISYLRTWGCLAKVNVPINKKRKLGPKTVDCVFLGYAFHSIGYRFLIINSGVPDMLVGTIMESRDATFFEDEFSMKATHDTSNDEPTIPHEHFIPVEHTEESHIHNHVENDNVSTRKSKRPRIAKSFGDDYIVYLVDDTPSTIEEAYSSPDADFWKEAIRSEMDSIMSNATWEVVERPYGCKPIGSKWVFKKKLRPDGTIERYKARLVIKGYSQKEGEDFFDTYSPVARLTKICVLLSLATSHGLLVHKMDVKKTFLNGELDEEIYMEQPAEFVANGQEGMVCKLLKCLHGLKQPPKIWHEKFDRTFTSTGFVVNEADKCVYYRYGGGEGVILCLYVDDILILGTSLDVIKETKDFLSNNFEMKDLGEADVILNIKLLREGIGGITLVQSHYVEMVLSRFGFSECEPAPTPYDPSKLLKKNRRTARDQLRYSQIIGSLMYLASATRPDISFAVSKLSRFVSNPGDDHWRALERVLRYLKGTMSLGIHYTGYPTVLEGYCDANWISDADEIYATSGYVFSLGGGAVSWKSCKQTILTRSTMEAELTALDTASVEAEWLRELLMDLPVVEKPVPAISMNCDNQTVIIKINNSKDNMKSTRHIKRRLKSVRKLRNSGVIALDYVHTSKNLANQFTKGLSRSVIXSASIEMA

SEQ ID NO: 216766 - protein, 153 aa, Zea mays
  Clone ID: MRT4577_129290C.1.pep
KDEGIVRAFKNVPGVETCPVDKLNLLQLAPGGHVGRFVIWTESAIAALDNVYENKSGFTLPIAKIASSDVTRLINSDEIQSVLRPAGQAVAKRPFTQKKNPLRNKAILFRLNPYAKTLRRQELLRQERKAKGSVKKSVPGAAGKEFLDILHAA

SEQ ID NO: 216767 - protein, 86 aa, Zea mays
  Clone ID: MRT4577_129291C.1.pep
ASVQQLALVILGLPSLGVGAAHSVQRLVHQRPFLASGRDLGLSALCPCSLSRSACVTVVPTASRPPLQSVRRRVLAPVALDPAAGW

SEQ ID NO: 216768 - protein, 525 aa, Zea mays
  Clone ID: MRT4577_129292C.1.pep
MAGGGEREGAQAMDSGEKRLNELGYKQELRREMTLFKTLAISFSTMTLFTGITPLYGSSLQYAGPAPLVWGWVVVSFFTCFVGVAMAEICSSFPTTGSLYFWAAHLAGPVWGPLASWCCAWLEAIGLIAGIGTQAYAGSQVLQSIILLCTGTNTGGGYLAPRWLFLVMYIGLTLIWAVLNTFALEVIAFLDVISMWWQVIGGTVIVVMLPLGATTTQPASYVFTHFQTAPDVTGIGSSAYAVVLSFLVSQYSLYGYDAAAHLTEETKGADKNGPIAILSSIGIISVFGWAYILALTFSIQDFSYLYNPNNETAGTFVPAQILYDAFHGRYNSSAGAIVLLFVIWGSFFFGGLSITTSAARVVYALSRDQGVPLSSVWRRIHPRHKVPANAVWLCAAVCTLLGLPILRINVVFTAITSIATIGWVGGYAVPIFARMVMREDDFRPGPFYLGRASRPVCLVAFLWICYTCSVFLLPTVYPIKMDTFNYAPIALGVCLGLIMLWWLLDARKWFKGPVRNIDDHNNGKV

SEQ ID NO: 216769 - protein, 232 aa, Zea mays
  Clone ID: MRT4577_129293C.1.pep
PTRPAHCHFGHAETRLPHSYDPWEFNSYYQSSYAESTILDQESLRSSYKEQKRVVRKHILRGRAGASPFTICNGCFNLVQMPSDVYISKAMVGKMQCGKCSKVLALSFRAAYNANAKSSVDVAQESYNLDDSVVAKNEDIASYYAECLTGGPVSISEDYGASHTRSMPAQAESSSLAAAQSGKKVSDSALHRLMGYDSASQLLRHSRVFEDGYESFESMVPVSSRVSRRKNK

SEQ ID NO: 216770 - protein, 72 aa, Zea mays
  Clone ID: MRT4577_129294C.1.pep
PGVLLSKGFRALPPVLVPPGTQGGFPRPPFLQHPPAGGGGPGCHSLGVRLPKPVAPGIHSSGLIKIFKCPFP

SEQ ID NO: 216771 - protein, 40 aa, Zea mays
  Clone ID: MRT4577_129295C.1.pep
SVCCNIHRKQFGFGFSFNVNVSYITINKHIQCFMCIYKMI

SEQ ID NO: 216772 - protein, 152 aa, Zea mays
  unsure (1)..(152): unsure at all Xaa locations
  Clone ID: MRT4577_129296C.1.pep
MATPARNRLMPQSQRLHHDPPDGISGAPXDNYIMRWNRVLFRSDDTSCNGGTIXLTLQCIXDYPKPAPAALXMREMFHPNIYANGDICLDMLPNQCSPIYDDAAIXTSIHDLLCEPDADSPANSEAARMFTXNNLDDNQXITRMTDQIWTVD

SEQ ID NO: 216773 - protein, 69 aa, Zea mays
  Clone ID: MRT4577_129297C.1.pep
GFFLFKKKLIFSLFKIAWNLKNAWEGKKWGFFHKVNPIKDLIPGPTPDNDWVTIAHPFGIIFLGTLNMG

SEQ ID NO: 216774 - protein, 136 aa, Zea mays
  Clone ID: MRT4577_129298C.1.pep
MKMVERKWYGGGSLVLRVITNDYAKAPASAPTPAPTPTLAPALRPTPAPAPTPTPAPTPAPMPAPRPAPAARPAPTPAPMPAPRPAPAPRPAPTPTLAPIPRFAPKPPNPPRPPKNGIMPPIPPSMPPPNGIIPPP

SEQ ID NO: 216775 - protein, 65 aa, Zea mays
  Clone ID: MRT4577_129299C.1.pep
LPVATASVERVFSAMNLVKNKLRTTMSDDRLNDCLVTFIERDVFMEVSEDDIVDAFMAMQKRRVT

SEQ ID NO: 216776 - protein, 170 aa, Zea mays
  unsure (1)..(170): unsure at all Xaa locations
  Clone ID: MRT4577_12929C.1.pep
MRRPIARGEPKVQTLALGPPSAAAPTKMGAHRRQPSSHRRVAGALTLLAASALALLLLASRRVPPTYGVIIDAGSTGSRVHVLAYRSTAGLPQLDWARMASMKATPGLSSFAADPRGAGLSLAPLLEFARRRVPRESWGETESILQSCREVLXXSGFQFQDEWATVISGM

SEQ ID NO: 216777 - protein, 29 aa, Zea mays
  Clone ID: MRT4577_1292C.1.pep
SASYEIVGGLSDHSCKCCGIGCTKQKFPP

SEQ ID NO: 216778 - protein, 249 aa, Zea mays
  Clone ID: MRT4577_129300C.1.pep
CLVHNTEYISIFTSALLQRPLSVVSSSTYYNSSTLVLTMWLAMACLLRDQHEQWKHKYENPCRSVKIFRCQLPQNNAFYSAQPPKHDGSDKPLCPGAPVCHWCGTWKGDKICSSCKKARYCYEKHHALHWRTGHKNDCLQIISSSASNSVLPAVGIGFVRWFAKASNVHRLHVLDPSCLYSVLFYDQLTIHYLRLMALINNTEMELRVSMEMHVAELSQVSIHCVCARLFGIVFLLFMGNHKSIWRNYV

SEQ ID NO: 216779 - protein, 532 aa, Zea mays
  Clone ID: MRT4577_129301C.1.pep
MGAQIDNSVNDGRGPPLFKICGQVHHRIGSLLPPDGSSPKFIQLYIYDTANEIQNRMNSLGNNDRNDGGLDPVIVNGLIKMLDDHNPFAKKFRMARDRLADNESEDFIIRLIGAKEGDPVQYNLPTTDQLAMLIVGDFSLDTFKLLYTIEFQKRGLPHSHIIFWVSNGTSESTSNFIDSFISAEIPDPSIDPLGCSKNYPKEFHEETNLDEQGFATYRRQNNNRYVIKGGHKLDNRWVVPYNDTLLKTYQAHINVEWCNKTVFVKYLFKYVTKGPDYNKVYLQRIRNGEDTPYDEETNARNEVKEYLDTRYLCDKDSCWRATSYEDLRRYNNILHPTFKEACRARGLLNDDNEWYNAFDEAARWATSEQLRHLFVTMLLYCEVGDEYAFFEKVWKQLTDDIQYRMRKTLNLPSYQMPTIELRDHLIDKLSVLFNKCGSNIKEYNLPQKTNSTGSIHDNRFIEEELSYNFDTLSQTAYNLRVKLNDQQLHAFNTIVDTVLSNIFGFFFLSGYGGTGKTFLWNAIITHLRAQKG

SEQ ID NO: 216780 - protein, 151 aa, Zea mays
  Clone ID: MRT4577_129302C.1.pep
MPKYLLPAHVCHWCGTWKGDKICSSCKKARYCSEKHQALHWGTGHKNDCLQIISSSAASNSVLPTVGKVPANTSWPEFEIKIDYEGIFDSDSGDENNSKLLVMQRHGKPDAMMQSWMDQFEVLGPFSFRITSVGLLLMHQSLYLFNWVGRF

SEQ ID NO: 216781 - protein, 61 aa, Zea mays
  unsure (1)..(61): unsure at all Xaa locations
  Clone ID: MRT4577_129303C.1.pep
PYSSPPLSYSNQSLYFSXFSPHKQXXLFIHPPXLFNXYPSYLFLSILPTSTXIKPSHPPPT

SEQ ID NO: 216782 - protein, 128 aa, Zea mays
  Clone ID: MRT4577_129304C.1.pep
SCKSTRSSGCMFAGMIFRKEPFFYGHDNHDQLVKIAKVLGTDGLNSYLNKYHIELDPQLEALVGRHSRKPWLKFMNGDNQHLVSPEAIDFLDKLLRYDHQDRLTAREAMAHPYFLQVRAVENSRTRPQ

SEQ ID NO: 216783 - protein, 44 aa, Zea mays
  Clone ID: MRT4577_129305C.1.pep
VKSNQYESSSLVQILGVNTKEDVACYAGTCMVYIYKANTMSIVT

SEQ ID NO: 216784 - protein, 51 aa, Zea mays
  Clone ID: MRT4577_129306C.1.pep
MGVILSVFARFYAEKVLLALEYLHMLGVVYRDLKPENVLVREDGHIMLSDF

SEQ ID NO: 216785 - protein, 93 aa, Zea mays
  Clone ID: MRT4577_129307C.1.pep
RQVLGTDGLNAYLNKYHIELDPQLEALVGRHSRKPWSKFMNADNQHLVSPEAIDFLDKLLRYDHQDRLTAREAMAHPYFLQVRAVENSRTRPQ

SEQ ID NO: 216786 - protein, 104 aa, Zea mays
  Clone ID: MRT4577_129309C.1.pep
GGGGKKKMISAWEASFVRQYSHLHASMLASQSVQSCLAGLVPAVPPSPTVATPHPVLLPAVTWISLASRRPFSPFKAVVITPARARRGKIFGFLVPFAGLQFVA

SEQ ID NO: 216787 - protein, 53 aa, Zea mays
  Clone ID: MRT4577_12930C.1.pep
LDRERRPFFFCGYCIHVVVMRMCFCIKPCFLWEQKSVDKSHYNECFLNPIIVI

SEQ ID NO: 216788 - protein, 126 aa, Zea mays
  Clone ID: MRT4577_129311C.1.pep
ARNSARGLINPTVKPGRDQNAEGSLPEIPPGTGQQQGNSKPAPPPALHNTNSTTGHGQRCQGPHRPGPESAHKGREHKCQDAKQAPRRQATTFPGTTTHEKAARIIRNTPTGSSRYNTWREVENNL

SEQ ID NO: 216789 - protein, 124 aa, Zea mays
  Clone ID: MRT4577_129312C.1.pep
MAEGRCNCGGIKVSVPALPEKSIICYCSNCRRAGSSIGSIIYSLDKSEVTINDPNGNLKGYEDSDTKSGNTLTRQFCSNCGCPIVSLLGQKMFLKGGLFKHTCSGPQKFCGRRAELDEGSRARR

SEQ ID NO: 216790 - protein, 230 aa, Zea mays
  unsure (1)..(230): unsure at all Xaa locations
  Clone ID: MRT4577_129313C.1.pep
MLSGDVPPNQTVYFRNLNEKVKKEELKRSLYALCSQYGRIVDVVALKTHKLRGQAWVAFSEITAATNAFRGLQDFDFYGKKMRVQYAKTKSDCFAKADGSYAPKEKRKKQEEKAAEKKRRTEDGQQPGASAPVAPSNGTGHQPSRFAKPXQEPAAPPNNILFLQNMPDQTTSMMLQILFQQYPGFREVRMIEAKPGIAFVEYEDENQSMVAMEALQGFKISPENPMAISY

SEQ ID NO: 216791 - protein, 613 aa, Zea mays
  unsure (1)..(613): unsure at all Xaa locations
  Clone ID: MRT4577_129314C.1.pep
MAAPPATTATTHHRALLPPTRTHAAATHSALRLPLRAHPHAHAQRARLTAAAAPAPAASTASLESSAAGKPTVLVAEKLGAAGLALLREFANVDCSYGLSPEDLRAKISLCDALIVRSGTKVGRDVFEASGGRLRVVGRAXGVGIDNVDLAAATEHGCLVVNAPTANTVAAAEHGIALLTAMARNIAQADASLKAGKWQRNKYVGVSLVGKTLAILGFGKVGSEVARRAKGLGMHVIAHDPYASADRARAIGVELVSMEEAMTTADFISLHMPLTPATDKMLNDEAFAKMKKGVRIINVARGGVIDEEALVRALDSGVVAQAALDVFTKEPPAADNKLVLHGNVTVTPHLGASTVEAQEGVAIEIAEAVIGALKGELAASAVNAPMVPAEVLSELAPFVVLAEKLGRLAVQLVAGGGGIKSVKVTYASARAPDDLDTRLLRAMITKGLIEPISSVFVNLVNADFTAKQRGVRITEERILLDGSPETPIDYIQVQIANVESKFPSAISETGEITVEGRVKDGVPHLTKVGAFQVDVSLEGSLILCRQVDQPGMIGSVGSVLGEENVNVSFMSVGRIAPRKHAVMAIGVDEEPSKGTLTKIGEIPAIEEFVFLKL

SEQ ID NO: 216792 - protein, 76 aa, Zea mays
  Clone ID: MRT4577_129315C.1.pep
FIGKRGGRPFFLTGKVPSDSPKSKKKGCKVGFALDFLPRGKGKKKKKKKKKKKKKKKKKKKKKKKKKKKNSKGARY

SEQ ID NO: 216793 - protein, 124 aa, Zea mays
  Clone ID: MRT4577_129316C.1.pep
MAHVDRPRSRAVLAVAVAVAAAALLLFAAAGVPRAAGQTTTTAVVDLDSWADRGAACTGAVEACGGIGATARRELGSGGYISYDAMSRGRVPCSYRGASYYNCRPGAPANPYSRGCSAITRCRG

SEQ ID NO: 216794 - protein, 128 aa, Zea mays
  unsure (1)..(128): unsure at all Xaa locations
  Clone ID: MRT4577_129317C.1.pep
NKGKGGAPRKDPQKKNQKQHPKKPHPKKQQHHPPPQHPREEQPQQQGHRHPQKPPQQQEGQGKKKKQQPGDPPQQKQQQPQQQHEGEGQQQHPKQXKGRGQHPKQSPDQPRGQTPEQKHKQQFRGQEK

SEQ ID NO: 216795 - protein, 128 aa, Zea mays
  Clone ID: MRT4577_129318C.1.pep
LKVQLNNMQRLMQILRLNRLTTNSRLLRLGIRGLTRIKRRLNLILILRRLNGHMTTKPHPLLRQHSHLQSRLNMQQINQTNTLLERNNLVNLNELHINDEHHQNINKHLSNHVRRQHKDGDGINHPST

SEQ ID NO: 216796 - protein, 275 aa, Zea mays
  Clone ID: MRT4577_129319C.1.pep
MRKSRVNPSRQERSGGMATPRRLIRERAEAAVATLVAVRPHEIPPLMSAATTFFFILSAYFVVLPLRDEGAISMGLDTLPGLFAGSLLLTVVAAPIASLAFSLPSIPKSKALMMIHRFFSISLLAFFVLWYTSTPGQSGPTSQSSEGGSDKPAGWRNQSWFYIVVRISLFLWVALLNLITISSTWARVIDVMDSESGSRLFGFIGAGATLGQLFGSLFAASMAWLGPFLLLFSSLLMELAALSSKGICIDGNHASAELRQTGAGQAPNTWLMMKF

SEQ ID NO: 216797 - protein, 81 aa, Zea mays
  Clone ID: MRT4577_12931C.1.pep
KYMVVKLVLIIVVHLSSMAPSIVSSQYYADLLGLSKKNAIVGMNLNKYRSRFIFGIAISFFLNGWSTFWKENKCKVPSSGE

SEQ ID NO: 216798 - protein, 63 aa, Zea mays
  Clone ID: MRT4577_129320C.1.pep
LPRHELTACPSYSQFLALQQAVYQKAGNIFFRKSVKSVITTEQSNRYSIASLSSYFLSLACIV

SEQ ID NO: 216799 - protein, 82 aa, Zea mays
  Clone ID: MRT4577_129321C.1.pep
IRCAYKKSFRCYKKSSKPWASKKHAHYFFFFLCLVFFIIIFFFFFFFLFFFFIFIFFFSFFSLFYIFYYFFFFFRTRGRTRG

SEQ ID NO: 216800 - protein, 56 aa, Zea mays
  Clone ID: MRT4577_129322C.1.pep
LFPVHSNRSNSPEYVHPTSTAAVCISFCFFCYLCPYGSKMIRVCGPPKIKSYLSTF

SEQ ID NO: 216801 - protein, 92 aa, Zea mays
  Clone ID: MRT4577_129323C.1.pep
RGPGGEPQTFPPLGRLGGGGSPAFGGLPGGSISGSSIPGFSKPGNGSTLPGFSLPGNGSIPLFGGGPPGFNGFGGMPGLPPPGSVPEHANKP

SEQ ID NO: 216802 - protein, 316 aa, Zea mays
  Clone ID: MRT4577_129324C.1.pep
MLPLAHSAGCSHLHLPPAPSRAYLPNRRRVRSLVRARPPSAGASGTETTSTTSGSVMSFLCPLLKLLGGGDPSQQRNDVVEVTTSSISSLSRLPWGSKVATSSGENIDSAISIPTLQLYEFEACPFCRRVREAMTELDLSAEVYPCPKGSLRHRDIVKKIGGKEQFPLLVDASTGISMYESGDIVKYLFRNYGQGRSPSPGLLESTIFTGWVPTLLRAGRGMTLWDKAGAVPAEKLELFSYENNPCARIVREALCELELPYVLQNVGEGSSRTDLLLRKSGSKQVPYLIDPNTGFQSGDHKKILPYLFQQYPVSSI

SEQ ID NO: 216803 - protein, 56 aa, Zea mays
  Clone ID: MRT4577_129325C.1.pep
SSTMQPPGAAVSSPRCRPAHPYKHRDPCGSKEFLRPGEDSSASRILSKRLRGFARL

SEQ ID NO: 216804 - protein, 148 aa, Zea mays
  Clone ID: MRT4577_129326C.1.pep
AVLAAFLLYSQVLVVGSRKDGISPVPEEHPQAWLELLFMSSQDIRVAEYVGAAEAVQRLLLESLGSCRLRLASCPLPRPPGWCSLAAAVLLHVEGVGGPLWWAAGRGLSSGGPGGGPRGRPSLGPVGPPRWASCQLCANCCLLWVGLG

SEQ ID NO: 216805 - protein, 153 aa, Zea mays
  Clone ID: MRT4577_129327C.1.pep
GSPPSLVFPPRGGLPIFVKTPAGKTLTLGGERLGPLAHVKGKIPGKGGVPPGPQGFVFSGQQLGGGRPLAGFHLPKGGPPPPVVRFPGGPLILGWFNLPWAWVVWGPLSLRRGAKDFLFGSLVGARVGLKRARFFWVGGLPPTFANSELVLCF

SEQ ID NO: 216806 - protein, 735 aa, Zea mays
  Clone ID: MRT4577_129328C.1.pep
MRVCAVLANWNGSDNESFEGFDIGNGPEWDTTRQMFEQFVDIFINAMFDLIGPRKYSQWGGSLIDSVVGTFLTQNSADNLSSQAFMNIAVRFPKSERHCQDNATQLIDGVDRKMKSKEAFDNFDLVHSHFDEYIKSEEEVDFDKKVKSQYGEDYNRIIGNFAASMKQKNISTWDSDLMNLVKDKYGNPVCDENNLRKILASLRQPVTASNWKELQEEAYKKGYNNKSQTETSDVVDWESVLNAPFSEVAKCIAIRGQHNILAVRILAFLDHVKKAQDGSFDLDWLRFVSREKAKKFLLSIHGIGVKSADCICLLSLRHRAFPVDVNVARIVTRLGWVKLQPLNGADFHLIDLYPILDDVQRYLWPRLCTIDKEKLYELHCLMITFGKVVCRKKNPNCGACPFSASCKYYNSSLAKKSLPLPEKHEQGEQQTSMVAYGSCTPSSQQMYRYQIAISSTTTETPPIHSCEPIVEMPPSPEYEYNETPNEQEDFYEDYACDIEDFAPGVQYDSEINICSNKHTLNNNSWTPNCGKDLAVINPKCSFGQSKKLKNTGRLRTEHNAYVLPDGHVILEEFEDRVPGDRCPYLLVVISCPDDYKVKGTVLIPCRTANRGKFPLNGTYFQENEVFADYSSSRNPITVPRECIGMLERSIVYFGSSIHSITKGQTRQDIQECLKEGYICVRSFHRKTRIPLRLCSTLHATNTKPAREKPMKRTRTSPEGKKNGTSPEGKKNESLF

SEQ ID NO: 216807 - protein, 66 aa, Zea mays
  unsure (1)..(66): unsure at all Xaa locations
  Clone ID: MRT4577_129329C.1.pep
WSGRPSPSVXCPCXSXGCXXVFSPAXAGRRPCXCPXVXAXAXXARPAAAPCXCLSWXXRGCGSWAS

SEQ ID NO: 216808 - protein, 313 aa, Zea mays
  Clone ID: MRT4577_12932C.1.pep
MSRVNGATDALSIGPSAGYTLFFVFVHVSLLFTAYASSYTHMHIHVITYIALFFWIKLKLKMPNFLTIQKPEIRQFSVSGFAVALKPSEPFDETFYKRWRSKMILWLTAMNYYHAAQGKPELFTPEDERMFDVADNLFRGAVIGALANKYVDSYLTCTSAKGFWDALDEKFDVSDAGSELYIMEQLYDYKMVDNRTVVEQTHEIQALAKELERFPCVLPDKFVAGGIIAKLQPSWTDFATPLKHKRQEFSVAELIGCLDVEEMARAKDPRGKGVETSSANMVQKKNSNVSHNNKRKKKKKKKKKKVLCVVTTA

SEQ ID NO: 216809 - protein, 412 aa, Zea mays
  unsure (1)..(412): unsure at all Xaa locations
  Clone ID: MRT4577_129330C.1.pep
MAFEKIKVANPIVEMDGDEMTRVFWQSIKDKLIFPFLDLDIKYFDLGVLHRDATDDKVTVEAAEATLKYNVAIKCATITPDEDRVKEFNLKQMWRSPNGTIRNIINGTVFREPIICKNVPKLVPGWTKPICIGRHAFGDQYRATDAVLKGPGKLRLVFEGKDETVDLEVFNFTGAGGVAMAMYNTDESIRGFAEASMAIAYEKKWPLYLSTKNTILKKYDGRFKDIFQEIYEAGWKSKYEAAGIWYEHRLIDDMVAYALKSEGGYVWACKXYDGDVQSDFLAQGFGSLGLMTSVLVCPDGKTIEAEAAHGTVTRHFRVHQKGGETSTNSIASIFAWTRGLAHRAKLDDNARLLDFALKLEAACVGAVESGKMTKDLALLVHGSSKVTRSHYLNTEEFIDAVATELRSRLGAN

SEQ ID NO: 216810 - protein, 159 aa, Zea mays
  Clone ID: MRT4577_129331C.1.pep
GGPLCFWPPQGPQFSDQCGMALFGFKPGAKRKVFSGAPLISPKVARVSLGCSPFLEPGRPKTLGPHLLEMVPPREIWFFFKKSRGGVGAPFKVDDFVSLGFKGPPFPGFWRPFWTPKFSPPFFGGIAKGPNGVLGRVARGPPFLSLFKLRGENPKGFSF

SEQ ID NO: 216811 - protein, 58 aa, Zea mays
  Clone ID: MRT4577_129332C.1.pep
AVAWHFTFILHKHGFLHKDQALARLSHSHLEFTGSNSKSHRWIIRSCDVEALLTLHLS

SEQ ID NO: 216812 - protein, 79 aa, Zea mays
  Clone ID: MRT4577_129333C.1.pep
RGEGPKVGPPKKSNPGGPMGETQKIGREGTTHGGAVGPGPKPFGRKRGQDAKTTARFPGNKDFNTPGNKKRGTKSRGSP

SEQ ID NO: 216813 - protein, 57 aa, Zea mays
  Clone ID: MRT4577_129334C.1.pep
SIIFFLRFISTTMDNFNVANYMLSFLVSMSKTFILIITYLYIKVLPTFIHLIILFIK

SEQ ID NO: 216814 - protein, 100 aa, Zea mays
  unsure (1)..(100): unsure at all Xaa locations
  Clone ID: MRT4577_129335C.1.pep
CLSPRHKPRRRGLVAGSSRCPKALRIHGWPSPAYSHRTVMPVRADKRHAIAIXWARXGFSAWPHPTHGRAYTLHEYTRSLECVGKAGATDTHSIGVQGYF

SEQ ID NO: 216815 - protein, 84 aa, Zea mays
  Clone ID: MRT4577_129336C.1.pep
NAVGMRWTLATRACSTPACPRCLLRCHCHGQDPPATAPLAVSRHVPRQAPAPRSSWGHRRRRAGEDGGKRNGKAQQGCTEGSPA

SEQ ID NO: 216816 - protein, 84 aa, Zea mays
  Clone ID: MRT4577_129337C.1.pep
LLSKPGFGGPPPFFQHGINGGGGFTQKGPPNVDLPQAAPPFRVSPMLDHIKLGSQCLSGLILFQWCPWGRPIVWDPPPVKPPWP

SEQ ID NO: 216817 - protein, 243 aa, Zea mays
  Clone ID: MRT4577_129338C.1.pep
FQKMVQQGVRPNVVTFSAILNACSRCNSFEDAALLLEQLRLFDNSVYGVAYGLLMGHREAWSQARSLFNQLGRMDSPTSSAFYNALTDVLWHFGQRQGAQQVVLEGVNRRVWENTWGDFCLDLHLMSCGAAQAMVHAWLLNVRSIVFEGRAMPEFLSILTGWGKHSKIAGSSTLRRVIEALLLSIGAPFQAERFNIGRFVSPSALVSAWLRESGTINILLLRNERAQHANTSNLVPRLQALQL

SEQ ID NO: 216818 - protein, 134 aa, Zea mays
  Clone ID: MRT4577_129339C.1.pep
MAGRTGWVLEERGEGDKRGQWGRNTGVWGERRALEYHWLSTTEVSTNQLTRMKPGTVALLILLNMMCIVAYFDHGSFPGTMAEETTLLANSYGRNEGTKGIHRGRKLMDAGTDSNRGFSISDMRHIMSSGNPHP

SEQ ID NO: 216819 - protein, 230 aa, Zea mays
  unsure (1)..(230): unsure at all Xaa locations
  Clone ID: MRT4577_12933C.1.pep
MRRPIARGEPKVQTLALAPPSAAAPTKMGAHRRQPSSHRRVAGALTLLAASALALLLLASRRVPPTYGVIIDAGSTGSRVHVLAYRSTAGLPQLDWARMASMKATPGLSSFAADPRGAGLSLAPLLEFARRRVPRESWGETEVRLMATAGLRLLDSAVAESILQSCREVLRGSGFQFQDEWATVISGAEEGIYAWVAANYALGTLGGDPNDTTGXIIELGGASVQVTLVT

SEQ ID NO: 216820 - protein, 158 aa, Zea mays
  unsure (1)..(158): unsure at all Xaa locations
  Clone ID: MRT4577_129340C.1.pep
GKKKRVQKTGPWPIPKAEVSPTKKPKAAHPGGQPEGGISKNYGGEQKGFHPASPASGDPXKGGLGVAPSPPKNGPGPRGRGRNPRAPKGXGGANKIGGPIPPPEPHSGGSLGGKTLPGKGGGTKKGERRPCIERPLYGVGGPLNLAPGKRLHGGGPQN

SEQ ID NO: 216821 - protein, 105 aa, Zea mays
  Clone ID: MRT4577_129341C.1.pep
MKPATVALLILLNMMCIVAYFDHGTMAEETTLLANSYGRNEGTKGIHHGRKLMDNSIGSNREYSIDDMSHPKAPHTELKQPSYLAPGCSSNPLKQPSYLAPGCIP

SEQ ID NO: 216822 - protein, 165 aa, Zea mays
  Clone ID: MRT4577_129342C.1.pep
LASAQSRRFCSTGSSAPPTNRAIVRAAGYPDSSTRPVPTHPTAGRIYVAARCRLLHERVYMDKVTYNVLRYQEMDEFMERVACSAAGASHRRGCLPAGLHSAVRPLQERHRTPLGTSRRIISSIEHQLLAPSINERDTAPPSVYLPVSRDLERYCDPHLRRNASA

SEQ ID NO: 216823 - protein, 73 aa, Zea mays
  Clone ID: MRT4577_129343C.1.pep
CTDGHTTEPHLLDCLALTYIVDTRRGIYMHGQRRHSRSCYVRTSDAHHPHVASCTIWRAAGSHILAGTILMSV

SEQ ID NO: 216824 - protein, 94 aa, Zea mays
  Clone ID: MRT4577_129344C.1.pep
SPRCSTPLMSEYLLRSPCTRTSGWPLGSSARWTTWHPLMRLSIYRPASRPLSHIMLVRARPRRRLWRSPQHLAFVGAGVGCQPSVGGLKGSETP

SEQ ID NO: 216825 - protein, 46 aa, Zea mays
  Clone ID: MRT4577_129345C.1.pep
SGSNTRPQTRGVGSILLAEQNSLLKKSILYYRHYSFLITCRANVVT

SEQ ID NO: 216826 - protein, 96 aa, Zea mays
  unsure (1)..(96): unsure at all Xaa locations
  Clone ID: MRT4577_129346C.1.pep
MGDADAGSDSSEEAEEDAAEREAALEKGGYMEDVEDKPLVMEPEPNPELHGAPMYESARAPAVQDLIAEYDQPAWTPAVQEVEGDXSAPRVRLGDI

SEQ ID NO: 216827 - protein, 69 aa, Zea mays
  unsure (1)..(69): unsure at all Xaa locations
  Clone ID: MRT4577_129347C.1.pep
MAPKXVPAKKGDAKTHAFKVAKAVKSGAANKKTNNIRTYVTFHSPHDPXKARVLKYPRFHHYRREHCFD

SEQ ID NO: 216828 - protein, 257 aa, Zea mays
  unsure (1)..(257): unsure at all Xaa locations
  Clone ID: MRT4577_129348C.1.pep
ARRRRAHGRRGRRQRQQRGGGGGRGGEGGRAGEGRLHGRCRGQAPRHGAGAGAQPRAARRANVRVGEGTRRAGPRRRVRSAGVDTGGAGGGGRRXSAPRVRLGDIGGPVVEDPAAPRSTTPTAREGEDIGTTPVVRQFETMSLSDDPTHVGAGKKGAKAEEWKDKAADTVRGADGGGGASYTDTLKNAAAGTTEYGKKLASTVYEKVAGVTTAVGVGKRGDERTEATPASNTRTEERGAAPEATDATRGAGYTDKIK

SEQ ID NO: 216829 - protein, 85 aa, Zea mays
  Clone ID: MRT4577_129349C.1.pep
PGCSNTVSRLAETLQHTPKLLALHSNLYSASHHTANMHLNPTFYQINRYHQYCESTDHVALSYTSMIAKPLLSTNLHFTLQSTPI

SEQ ID NO: 216830 - protein, 54 aa, Zea mays
  Clone ID: MRT4577_12934C.1.pep
PPKGVANLAAVAALWVQNKFGFSPSMSMVVKAVSPLLVNARNQPARAPKGSSKA

SEQ ID NO: 216831 - protein, 75 aa, Zea mays
  unsure (1)..(75): unsure at all Xaa locations
  Clone ID: MRT4577_129350C.1.pep
QVVPXXPNPAPVSSPVQSHSAAAGRGGHGPSAPPIPEEREGSGGRIGAGFGAKERGGQRGGGGGGGRHGQGEERA

SEQ ID NO: 216832 - protein, 102 aa, Zea mays
  Clone ID: MRT4577_129351C.1.pep
TEKIFFFVHFGTKGWYASGKKFFWGGGEVFESECFMGCEPFVLFPPGKIPPGGRLQAISLSVCHALFKKDLGGFFSGGFFGFCGLFFFFLLTPFFLAFGFFF

SEQ ID NO: 216833 - protein, 59 aa, Zea mays
  unsure (1)..(59): unsure at all Xaa locations
  Clone ID: MRT4577_129352C.1.pep
LWEALVYVKPKYAPPFSDYYKGVSVTPQWETFYTRMGSFSAPPPPVSXTSLXPDWDPFY

SEQ ID NO: 216834 - protein, 279 aa, Zea mays
  Clone ID: MRT4577_129353C.1.pep
MAAAAPEAADEVAPSATLSVYKAARCIKRRASTLYNALRSVAEDAAFVAEVAALWPSLPLVANLRCGLWYAPPRAFAATCYFKSTDGHAGNWSFSTARLNLHLALLAGERGGCIIVDSTRRGKRFPDSMSKTIPIWCSVLNRAIERHRLQAIHKSAEVNYQSSTLLNGDAENNSDLSNWDSSVHLPVWVLGTEKNAIEGRIDEWTDQFESCGADIHSLAVGLQKPLRPLWISQRTRIWLNEVPELESWDFTPIILISASDAVATQRMSLDLSWPYFPEP

SEQ ID NO: 216835 - protein, 253 aa, Zea mays
  unsure (1)..(253): unsure at all Xaa locations
  Clone ID: MRT4577_129354C.1.pep
MAAAAPEAADEVAPSATLSVYKAARCIKRRASTLYNALRSVAEDAAFVAEVAALWPSLPLVANLRCGLWYAPPRAFAATCYFKSTDGHAGNWSFSTARLNLHLALLAGILNQNLRFMTVVLFPVQEGRGTLLHWFLYNLYSXQSWGKLKHRYPXERGGCIIVDSTRRGKRFPDSMSKTIPIWCSVLNRAIERHRLQAIHKSAEVNYQSSTLLNGDAEXNSDLSNXDSSVHLPXXVLGTEKXAIEXRIDEWTDQ

SEQ ID NO: 216836 - protein, 101 aa, Zea mays
  Clone ID: MRT4577_129355C.1.pep
TIYGVFFFGPFAGGFRLLAPIKKSRFPPPLVFDPRHLQNQKGSACFHALSFTISTTAPAVVKKTPSPRKKKKKKKKKKKKQKKKKKKQDKKKKKKKKKKKT

SEQ ID NO: 216837 - protein, 69 aa, Zea mays
  unsure (1)..(69): unsure at all Xaa locations
  Clone ID: MRT4577_129356C.1.pep
PPRPPPAPPPPLLAGQXTECFSPPPPRRPRTGAPGEPAPRRRTQSGPLGRGTVRALYKGTPPRPCPSCR

SEQ ID NO: 216838 - protein, 88 aa, Zea mays
  unsure (1)..(88): unsure at all Xaa locations
  Clone ID: MRT4577_129357C.1.pep
MAASSTACSVDDVSVKDASCTNVDLTTYSGNVLLIANVASHCGVPNSXYTELAQLYXKYTDHGFXILSFPCNXFGAQEPATNEEIVHF

SEQ ID NO: 216839 - protein, 165 aa, Zea mays
  Clone ID: MRT4577_129358C.1.pep
MHLPPLRRVPAALLVPARGLLEARVPWVRERALDHVVERERHLVPFLLAKDVLLAATPPPHAVPLHSLPSTIPFPFRPLRFLRLYPSAFALSPHPIEVSPTPRLSALHAAEAQAVDATVPDAADRLLRLLMLAPSRALPLRLVARLRLDLGLAFDFQRSLVPNYP

SEQ ID NO: 216840 - protein, 89 aa, Zea mays
  Clone ID: MRT4577_129359C.1.pep
ARRYASAGSRLRPFDYFLARRAPWASATFCSCAGTTSSTSASSVSLRLLKMMMLRLNNLSGQITLPINNFRSELHLYLSSICRRQGLNN

SEQ ID NO: 216841 - protein, 86 aa, Zea mays
  Clone ID: MRT4577_129360C.1.pep
MLRPKALTQVLSQANTGGVQSTLLLNNEGSLLAYSGYGDTDARVTAAIASNIWAAYDRNANQAFNEDNLKFILMDCMVGRVAITRV

SEQ ID NO: 216842 - protein, 88 aa, Zea mays
  Clone ID: MRT4577_129361C.1.pep
LCASDNTIARCASRCFAFLKPTSSTLIPPDTRLRHHERRGTGAFYIYHGCIHDCTFHHLFAIYGDDSFLTLEIASSPHHTTHYNPPAG

SEQ ID NO: 216843 - protein, 91 aa, Zea mays
  Clone ID: MRT4577_129362C.1.pep
SAADDARLLSDCTTVHHYAEEDSALPILSSSHGATDDVTSSHLIMLRRRDGVRRQQQQSRCQDPRRDHLLRGGANDHYCSTAAIELLTGDM

SEQ ID NO: 216844 - protein, 52 aa, Zea mays
  Clone ID: MRT4577_129363C.1.pep
CQLSRSVISDRGESEHSYLACARVVVQRKGGYFSPCVRLRDLSCSSTGGLLC

SEQ ID NO: 216845 - protein, 68 aa, Zea mays
  Clone ID: MRT4577_129364C.1.pep
RGHPFSGNRTHYLAIHPSFLRIRELPCNSPYTALSPGRRVLRTSKRPEPVNHCLPSLVQLARTIELQL

SEQ ID NO: 216846 - protein, 41 aa, Zea mays
  Clone ID: MRT4577_129365C.1.pep
SREHSGVQYNLVHRYIKRLPPRYVRFGVGFGAASTSTSKSW

SEQ ID NO: 216847 - protein, 119 aa, Zea mays
  unsure (1)..(119): unsure at all Xaa locations
  Clone ID: MRT4577_129366C.1.pep
CRLRLLRLRRRRSQASGAWCGPPKVPPGKNITATYRKDWMDAKATXYGKPTGAGPDDNRGSCGYKDVHKPPFNXMGRWSNIPILKDGLDCGPCYEIKGRKTVKCSGKPAVVHITDMNHE

SEQ ID NO: 216848 - protein, 157 aa, Zea mays
  Clone ID: MRT4577_129367C.1.pep
DPGIQPPPPLPYGPSLSPCRPQLPAARPGSPAPSASGTSTPSPSPAQTDCRRSCPAGSSPGTETSSMTATYSTAAAPSLPLRSPLQPTTTTVLTRQPKHEWRVRRALPITTKQALQYTPSYLCPKGGSPAVFISGGSCSLLVFGDENASCRVPAGLE

SEQ ID NO: 216849 - protein, 33 aa, Zea mays
  Clone ID: MRT4577_129368C.1.pep
LWEVILCDIVREITNFKQYIFYDHDKVIFLIFF

SEQ ID NO: 216850 - protein, 86 aa, Zea mays
  Clone ID: MRT4577_129369C.1.pep
FFPFNQLAALNPLLFFPHQKFLPLGQLVTTSPLSFLTKQKVFPFSHQFGGNPPTLLKMHQFVPFVQLVLKNPAPFFQKKIIGGPLF

SEQ ID NO: 216851 - protein, 118 aa, Zea mays
  unsure (1)..(118): unsure at all Xaa locations
  Clone ID: MRT4577_12936C.1.pep
MRVLLVALALLALAVSATYTHTIGHCXIXPTATISQLLPPDTSMGWGHPAVQGYRLQLRLAASALQQPIAQLQQQCLAHVTLPTIGTAQPPQQFFASGGALTGGNPGTYLEQQVVGCN

SEQ ID NO: 216852 - protein, 65 aa, Zea mays
  unsure (1)..(65): unsure at all Xaa locations
  Clone ID: MRT4577_129370C.1.pep
FQECXVYQMMKSRRNPFSESEIRNWCFQIFQDLIYMHXHGYFQCDLNPDMWFCIFFTNNVAMVDL

SEQ ID NO: 216853 - protein, 56 aa, Zea mays
  Clone ID: MRT4577_129371C.1.pep
KTAGPFFFFFFFWKAQTKFTTSCHSFTNRPLLITRPTLLTGFPGQGPLNLTGGSQN

SEQ ID NO: 216854 - protein, 53 aa, Zea mays
  Clone ID: MRT4577_129372C.1.pep
QLRRVVERLSGGARAAKLSCSRPVMFTLVQRVYLGSYRVRCCPYVFLNARSNV

SEQ ID NO: 216855 - protein, 49 aa, Zea mays
  Clone ID: MRT4577_129373C.1.pep
KPLKVLRYMFSQFHLKATKSRSRGAFSFALRKSQLLEKAAFWIQYLGLA

SEQ ID NO: 216856 - protein, 461 aa, Zea mays
  Clone ID: MRT4577_129374C.1.pep
MVSETNQSKNVCVIGAGPSGLVAARELKREGHKVVVLEQNHDIGGQWLYNPNVQEEDPLGRDPWLKVHSSIYESLRLMSPREVMGFTDFPFLVKKGRDPRRFPSHRELLLYLKDFCEWFELRDMIKFNTKVHYVGPLNYGVPSEDLKWVVRSKDKNSEEEVEQVFDAVVVATGHYSNPRLPCIQGMAIWKRKQMHSHIYRSPEPFRGEIVVVVGNSFSGQEISMELVKVVKELHLSSKSLDIYEGLSKVISKHENFHLRPQIETLREDGTVIFNDGSSIIADTILYCTGYTYSFPFLDTKGMVVVDDNRVGPLYEHTFPPALAPSLSLVGIPRRILGLPFFESQGKWVAQLLSGKKALPSYEEMMKSIKEFYHSKEEAGIPKHYTHEIEGFDYCDKYAENVGLPKLQEWRKDLCVSAVVNLFINLETYRDSWNDDIDEKLQEALRSPYFTQLGVEPEDPSL

SEQ ID NO: 216857 - protein, 129 aa, Zea mays
  Clone ID: MRT4577_129375C.1.pep
LPPFSGARHRPSSPRMPQLDLLRACERRRAVSPRRHGRSVAFLSRLSLECARRVLRCFARGISHCRGMRARPLFVASEQARLPSCTRAPPSGVRPPPLFFLRAWTPLSHSVQMRPPLVLYFFHTHACCS

SEQ ID NO: 216858 - protein, 85 aa, Zea mays
  Clone ID: MRT4577_129376C.1.pep
RVVDLFPCAWPYPVADPAQIFRPIAPAATAQSLPLFFLADHQPSSSSVCATKKNQASSSSFQQPQAPASTFPSAEILPWPPSLVL

SEQ ID NO: 216859 - protein, 230 aa, Zea mays
  Clone ID: MRT4577_129377C.1.pep
PAGPRTLAALRSFLHPPPAAPPHRRRRRWVTFRHPFRYKHQKELFVAAEGMYTGQFVYCGRRATLSIGNVLPLRGIPEGAVVCNVEHHVGDRGVFPRASGDYAIVISHNPDNGTSRIKLPSGAKKIVPSSCRAMIGQVAGGGRTEKPMLKAGNAYHKYRVKRNSWPKVRGVAMNPVEHPHGGGNHQHIGHASTVRRDAPPGQKVGLIAARRTGRLRGQAAATASKADKAT

SEQ ID NO: 216860 - protein, 130 aa, Zea mays
  Clone ID: MRT4577_129378C.1.pep
TGLPCITSYAHLHHLIGHEYSLLLQHWYCLFIHPRWNDEDYMGVISLGPVGDTNLKDGFLETIGQMLIAMINFCKVLLCLTVMNSGGPLTTTKEHIRYYLHEVDRTYSLNVWQFRTSACRRTIYHYREWY

SEQ ID NO: 216861 - protein, 230 aa, Zea mays
  unsure (1)..(230): unsure at all Xaa locations
  Clone ID: MRT4577_129379C.1.pep
MGRVIRAQRKGAGSVFKSHTHHRKGPARFRSLDFGERNGYLKGVVTDVIHDPGRGAPLAKVTFRHPFRYKHQKELFVAAEGMYTGQFVYCGRRATLSIGNVLPLRGIPEGAVVCNVEHHVGDRGVFASSCRAMIGQVAGGGRTEKPMLKAGNAYHKYRVKRNSWPKXVRGVAMNPVEHPHGGGNHQHIGHASTVRRDAPPGQKVGLIAARRTGRLRGQAAATASKADKAT

SEQ ID NO: 216862 - protein, 104 aa, Zea mays
  unsure (1)..(104): unsure at all Xaa locations
  Clone ID: MRT4577_12937C.1.pep
GECYHNIASSAYAAWSTRWIPREVYPLFVRMAVGLGIRAYQLVRNITGKPDVRVTKENRAGRVLDKQDQXNRYPXHAVRTILCGNSPEIIALINSFFAESLNDY

SEQ ID NO: 216863 - protein, 234 aa, Zea mays
  Clone ID: MRT4577_129380C.1.pep
MGRVIRAQRKGAGSVFKSHTHHRKGPARFRSLDFGERNGYLKGVVTDVIHDPGRGAPLAKVTFRHPFRYKHQKELFVAAEGMYTGQFVYCGRRATLSIGNVLPLRGIPEGAVVCNVEHHVGDRGVFARASGDYAIVISHNPDNGTSRTEKPMLKAGNAYHKYRVRRNSWPKVRGVAMNPVEHPHGGGNHQHIGHASTVRRDAPLGQKVGLIAARRTGRLRGQAAATASKADKAT

SEQ ID NO: 216864 - protein, 241 aa, Zea mays
  unsure (1)..(241): unsure at all Xaa locations
  Clone ID: MRT4577_129381C.1.pep
PSRLGRVSRSSLXYKSVFIVDTPSKLFLFSGCNSSMQTRAKALDVVKHLKENRHLGRCEIAAIEDGKLVGDSDAGEFWNLFGGYAPIPRDLPDAIKEEPLTAPSKKLFWINKKNLVPLEAHPLDREVLNSDRSYMLDCSTEIFLWMGMTTLVSERKSSVAVLEDYVHSQGRSFNVHTFIMTEGHETVDFKLHXQHWSRNVELKLYEAXREKVAAIFKHQGYDVTENPEDKPQQLIDLYGSL

SEQ ID NO: 216865 - protein, 261 aa, Zea mays; identical to SEQ ID NO: 215973
  Clone ID: MRT4577_129382C.1.pep

SEQ ID NO: 216866 - protein, 78 aa, Zea mays
  unsure (1)..(78): unsure at all Xaa locations
  Clone ID: MRT4577_129383C.1.pep
PMANPTGSRVSXXGPSQWAIPNPXXAGLFRYFXXGGYLGPQCRFLKDXDIPITVPGLKSLLSNRVPGPPTPPPPPPPP

SEQ ID NO: 216867 - protein, 40 aa, Zea mays
  Clone ID: MRT4577_129384C.1.pep
ILHDRQQVQGPCQVKIMVMPGFYVQDRVLKCRVLTTRSAA

SEQ ID NO: 216868 - protein, 46 aa, Zea mays
  Clone ID: MRT4577_129385C.1.pep
DGFLYLRSFLRNQLTLLTGGDRPDSYVHLKLSATIRPLIEYRDYTD

SEQ ID NO: 216869 - protein, 149 aa, Zea mays
  unsure (1)..(149): unsure at all Xaa locations
  Clone ID: MRT4577_129386C.1.pep
MKDGTSSGGGAFAAGSDPRQPSTAKPYAPPKLSPQDLPIDYAGFLAVAFGVLGVMLRYKVCSWIAIIFCAQSLANMKNFENDLKQLSMAFMXCCYGSGDELFWPRSSRQYKALNCGRTCATFFIGLFGASXIALPSVLTXMYVQFEQTS

SEQ ID NO: 216870 - protein, 152 aa, Zea mays
  unsure (1)..(152): unsure at all Xaa locations
  Clone ID: MRT4577_129387C.1.pep
MKDGTSSGGGAFAAGSDPRQPSTAKPYAPPKLSPQDLPIDYAGFLAVAFGVLGVMLRYKVCSWIAIIFCAQSLANMKNFENDLKQLSMAFMXCCYGSGDELFWPRSSRQYKALSCGRTPCASFFIGYLADLFGASXIALVLTXMYVLFEQTS

SEQ ID NO: 216871 - protein, 84 aa, Zea mays
  unsure (1)..(84): unsure at all Xaa locations
  Clone ID: MRT4577_129388C.1.pep
KKKYITRGFTGPQGNPKSLGSFXKPGAKPVFFPGPPLLGPPKKNPPKPGFPKFFFKETKTLYVPPKFXPQKPPFEALKSPLPPP

SEQ ID NO: 216872 - protein, 121 aa, Zea mays
  Clone ID: MRT4577_129389C.1.pep
EVIINLQCGLTSLQNLLTSNPGLAAVFATKERLVPLFECLALHVSPESSIPQICLSILSLLTKHAPCLEAMVAERMSLILLFQILHCNPPCRDGALAVLYSLASTPELAWAAAKHGGVVYI

SEQ ID NO: 216873 - protein, 133 aa, Zea mays
  unsure (1)..(133): unsure at all Xaa locations
  Clone ID: MRT4577_12938C.1.pep
STFIMIMPDYAQRPLLGEILLPFMRTTPSHLKDLMLGNAQRTFAEKTYADLPSWPFFHGLVDYXISGPVEAMVXDVYSVVTTGRNDIGGSHXPWLSEPGTXIRGNFAGNLGTNVIHGSDCIEXANLEIALRFP

SEQ ID NO: 216874 - protein, 107 aa, Zea mays
  Clone ID: MRT4577_129390C.1.pep
MVTGKVAVVLLACWTLVLYQPVLGRLPCNNDQKREILRECDPLNSTPDYTPSRHGACCVAVRKVPGTNMLCIASILSLADKAKYSVRKILGFRDACAPSHPHHQVMA

SEQ ID NO: 216875 - protein, 88 aa, Zea mays
  Clone ID: MRT4577_129391C.1.pep
HFSFHFTVVQHLAFHLTLTSDISHSYLYPFMSQLPKQHIQSKVSKMVKLFFVSCVCIIFYNYITDVYNLVVLLKSSHAVTISYTKIIF

SEQ ID NO: 216876 - protein, 112 aa, Zea mays
  Clone ID: MRT4577_129392C.1.pep
MVTGKVAVVLLACWTLVLYQPVLGRLPCNNDQKREILRECDPLNSTPDYTPSRHGACCVAVRKVPGTNMLCIASILSLADKAKYSVRKILGFRDACAPSHPHHQVVNTRSIT

SEQ ID NO: 216877 - protein, 97 aa, Zea mays
  Clone ID: MRT4577_129393C.1.pep
WEAGLGGGLGSGRIRGVGRHGGGRVLVGLGRRIGWRVRGVLLDGASGEEQSEERGVEDDGGPRRHCERCERAAAAAALLCGAVCLCECQAANPSCRI

SEQ ID NO: 216878 - protein, 56 aa, Zea mays
  Clone ID: MRT4577_129394C.1.pep
PLLSTGGTRQQRREFRDLVCLMVDPLRPGDFNQALIELGATYMYQDKTWLFSMPTL

SEQ ID NO: 216879 - protein, 143 aa, Zea mays
  unsure (1)..(143): unsure at all Xaa locations
  Clone ID: MRT4577_129395C.1.pep
FGVLPFGPGRRVCPGAPLGVGLVAPLVGPCLPPFXWSLPAGPXPGGVCVVGSPGLVXFLGXPLRAVVXPRLAXXGLCPWVPVGLGACGRFGVAPPVFFSLVRLLLLAFGCPALFVLFVGCWPFASPRVVCRLSWACALCLSPL

SEQ ID NO: 216880 - protein, 53 aa, Zea mays
  unsure (1)..(53): unsure at all Xaa locations
  Clone ID: MRT4577_129396C.1.pep
GGVWGGGGPLMGGGXGGGGGGYGAGGGYGGGGGGYGGGTRGGGSGNSPGNWRN

SEQ ID NO: 216881 - protein, 145 aa, Zea mays
  unsure (1)..(145): unsure at all Xaa locations
  Clone ID: MRT4577_129397C.1.pep
KDRGGGRDNNQRKPPPTKTTTGRXTGTKXDKTGGGRPKKTNRPAQRKPKHEAARQEAQARRHRRREGTKNTTGRKRKQARDNPRRGKQRGGKNKKADSRGRSNGRPEATAKNGTKAQXGDRNTRGRRXASRAKKRSKGNTQSRTP

SEQ ID NO: 216882 - protein, 103 aa, Zea mays
  unsure (1)..(103): unsure at all Xaa locations
  Clone ID: MRT4577_129398C.1.pep
MSPHVSFGTDSGTKKEGSFVPRVHIYAGILVVTPKEAQEVHMMSAEKASVQQAAAIFAAGKLTEAMADQFGTIQKQVGXPTDHAQIIIQGVPTTNYSSVSEAS

SEQ ID NO: 216883 - protein, 85 aa, Zea mays
  Clone ID: MRT4577_129399C.1.pep
SKLIVPLGNAQKGFSPKGFSSKSSPLPQTPGPRKYFFPQRRLTKGGEGPGGGAGGVSPPGSWHKKFYVPGVSKGRFFKSGGSLFP

SEQ ID NO: 216884 - protein, 92 aa, Zea mays
  Clone ID: MRT4577_12939C.1.pep
AQSNRVPTAKGGDGSFKRMGAPVLVLLLLLVAKKLGTTKVAKARPSLSQNPRFKGLCINNNNCANVCQTKNFPGGKCKAKGPTPKCFCKKIC

SEQ ID NO: 216885 - protein, 53 aa, Zea mays
  Clone ID: MRT4577_1293C.1.pep
EKGHIIKITNCTEIDLIKSQLKIALCKSHTHFQVSSRIPACLLGLSSLGLHCT

SEQ ID NO: 216886 - protein, 183 aa, Zea mays
  Clone ID: MRT4577_129400C.1.pep
MPSAVAEPLPDGKYETDRAGAVTVVGAGADHSIDGAVNGSKDESFFEARPWLDSDSEDDFYSVRGDFTPSRGSTPVHPRLTPSSGRMLADRSGPSLVKKKQRLLELLQEEQHYDDEDDSVTDASNDLESSAVHAIEEEEEHTRTRRRSEKSKKSSGSGCLPTFIWKRSFTACRKKKKEKGAEG

SEQ ID NO: 216887 - protein, 82 aa, Zea mays
  Clone ID: MRT4577_129401C.1.pep
ETTSGLSGPWLSFNNRVKALIRSGDLHGASGAARAAFSSGVRPTVFTCNGVAATMVRAARHDDAVVLFDFFFRRSNIVPNIV

SEQ ID NO: 216888 - protein, 72 aa, Zea mays
  Clone ID: MRT4577_129402C.1.pep
SIELSCIQQKLYMSNFRVNKTSFDFVEENVHHQIDRLTDAYNFYYLAKHWDCNLHCGTLYLAKHREWKLLLR

SEQ ID NO: 216889 - protein, 45 aa, Zea mays
  Clone ID: MRT4577_129403C.1.pep
SHIGYPQGKFISSHFCESGVTTHEGESLSCQWVPGYLHSIGVAGS

SEQ ID NO: 216890 - protein, 172 aa, Zea mays
  Clone ID: MRT4577_129404C.1.pep
RDTSKNSDVMRALSNAVHALSWRSGTTGAAVEACHWADGYPLNVLLYCSLLQAIFDLRESTVVLDEVDELLELIKKTWPTLGINRMLHSVCLSWVFFQQYVITGQVEPDLAAAALAILVDVAADTKHGSRDPMYVKVLLSALGGMQEWSEKRLLDYHDSFEKDIGGAATEGM

SEQ ID NO: 216891 - protein, 72 aa, Zea mays
  unsure (1)..(72): unsure at all Xaa locations
  Clone ID: MRT4577_129405C.1.pep
IPYTMMKPACFETIGELIYKHAVPVPKSDCYTTTQLAINXAGGYIARSIXAIDYNPGDNLGYVMNNAEGATG

SEQ ID NO: 216892 - protein, 75 aa, Zea mays
  Clone ID: MRT4577_129406C.1.pep
GGFAANGEPFFSKKKTLFIYMGAWRGVFLGLGLQDHLHNPGVVFLFFGQAPPPKVPLLKKFPLQISFLGGVVKLF

SEQ ID NO: 216893 - protein, 130 aa, Zea mays
  Clone ID: MRT4577_129408C.1.pep
MAPLKLYGMPLSPNVVRVATVLNEKGLDFEIVPVDLTTGAHKQPDFLALNPFGQIPALVDGDEVLFESRAINRYIANHASYLLYLSKTPKAGLVAARPHVKAWWEAIAARPAFQKTVAAIPLPPPPSSSA

SEQ ID NO: 216894 - protein, 86 aa, Zea mays
  Clone ID: MRT4577_129409C.1.pep
SLKQTRKIHASLGINSPEHEKKSGGKNSTDAKERRQLKSRRSPYGGKVPVKKGGSRGDRSWRGDRRRGAAAGQRRSREKSLIPSAP

SEQ ID NO: 216895 - protein, 107 aa, Zea mays
  Clone ID: MRT4577_12940C.1.pep
ARVPFTSNKGIKKQGVRYANPFAFFRKDPLKECGAPLQKSVFKGASETPWWSPVLGMPASIVALPARPKIKNGSSPPRFLNWVGKSPAFKGTDNGPGLVSKRSIRFF

SEQ ID NO: 216896 - protein, 124 aa, Zea mays
  Clone ID: MRT4577_129410C.1.pep
MAPLKLYGMPLSPNVVRVATVLNEKGLDFEIVPVDLTTGAHKQPDFLALNPFGQIPALPQQDPQGRARRRPPPRQGLVGGHRRPPRVPEDRRRHPLAPAALLLGLTSPCAAWVADASEPQPRVE

SEQ ID NO: 216897 - protein, 145 aa, Zea mays
  Clone ID: MRT4577_129411C.1.pep
RTRGKKKKKKKKKKKKKKKKKKKKKKKKKKKKKKKKKKKKKKKKKKKKGGGLFRGPKFTSPCLQRISFFLGPPNLISWAGFLKLGAWKNLGFPKFNPFEKIPLFPSWVYTKRAPPFPLSKNLPTLIGNWNPPFSGPLSAGGGGVP

SEQ ID NO: 216898 - protein, 190 aa, Zea mays
  unsure (1)..(190): unsure at all Xaa locations
  Clone ID: MRT4577_129412C.1.pep
MAPLKLYGMPLSPNVVRVATVLNEKGLDFXDEVLFESRAINRYIASKYASEGTDLLSATASAAKLEVWLEVESHHFYPNASPLVFQLLVRPLLGGAPDAAVVDKHAEQLAKVLDVYEAHLARNKYLAGDEFTLADANHASYLLYLSKTPKAGLVAARPHVKAWWEAIVARPAFQKTVAAIPLAPPPSSSX

SEQ ID NO: 216899 - protein, 219 aa, Zea mays
  Clone ID: MRT4577_129413C.1.pep
MAPLKLYGMPLSPNVVRVATVLNEKGLEFEIIPVDLTTGAHKQPDFLALNPFGQIPALVDGDEVLYESRAINRYIATKYASSGAALLPATASAKLEVWLEVESHHFYPNASPLVFQLLFRPLFGGAPDPLVVDKHAHELAKVLDVYEAHLASNKYLAGDEFTLADANHASYLLYLTKTPKAGLVNDRPHVKAWWEEIAKRPAFQKTVAAIPFPPPPSSA

SEQ ID NO: 216900 - protein, 221 aa, Zea mays
  Clone ID: MRT4577_129414C.1.pep
MAPLKLYGMPLSPNVVRVATVLNEKGLDFEIVPVDLTTGAHKQPDFLTLNPFGQIPALVDGDEVLFESRAINRYIASKYASEGTDLLPATASAAKLEVWLEVESHHFHPNASPLVFQLLVRPLLGGAPDAAVVEKHAEQLAKVLDVYEAHLARNKYLAGDEFTLADANHASYLLYLSKTPKAGLVAARPHVKAWWEAIAARPAFQKTVAAIPLPPPPSSSA

SEQ ID NO: 216901 - protein, 38 aa, Zea mays
  Clone ID: MRT4577_129415C.1.pep
GIRKAGHLLHVERPCAYNRQLQRWFAYVNSTEDHVQAR

SEQ ID NO: 216902 - protein, 222 aa, Zea mays
  unsure (1)..(222): unsure at all Xaa locations
  Clone ID: MRT4577_129416C.1.pep
MAPLKLYGMPLSPNVVRVATVLNEKGLDFEIVPVDLTTGAHKQPDFLALNPFGQIPALVDGDEVLFESRAINRYIASKYASEGTDLLPATASAAKLEVWLEVESHHFHPNASPLVFQLLVRPLLGGAPDAAVVEKHAEQLAKVLDVYEAHLARNKYLAGDEFTLADANHASYLLYLSKTPKAGLXVAARPHVKAWWEAIAARPAFQKTVAAIPLPPPPSSSA

SEQ ID NO: 216903 - protein, 93 aa, Zea mays
  Clone ID: MRT4577_129417C.1.pep
LAGLSASRRMATGTGSQQRRRTCARDRGKSPLASSPLCCVHLSPSLLGSTSKLLVYCSKERVQLLLTGRSDDFRLLLTVECGPIRDSSVENLR

SEQ ID NO: 216904 - protein, 222 aa, Zea mays
  unsure (1)..(222): unsure at all Xaa locations
  Clone ID: MRT4577_129418C.1.pep
MAPLKLYGMPLSPNVVRVATVLNEKGLDFEIVPVDLTTGAHKQPDFLALNPFGQIPALVDGDEVLFESRAINRYIASKYASEGTDLLPATASAAKLEVWLEVESHHFHPNASPLVFQLLVRPLLGGAPDAAVVEKHAEQLAKVLDVYEAHLARNKYLAGDEFTLADANHASYLLYLSKTPKAGXLVAARPHVKAWWEAIAARPAFQKTVAAIPLPPPPSSSA

SEQ ID NO: 216905 - protein, 222 aa, Zea mays
  unsure (1)..(222): unsure at all Xaa locations
  Clone ID: MRT4577_129419C.1.pep
MAPLKLYGMPLSPNVVRVATVLNEKGLDFEIVPVDLTTGAHKQPDFLALNPFGQIPALVDGDEVLFESRAINRYIASKYASEGTDLLPATASAAKLEVWLEVESHHFYPNASPLVFQLLVRPLLGGAPDAAVVDKHAEQLAKVLDVYEAHLARNKYLAGDEFTLADANHASYLLYLSKTPKAGXLVAARPHVKAWWEAIVARPAFQKTVAAIPLPPPPSSSA

SEQ ID NO: 216906 - protein, 122 aa, Zea mays
  unsure (1)..(122): unsure at all Xaa locations
  Clone ID: MRT4577_12941C.1.pep
MQTSLKLTVLALLLAAAGHHRLLPVPTARCCWLNPEIYDAGELSQRAFPDRFMFETVTSAYQLEGMAKHGGRGPSIWDACIKVPGTIPNNATCDMTVXDEYHRGAEDVAIMKNMGLDAYRPS

SEQ ID NO: 216907 - protein, 373 aa, Zea mays
  Clone ID: MRT4577_129420C.1.pep
MDRLVVFSRRRRRWILLAAAGAAAAVGAYKIYHHPAVAERRRRLVRLAAAIAAFADAAASSADAVALVTSDLADFVRSDADEVPRSVKQLAKLAASREVSATVSTLSEAVTSGILRGSGSSSSGPASGGTVALSDRLVDRLFSDSGERLASAVAGSFARHLVLAFYSAPSPQGEASSSPTMWVNVVATGKCRKAISNWVEVFVGTAVREFIDKTIHINTYEQLFEGLTNPRHDAKVKELLVSVCNAAVETLVKTTHHALYSTNGNLGANGSVSGNANGAGEGWVETVSSTLAVPSNRKFVLDVTGRVTFETVRSFLEFVLWKLQDGARKGGGSVVDSGLRVVRYMSDKSMVIATICITLCLHVLNGTRLLVTA

SEQ ID NO: 216908 - protein, 175 aa, Zea mays
  Clone ID: MRT4577_129421C.1.pep
PRVRPRVRAHSGGIVSGKQFAFLRNEAGNICPGAGVLFEFFGIRPERLAAFPTVHLCPSTRIYTGTTVYSFDKNGSMIFLDISYNRLTGAIPAGLGNMMYLEVLNLGHNDLNGTIPYEFSGLKLVGALDLSNNHLTGGIPPGLGGLTFLADLDVSSNNLSGPIPSTGQLTTFPQS

SEQ ID NO: 216909 - protein, 317 aa, Zea mays
  Clone ID: MRT4577_129422C.1.pep
LSFSPVPPLFADKHAAFSSPSTPAAAGPGRCSPPPAEKCRRSVRTSGTSSGCRRSSWTTTSSPRRRRRPWRPGARATRRTAWRGSRAGSRASSATTGSGSRLPPPPPQIAPPSAKVPAGAGGHYHPLAHLVSQRQMQAAQFHLLKQHQLLKLQRQRHLAAWSARQSACAKPVGCGGGDAPLGLNPAAWPPLQKPPPPPPPQQHQAPAHPASGMRAVFLTPPGAKRERNGTGVFLPRPAGAPAAEPKRKTAGACSTVLVPARVVQALNLRLEDLGAQPRYYPGGFVLDHDALISRSNAMLASQKRRAAAAAAVCHRST

SEQ ID NO: 216910 - protein, 135 aa, Zea mays
  unsure (1)..(135): unsure at all Xaa locations
  Clone ID: MRT4577_129423C.1.pep
IFRSSLIMQMTMMVPPSFPQEHSLNKXEHRLLRWXLVLVVKHRDAVYGPEFVNEDDGRNELSGFSLAHRKDVDDTELASNDEDSDGDSDDRRVCGQGGRRGEVELLGQVSAVSFVLADAFSGVSSSMWIFFIIII

SEQ ID NO: 216911 - protein, 38 aa, Zea mays
  unsure (1)..(38): unsure at all Xaa locations
  Clone ID: MRT4577_129424C.1.pep
PAGGEXRGAXXVGXREREPSRVWLVXGLTRLWWCAASC

SEQ ID NO: 216912 - protein, 119 aa, Zea mays
  Clone ID: MRT4577_129425C.1.pep
EAGGGGRATGEVAAGCCGSRASRPHLGTWAAATRSPPYHGTVSRARGDHAGDGHFRRGQARRLPPFIICCHDRCRCCRPGQAHHLPLFLCCHDRCWGLGGGVEISRATSALETGFARLA

SEQ ID NO: 216913 - protein, 122 aa, Zea mays
  unsure (1)..(122): unsure at all Xaa locations
  Clone ID: MRT4577_129426C.1.pep
MCSGSCLALRCAACACEACRTAAGSIGRRSARIAYCRLFALFLFAFWSLREVDAPLLHSIPWIKQFHKTPDRKWFEIDAALRVRLGNFLLFTILAVIMXFINYQKDPLNKNHYXRWMHKIFC

SEQ ID NO: 216914 - protein, 545 aa, Zea mays
  Clone ID: MRT4577_129428C.1.pep
MGLIGDPSLAGFETGRSASEDAAGPPPASPVSRSRSGGAALGSAGKPPLGGVRLRSSLSDGPDPTDEDPRCLIRNLDDGREYVVKEEFALREVGTGRHLTVEELARSPIVQELMRRQAFSTPNSNCTSNSQSGTSTPIERSSSGSSNGVGRAKRRSSWLRSIRCVAGSFASHSRDRRSSDEKDASPEKGGHHSSSTTDDSQDSVPRHGPARVKVRQYGKSYKELSGLFMTQEIQAHSGSIWSIKFSPDGRYLATAGEDCVIHVWEVLEFERARKENEVCNPLVAMVCNESSETTVGSAAPSESHWEKKLRSKVLHGGGSVSSDRLMVPEYVFALSEKPVITFAGHSEDVLDLSWSKSQYLLSSSMDKTVRLWHMSSTYCLKTFSHTDYVTCIQFNPVDDRYFISGSLDEKVRIWSIPKREIVDWVDLHEMVTAACYTPDGKGALVGSHKGSCHLYDTSDDMLCYKTQIDLQNKRRKSSQKKITGFQFVPGDSSMVIITSADSRIRVLDGFELAHRFKGKILLSTIFHVHSQFALVQNFRTWCNHC

SEQ ID NO: 216915 - protein, 82 aa, Zea mays
  Clone ID: MRT4577_129429C.1.pep
SARPRFTDARRMRRSTTAISPPSSGTASRSRTPTIRSLPPPPRSSSGRRSRLHRAPPEKPWSPSGRCSSTCLPPPSMRGSCT

SEQ ID NO: 216916 - protein, 108 aa, Zea mays
  Clone ID: MRT4577_12942C.1.pep
PKRPQRPTGSLVLVRQGRRLRNFTFRWDNLALGVQPKPKPTAGPSTSTSDARLSDYKGFSVLGHGNGGTGSKGRNRRSGQPVELKLLGDGATLGAPEAKKLMLAGDPP

SEQ ID NO: 216917 - protein, 291 aa, Zea mays
  Clone ID: MRT4577_129430C.1.pep
PKREIVDWVDLHEMVTAACYTPDGKGALIGSHKGSCHLYDTSDDMLCYKTQIDLQNKRRKSSQKKITGFQFVPGDSSMVIITSADSRIRVLDGFELVHRFKGFRNTSSQISACLAGNGRYIISASEDSRVYIWRNDDGSKPSKKKGIVSVTNTHEHFHCESVTVAVTWPFTSTTMTSLMNPRKQELERGSENGYSPQDLQTKLAKAREMTDVEYRRTNITSYNSKHNSDRTSPAWPEELVTPPNQSLSATTCHANEGDQALNRSAWGLVIVTAGRGGQIRTFQNFGFPVRV

SEQ ID NO: 216918 - protein, 102 aa, Zea mays
  unsure (1)..(102): unsure at all Xaa locations
  Clone ID: MRT4577_129431C.1.pep
XPAREPRVFFSPILTPLLFPTILVTIVFITFMFCMAHKCKVRFFSFRIPFLSICSMIVQVYAKHPPGRKLTPTGCSARSGGVAVRPVLCEPCIKYMQTRRCK

SEQ ID NO: 216919 - protein, 104 aa, Zea mays
  unsure (1)..(104): unsure at all Xaa locations
  Clone ID: MRT4577_129432C.1.pep
MRAVVHAWAGKMTGGYIGGXLGGSFAIEYLCDTFIXSRKAFGGSTHKTVNDKEWWQATNTKFQAWHSTDGPPVVMNPMSRQNFINKSTENGLAKKPLSKAWVPA

SEQ ID NO: 216920 - protein, 174 aa, Zea mays
  unsure (1)..(174): unsure at all Xaa locations
  Clone ID: MRT4577_129433C.1.pep
LTSVPRRGHRTDTQSDDGPSWRLHQTTSFLGKALDSRVAGVDAGDRITMRRTVKSVPQRIWNGPDRPKYLGXPFSEETPAXLTGEFPGDYGWETAXLSADPETLARNRQLDEIHSRXLMLDALGWVLPEILGENEDQIDEVQXSRTXAQIFSEDALDYLANPYLGNAHSMLSMW

SEQ ID NO: 216921 - protein, 141 aa, Zea mays
  unsure (1)..(141): unsure at all Xaa locations
  Clone ID: MRT4577_129434C.1.pep
GEGXXXEKXEEGGERGXXKGEGKKXENRXGEGXHTLGKGKGEGEGKXXQTXEXXRGXAXXAEXPEGSNKXKTRGRQXXGKHEQKXDGGXGXXKGRGGXXDQKKXGGDTXDSRRGGPXXGGXSTKKGHTXRTKEGKNHXXKK

SEQ ID NO: 216922 - protein, 36 aa, Zea mays
  Clone ID: MRT4577_129435C.1.pep
CTPENGDISMRKMESEACIHPIFRMASGEVSVIDLA

SEQ ID NO: 216923 - protein, 83 aa, Zea mays
  Clone ID: MRT4577_129436C.1.pep
ASSLNSVLLFLPLDRSKCSHSTVGSVGGPAWSATKFYRPVYHVPCSRCARSQLQCASFGVCISRHSALCIACFSDAFFSSVRM

SEQ ID NO: 216924 - protein, 183 aa, Zea mays
  unsure (1)..(183): unsure at all Xaa locations
  Clone ID: MRT4577_129437C.1.pep
MASQLSAAXAPESTDLRGYAAPQGXAAALPXRRVGRKRSWRDGMRCDYIGCSTNLTMVTXTTLMLHAGRFVLAPLENRNATGALKLXARNSGLQTGDPDGFTLIDTLAXGADGHILXAAIVLGLNNTGALDQYHWMDPYILGGKIRLIILYRSAGRQVPARGDFGTCVRTYVHIAFILVAMDI

SEQ ID NO: 216925 - protein, 66 aa, Zea mays
  Clone ID: MRT4577_129438C.1.pep
PAGSYSSLLPSNSAVSTGDRPAVTREEIDGSLDPDRAQRHRQARLRRSSLVANGGEEALPRLTGDL

SEQ ID NO: 216926 - protein, 59 aa, Zea mays
  unsure (1)..(59): unsure at all Xaa locations
  Clone ID: MRT4577_129439C.1.pep
NQTPPRAGPPGCVGAXKPRKPKVHRANAPQRPQGNNSSLSCTAQHQPQETGPALLVQRN

SEQ ID NO: 216927 - protein, 58 aa, Zea mays
  Clone ID: MRT4577_12943C.1.pep
APQSKPGLVGLLGGSDCHQSGPETVSPLQELTGYWSRNTGPLSFQTRNARHDMWYSIS

SEQ ID NO: 216928 - protein, 60 aa, Zea mays
  Clone ID: MRT4577_129441C.1.pep
PFPFGLLFCWEGRSVLSSSLSPHLTRMGCNASQLGWVTALFFPVVVVVTPRPVNLGYVTL

SEQ ID NO: 216929 - protein, 32 aa, Zea mays
  Clone ID: MRT4577_129442C.1.pep
DSHCASIHSADEVSNCLHPVYVGKSSLLYLFI

SEQ ID NO: 216930 - protein, 139 aa, Zea mays
  Clone ID: MRT4577_129443C.1.pep
ISSRCRFLGTDGKLDQLIINWRKNRKKWDTKKKFHENLAAVLDFALPSPPSVGDKAKDDEQADCGICYAKHLPVDDELGAHSGCATDYMCENPSCSRAFHSVCLRDWLRSITTTRQSFDVLFGNCPYCSDPVAVKITGH

SEQ ID NO: 216931 - protein, 51 aa, Zea mays
  Clone ID: MRT4577_129444C.1.pep
LKRFPPPLILKRSLPDGTNYFSPLVLVTEGVPCSRSSGDQLLVSPLVFFGS

SEQ ID NO: 216932 - protein, 59 aa, Zea mays
  Clone ID: MRT4577_129445C.1.pep
TGKLANASPACQQFTVRKIIFQPSSWRGPVLVHSDQQGAFFGCVSQGGACAHRKAFWRN

SEQ ID NO: 216933 - protein, 124 aa, Zea mays
  unsure (1)..(124): unsure at all Xaa locations
  Clone ID: MRT4577_129446C.1.pep
MTDETRXLKEYLEGYIEEXILHFELTGGVAGSEEDFEQIGGSNRATTESANEXLTDDDDEADDDAXNLLNXNMKDVLYDLXCYDWCNGRSKTTEENKEAYNKHHKKTDRKKDRACGGGNDAGDG

SEQ ID NO: 216934 - protein, 112 aa, Zea mays
  Clone ID: MRT4577_129447C.1.pep
IFFEFLFILEASSSMVRFCYGVGILIYQPDDYSVCIKNGDLNAFIPLKPAWPLLPLLVLLLPSLVLMLLLLLLLYYYYLLGHRRRCLSISLCFPLSLAACLMPASVWMCVIL

SEQ ID NO: 216935 - protein, 114 aa, Zea mays
  unsure (1)..(114): unsure at all Xaa locations
  Clone ID: MRT4577_129448C.1.pep
DRETQRXRGFRFYTLSTGEXTRHPLEGLNGRDLDGLNFTVNEANSRGARRGGGGGYGGGRGGGVYGGGGRRDGGGGYGGGGGYGGGGGYGGGGGGYGGGNRGGGYGNSDGNWRN

SEQ ID NO: 216936 - protein, 153 aa, Zea mays
  Clone ID: MRT4577_129449C.1.pep
SSTVSDPLELLLSSNGIVGPIVEAFSFLAIATSYIGFVLGISDFLADLLKLPSGQNKPLPYVLTLFPPLVLSLLDPEIFFKALDFAGTYGVLVLFGVFPAAMSWSERYSDELEAPVPPIVPGGKFTLSAVMGGALLVIVPELIKDVMQLQGLH

SEQ ID NO: 216937 - protein, 290 aa, Zea mays
  Clone ID: MRT4577_12944C.1.pep
MVRKETAMRLPPQHQGLEVKIPSFFRCPISLDVMRSPVSLCTGVTYDRASIQQWLDSGNTTCPATMLPLPSTDLVPNLTLRSLIAHWAASAASCSPTAAGGAGVADSSSARTSSPASLVRQVASSGVDPSPALRELAAYLSDDDVDDFEKNALVGAGRAAETVASVLRRRAEETGVEGVEAATRVLALILASDGIDDSNKKRVATGLAADAAASTASLARVMRGGSDLEARIDAAKLAELLLANAAGEAKAAATKSSELLAELVRLVGTVDETGALDRNAVDTGLSCLAA

SEQ ID NO: 216938 - protein, 134 aa, Zea mays
  Clone ID: MRT4577_129450C.1.pep
MVGIFSRFSAGAHRRSKSVAEAVETLTPNMSTGESDPAAAVPAESPHGIEVGVEFKPVERPVEPINLDEPVKCPLPEPSILHVSHPLSSSVLYRKMALEYQFIDKTINFLFLHRSVLNGIRKLSCAAECDVKPF

SEQ ID NO: 216939 - protein, 42 aa, Zea mays
  Clone ID: MRT4577_129451C.1.pep
AEKNDCGDGDGYAADLVPGGPCDTHPRPFRQTLGDGAPSQST

SEQ ID NO: 216940 - protein, 39 aa, Zea mays
  Clone ID: MRT4577_129452C.1.pep
MATVWACAGKEAYDQVCRRRTSVPNLREGRSVVSMGAAE

SEQ ID NO: 216941 - protein, 96 aa, Zea mays
  unsure (1)..(96): unsure at all Xaa locations
  Clone ID: MRT4577_129453C.1.pep
FIPSSHPIKNTISNPHXKTIFKLLLHTXTHKILITSIFEPNPPXIIQXIPIPLKYVPPKPYFXTTLXIHPSPSQKFFPIPPLTKPFIPTSKPKTNF

SEQ ID NO: 216942 - protein, 65 aa, Zea mays
  unsure (1)..(65): unsure at all Xaa locations
  Clone ID: MRT4577_129454C.1.pep
RAGNMEHCVKXNEPIQPIHEMDDLWQSQEDFLIKEIMKHVKVKNAYSQEVHKCETSTKEPTTCHE

SEQ ID NO: 216943 - protein, 126 aa, Zea mays
  unsure (1)..(126): unsure at all Xaa locations
  Clone ID: MRT4577_129455C.1.pep
MFLGPVPSAPKPKRRRECHGVSIDMGMAFTRLFXTDFFNREAIILVLRLDIAGXTTILYTLHMGEVLFTIPTIGFNDYTVQYNNIKAQVWDLEGQTCIKPYWQCYFPNTQAIIYXVDDASDTYRLV

SEQ ID NO: 216944 - protein, 97 aa, Zea mays
  Clone ID: MRT4577_129456C.1.pep
SCKCSFMRSVIRRCVRLCLRMGTIIDPMRYAQTLHEALHVGQTRWDTGWVYRRVEDPAERLPLRMSSRRISCQLISRTFTGADRCLQSSVPYVVSVG

SEQ ID NO: 216945 - protein, 171 aa, Zea mays
  Clone ID: MRT4577_129457C.1.pep
LPKYPTNTNQYHNTTTPQQPHHSLISKMSCPIIGTTNDTLPPNHPSIDLSKDGQTCPVVGATTDHHHNLHSHPPVPTNETTATACPALKNNIVKQPRAQEMDDAICPIVGVATTVLPPDHPDMLKANEGDVCPVTKATVGHHKDKVATHPSVEAARDGAVCPVTGQRQQLA

SEQ ID NO: 216946 - protein, 503 aa, Zea mays
  Clone ID: MRT4577_129458C.1.pep
MMLAILARRRAAEAVLRRPQAAAGAAVSAWRAYAAAGEESDVVVVGGGPGGYVAAIKAAQLGLKTTCIEKRGTLGGTCLNVGCIPSKALLHSSHMYHEAKSSFAHHGVKFSNLEVDLPAMMAQKDKAVAGLTKGIEGLFKKNKVTYVKGFGKLSSPSEVSVDLIDGGSTIVKGKNIIIATGSDVKSLPGITIDEKKVVSSTGALCLSEIPKKLVVIGAGYIGLEMGSVWNRLGSEVTVVEFAPDIVPSMDGEVRKQFQRMLEKQKFKFMLKTKVVGCDTSGDGVKLTLEPAAGGEQTILEADVVLVSAGRSPFTSGIGLETLGVETDKAGRILVDKRFMTNVKGVYAIGDAIPGPMLAHKAEEDGVACVEFIAGKEGHVDYDTVPGVVYTHPEVASVGKTEEQVKALGIPYRVGKFPLLANSRAKAIDDAEGVVKVIAEKETDKILGVHIMAPNAGEIIHEAVIALQYGASSEDVARTCHAHPTVSEALKEACLQTFDKAIHI

SEQ ID NO: 216947 - protein, 76 aa, Zea mays
  Clone ID: MRT4577_129459C.1.pep
MAGYRRTISFPAPKPGSDALALATASDKLAAYRIRSSSLPCRFHPLLLQLDDDVDALRLVIGQSPPCPSASSASAS

SEQ ID NO: 216948 - protein, 39 aa, Zea mays
  Clone ID: MRT4577_12945C.1.pep
SCQAISSCPLLLLLVLGLTIVVAATRAGSASELIQGLTS

SEQ ID NO: 216949 - protein, 504 aa, Zea mays
  unsure (1)..(504): unsure at all Xaa locations
  Clone ID: MRT4577_129460C.1.pep
MALAILARRRAAAAVLRRPQTAAGAAVSAWRAYAAAGEESDVVVVGGGPGGYVAAIKAAQLGLKTTCIEKRGTLGGTCLNVGCIPSKALLHSSHMYHEAKSSFAHHGVKFSNLEVDLPAMMAQKDKAVAGLTKGIEGLFKKNKVTYVKGFGKLSSPSEVSVDLIDGGSTIVKGKNIIIATGXSDVKSLPGITIDEKKVVSSTGALCLSEIPKKLVVIGAGYIGLEMGSVWNRLGSEVTVVEFAPDIVPSMDGEVRKQFQRMLEKQKFKFMLKTKVVGCDTSGDDVKLTLEPAAGGEQNILEADVVLVSAGRTPFTSXIXLETLGVETDKAGRILVDKRLKFGTRGVYAIGDAIPGPMLAHKAEEDGVACVEFIAGKEGHVDYGTVPGVVYTHPEVASVGKTEEQVKALGIAYNVGKFPLLANSRAKAIDDAEGVVKVIAEKETDKILGVHIMAPNAGEIIHEAVVALQYGASSEDVARTCHAHPTVSEALKEACLQTFDKAIHI

SEQ ID NO: 216950 - protein, 88 aa, Zea mays
  Clone ID: MRT4577_129461C.1.pep
KYLGPRVHRFFISKRCFFCAHHPPKTRAGLFEFVKKGGLTLCGFLRVGCVMYFRNSDFYKMCLQKPRLFRFSQKKKKKKTSKKKKPHP

SEQ ID NO: 216951 - protein, 71 aa, Zea mays
  Clone ID: MRT4577_129462C.1.pep
GTLSEITLKTTPRAMHTSHGDTSWTSSHKGILLHADNASYRLTQNNTLPTTVDHDACQLLRRTRTRTTTST

SEQ ID NO: 216952 - protein, 63 aa, Zea mays
  Clone ID: MRT4577_129463C.1.pep
MLILDLAIWIIPVTLVLVPFRRLVVLVARLQELEECIMRPRPPLMDSWAWGRVGGLHTMSIMM

SEQ ID NO: 216953 - protein, 62 aa, Zea mays
  unsure (1)..(62): unsure at all Xaa locations
  Clone ID: MRT4577_129464C.1.pep
MAGGRVAHTTLKGLSVVNEFFIXVTVGLFPVGMWKMHLWIEQRNCRSFFPMLFKGQISVVVH

SEQ ID NO: 216954 - protein, 286 aa, Zea mays
  unsure (1)..(286): unsure at all Xaa locations
  Clone ID: MRT4577_129465C.1.pep
MAPPTSTDETARHKKARKSKIDIEEKKHKKTNKARAAAEDAPIPDAAERKKRKHKDGREEKRDGQKSKKERKSEGKGEEAEAAVGRDEKMRRAMEDERFAAARTDPRFRPMRRKESKVALDSRFSSMMTDPRFASSAAPVDKRGRRRKKRENPMLHYYLNQEDLEDDGKGKEKGKKPVLVEEEEEDEEELEEQEEEESSSSDDDEDEDLDDDEEECSVGSDIAHYLMGRHDDTPMIDKETHRLAXVNMDWDHIKAVDLYMVMTSCLPRXGRVLSVSIYPSEFGLKC

SEQ ID NO: 216955 - protein, 49 aa, Zea mays
  Clone ID: MRT4577_129466C.1.pep
ANLNSSFSRNNAAIMVIYYLVLFAILLLLYCSLRECNRYFLGNSNSAFS

SEQ ID NO: 216956 - protein, 123 aa, Zea mays
  Clone ID: MRT4577_129467C.1.pep
LTWPPWHSVATGKEHMGGLTLASTGRNGLGKLSQAKRDRLRSDQATLALHWITNVTPTGSTKHSLFVPETTSSWSCSLIINLLFGSSAQLLLFPVTLVGLYQNWSITACLTRFQKYRKPGPFP

SEQ ID NO: 216957 - protein, 183 aa, Zea mays
  unsure (1)..(183): unsure at all Xaa locations
  Clone ID: MRT4577_129468C.1.pep
HAYGGTQAQALVQTLVWLLARFWCLSTCSALLDALFGGLLSINRLNKGLDTAAMSAAKVGNLERTLGAAEGADHSLGALTADIIPLDTYLYTQIFVQTTLHTPPQIFTTICYTWSFNLCVPYFKIYCYLPCYFHHTYXSTYSKTDTYSAKSCAITYGSGQITDYFMEDNDLVGHLDEHIETSI

SEQ ID NO: 216958 - protein, 52 aa, Zea mays
  Clone ID: MRT4577_129469C.1.pep
RHLVNGVNGERQVLAVGTARQHPVNAREHVDVDAHPLKKVPVGPVVAGAMTV

SEQ ID NO: 216959 - protein, 114 aa, Zea mays
  Clone ID: MRT4577_12946C.1.pep
PGPSSRPASSNWSLLPAPLARKGRGLGAAPVSPRLASLGAAALALLVAAALPSPAAGGHATGGLLGVPNFPHFARVVASTLLCHELCPRGSLSLLGARNTNLWHTPPRFSAAAA

SEQ ID NO: 216960 - protein, 55 aa, Zea mays
  Clone ID: MRT4577_129470C.1.pep
IWSSVQVHLVEEVHPFSLAWVLLYVVFPRLTFDPTMSVSLGYFDLLLENNTSATL

SEQ ID NO: 216961 - protein, 72 aa, Zea mays
  Clone ID: MRT4577_129471C.1.pep
PGPRWSPFIRQHAANGPPRSNPYLWNRSSFGPCHDHGGRGKPSPPPHVWTPCKARPPKDSRKINEGKASFGF

SEQ ID NO: 216962 - protein, 116 aa, Zea mays
  unsure (1)..(116): unsure at all Xaa locations
  Clone ID: MRT4577_129472C.1.pep
MAGAIWSILXMLLALSACVDNATMLPXYSQAPIAALLPPYLPSMTASVCENPSLQPYKLQHAIATSSLSLSPLFYQQSPVLCMEQSLVQTIRAQQLQQLVLPVISLVAIANLYSYY

SEQ ID NO: 216963 - protein, 85 aa, Zea mays
  unsure (1)..(85): unsure at all Xaa locations
  Clone ID: MRT4577_129473C.1.pep
MASLNGLRSCTAPGAPSLNTLRFLDGQLGLHCVYTTTSGCMNISAEWRSGXPLPVYLDGCSSGDFCYYQLELVTTSQNIKRRKEE

SEQ ID NO: 216964 - protein, 46 aa, Zea mays
  Clone ID: MRT4577_129474C.1.pep
VVLGGGRSFWGKTVVGLKVREEFVSCSVFKIISRPLGPFGRLGGWG

SEQ ID NO: 216965 - protein, 81 aa, Zea mays
  Clone ID: MRT4577_129475C.1.pep
CSGLGWQASRFDLIVGALGFFFSWDRSWLNGFSSSGGWQFFLGGWGPILFNCAVFPALLFGGVWAQALSKAPPVLCDWGGG

SEQ ID NO: 216966 - protein, 50 aa, Zea mays
  Clone ID: MRT4577_129476C.1.pep
PPTRPPTRPPFLSTTLTITYRQFHKQVRLLTPIHSLNYIHLITSTTIHSY

SEQ ID NO: 216967 - protein, 29 aa, Zea mays
  Clone ID: MRT4577_129477C.1.pep
NPAGPMGFMKLNGVVYGEGTNGRYPMLGT

SEQ ID NO: 216968 - protein, 195 aa, Zea mays
  unsure (1)..(195): unsure at all Xaa locations
  Clone ID: MRT4577_129478C.1.pep
RGTFTRGVEQDANIDRAAKKFSDNXLLLLFHYDGRLSEXDEFEWAQRAIHISVRKQTKWRHAKRFLHADIGSGYESIFIWDEDLGVEHYNAXEIMKLDKKHXLXISQPALEPDRGLTWHTTKRRGDSEVHTDTEEMPGXSSDPDIPPXAGSVEIQCPFLSRDACRCVWRMIHNDLLLFCARIVRSSNDKNLLIKR

SEQ ID NO: 216969 - protein, 61 aa, Zea mays
  Clone ID: MRT4577_129479C.1.pep
SPRWVTHWVLLGRSGRYNFGPMSWGRLAGSHPCEGLIGFGLCAFCFVRVLRPEKMFKNPHK

SEQ ID NO: 216970 - protein, 115 aa, Zea mays
  unsure (1)..(115): unsure at all Xaa locations
  Clone ID: MRT4577_12947C.1.pep
PRGPGRRTKESGTAGPGXEPGPYGGRSGRLRARGPPRKARGAPALCAAPPXGHARPPXPGGGIPGPGRPGPGGARGPGGGGGRGGPRGXAPRPGHRHGLYPXARGPPPTRPPTRP

SEQ ID NO: 216971 - protein, 406 aa, Zea mays
  Clone ID: MRT4577_129480C.1.pep
MEAPPVPELMDLDAPPPAAADAAAAAPVPPAVSDKKKEGEGGDTVTGHIISTTIGGKNGEPKRTISYMAERVVGTGSFGIVFQAKCLETGETFAIKKVLQDRRYKNRELQLMRAMEHPNVICLKHCFFSTTSRDELFLNLVMEFVPETLYRVLKHYSNANQRMPLIYVKLYMYQLFRGLAYIHNVPGVCHRDVKPQNVLVDPLTHQVKLCDFGSAKVLVPGEPNISYICSRYYRAPELIFGATEYTTSIDIWSAGCVLAELLLGQPLFPGESAVDQLVEIIKVLGTPTREEIRCMNPNYTEFRFPQIKAHPWHKIFHKRMPPEAIDLASRLLQYSPSLRCSALDACAHPFFDELRAPNARLPNGRPFPPLFNFKHELANASPDLINRLVPEHIRRQNGVNFGHIGS

SEQ ID NO: 216972 - protein, 84 aa, Zea mays
  unsure (1)..(84): unsure at all Xaa locations
  Clone ID: MRT4577_129481C.1.pep
GLFSQPSCGGTAPHPRLEAMLEAFINAGPQKRDWPYGFCIPCFLIILYVSPLQQKRKNKKNLIQKKKKKQKKQKKKKKGRXRPR

SEQ ID NO: 216973 - protein, 404 aa, Zea mays
  Clone ID: MRT4577_129482C.1.pep
MEAPPVPELMDLDAPPPAAADAAAAAPVPPAVSDKKKEGEGGDTVTGHIISTTIGGKNGEPKRTISYMAERVVGTGSFGIVFQAKCLETGETFAIKKVLQDRRYKNRELQLMRAMEHPNVICLKHCFFSTTSRDELFLNLVMEFVPETLYRVLKHYSNANQRMPLIYVKLYMYQLFRGLAYIHNVPGVCHRDVKPQNVLVDPLTHQVKLCDFGSAKVLIPGEPNISYICSRYYRAPELIFGATEYTTSIDIWSAGCVLAELLLGQPLFPGESAVDQLVEIIKVLGTPTREEIRCMNPNYTEFRFPQIKAHPWHKIFHKRMPPEAIDLASRLLQYSPSLRCSALDACAHPFFDELRTPNARLPNGRPFPPLFNFKHELANASPDLVSRLVPEHIRRQIGVNFGSS

SEQ ID NO: 216974 - protein, 108 aa, Zea mays
  Clone ID: MRT4577_129483C.1.pep
SNVEAYVLFAGAEFAWLFLDGSWLGFAVACLVGTVCPLAEIPLIKLLGCWSYPNADVHLLGEGLVSWTTTCYFVYTPFLANLARWLDSRLAINKDVADAEGGDEAARS

SEQ ID NO: 216975 - protein, 107 aa, Zea mays
  Clone ID: MRT4577_129484C.1.pep
MTASCSLEHKQKLVLSGAEFHRRRAPLLALYAVAAASVTIQGANITVAASKRRPTPPHLAEEKKDPNDIEVLAKPLATRNMKEAKKEAMPELERETMTRMISEGPKN

SEQ ID NO: 216976 - protein, 114 aa, Zea mays
  Clone ID: MRT4577_129485C.1.pep
MRTTCTWTERPYVLFAGAEFAWLFLDGSWLGFAVACLVGTVCPLAEIPLIKLLGCWSYPNADVHLLGEGLVSWTTTCYFVYTPFLANLARWLDSRLAINKDVADAEGGDEAARS

SEQ ID NO: 216977 - protein, 153 aa, Zea mays
  Clone ID: MRT4577_129486C.1.pep
GNPGKGFIYFGYHTTPHQTIGPKLPWYNTYGAIQYTGKGRPHSGIQLLFLGGGPRGGLTEREHAGGGNFDDDFFAGGVFARGGFPPQGHSPPVPLGCPCPSRSGGNNPRGGCHSFHGGAPPLHREEMPLLGYGGHPGGGRAGPLLGWKRRGPL

SEQ ID NO: 216978 - protein, 68 aa, Zea mays
  Clone ID: MRT4577_129487C.1.pep
DGLFVPPRDPRQLNKLARKNVKDTAGKGWFDMPAPTITPELKKDLEILQVWCYSYSVTLLAVGCHNSL

SEQ ID NO: 216979 - protein, 62 aa, Zea mays
  Clone ID: MRT4577_129488C.1.pep
NLDESFHWHQHFRFQYLLCLNHLNYMLQLLIPYKLLPNVHHQQCHMLNLLHALSYHVYLQLL

SEQ ID NO: 216980 - protein, 53 aa, Zea mays
  Clone ID: MRT4577_129489C.1.pep
SKSKCLIIQFTLGVNFIWILLIENGKSHYVHVITLRPIILCTIPEFMMIFDGA

SEQ ID NO: 216981 - protein, 41 aa, Zea mays
  Clone ID: MRT4577_12948C.1.pep
THPLPTATTLHQEAHSQRPWEGRRLEPRPIRAPVYVRHARH

SEQ ID NO: 216982 - protein, 69 aa, Zea mays
  Clone ID: MRT4577_129490C.1.pep
EYYWRPRPPVNTNHFEEKGSSGFFFLRATRGPKGTSAETGRGQPGQGNHPCLENSGSFWHPDFLPFVVN

SEQ ID NO: 216983 - protein, 137 aa, Zea mays
  unsure (1)..(137): unsure at all Xaa locations
  Clone ID: MRT4577_129491C.1.pep
PGGHGHPSPCPKRFPPGKVKNGPPKGDPKEPGGGPPPQRPPLGPQPXGSWLGGPPSGPPPPPRGMGAMFLRAGPRVFVWSFPPFYPGGSLGGPXAPPGPGXTPLGGPVENFPPLGHPGFKKPPPPCSLLLRTKISLF

SEQ ID NO: 216984 - protein, 278 aa, Zea mays
  unsure (1)..(278): unsure at all Xaa locations
  Clone ID: MRT4577_129492C.1.pep
GDWDPRGRPGVKRRTDFMADEGIIFKNGVAVGEEGHPSLSDLRASHNVVVIATGATVARDLPIKGRQLEGIHYAMEFLHKNTKSLLDSELGDNAYISAKDKHVVVIGGGDTGNDCIGTSLRHGAKSVTNFELLPQPPPERANDNPWPQWPRIYRVDYGHTEVRQHTGKDPREYCIMSEEFMDDGSGKVKGINTXXRVEWTKSPSGGWDMKKVEGSQQFFPADLVLLAMXFLGPEARVLGDEIEKDARKNVKTAPGKYRPNXEGVFXAAGEXRRGQSLI

SEQ ID NO: 216985 - protein, 80 aa, Zea mays
  Clone ID: MRT4577_129493C.1.pep
TYPIQTSYSILSSKYLCLIMVGIHNMETGESTHNTTHHTNLHHKTKILMNLMSDLTHINSPTLTHHFPHPKPLFQDALLN

SEQ ID NO: 216986 - protein, 139 aa, Zea mays
  Clone ID: MRT4577_129494C.1.pep
MASAAKTLARVGSSLFGRILASPSSSIPRAGLPLARLQPHVPPPAPAGVDAYEAETVARLSSLPGEISFPCGLPSLRFFIDDVEDPVPNDPFQLLPKRTYQPSTIKRKRTHGFLTRKSTKGGRKVIARRIAKGRHRISV

SEQ ID NO: 216987 - protein, 139 aa, Zea mays; identical to SEQ ID NO: 216986
  Clone ID: MRT4577_129495C.1.pep

SEQ ID NO: 216988 - protein, 58 aa, Zea mays
  Clone ID: MRT4577_129496C.1.pep
VPGSISELRTRTPLCALKTLTERTGRDICIYFRVCCSRSFFITPNKKKKKGRPPSNEL

SEQ ID NO: 216989 - protein, 101 aa, Zea mays
  Clone ID: MRT4577_129497C.1.pep
GGGGGPNKNSGGGEQGQAPQARAPPAEVHAGAWRQASWRWTSRRPSTRWRETGGGGALSRPSTCRTRSCAGPTRRATRRRQRRSRRRWTTGTPTTAGAAAT

SEQ ID NO: 216990 - protein, 68 aa, Zea mays
  Clone ID: MRT4577_129498C.1.pep
ALIPFHFPCLPLSHTQTTSNYLTLPSYSSSNLFLPDYTMPPTQKSSYPYSYPNPNNLLPFLLTNFLKF

SEQ ID NO: 216991 - protein, 67 aa, Zea mays
  Clone ID: MRT4577_129499C.1.pep
SQNTSIMSIYCGKILTLTITIKTSFLRIGREIENSGKRTTAAKLVCYTAIPLQKLSNCPRIYIIINF

SEQ ID NO: 216992 - protein, 193 aa, Zea mays
  Clone ID: MRT4577_12949C.1.pep
MSKRQGPPKHQNRYAWKPNLGQKINETEPGGRFRPLSEITGVCQRCRDQIDWKRRYGKYKPIVEPAKCQKCNKRNVRQAYHNVCRDCSKDLGICAKCCTCVNELVGRDANEEESERKSLEEAVRGARERERRTLLRIMNKGKGGESGPSVPKIADRSREGDIFPAGSLDEYAEQTREQEEDDSDVEAGDFVED

SEQ ID NO: 216993 - protein, 113 aa, Zea mays
  Clone ID: MRT4577_1294C.1.pep
WSQCHGQYSHTWCHSYLWPCPPTLASTNKGVTPQQTSKRGRKVPIGRTMGRWASGGLFSTFMIAEMQVNATDGKGSKFSSSVAIPPFYHVFMATYSHFWFCASPTLERRTKTG

SEQ ID NO: 216994 - protein, 42 aa, Zea mays
  Clone ID: MRT4577_129500C.1.pep
GLVRFPRITPGIVTANQSLFKLEKQFGQKLFPPINPVKTNKV

SEQ ID NO: 216995 - protein, 155 aa, Zea mays
  Clone ID: MRT4577_129501C.1.pep
SAALALPGVVAREAHARALRSVEQSDDILFAALVDAYVKSGLLGYARRVHGAMPVRSVVCSTALLVGCMQEGLFEDAEAIFNEMEGKDVVAYNAMVEGYSKTEETAEGSLEVLKAMQRAGLRPTVSTFVSVLGACSLLSSPELGEQVHCQGTKSG

SEQ ID NO: 216996 - protein, 49 aa, Zea mays
  Clone ID: MRT4577_129502C.1.pep
PPPFVCGVALCESAVCVVTCGASCVLKTCLELFPGLCLCRAERIMDGLG

SEQ ID NO: 216997 - protein, 84 aa, Zea mays
  Clone ID: MRT4577_129503C.1.pep
GKTQFPKTPETPCRRPPTKPGAGGGGGPKDPTGGPGGGTNDQKKTKGMHPKNGPRQLGPTGQPPQTRPMGRSPDYQNPATHTPD

SEQ ID NO: 216998 - protein, 45 aa, Zea mays
  Clone ID: MRT4577_129504C.1.pep
KKKKKKKKKKKKKKKKKKKKRKKKKKKKKKKKTKKKKTKKKGRPF

SEQ ID NO: 216999 - protein, 51 aa, Zea mays
  Clone ID: MRT4577_129505C.1.pep
VSICVWIPCTALYILVTSCSYTHYALFTSLRCDLCIIVFKRSVVCSGAIVC

SEQ ID NO: 217000 - protein, 117 aa, Zea mays
  Clone ID: MRT4577_129506C.1.pep
TSDPQAQKAFQRLGARLTQIEKRVVPMNAAPPPKNRNGPAKFPSPLLSPHPSDTKGAPPGIPPQGLPNSISLLVLSEKRTDGRRPSCLGFPVPFPKVWFSPGRFCAKSPVPPPEGAT

SEQ ID NO: 217001 - protein, 136 aa, Zea mays
  Clone ID: MRT4577_129507C.1.pep
YSTDSEAAPARGDKTELHRSSDDCACCRKEKAKRINDCAVRVTHLLDANGFGSPVTLTRIESSSFAGCCHSLDPQHAQESASILHPQLLYLGTVLVLILVLDEINGVLLRSKHSKGRYLEGRGPTDAHRHRTPRDS

SEQ ID NO: 217002 - protein, 60 aa, Zea mays
  Clone ID: MRT4577_129508C.1.pep
KFSLLVSYHTFLFPCLLIAPPFCVTSKSNSLIDSSVNHCFRLLPRWLNKILKHICSIYGG

SEQ ID NO: 217003 - protein, 123 aa, Zea mays
  unsure (1)..(123): unsure at all Xaa locations
  Clone ID: MRT4577_129509C.1.pep
TGALHLCASGTSLPHRPPVRIRQRRARSASRGVRRGRLLVRGWLTPARMTRTXRRCCSWRRMEQTAGGPTEAVAALQGGRGPRRMASAWIPARARSPLAWSRLPAPARAQSGLGRGGGSMMAA

SEQ ID NO: 217004 - protein, 61 aa, Zea mays
  Clone ID: MRT4577_12950C.1.pep
TTPVVRGADKAVPLAVLSKPWRHLGVRLGADRVVGFQPMATLANAVLARVAEQRYELTQRV

SEQ ID NO: 217005 - protein, 54 aa, Zea mays
  Clone ID: MRT4577_129510C.1.pep
NTIKLDCIFKRQILGAACEKTVCSIITPEICILICKHDLSLAQKICMNADHNAT

SEQ ID NO: 217006 - protein, 119 aa, Zea mays
  Clone ID: MRT4577_129511C.1.pep
ETGLAPKRAKRERQGGGGLKRAYILVYINPRWVALFVQASRNLGKNLFFFFSPIFGDFRVKNLWAKNGVQPFSFQGKDGIHIWPPFCIVVLPEPGGFPPPCPSKKKKFGWENQGRGPFS

SEQ ID NO: 217007 - protein, 45 aa, Zea mays
  Clone ID: MRT4577_129512C.1.pep
KNFFFFSLFIQKLLFFYITNVGKVLDHLKNSKSFLPRAMKFFFFF

SEQ ID NO: 217008 - protein, 69 aa, Zea mays
  Clone ID: MRT4577_129513C.1.pep
AYILKPQVLHPCLQAPPPKRFFISKTLFLKDGGLKKLIRTFLSCDGSQDVVRNMDLWSFKEMPMFGGFY

SEQ ID NO: 217009 - protein, 58 aa, Zea mays
  Clone ID: MRT4577_129514C.1.pep
HVFLRIPILGTYSALVSYPLPQPTPSHEHEREGRAPIPPPLPALRFLISWPRFPLKRQ

SEQ ID NO: 217010 - protein, 134 aa, Zea mays
  Clone ID: MRT4577_129515C.1.pep
IFPPNLTEKRNLHRRPNDQSHATLQSGRTHTPDHWVLPDERNINLDTNLREFPHDGRDDLDLDRELEDENPENLLLEVDDELNPLYDSHELYDLNYIPERFSRELLVLNILLEVAPEFDELLEYSDDSLLHLWL

SEQ ID NO: 217011 - protein, 48 aa, Zea mays
  Clone ID: MRT4577_129516C.1.pep
GNPCCCVQVDQSTVAIREHFGKSNSVLQPGCHCMPSFTGKRVARHLTL

SEQ ID NO: 217012 - protein, 82 aa, Zea mays
  Clone ID: MRT4577_129517C.1.pep
MNRWGKSKNPAPAARSGAGAGAAGVGEVPVQKVSKIEFHSLINRPAIYGGRASRGAEDDINEKAERFIRETRLWFHRQKPAA

SEQ ID NO: 217013 - protein, 73 aa, Zea mays
  Clone ID: MRT4577_129518C.1.pep
RSLPFDAPVLKGNGVLAVRAGAVRRLSSGEGLGLLVKIHGALCVVLDIGDLSGEGRLFRFLMCASFRMVVLWR

SEQ ID NO: 217014 - protein, 125 aa, Zea mays
  Clone ID: MRT4577_129519C.1.pep
MNRWGKSKNPAPPARSGAGAGAAGVGEVPVQKVSKIEFHSLINRPAIYGGGGGGGRASRGAEDDINEKAERFIRETRLWFHRQKAGRAVSAGRLMTSPSSSYAYVYGWILLLSFIITMDIANAYI

SEQ ID NO: 217015 - protein, 92 aa, Zea mays
  Clone ID: MRT4577_12951C.1.pep
GLKDRGTGRGPFHPFKNVKRGKRRAPSSPFTPKRPKGEKGDKAEKSRKWRRFQGFPHAGKCRAQRTSKIVTPKREKGPLETSSTQRPTRGTV

SEQ ID NO: 217016 - protein, 83 aa, Zea mays
  unsure (1)..(83): unsure at all Xaa locations
  Clone ID: MRT4577_129520C.1.pep
MRLFLSLPVLVVVLSIVLEGPAPAQGTPDVSSALDKLKEFGNTLEDKXRELISGIKQSELSAKMREWFSETSQTVXAELKIDS

SEQ ID NO: 217017 - protein, 67 aa, Zea mays
  Clone ID: MRT4577_129521C.1.pep
EDRPESLELFYRKNKMRTEDSCWYGRMIYVSRGLGGENSLVRKWTGLYMLLVELPLQLQEIVKWATL

SEQ ID NO: 217018 - protein, 89 aa, Zea mays
  Clone ID: MRT4577_129522C.1.pep
KDIAKLQASRVFHGCCAPRVVSVCQHDGDAVPGHLPAHLQGDAPCCGRSPGQQPWRYSTWGGRPPSCRGANLEALEQPPSERLAPSLWR

SEQ ID NO: 217019 - protein, 44 aa, Zea mays
  Clone ID: MRT4577_129523C.1.pep
WSLDNSHLISSITGTVGWYSIIISLDSTSYEESTRAGPIEPRAE

SEQ ID NO: 217020 - protein, 74 aa, Zea mays
  Clone ID: MRT4577_129524C.1.pep
IHQTSCTHTQHALKTNGSNCWITLLSLTHLNPIANIIWIIVPPSFLTRKVTSCLLPSSCPAIPPLPRAAPSLGP

SEQ ID NO: 217021 - protein, 41 aa, Zea mays
  Clone ID: MRT4577_129525C.1.pep
DSDLLYLIEPFMAHAASCMTNHLYHFATQSCGLYRRTPHCI

SEQ ID NO: 217022 - protein, 45 aa, Zea mays
  Clone ID: MRT4577_129526C.1.pep
PNTLHYSHTNLHNTQGILSHITLAHIFSNLNPHPTITAQKKTYKH

SEQ ID NO: 217023 - protein, 49 aa, Zea mays
  Clone ID: MRT4577_129527C.1.pep
NNLQRLFPLLFDIFCFFFFYHLSLAFKALFCCFFLFPTRPRTSGRTSGR

SEQ ID NO: 217024 - protein, 151 aa, Zea mays
  Clone ID: MRT4577_129528C.1.pep
PPPPPPPPGHLFFLLFLFLVFVFFFSFFFFLFFFFLNVFCFRMFLFSYIKKIFFSERKPKRWGTTKPAGGKQNGGPAPKQKNSPRRKKPAPKKKNKRGRGPGEQGSPPKQKKGKRRKEGGWAAKRPHQGRRTRPPRTEKAKDFRRGKERPG

SEQ ID NO: 217025 - protein, 65 aa, Zea mays
  unsure (1)..(65): unsure at all Xaa locations
  Clone ID: MRT4577_129529C.1.pep
LTTSHPVPFCERSFTSNLLLLQLLLLSLYSLSFLSSPHNSPSTPDRHSSHLRLTXGRHXFSRGTH

SEQ ID NO: 217026 - protein, 52 aa, Zea mays
  Clone ID: MRT4577_12952C.1.pep
FYVERKQPEWCSSSSVPGKMNGFYLILAGVWTMEWADRIRKSFMEENKTECR

SEQ ID NO: 217027 - protein, 79 aa, Zea mays
  unsure (1)..(79): unsure at all Xaa locations
  Clone ID: MRT4577_129530C.1.pep
HDSTPPPRPPKDRASAPSPVADDSXWISTGTKSTASTEPPSMLAEPAXVIPKVSAPVGRQMLLHPRTGAAQGAASHQED

SEQ ID NO: 217028 - protein, 89 aa, Zea mays
  Clone ID: MRT4577_129531C.1.pep
ILGYMNFDQTLSLSLSLINHYLPFFNYNHVSYRSMTLLQSTDSFRVDELLNVQAEWAGSLSASIGRTKQPRWCSDHDVSCEGGSSLISL

SEQ ID NO: 217029 - protein, 79 aa, Zea mays
  unsure (1)..(79): unsure at all Xaa locations
  Clone ID: MRT4577_129532C.1.pep
RIIPVYCTVPIAAYVFKKADTYEEKKLLGVTTLDDAVAKTFYAGKAVQPVYRCXTPVPRCHRGXITILPLLWHWSHACY

SEQ ID NO: 217030 - protein, 83 aa, Zea mays
  Clone ID: MRT4577_129533C.1.pep
INIKGCLTTLFSQGKPFFSRENELNSLEKIKPFKKNKGGKLALLKNLCQMQHRVPPFSFLQKTTGPGFRGNSLSRGCKKTGVN

SEQ ID NO: 217031 - protein, 55 aa, Zea mays
  unsure (1)..(55): unsure at all Xaa locations
  Clone ID: MRT4577_129534C.1.pep
IQSDQILLLQQQATTGNVDLFACLAPKQVGGGGILKXHINXCPHARKSTFLSRPS

SEQ ID NO: 217032 - protein, 64 aa, Zea mays
  unsure (1)..(64): unsure at all Xaa locations
  Clone ID: MRT4577_129535C.1.pep
APLFDLILGAKYFNIKGXVDLTCXNVFCMIKGKTPKKIFKTFNIKKEFSXXEEKEIPKEKQWAF

SEQ ID NO: 217033 - protein, 58 aa, Zea mays
  Clone ID: MRT4577_129536C.1.pep
RSRPTGSVGALPEFYGLSPRRRRSDSKSHLTRGILVQFSLLPSRRFRPRVGSSLPLMS

SEQ ID NO: 217034 - protein, 96 aa, Zea mays
  Clone ID: MRT4577_129537C.1.pep
MDWLGQKRAEMLMQVLLVASAVAAFLVGYVRADFQLMLLVYAGGVVLTALVTVPNWPFFNRNPLKWLDAAEAERHPRPQVSAGAAAGGKKKSGKNK

SEQ ID NO: 217035 - protein, 85 aa, Zea mays
  unsure (1)..(85): unsure at all Xaa locations
  Clone ID: MRT4577_129538C.1.pep
MAVNVSTIWSVMQAQVGMVVAVSFLVSRAWCRPSKVPPGKNITATYGKDWLDAXATWYGKPTGAGPDDNGGGCGYKDVNKPPFHS

SEQ ID NO: 217036 - protein, 50 aa, Zea mays
  Clone ID: MRT4577_129539C.1.pep
PPYYGRGHIQVTHDHNYMLGGEAMNLNLVINPDLEASDLAISFETDIWFC

SEQ ID NO: 217037 - protein, 39 aa, Zea mays
  Clone ID: MRT4577_12953C.1.pep
FSLPNASFHCTTKSSRVQKRLEGVWFIGTNGYLHHFISF

SEQ ID NO: 217038 - protein, 95 aa, Zea mays
  Clone ID: MRT4577_129540C.1.pep
SNFRCTGSDPSESDLLFLGFLAEDYGLAGAEARGDADAGAAGGVVLTALVTVPNWPFFNRNPLKWLDAAEAERHPRPQVSAGAAAGGKKKSGKNK

SEQ ID NO: 217039 - protein, 161 aa, Zea mays
  Clone ID: MRT4577_129541C.1.pep
LGQKRAGTPGGDWVPRGRPGGVVLLNEHSPALFSLSWRRLGDRRRPRPEASIFGPFTGYEHHLRIMDWLGQKRAEMLMQVLLVASAVAAFLVGYVRADFQLMLLVYAGGVVLTALVTVPNWPFFNRNPLKWLDAAEAERHPRPQVSAGAAAGGKKKSGKNK

SEQ ID NO: 217040 - protein, 64 aa, Zea mays
  Clone ID: MRT4577_129542C.1.pep
IADAHVVITSFIHTHAYLSEELGRYTHAADRVQQHHNGTRIHGLPRSKTYVLNRKKDAHSACQW

SEQ ID NO: 217041 - protein, 96 aa, Zea mays
  Clone ID: MRT4577_129543C.1.pep
QRPARRAQLYWGVIVVPRLHTAEAWTMSMDIRNVNAATCATEQDILIGEVIRLKALLDSTHSGLWKGHGSPGHMEHGAVCPLSWGLRAPAAVPSTL

SEQ ID NO: 217042 - protein, 65 aa, Zea mays
  Clone ID: MRT4577_129544C.1.pep
QKRFPSLSLPLVYKIFGGKKKCFLTFQPPFPILNKILGPFIFWGQPWVLFSQKIPLGHRQSAYRY

SEQ ID NO: 217043 - protein, 43 aa, Zea mays
  Clone ID: MRT4577_129545C.1.pep
HRVRTYVCLKAADLFFFFFFKIFYFVYWGQNMCSHDNQNEVQL

SEQ ID NO: 217044 - protein, 88 aa, Zea mays
  Clone ID: MRT4577_129546C.1.pep
GAVGSAGGTPALRGARRRSSVRHLCSIWSIVHDAGHMTRTLPSGQGGLRTEIEAIEAWGHAGLDALNCPTYRTSSGTYADLFTASAQP

SEQ ID NO: 217045 - protein, 125 aa, Zea mays
  unsure (1)..(125): unsure at all Xaa locations
  Clone ID: MRT4577_129547C.1.pep
CPQELVLSHPXVGLFLTHCGWNSTLKSVCAGVPMLCCPFFAEHPTNCRYVCDKWGIGMEIPNYVRREXVARLVREPIAGEGGKPMRVKSIVWKEKARQPVEDGGPSRKTLPPLVDFLLAGKDVPS

SEQ ID NO: 217046 - protein, 267 aa, Zea mays
  Clone ID: MRT4577_129548C.1.pep
MRDADVGLPLYFWNRKEVCRFPPRRGRGRCVSNSNPFLSTIILPSACVVLAAMDLADGRDDALNGGVGVGVGVEETRRRRKVELVQEAIRGFLEEKRSDGQGGGEERLTARLREEEQELLLSLLSKLGELKTDPDPDILEEPSSSRPDHGHQPAGGGERSKEVEPADIAKDLSKIKRQNTITHLLLGAVIVLTAVWQVNEVSFLLWLQSKLSNPFKSLGDMVKASLLKLRGRRPVLESSPLPLAGVPDVSRADLPTLVIGGTEHVGK

SEQ ID NO: 217047 - protein, 102 aa, Zea mays
  Clone ID: MRT4577_129549C.1.pep
SMLRILQRHLFCFCSPDSFRRHCRTKEGRRGKRNYRWGQTGKTTARWCVASWRMESSRLYVHVLEEARSGTDSDDVCMQLVQAAGMDRRKPYLTGHRGSPPG

SEQ ID NO: 217048 - protein, 157 aa, Zea mays
  unsure (1)..(157): unsure at all Xaa locations
  Clone ID: MRT4577_12954C.1.pep
DEVIKNADYIVTRXMGILGADEFTGTIEKRLYSMKGENVMEXSRALCYVAIVVPWCSSRISGVIFFEETLYQKTKDGKSLXDFLKEGGEAPXEKVDKGTIEVXAGTDKVTTIHRHDDLVKGCAKDYKVGCLYDKRRACLKIGPNEPSQCXIDLNAQG

SEQ ID NO: 217049 - protein, 88 aa, Zea mays
  Clone ID: MRT4577_129550C.1.pep
MSTLRLLLPPKLLRLPGKLALRVKLGLRLKSVLTPTCLHRTVVTLTAATLTAVTPTVDTVTAATPTAATLTALTLTALTLTALTLKLM

SEQ ID NO: 217050 - protein, 131 aa, Zea mays
  unsure (1)..(131): unsure at all Xaa locations
  Clone ID: MRT4577_129551C.1.pep
MAAAPAASSSTSGSPAAGGPRSRFGDTTLTKVFVGGLAWETPSEGLRQHFERYGDILEAVVITDRLTGRSKGYGFVTFREPEAARRAVHDPNPTIAGRXANCNIASLGPXXPAQPGVAGRGGPYTVGPYQL

SEQ ID NO: 217051 - protein, 76 aa, Zea mays
  Clone ID: MRT4577_129552C.1.pep
SLYTPPSRGRRLYRLPFPVSGAQGQANSFEVAMADHANQPTVLPKLGGQFHLTSTFSERVRPPNILPFFPLLSKDI

SEQ ID NO: 217052 - protein, 54 aa, Zea mays
  Clone ID: MRT4577_129553C.1.pep
IVGGPVVRASQGWDDGCVCVRDRGERMSCLCARSLALAAAQGSERDARLPLVPN

SEQ ID NO: 217053 - protein, 85 aa, Zea mays
  Clone ID: MRT4577_129554C.1.pep
GRAPQSIRPRSCPDSSPAQSMRSLLTRYASILSLINQYNSMPLRQGIQLFISFSVTQNNSQLCKIIIVFSDFRMSCVLGILGGLV

SEQ ID NO: 217054 - protein, 770 aa, Zea mays
  unsure (1)..(770): unsure at all Xaa locations
  Clone ID: MRT4577_129555C.1.pep
MDTPDRPRAAAAAGFEDSPVFNFINNLSPIPPPKPLDSAHNVQLFKSSDLAPVSSIFASPHVNPVKETKVLIRDESVHLPQELHSPSSVRTRIDTSGSFRMIRCKDIVSDNCNITCQLNEASIDSSDHTSNSTGQLTQSIQDAAGSMESDKDQCDANKTDLTISQECTGLEGMNLDESGPDKMDSSHSGIVVHENQLSEQNNDEPAAYNEGYIITHQSTSDMLTLAIPSGTETQPVNDTQMADNPYSCESLLDDQSSGYCTQNSVHEPHLYWTGAVEGSAVSYTPQTLPGALQSQLMPCNKLSEPKDYVPTEQNALSQHLRGMRRRSLFNEKAGISNKGVDKTSDHHPVNSTTPKCKTISGDNSKPLRTPPCALPGIGLHLNALATIPKEKIVPREIQSTINESSNLIGPAGSSPAPFEQNIINDDFTQTTDVATAEASSQGSPKKKRHKFDNGDGTSCKRCSCKKSKCLKLYCECFAAGVYCSEPCSCIGCQNNQSHMETVLSTRQQIESRNPLAFAPKVIHTSEPGMDLGDFSNKTPASARHKRGCNCKKSSCLKKYCECFQGGVGCSVSCRCEGCKNAFGKREGASVLGIGEPKQGLEEKDVCVKEEKSEIDKQLVVYQTTDAAPAENVLTTPSMVECRPLACLPPASSKXKLQKTTVFNKAHRTSFSXCNLQAPPKTDVVLSPFENYAEMVLGDSTSDILKGNSSPHTSVKVVSPNKKRISPPRMGIGLSPICRSGRKLILKSIPSFPSLGGDVNNEDPKAKLPAP

SEQ ID NO: 217055 - protein, 81 aa, Zea mays
  Clone ID: MRT4577_129556C.1.pep
RLNLIVSHFSTVLYLEGVAFALFAVLLCTYLWIPFFFLGASLRVTKPDGIRGPAPLIPYGLVWESQTRRGLEGRLDVKVVL

SEQ ID NO: 217056 - protein, 772 aa, Zea mays
  unsure (1)..(772): unsure at all Xaa locations
  Clone ID: MRT4577_129557C.1.pep
MDTPDRPRAGAGAGFEDSPVFNFINNLSPIPPPKPLDSAHNVQLFKSSDLAPVSSIFASPHVNPTKGTKVLIRDESVQLPHELHSPSSVRTRIGTSGSFRMIRCKDIVPENCNITCQLNEASIDSSDHTSSSTGQLTQSIKDAAGSMESDKDQCAGGKIDLTMSQECTGLEGMNLDESSPDRMDSSHSGIVVHENQLSEQNNDEPAAYNGVYMITHQSSSDMLTLAVPSGTEAQPMNDTQKADNPYPCESLLDVQSSGNCTQNSVHEPHLYWNGAVEGAAVAYTPQALPGALQSQLMPCNKLNEPKDYMPTEQNALSQHLRGMRRRSLFNEKAGLSNKGVDKASDHHPVNSTTPKCKTISGDNSKTLRTPPCALPGIGLHLNALAATATPKEKIVPQDIQSTINESSNLIGPAGSSPAPSEQNIINDDFTQTTDVATAEASSQGSPKKKRHKFDSGDGTSCKRCSCKKSKCLKLYCECFAAGVYCSEPCSCIGCMNNQSHTETVLSTRQQIESRNPLAFAPKVIHTSEPGLELRDFSNKTPASARHKRGCNCKKSSCLKKYCECFQGGVGCSISCRCEGCKNAFGKREGAAVLSIEEPKQGLEEKDVCVKEEKSEIEKQLVVYQTPDDAPAENVLTTPSMVQCRPLACRPPPSSKXKLQKTTIFNKTHWTSFAXCNLQAPPKTDTMLSPFENYAEMVLGDSTSDILKGNSSPQTSVKVVSPNKKRISPLRMGTGLSPICRSGRKLILKSIPSFPSLGGDVNNEDPETKLPAP

SEQ ID NO: 217057 - protein, 84 aa, Zea mays
  unsure (1)..(84): unsure at all Xaa locations
  Clone ID: MRT4577_129558C.1.pep
GGGTVDTTKFRGGSSHDTTVTTTNAGAPVWNDNEALTVGPRRPILLEDYHPVGXGGHXFARERIXPERVVDTRGAPGKGFFECP

SEQ ID NO: 217058 - protein, 653 aa, Zea mays
  Clone ID: MRT4577_129559C.1.pep
MPLNTEVEFVIDPLPGTAPISKRPYMISVEELKELKKHLTELREAGYIRPSLHLGEHRSLNGVNMKNKYPLPHIEDLFDQMRGARVFSKIDLRSGYHQMKIRPSDIPKTDFSTRCGLYEFTVMSFGLTNAPAYFMDLKNKDLEIHYHPGKAKLVADALSRKEHVHSAIVAQLPDEIVEDFRRLNLGIVAHTKGVTIDVEPTLEQEICKGPTGDARIQEINDLITEGRGPEFTKDEQGTVWFKDRLCVPDIESLRETILKEAHDSDYSIHPRSTKMYQDLKQRYWWHGLKRDVAAHVAMCDVCQRVKAEHQRLAGLLHPLKIPEWKWKENGKDFITRLSRTSKGYDSIWVIVERLTKVAHFIPKIVLDRGSQFTFRIWKSSHENMDTKLNFCTAYHPQTDGQTERTNQVLEDMLRACALKHGGSWDKSLPYAEFSYNNSYQASLKMSPFEALYGRKCRTPLYWDQTGERQLFGPEIIQEAEEQVQQIRENLRTAQSRQKSYADTRRRLLEFKEGDYVYLKVSPLRGMRRFKVKGKLSPRFIGLFLILKRVGEVAYQLELPDHLADVHDVFHVSQLKKCLRVPEEQLSMEDLSVQDDLTYAEYPIKILDTLTRVTRNKVIKMCKVQWSHHGEDEATWEREEELRIDFPHLFSRSS

SEQ ID NO: 217059 - protein, 152 aa, Zea mays
  Clone ID: MRT4577_12955C.1.pep
MTTEQTFIAVKPDGVQRGLIGPIITRFENRGFKLAGIKMVTPSKEHLEKHYADLSDKPFFPGLIAYMGSGPVCAMVWEGRDAVKTGRSILGATNPLASAPGTIRGDYALDVGRNVCHGSDSVENGKKEIALWFKDGEVQSWKSAQHDWVYEK

SEQ ID NO: 217060 - protein, 64 aa, Zea mays
  Clone ID: MRT4577_129560C.1.pep
PVTTRSIYMLLLTPNARTTHTQVYMFLRADRQQILQTMIQNYTANTRQLGNLWAYHCRNQHNFN

SEQ ID NO: 217061 - protein, 558 aa, Zea mays
  Clone ID: MRT4577_129561C.1.pep
MGYPYSVRREHYSRDPWMSVEELKELKKQLTELQEAGYIRPSSSPWGAPVLFVQKKDGSQRMCVDYRSLNDVTVKNKYPLPRIEDLFDQMRGYYRRFIEGFSKIAKPMTSLLEKGREFKWDEKCQDSFDQLKKRLMSPPVLVMPDLQKGFDIYCDACGQGLGCVLMQEGHVIAYASRQLRKHELNYPTHDLELAAVVHALKIWRHYIMETKCQVYTDHKSLKYIFTQKDLNLRQRRWLELIKDYDLEIHYHPGKANLVVDALSRKEHVHSAIVAQLPDEIVEDFRRLNLGIVAHTEGVTIDVEPTLEQEIRKGQIGDAKIKEINDLITEGRGPEFTEDEQGTIWFKDRICVPEIESLRETILKEAHDSDYSVHPGQSEDVTIQGSIWQEMQDSSTLDQNGRRQFFGPELIQEVEEQVRIIQENLRVAQTRQKSYADNRRRPLEFEEGDHVYPKVSPLRGMRRFKVKGKLSPHFIGPFRNFRRVGEMVYQLELPDNLSDVHNVFHVSQFKKYLRVPEEQLPMEELSVQGDSTYMEYPIKILDTLTRVTRNKVIKMCKVQ

SEQ ID NO: 217062 - protein, 671 aa, Zea mays
  unsure (1)..(671): unsure at all Xaa locations
  Clone ID: MRT4577_129562C.1.pep
MGILACTTIRQRQYIHCAKGTVELTRSKGERFEVGTAVTTVTRLATFLVDGKFVGVNIRVVRDFPDVFPEELHGXPPYREVKFVIDPLPXAAPTFKRPYRMSVEELKGLKKQLTELQEAGYIRSNASPCGAPVLFVQKKEGSQGMCMDYRSLNDVIVKNKYPLPRIEDLFDQMRGARIFSKIDLRSGISVDPAKVKEIMEWRVPTTVTEIQSFLGLAGYYCRFIEGFSKIAKHMTSLLEKGREFKWDKKCQDSFDQLKKRLMSPPVLVMPDLQKGFDIYCDACGQGLGCVLMQEGHVIAYASRQLRKHELNYPTHDLELAAVVHALKIWRHYIMGTKCQLAQLPNEIVEDFRRLNLGIVAHTEGVTIDVEPTLEQEIRKGQLDDAKIKEIKDLITEGRGPEFTKDEQGTVWFKDRMCVPDIESLRKTILKEAHDSDYSIHPGSTKMYQDLKQKYWCYQASLKMSPFEALYGRKCRTPLYWDQTGERQFFGPELIQEAEEQVRIIRESLRVAQTRQKSYADNRRRPLEFEEGDYVYLKVSPLRGMRRFKVKGKLSPCYIGPFLIFRRVGEMAYQLELPDSLSDVHNVFHVSQLKKCLRVPEEQLPMEELSVQGDLTYTEYPIKILDTLTRVTRNKVIKMCKVQWSHHGGDEATWEREEELRIYFPHLFPRPS

SEQ ID NO: 217063 - protein, 452 aa, Zea mays
  Clone ID: MRT4577_129563C.1.pep
MGIVAHTEGVTIDVEPTLEQEIHKGQIDDAKIQEIKDLITDGRGPEFMEDEQGTVWFKDRICVPDIESLCETILKEAHDSDYSIHPGSTKMHQDLKQKYWWYGLKRDVAAHVAMCDVCQRVKAEHQRPAGLLHPLKIPEWKWEEIGMDFITGLPRTPKGYDAIWVIVDRLTKVTHFIPVKTTYKGSQLAKLYMVQITDGQTERTNQVLEDMLRACALQHGGSWDKSLPYAEFSYNNSYQASLKMSPFEALYGRKCRTPLYWDQTGERQFFGFELIQEVEEQVLIIRENLRVAQTRQKSYADNRRRPLEFEEGDYVYLKVSPLRGMRRFKVKGKLSPLYIGPFLIFSRVGEMAYQLELPASLSNVHNVFHVSQLKKCLHVPEEQLPMEELSVQGDLTYMEYPIKILDTLTRVTRNKVINMCKVKWSRHREDEATSEREEELSIDFTHLFPRSS

SEQ ID NO: 217064 - protein, 373 aa, Zea mays
  Clone ID: MRT4577_129564C.1.pep
MPPKKSSGLGVALQPLDINQQTLREARSQKRKATSPTPQEEELDQEIRDLEAIHQQVQRKKEKMLCLANLQKKIDELTEEMCHLTQDVQDRRPQYRELHQDNSYNDDEWYDDFHHGNFTFDDASPLAAELQATPWPPSYKPPQLPMYDGHSDPKQFLMSYEATISSYGGNTAVMAKSFVMARREEAYRFSEMTRGFGGSIHPRHVRSIHNSSLSDDRGSQPQRPQHSSQSSGQQQSSFRPPTPRGRGGRGFGGRYEDQPRRLYCLFFGEDKGHTTRTCQVTIQKKKEIAEAEARQNQPKQVLHTASCYSPYVPEYVGNQQTSAFIASVMELPLDAQSSGRRLDVDERVEQCRAVVDVLHVLARFVLVLQMQHL

SEQ ID NO: 217065 - protein, 67 aa, Zea mays
  Clone ID: MRT4577_129565C.1.pep
ARLERPLVPTQVARRGCKHSCQPEPPPPAARPAGGMALRLPLSSPPVAMRLTERVRERMRMRVRTRG

SEQ ID NO: 217066 - protein, 85 aa, Zea mays
  Clone ID: MRT4577_129566C.1.pep
MCCRQCSPHGPSRFMIPGQVSLPVTIGGTFRESIKEYVGNTFRYTIKWIQICVTGPGIFFIKLMVHDKNISVEISSATSSTYTTI

SEQ ID NO: 217067 - protein, 101 aa, Zea mays
  unsure (1)..(101): unsure at all Xaa locations
  Clone ID: MRT4577_129567C.1.pep
SRPFQSKDYVLESKSSAXRSSPFLGLGEDLSEAEPAVPLLFSGFLGRRGGGGFALAPLLVQDGVRLQQLLLFVQRAEDGVEQASSPPPASPPPPSRLRTRG

SEQ ID NO: 217068 - protein, 126 aa, Zea mays
  Clone ID: MRT4577_129568C.1.pep
RIRLTMEWNGKLGVFLEKQKERNEYLKRSIQCEITAEKTSGNVSSQNNHFLPWKPMDINDSQSNSNTSISSPFTQYSLKRERESENTNAKSIKKTKLSSILRETIREESIPVEKLEETEDKTTTAS

SEQ ID NO: 217069 - protein, 243 aa, Zea mays
  unsure (1)..(243): unsure at all Xaa locations
  Clone ID: MRT4577_129569C.1.pep
MAGLLSVKAVALAAVLAAAYASCAAAEQPGAADLDASAVSYSSAWLPARATWYGAPNGAGPDDNGGACGFKHVNQYPFSSMTSCGNQPLFKDGKGCGSCYQIRCSGDKSCSGKIETVMITDMNYYPVAQYHFDLSGTAFGALAKPGLNEKLRHSGIIDIQFRRVPCNFPGLKINFHVVDGSNAVYLAVLIEYEDMDGDVIQVDMKEANSGSWTPMRESWGSIWRMDSNHRLQXPFSMRITSDS

SEQ ID NO: 217070 - protein, 95 aa, Zea mays
  Clone ID: MRT4577_12956C.1.pep
PTRPRTRGLTPLKDPSTARRATSRMSHAQVPAYTVAEGTGAVHASSSSTAAQEATDPSRDGRLARPRRNRDRPKGWGGQASQEGPLLRQPGKARR

SEQ ID NO: 217071 - protein, 137 aa, Zea mays
  unsure (1)..(137): unsure at all Xaa locations
  Clone ID: MRT4577_129570C.1.pep
MNTTMSRSKGYTLQDVAKHTPRTTAWVVIPXKVYNVXTKFLEDHPGCDDALLSYTAKDATHDFDHVGHITTARAKMHEYLLGEIDAPTIPTKEKYTPPXQTNYNQYNTHELTIKILQILVCLAILALRVTGRMYTKP

SEQ ID NO: 217072 - protein, 407 aa, Zea mays
  unsure (1)..(407): unsure at all Xaa locations
  Clone ID: MRT4577_129571C.1.pep
MGESRGSIAFFATYRPPVPLDIFSVPIPPSSIRVGYHRARSDXETRRRRALAXFDKIESPVKDVGLFRVSGVFPTISKDGSKLAFVDNEFKAVWVADSQGLRVVYETKGPDNIFSPMWNQNPDKDILYVCMGPSFNAGKPLEICAIPNVSSGARQRRQLTKGKFNNAFPSSSPDGNRFVFRSTRDGGDKKHKNLYIAENAEVGEYGDGTVTRLTNGEWTDTHCQWSPSGDWIVFSSTRDKPKDAPELDNGLDPGYFAVFMVKASDPTVVIRVIRSGDDLGGHVNHPVFSPDGRSIVVTSDLAAVSADPISLPLFIHSVRPYGDIFVVDIDPEDASKNKDVKKFHRVTHSRYEYSTPTWTVFATDDPNAQWNMLVKKDSYTPACPYAYPDGGESWHMTGHLCIPRRCC

SEQ ID NO: 217073 - protein, 136 aa, Zea mays
  Clone ID: MRT4577_129572C.1.pep
RPTPTLAPTPAGPPADTPTLAPTRPGPPTPAPTPALIPPGPPTPAPTLAVMPAGPPIPAPTWALMPLGPPTPTPTLAPKPPGPNPAPTLAAPSPPSPTLSPSPGKPPIPPKPGRMPKPWPTPPAPGNKPPKPGRPG

SEQ ID NO: 217074 - protein, 94 aa, Zea mays
  unsure (1)..(94): unsure at all Xaa locations
  Clone ID: MRT4577_129573C.1.pep
KSLARGVNPATIHPSSILASSGSTSTSGSTGFGTIGKLATTVALQNDDVELVAVNDALSSTDYMTYMFKXDTVRRQWKHHEVKVKDSKTLPLGE

SEQ ID NO: 217075 - protein, 70 aa, Zea mays
  unsure (1)..(70): unsure at all Xaa locations
  Clone ID: MRT4577_129574C.1.pep
CPLSPCFSAVDAAFQCEETPTQASXWVRPQVYPLFAATGVAVGICGFQLFRNITGKPGVRGNKARKATGV

SEQ ID NO: 217076 - protein, 151 aa, Zea mays
  unsure (1)..(151): unsure at all Xaa locations
  Clone ID: MRT4577_129575C.1.pep
ELIGYLYPWXKEKVIDSDLKRKDGLCPLTPEETTLVLRALDIDRSMQIYIAAGEIYGGKHRMASLTSAYLNVVCAQIYYASIVAYLLHSTLPSLLFFLVDAKIKFTSMVAPHPQPVTYFSIIYLWKNEFSCLVSFIYRKTMCTKKKKKKSG

SEQ ID NO: 217077 - protein, 80 aa, Zea mays
  Clone ID: MRT4577_129577C.1.pep
AAGPARPNSTVRYLDVYTSFTWFIFVRLHRRRPFACMIAKTLCVIMLALCSFSPFAYPSITQTNTVDRRMLLLLAGFLLS

SEQ ID NO: 217078 - protein, 195 aa, Zea mays
  Clone ID: MRT4577_129578C.1.pep
SARANFYNHKGQRKMKEQLFVDKFQETVQHTFLDYISSGFELNFMGAIDFTASNGDPRVPQSLHYIDPSGRPNSYQQAMLGVGEVLQFYDNDRRFPTWGFGARVHGYVSHCFNLNTATNDSEVVGVEGIMSAYTCSLYSVSLAGPTMFGPVINKAADIASQSLQYSNNKYFVLLIITDGVLTDIQETKIALPGHQ

SEQ ID NO: 217079 - protein, 77 aa, Zea mays
  Clone ID: MRT4577_129579C.1.pep
NRNIFFSPHLRARKIILYNYIIDRFPHSLNTKLSNAPANINPHYFWPLGAPVLGWHSLVSLGIACWSHGSNNILCLL

SEQ ID NO: 217080 - protein, 191 aa, Zea mays
  unsure (1)..(191): unsure at all Xaa locations
  Clone ID: MRT4577_12957C.1.pep
KKKPKKKKKKKIFKKKKKRPQGKAPRARRGPPPPAPSGKSGTGQSRSKGKPTPTRATPGEQQAPAAAKKAEPGERPAPDGGTKXGTPQRGEKPERAXGAPXTGEETKNKRERSQNQKAHPGGPAEKKRKGGTGETRRRAARITEKAKVFDSPKGKKTPKRSRNSRGSKGRQEKKEAPETEKAKDAKTGQHA

SEQ ID NO: 217081 - protein, 29 aa, Zea mays
  Clone ID: MRT4577_129580C.1.pep
AFISVLNVMNLFMQGTTYDGLCVVTLRVS

SEQ ID NO: 217082 - protein, 76 aa, Zea mays
  Clone ID: MRT4577_129581C.1.pep
GSNGEICQLPRVCELFKSVSSFYCKSYHGTFDDYTNKQHYQKWILIRYFALFFFLKLALPMLYPSPLFLRGTQHSD

SEQ ID NO: 217083 - protein, 106 aa, Zea mays
  unsure (1)..(106): unsure at all Xaa locations
  Clone ID: MRT4577_129582C.1.pep
PWQPPPXSLHSSARARRHEAVSTCSPQRQCRCLPSSERASPGGQALRADRAAAGRCARAAAELPPSQPPPARPPARSRCPPWYANPHLYAAPKKTLHKAQLVSSFC

SEQ ID NO: 217084 - protein, 67 aa, Zea mays
  Clone ID: MRT4577_129583C.1.pep
LFFLFFFYFLLKKITRVGSVKETVEELADGISQKNQQGACFAQNCKPFSKKIKKKPAREGGKGEFCK

SEQ ID NO: 217085 - protein, 54 aa, Zea mays
  Clone ID: MRT4577_129584C.1.pep
SPQNKSHKENHLGRAIRFQQFHNPALSAGLSKRSSDPRFDHLIEKGAKAIRIGP

SEQ ID NO: 217086 - protein, 159 aa, Zea mays
  Clone ID: MRT4577_129585C.1.pep
LEAGRDWALTPAITVYGIFSLQECADAHTFSLCAVIVLLPCGTRLYYLPRDQCPCNGRTLRFSISDAASIRVLCPLVCTSSPDHSCSDCLVTLPSLDTYPFFPSMTNITVVRGINCESVLLNTFSETTSTEFIISTHVLGTDYVRHAFHDIAVALLTSL

SEQ ID NO: 217087 - protein, 41 aa, Zea mays
  Clone ID: MRT4577_129586C.1.pep
MAMLALALLLLLSVAASARAGSCASHLDLGLGLLSYRDRRR

SEQ ID NO: 217088 - protein, 99 aa, Zea mays
  Clone ID: MRT4577_129587C.1.pep
PIVWSSPFSLRKSRLLVRLGARVRLVQVDPCLHGQDPLVHVQRCYVRSMPPVGGARVGSLVHRRHISHNDQYALLTRRGGVRHGPGPSSQDTAPVDEQE

SEQ ID NO: 217089 - protein, 359 aa, Zea mays
  unsure (1)..(359): unsure at all Xaa locations
  Clone ID: MRT4577_129588C.1.pep
MAEPSQQQQQLRSFVEVPAGSHFPIQNLPFGVFRRRGVQAQAPRPAVAIGDFALDLAAVADAGLFDGPALSGSPCFHQETLNMFLGMGRPAWREARATLQKILSADEPVLRDNEALRNKCLVPMSDIEMVLPITVGGYTDFFCSVHHARNCGFIFRGPQTPVNPNWFYLPIGYNGRASSIVVSGTDVTRPRGQGHPTGNSAPYFGPSQKLDFELEMAAIVGPGNELGKPIDINDAEEHIFGLTLMNDWSARDIQAWETIPLGPFLGKSFSTTVSPWIVTLDALKPFMCDAPKQVWIKPKDQNDASIVTKTNFKHLYWTLTQQLAHHTINGCNMXXXDIFATGTLSGLDXDSLRCLLELT

SEQ ID NO: 217090 - protein, 159 aa, Zea mays
  unsure (1)..(159): unsure at all Xaa locations
  Clone ID: MRT4577_129589C.1.pep
MHVITYFTNIIGVVTIALVSIVSILGLICLCCLVYFQLWIRRRGYRWLSYFNESWLTRITLMLVAFWWGIGEVLRLTFVNGEGRLISDRAWQENVCKFYIISNMGFAEPGLFLLLSFLLSVALQKQELGXLEXKWNQKTICAVFILCSPCLIWEACVVF

SEQ ID NO: 217091 - protein, 45 aa, Zea mays
  Clone ID: MRT4577_12958C.1.pep
AAGPARPWCSRPSWHASRTLSHLAELRGIIHVLETFLLVYNHSGY

SEQ ID NO: 217092 - protein, 433 aa, Zea mays
  unsure (1)..(433): unsure at all Xaa locations
  Clone ID: MRT4577_129590C.1.pep
MAEPSQQQQLRSFVEVPAGSHFPIQNLPFGVFRRRGVQAQAPRPAVAIGDFALDLAAVADAGLFDGPALSGSPCFHQETLNMFLGMGRPAWREARATLQKILSADEPVLRDNEALRNKCLVPMSDIEMVLPITVGGYTDFFCSVHHARNCGFIFRGPQTPVNPNWFYLPIGYNGRASSIVVSGTDVTRPRGQGHPTGNSAPYFGPSQKLDFELEMAAIVGPGNELGKPIDINDAEEHIFGLTLMNDWSARDIQAWETIPLGPFLGKSFSTTVSPWIVTLDALKPFMCDAPKQEPEPLPYLAEKNHINYDIPLEVWIKPKDQNDASIVTKTNFKHLYWTLTQQLAHHTINGCNMRPGDIFATGTLSGPVWSKHCNFYTHSMNLTLTCAIXEPDSLGCLLELTWNGQKEIPVGNLTRKFLEDGDEVILTGCCKVL

SEQ ID NO: 217093 - protein, 61 aa, Zea mays
  Clone ID: MRT4577_129591C.1.pep
STLSTHYTETHCAQQALSTPKHRTPTDHGHPEQLLELTELWSTYAPDRHGSPPYSNYGPRG

SEQ ID NO: 217094 - protein, 77 aa, Zea mays
  unsure (1)..(77): unsure at all Xaa locations
  Clone ID: MRT4577_129592C.1.pep
MACSNCECHRRFDLIVVGAGMMGSCAVYSTSSRGSRXLVLVRFYLLHHXGASXHGESRTMRATYPEAHYPHMVRLSW

SEQ ID NO: 217095 - protein, 70 aa, Zea mays
  unsure (1)..(70): unsure at all Xaa locations
  Clone ID: MRT4577_129593C.1.pep
PLASAVDSKALAELXSRXLKTGRLAMLSMLGLLVXAIVSGNDPIXNLADCILCPVSTNVWAYATRLVPGK

SEQ ID NO: 217096 - protein, 95 aa, Zea mays
  Clone ID: MRT4577_129594C.1.pep
MADCARKPNAVSSEPGLSYLILILVTPTDGEERDGGRNSHVNAGNSFPEPKRQETKQRKVWKGRRLLSRVESGEREGEKERVEAEAMATPAGDRG

SEQ ID NO: 217097 - protein, 92 aa, Zea mays
  unsure (1)..(92): unsure at all Xaa locations
  Clone ID: MRT4577_129595C.1.pep
MGTKRFTLFTLLAICACVANATIITECSQAAIAALLPPXIPSMIAXMCENPALXPYRLQQAISTSNIPLSSLLQQSPALSMLQPLVQTIRAH

SEQ ID NO: 217098 - protein, 237 aa, Zea mays
  unsure (1)..(237): unsure at all Xaa locations
  Clone ID: MRT4577_129596C.1.pep
MNFSVGAGGSGDGGGEGGRVQAERWLEIAAKLLAARDLVGCKRFAERAVEADPLLPGADKLLAVADVLLTSQAMLYTGEPDPYAVLQVPSKTTDHGAISRAFRRLALLLQSSNPHPGADVALRIVNDAYELLSDPSRQPLRSARTNIPSGAPSHPAAAAAPAAEATDFWTVCPFCCYVHQYPRELVGRALKCPNSXCRXGGLVAVEIPTQPTIVPGTEMTTVAWGFFPLGFPXSADL

SEQ ID NO: 217099 - protein, 42 aa, Zea mays
  Clone ID: MRT4577_129597C.1.pep
MGDEEKRNRAITARRQHLKSVMLQIAATELEKEESRRESEKQ

SEQ ID NO: 217100 - protein, 93 aa, Zea mays
  Clone ID: MRT4577_129598C.1.pep
SRDKKGLSKFPRFFMKTGAKFVSRLTKKKNRGFEFAKKTKAGFKKRRTGGIKLQKGSLFGRKRKTKLPERVLRGWALLLFASPVSKKKNERPN

SEQ ID NO: 217101 - protein, 122 aa, Zea mays
  unsure (1)..(122): unsure at all Xaa locations
  Clone ID: MRT4577_129599C.1.pep
SIHLRKSXSEDHLPKVFSYFDKNGSGYIEIEELKEALSPRGDQKAIEDIILDVDIDRDGKISYEEFELMMKAGVDWRNTSRQYSRAVYNTLSRKMFKDASLKLGSNNGPLAAAAVKEQQDVD

SEQ ID NO: 217102 - protein, 60 aa, Zea mays
  unsure (1)..(60): unsure at all Xaa locations
  Clone ID: MRT4577_12959C.1.pep
MGGGNGQKSKMARERNLEKNKGAKGSQLETNKKAMSIXREHAEAKHPKTDVYQCFPHLKK

SEQ ID NO: 217103 - protein, 132 aa, Zea mays
  unsure (1)..(132): unsure at all Xaa locations
  Clone ID: MRT4577_1295C.1.pep
AASRSDRPAPSPPPNPKGASLTRRPKFPEFKEGLNLLHKXGNGSSRTKDLGXTVMRTLGQNPTEAELKDMIKDVDANGNGTIDFPEFLNLMARKMNDTDSXEELNEAFRVFDKDQNGFISDAELRHVMTNLG

SEQ ID NO: 217104 - protein, 46 aa, Zea mays
  Clone ID: MRT4577_129600C.1.pep
ESSCCCNNSFCCCSSCCCSCCCCCCSCCCCCCCLSNNILSTIESGG

SEQ ID NO: 217105 - protein, 51 aa, Zea mays
  Clone ID: MRT4577_129601C.1.pep
GPVTSGQLRASAPVEPRVPSRRGCCCHLLASGCSPRSWNSSPLLPYPTRTW

SEQ ID NO: 217106 - protein, 340 aa, Zea mays
  unsure (1)..(340): unsure at all Xaa locations
  Clone ID: MRT4577_129602C.1.pep
KTGEPNLLTNSHWXWXEKLLQFLELFYDATVTLSGVYYPTSPLIMHNILDIIQHLNQHENDALLRHAVAPMKSKFLKYWRDIPMLYAFAFILDPRAKLRGFSNILRILSGLSGTDYSLYFTCVKSELFTMFNKYDVKFGAVRQQVPPPPPITGKRKQNWGLIYGSDSNSEFSYPGSSTPNLAAGTSASALLQQAHSSVGLSSLDTELSSYLDSDTLQKFDEDFNTLNWWHEHKLSYPVLCILARDVIFVPISTISSESAFSLCGRIIEERRRRVAPEMVEMLLCMKDWELGKARGQYCTQDQELEDAFEGLYLDDPYDFYLPSSYSILLIWKSSDVSCNM

SEQ ID NO: 217107 - protein, 266 aa, Zea mays
  Clone ID: MRT4577_129603C.1.pep
GRAGATGNPNPNALSSLPPASPCGGRGSLSRGVGDSGAALGCSLLPVLPARLLPHPVIPVVPGWLAPSLLGCSPSTRRSGAPCSLDPSSSRRSLVPRSLRRRWLPCSLGPSSRRSLLPRSLLRRWLPCSTGQAGTSASALLQQAHSSAGLSSLDTELSSYLDSDTLQKFDEDFNILNWWHEHKLSYPILSILARDIISVPVSTISSESAFSLCGRIIEERRRRLAPEMVEMLLCMKDWELGEARGQHSTQDEDLEEAFEGLYLDDP

SEQ ID NO: 217108 - protein, 268 aa, Zea mays
  unsure (1)..(268): unsure at all Xaa locations
  Clone ID: MRT4577_129604C.1.pep
MCSFISKVLNVLSTSSIKMEGDVVSFTQLLNEGVYEESLHDICTTPDELHQIPPIKDNNSSSKPNQKLKVEQAERLFKSQNPKEKSFQFRHIWLQMKNQPKXHDKPQKLTTTNKTYKIQKKTQKPTIGRYDITTPGIKKDPTTNIPEKGAPQRPNGKMKPKESLXRNHRFYDXAVEILWAKMKEADAVKEFKXIRCVQRHXLDKEMNELIKERHALEKERIQNETNNIFLKTIAEEQKIMTMDLTSMSELQQQYYMSLQAEIMARRMN

SEQ ID NO: 217109 - protein, 73 aa, Zea mays
  unsure (1)..(73): unsure at all Xaa locations
  Clone ID: MRT4577_129605C.1.pep
YEVWCSWATSGSSSNCHSLCGRIIEERRRRLAPEMVDMLLCMKDWELGEARGQHCTXDQELEDAFEGLYLDDP

SEQ ID NO: 217110 - protein, 118 aa, Zea mays
  Clone ID: MRT4577_129606C.1.pep
ADQGGDLIYEGGFSESAFWYLLRISWDFFFPWWLCLSLSLSLSLSLGPDPGAPGIGAFQKLELDLDDLSGFSLLGIEKTVKSSGSVLLDEIYGRTYPKGSCDGTWEWEGYCIRTWGFL

SEQ ID NO: 217111 - protein, 107 aa, Zea mays
  unsure (1)..(107): unsure at all Xaa locations
  Clone ID: MRT4577_129607C.1.pep
XLKDKEYAXSQAALWXGIEGXLPELGEIYPIGGAGDRLGLVDSDTGESLPAALLPYCGRSLLEGLIRDLQAREFLHFKIFGGQCITPVAIMTSSVKDNHEHIIAICE

SEQ ID NO: 217112 - protein, 126 aa, Zea mays
  unsure (1)..(126): unsure at all Xaa locations
  Clone ID: MRT4577_129608C.1.pep
MGRRHCRGGRPESTSLHQGDQPLHAHRRHPGRHRHATPRCQSDTPHSKALHKSFLKTCEVGGCILTLPSCSPXSRDSMKELREVTVKHSWNLMTSSVLXGQFLNMLIKLIGAKKTMEIGVCTGYFL

SEQ ID NO: 217113 - protein, 37 aa, Zea mays
  Clone ID: MRT4577_129609C.1.pep
RVRTGKEHRGTVKMVRQHSKQSKSKLRCWQCAYGSWP

SEQ ID NO: 217114 - protein, 42 aa, Zea mays
  Clone ID: MRT4577_12960C.1.pep
PYIFPTKLNLLSYCGPTVQFSGAGRDLRETYVILFLCSYHEW

SEQ ID NO: 217115 - protein, 93 aa, Zea mays
  Clone ID: MRT4577_129610C.1.pep
RHCGHSFWLQTLIPFLSWSMNQSYPVESLELKDNLANETAAEHLLLRIRALDSCLNRTVSKWKNKFLSLFYSFLWSCFSPSPRGIWSVSLLNC

SEQ ID NO: 217116 - protein, 85 aa, Zea mays
  Clone ID: MRT4577_129611C.1.pep
LLIFFYSITTPPGGDTGAKAGQHRADTGHEHQETSRPPKREGDRPNRHRGGRNNPRTKDHQRNGAQGGGRPPSGRRSRTRKGTRH

SEQ ID NO: 217117 - protein, 53 aa, Zea mays
  Clone ID: MRT4577_129612C.1.pep
HTFFNTFDIFSHIYAILFCVQELQGGCFAIECAGYIFARSGYNLSCVTVTTFI

SEQ ID NO: 217118 - protein, 41 aa, Zea mays
  Clone ID: MRT4577_129613C.1.pep
WGCFSLYCSPTSNGSAFKNFATHRLLKEYFTKPRIITQLFN

SEQ ID NO: 217119 - protein, 85 aa, Zea mays
  Clone ID: MRT4577_129614C.1.pep
GHTKGGTTKEGTTEVGRTPPRGALSVRHTVGVGASRKNRKEQGDQPRMSMKHRKKDIDKKDEPHQRQHPKRSSSDEQLDPNNDIP

SEQ ID NO: 217120 - protein, 61 aa, Zea mays
  unsure (1)..(61): unsure at all Xaa locations
  Clone ID: MRT4577_129615C.1.pep
SSRVCAEFLSSSQLLDQLRSASSSISSCSSIHVCSAYLCHIVVYVLDVYISLFIPFLXLVI

SEQ ID NO: 217121 - protein, 146 aa, Zea mays
  unsure (1)..(146): unsure at all Xaa locations
  Clone ID: MRT4577_129616C.1.pep
GLVGVLGPVTXICGLNEGNRDLIHQRGIYQVRQKGESLXLHTVDRKLLXEWTVPGGGTQALTCHKALLNAPAESDPVALDMSSMVNDQVWLNWSHTWRYWLYKTHCSGCVRXSFLATYRQDKRTSICGDLSKRWYHVHWDKSESHR

SEQ ID NO: 217122 - protein, 50 aa, Zea mays
  Clone ID: MRT4577_129617C.1.pep
SVCVAVISDVQLEISSLRSSYMYSGFIRFDRRYGFKSIKSVSRLCPRRFM

SEQ ID NO: 217123 - protein, 100 aa, Zea mays
  Clone ID: MRT4577_129618C.1.pep
CTHDLRSRLVIGALMTYEPLGPRRTRGLSSLGLRARTVHKAYNATSHAETHAVEARGRRCAKIVMMVLRPTPATPAVIMSMDRDDKAHADKQPCHNKTLG

SEQ ID NO: 217124 - protein, 56 aa, Zea mays
  Clone ID: MRT4577_129619C.1.pep
FLNFTRIFPLHNLSFFRVDSFLSYHCLDHFFPLGLFATFNFENGLKYSPLNFLAPF

SEQ ID NO: 217125 - protein, 55 aa, Zea mays
  unsure (1)..(55): unsure at all Xaa locations
  Clone ID: MRT4577_12961C.1.pep
ASPSTGGREQRRVLDHHVVLGGAWLGGQLFSDMVVHRPGHLFLDXLSLGYDYVYD

SEQ ID NO: 217126 - protein, 152 aa, Zea mays
  Clone ID: MRT4577_129620C.1.pep
RQQGWQQTLASNCSRRRFCPFTQQSALTCVFYLKHHQGPSTQQVVAGPRRFFPSNQRAALTSRVYLQHQQLFPLTQQVGGSQPPFLPHPQFLRFNKPAALTAGTLFMIVAVARGQPGSLPNPTGVWPPAPFKGGAFSYLYSPAGGQVRGILC

SEQ ID NO: 217127 - protein, 180 aa, Zea mays
  Clone ID: MRT4577_129621C.1.pep
LGPPGLPGFFFLPDTSLSLLQLPAGVLLYRGSPLRAGLSSASPSMALGCSKSLSYSLIETTRQLSAQLPRPWPQAPARVSLALCSSSPGRVPARSLPWLGSARAVLCPCARPAPWNLGFRRARVSLATVEPRCPSRSSLLATTCRAFASSFSVPCRLSVFDPRLDVILPVQRLLGAQQNA

SEQ ID NO: 217128 - protein, 459 aa, Zea mays
  unsure (1)..(459): unsure at all Xaa locations
  Clone ID: MRT4577_129622C.1.pep
WRTALATTQHVSTPTKNAESCGVLGPPAPAAAAXAAGAAEAEELIGFKATLRHVDADAGYTEEQLLSRALRRSSARVATLQSLAALAPGDAITAARILVLASDGEYLMEMGIGTPTRYYSAILDTGSDLIWTQCAPCLLCVDQPTPYFDPARSATYRSLGCASPACNALYYPLCYQKVCVYQYFYGDSASTAGVLANETFTFGTNETRVSLPGISFGCGNLNAGSLANGSGMVGFGRGSLSLVSQLGSPRFSYCLTSFLSPVPSRLYFGVYATLNSTNASSEPVQSTPFVVNPALPTMYFLNMTGISVGGYLLPIDPAVFAINDTDGTGGTIIDSGTTITYLAEPAYDAVRAAFASQITLPLLNVTDASVLDTCFQWPPPPRQSVTLPQLVLHFDGADWELPLQNYMLVDPSTGGGLCLAMASSSDGSIIGSYQHQNFNVLYDLENSLMSFVPAPCHLM

SEQ ID NO: 217129 - protein, 707 aa, Zea mays
  unsure (1)..(707): unsure at all Xaa locations
  Clone ID: MRT4577_129623C.1.pep
MERSCYFPLRWESTGDQWWYASPIDWAAADGHYDIVRQLLHLDPNLLIKLTSLRRIRRLEALWDDDARFADAARNRASVARSLLLECECRNHRPAAPGAGENTLLRAGYGGWVLYAAASAGDAAFVRELLERDPLLVFGEGEYGVTDMFYAAARGGSADVFRLLLDHAMSPRCSTSCRNGEASARRSSVFRLEMMSRAVHAAARGGSVEMLRELLEESSVSTYLDIRGSTVLHAAAGRGQLQVVKYLVASFDIINSTDNHGNTALHVAAYRGHQPVVEALVAASPSTLSVVNNAGDTFLHSAVTGFRTPGFRRLDRQLELMRYLIRERTADIQKIINLRNDAGLTALHLAVVGCAHPDLVELLMATPSIDLNAEDANGMTALALLKQQLRSATSDRLIKQIVSAGGVLNSSILRTRSAIASQIKMQGGIASSPGTTFKVSDAEIFLFSGMGAAESLRPSSCSSNXGRMMTLXADADCAENRGSSEKRLSSASRAKDRLKMMLRWPRHKDKTPKKSEDSSPLGSISRLNEHGAETPAPLRQKFTKTTALNGKRTLAVKSSTPSSSSTKKKLNTKLIHGIMEAMPQLAPSTARSASPTDTFLRSSVSSTPQPLAKLKDICLDDEISMVTPPAGRLKDSDDAMEDPSCSNNSSMDDGCGAGTAESAARKHGCGNGRLINICFGAQGLTVEDSASGQQTSKMFKQQCLRVS

SEQ ID NO: 217130 - protein, 180 aa, Zea mays
  Clone ID: MRT4577_129624C.1.pep
GSRLQTSPLPNVPVGTKKGSKPSQSIVQALATSDVTSLLTYQLNSPTGNNDAVNLEAHDDQDDGRSKEQGAGAVNQELDGEQDDGHREEQAAGMVTTEFGDDQADGHSEEQGAGAIISATPAKEENDGTWNDKGVQSPKDLNVVPPNSVALNQVRWNMNKGSQRWLCYGGAAGIIRCQRI

SEQ ID NO: 217131 - protein, 57 aa, Zea mays
  Clone ID: MRT4577_129625C.1.pep
STPRLHLPDQTMNAGITLSVSQLNILFWPHGYKQKIAYTSQWIHFGPQEKDLCEGGE

SEQ ID NO: 217132 - protein, 94 aa, Zea mays
  unsure (1)..(94): unsure at all Xaa locations
  Clone ID: MRT4577_129626C.1.pep
TITSHARLPNLVSSTTAALSLLLNIPLHSQSIYLSSHCIFLITLIPIFFPITSPPINDYPXSPIFYQAGVVKXIYXFXTHXXQNFKKFFXXPIT

SEQ ID NO: 217133 - protein, 94 aa, Zea mays
  Clone ID: MRT4577_129627C.1.pep
CSVELNPWRRANPCAAAKTLPCPSYGSQGLQLSVSRSRLSDDARTERAFLAVWQTPWPTEYPLAGVVDRGGLVASPARALWTGQVTAPLAFGLR

SEQ ID NO: 217134 - protein, 130 aa, Zea mays
  unsure (1)..(130): unsure at all Xaa locations
  Clone ID: MRT4577_129628C.1.pep
TSTSTRPLAGHYTEGAELVDQVLDVVRREAEGCDCIQGFQITHSLGGGTGAGMGTLLISKIREEFPDRMXXATFSVVPSPKVSDTXXVEPYNATLSIHQLVENSDETFCIDNEALYDICTRTLKLDSPSY

SEQ ID NO: 217135 - protein, 78 aa, Zea mays
  Clone ID: MRT4577_129629C.1.pep
FHIVYLNYFIFYHHRQCPHPLNPQLQTCHGMLTKRLQLMSEVGCNRWLKNAPVRKKSLVGFLIVDVFSRYKWMYGVPQ

SEQ ID NO: 217136 - protein, 77 aa, Zea mays
  Clone ID: MRT4577_12962C.1.pep
MGGGNGQKSKMARERNLEKNKGAKGSQLETNKKAMSIQCKVCMQTFMCTTTEVKCREHAEAKHPKTDVYQCFPHLKK

SEQ ID NO: 217137 - protein, 158 aa, Zea mays
  Clone ID: MRT4577_129630C.1.pep
ELLYNNLVMAALDLNLIKHSYAYMRKMRELSLPISPYAYNRLIILHSSPGRRKTISKILSQMKGDRVVPHTSTYNILLKIQANEHNIDGLARVFNGMKRAKIEPNEITYGILAIAHAVARLYTVCHTYVEAIENSMTGTNWSTLEILLILYGYLGKEK

SEQ ID NO: 217138 - protein, 79 aa, Zea mays
  Clone ID: MRT4577_129631C.1.pep
FQHATTVVSKVVIFFKLIFLIAFTCLQFNTDFNWIRSMPCHAPYPDFQGSAFLFQTNLCLVFYWIVLSFYTLLFFFFFF

SEQ ID NO: 217139 - protein, 83 aa, Zea mays
  Clone ID: MRT4577_129632C.1.pep
KKKINKKKKKKKKRERYKKKKRNKKKIIKDYLFKNPNLTSSSFLRLTSTLVLPNFYSLAFLFHLIIWQILSVPQFNRLALHPL

SEQ ID NO: 217140 - protein, 113 aa, Zea mays
  unsure (1)..(113): unsure at all Xaa locations
  Clone ID: MRT4577_129633C.1.pep
MATNILTLLALLALFVSASNAFIIPQCSLAPSAIFPQFFPPVSSMGFEYLSVLAYMQQHMLSASVLHQPIAXFQQQSLPHITIQAITTQQQQQFLPSLYHLAIENPAAYFQDQ

SEQ ID NO: 217141 - protein, 142 aa, Zea mays
  Clone ID: MRT4577_129634C.1.pep
SKYSFGILFQFVRCHGLSFFGFRHCVTFVSLHQLQVPTTVRPNPIIRCFSRSDAGFFFNLFLAPTPLILQSLIERWSDSLLAPPLPPAGQEDLVRIAREIGSGEGSKNALCPCSNWLCIRHIHGELESAASTEASARNQAWR

SEQ ID NO: 217142 - protein, 130 aa, Zea mays
  unsure (1)..(130): unsure at all Xaa locations
  Clone ID: MRT4577_129635C.1.pep
MNDDTSSSDMQVITPAPLAISTAARMGPDGCSGEDVAVYQSSANPLPSGIPAYTVRIINVCSGGCTVYDVHVSCGDFASTELVDPAKFQRVGFNDCVXKGGGALEPSETVSFQYSNSFSYHLSVASVACR

SEQ ID NO: 217143 - protein, 178 aa, Zea mays
  Clone ID: MRT4577_129636C.1.pep
MGQRRFEDERAALATVASLLLILTTAQAAAAAASGRHLSLPTQKAAAARMNDTSSSDMQVITPAPLAISTAARMGPDGCSGEDVAVYQSSANPLPSGIPAYTVRIINVCSGGCTVYDVHVSCGDFASTELVDPAKFQRVGFNDCVVKGGGALEPSETVSFQYSNSFSYHLSVASVACR

SEQ ID NO: 217144 - protein, 72 aa, Zea mays
  Clone ID: MRT4577_129637C.1.pep
ISLNTLLDSVQWPKRVKRLSPVVLKVMLRSRSEYVLRIVDGGPDRPKRDISPEPEAARDGGARGAAGESGVS

SEQ ID NO: 217145 - protein, 30 aa, Zea mays
  Clone ID: MRT4577_129638C.1.pep
KKEGFFFEKKRPSLGEWKKKKNFTCINTYY

SEQ ID NO: 217146 - protein, 79 aa, Zea mays
  Clone ID: MRT4577_129639C.1.pep
MAHPVVDPVSGSATLGLSLHPIGLSSAVTVFVLCQAQMWTCPVVWVASPSSATSGCAFVGDQERQELKALKPYVPFGRR

SEQ ID NO: 217147 - protein, 139 aa, Zea mays
  Clone ID: MRT4577_12963C.1.pep
SRPPGEVRVAAVDCRRILHHGRWQRPEVQDGPRAQLGEEQGGQGCAPLFSLPSTTPLPLLGCYVFSSSHCSGRALRSDGSACFRCAGSQLETNKKAMSIQCKVCMQTFMCTTTEVKCREHAEAKHPKTDVYQCFPHLKK

SEQ ID NO: 217148 - protein, 113 aa, Zea mays
  Clone ID: MRT4577_129640C.1.pep
KDRRVKSPHKMIGNDCCYTGVRNCSYKAGLQHEGDSNFNGAADDPNLRLPDDHNMYGLNPTVAKIFNASGPASVRETVPYEMDVSKISQTGGYEPRAYIWYEIELYACQNVFY

SEQ ID NO: 217149 - protein, 66 aa, Zea mays
  Clone ID: MRT4577_129641C.1.pep
RPIGKPPFPAGWRILCSSWRGWFPACSPASGRPGVGCELDHSLRQRKAKHLSKKKKKKKKKKKKAC

SEQ ID NO: 217150 - protein, 53 aa, Zea mays
  Clone ID: MRT4577_129642C.1.pep
MQLQKMSLPRRRHLVLLVCLLVFLVFAVSASTSSAEVCPSVSVDFVRRSCRST

SEQ ID NO: 217151 - protein, 70 aa, Zea mays
  unsure (1)..(70): unsure at all Xaa locations
  Clone ID: MRT4577_129643C.1.pep
MPEDITKGTQSLPTASASKFPSSGPVTPQPTALTFAKSSWARQESLQERKQALXEYARRRFTERRAQEAD

SEQ ID NO: 217152 - protein, 146 aa, Zea mays
  Clone ID: MRT4577_129644C.1.pep
PTKKIMKNSAAADAIISPASATGLAADGTDHVGQGPVIIGDVADAIVSPATAITFTRSEPILSLVEPTAAVADILMSPAGVAPSLLPSSGEQETSQSLQREEFIKSVTRQPSKLLPAPPVILKKKDNKLPSRSVPRRNRRFAGVGV

SEQ ID NO: 217153 - protein, 147 aa, Zea mays
  unsure (1)..(147): unsure at all Xaa locations
  Clone ID: MRT4577_129645C.1.pep
PPPARGFPPPPXGVPAPPPGHKGGPPRPEXGGGPPEAGQARWLRANPGTRGWGADGPFQLLRGPNPRGLGGGVVPGTPPPKQMGXASAGPVEQEKFKGYGRPAPQPGGXGKGIFQCPCSGAPGGYVFRPPPPPPGRLVAGPPPPWAN

SEQ ID NO: 217154 - protein, 70 aa, Zea mays
  unsure (1)..(70): unsure at all Xaa locations
  Clone ID: MRT4577_129646C.1.pep
VSCSTKTLCDGVSNLKNRCPKYLDMLNDLRSYLSHVYPKLNXILFLDDDIAAQRDLTGLWEADHNGKCKC

SEQ ID NO: 217155 - protein, 90 aa, Zea mays
  Clone ID: MRT4577_129647C.1.pep
RAITRLLWATGNFCMFPAIDFSKKGPGVHQLFRVTRGIKTGVHSTFFLLLGEPQKAQSIKKLSFIFNNRPPKKLLGGKIHVSQKGMNTLF

SEQ ID NO: 217156 - protein, 140 aa, Zea mays
  Clone ID: MRT4577_129648C.1.pep
TRGGQTFPSWQLIIAIGAVDVLATLFCVFGWLAGNPYQIPLNNPMSQWTQTLNGHTDIVTVVVIWGYSIGVTIVIAIVYYLLNSIPSLADIGRKKRSHHDTQMENIIGHLTKLTLQHETTPNGEGRYLLQQKASDEDDEE

SEQ ID NO: 217157 - protein, 350 aa, Zea mays
  Clone ID: MRT4577_129649C.1.pep
MAITFQHKIILSPGSMFYFGTISSVENEEGTLHRIADPPERRSPSTISGKVGAKLERAQPPMPREKTTFSELGAESPTTRRTPLSTSPIERWTRITRKKDRQTALLVPLPSKENRKKLIARTTPFYPDVLFIGRVESPPISDDEPTAPGEEPPQRESHRRRNRRRNIRRHHEAGERDPTQPVSRDEASEIGETPEEQVFRERRNSRRRDHRRVQEQAVQEARQRRENPLLGRNLNPDFARAMNTLSEEDTCGVLALTPRLRAIQWPPNFKVSNVDKYEPKQDPGGWLAVYTTVARAAGATEDVMTAYLPIVLGQDALQWLRHLPRHCIDDWSDFSRRFTANFQSLSDKPA

SEQ ID NO: 217158 - protein, 115 aa, Zea mays
  unsure (1)..(115): unsure at all Xaa locations
  Clone ID: MRT4577_12964C.1.pep
CQLQGTCGVGSTPILGQCVEFFRHQCSPTATPXCSPQCQLLRQQCCQQLRQXVEPQHRDQAIFGLVLQSIPQQHPQRVQVWGLLWAQIXNNNCSRCXGLQQLNPSPYAAAGGVPH

SEQ ID NO: 217159 - protein, 349 aa, Zea mays
  unsure (1)..(349): unsure at all Xaa locations
  Clone ID: MRT4577_129650C.1.pep
MGNCLGGSSYVNKVSSTAKPESPPKVQSPSEVDRSDDRKLPSNPGEVEALRRGASAATRRNPLVAFSFSELRTVANDFRKDALIGGGGFGRVYKGSFASPAGAADPSGGTLPVPVAIKVHDGDNSFQGHREWLAEVIFLGQLSHPNLVKLVGYCCEGEHRVLVYEYMALGSVESHLFSRTSPPLPWATRMKIALGAARGLAFLHDAEPRPVIYRDFKTSNILLDAHFNAKLSDFGLAKDGPVGEQSHVSTRVMGTYGYAAPEYMMTGHLTESSDVYSYGVVLLELLTGRRSLDXSRPPREQALTDWALPALPHKKRVQGIVDPRLAGAXWDYESTDRAVQKMVMLEYHW

SEQ ID NO: 217160 - protein, 118 aa, Zea mays
  Clone ID: MRT4577_129651C.1.pep
LSLGPQFVFFRGATRALLGGDPLVSPPPVFSFCLPAGSFEFCWAPSVRACSLGWWRPPHVWCERGFLFPPPGGLVTYPLGGPLWFGFRPLGVVLFLLQVKCGCCSLFTANELFYGIWK

SEQ ID NO: 217161 - protein, 66 aa, Zea mays
  unsure (1)..(66): unsure at all Xaa locations
  Clone ID: MRT4577_129652C.1.pep
SLASAQIPAPPLKTXPTXXGGGXAGDRVXXXXXXPXKTRKMDVPXXTXXRTMKXRPWAXGRSHYLC

SEQ ID NO: 217162 - protein, 126 aa, Zea mays
  unsure (1)..(126): unsure at all Xaa locations
  Clone ID: MRT4577_129653C.1.pep
MARLITVVWCAVAVLLCAAAGASWVEEAANPIRMVSGVEAEVVRVIGECRRALKFARFVSRFGKSYQSEEEMKERYEIFSQNLMFIRSHNKKRLPYTLSVNHFADWTWEEFKKHXRLGTAQNWSGT

SEQ ID NO: 217163 - protein, 32 aa, Zea mays
  Clone ID: MRT4577_129654C.1.pep
MLGRAPKNSDNTKYYEILRVPKSASQDELTNA

SEQ ID NO: 217164 - protein, 51 aa, Zea mays
  Clone ID: MRT4577_129655C.1.pep
CTPIGYKVPLIRSWSIRTKKCVLTIVYFLVEAQNKSFLEWIEIFYIKHTYF

SEQ ID NO: 217165 - protein, 248 aa, Zea mays
  unsure (1)..(248): unsure at all Xaa locations
  Clone ID: MRT4577_129656C.1.pep
MSSAEAKAAAKAVPESVLRKRKREEQWAADKKEKALADRKEALDSRKIIFARAKQYAQEYDAQEKELVQLKREARLKXGGFYVSPEAKLLFVVRIRGINAMHPKTRKILQLLRLRQIFNGVFLKVNKATINMLRRVEPYVAYGYPNLKSVRELIYKRGYGKLNKQRIPLSNNNVIEEGLGKHNIICIEDLVHEIMTVGPHFKEANNFLWPFKLKAPLGGLKKKRNHYVEGGDAGNRENYINELIKRMN

SEQ ID NO: 217166 - protein, 107 aa, Zea mays
  Clone ID: MRT4577_129657C.1.pep
ENPSRRHRSGLPGKQDRPARRRVKRNPRVTNSPPKCPKGHFTGPSFVRPVLIFPGLSTELPHKYNLRFIPIPKDHQVQVLPRTYQGPEGKGVQVYPPPLVIHVERIT

SEQ ID NO: 217167 - protein, 142 aa, Zea mays
  Clone ID: MRT4577_129658C.1.pep
MSSAEAKAAAKAVPESVLRKRKREEQWAADKKEKALADRKEALDSRKIIFARAKQYAQEYDAQEKELVQLKREARLKGGFYVSPEAKLLFVVRIRGINAMHPKTRKILQLLRLRQIFNGVFLKVNKATINMLRRVEPYVAYG

SEQ ID NO: 217168 - protein, 233 aa, Zea mays
  Clone ID: MRT4577_129659C.1.pep
AGLPLWLRPYEVIVTSAYTALIETIPDTASIHSVKSRFPNISSLRDYYVAKYEENSPNFKLAQRNFVESMAGYSILCYLLQVKDRHNGNLLIDEEGHIIHIDFGFILSNSPGGVNFESAPFKLTRELLEVMDSDAEGTPSEFFDYFKVLCIQGFLTCRKHAERIILLVEMLQDSGFPCFKGGPRTIQNLRKRFHLSLTEEQCVSLVLSLISSSMDAWRTRQYDYYQRVLNGIL

SEQ ID NO: 217169 - protein, 77 aa, Zea mays
  Clone ID: MRT4577_12965C.1.pep
MGGGNGQKSKMARERNLEKNKGSKGSQLETNKKAMSIQCKVCMQTFMCTTTEVKCREHAEAKHPKTDVYQCFPHLKK

SEQ ID NO: 217170 - protein, 107 aa, Zea mays
  Clone ID: MRT4577_129660C.1.pep
DRLTVRLSLTAYYMDGHNSIPEAGALKAIYQSLNSLGTLMCSLIKTRVGLFQSLNSMSVPWILIPESTTWRVTIMDNVCYSGEEGSHTTNRRKGSAALIVYSAILFA

SEQ ID NO: 217171 - protein, 66 aa, Zea mays
  Clone ID: MRT4577_129661C.1.pep
DQPPIVNARILSLGLVVLHGIRQSVWLHWRGFGSFPVVRKIHALCISVCPWQARWGFNYIIPPSLG

SEQ ID NO: 217172 - protein, 45 aa, Zea mays
  Clone ID: MRT4577_129662C.1.pep
ARTNVSSATPYVHKRTGYTLHFRITMLLRYRNHVPVSITLGRFLT

SEQ ID NO: 217173 - protein, 138 aa, Zea mays
  unsure (1)..(138): unsure at all Xaa locations
  Clone ID: MRT4577_129663C.1.pep
RFLYLLPAEPAPVTPGHRWSPPPCPLHWPSRTPPPANTPPRILHGQLAVATHLLSLSTCALASPSPLSSLAPPPAPCLRCLASPDHQLSFPSSSSHPNSRMGPSPPTTCSGAATSKFPRPRRHDRRXAAPFGFRRWSG

SEQ ID NO: 217174 - protein, 490 aa, Zea mays
  Clone ID: MRT4577_129664C.1.pep
MRDMYCNLQCSIRYFTSLPHLILPVSILTLSKGVSEKFTQASDNQKLEAKSRLLDLVNKGVEASLVQLLETGLLHADPHPGNLRYTPEGRVGFLDFGLLCMMERKHQRAMLASIVHIVNGDWASVVYDLTEMDVVPPKTNLRRVSVDLEDALGEVTFEDGIPDVNFFKVLGKIWSVAFKYHFRMPPYYTLVLRSLASLEGLAVAADGTFKTFQAAYPYVVRKLLSENSLETRRLLNQAIFNKRKEFQWQKIDAFLKLASARTNFKYNSEVLPEPDMKSMNVASLVEISDAYSLDRAIATPERALHTANLCVRLLLSKESIVIRRLIMTANAKSLARDLISRDALMFRVLLSKVIADVVYQWMLSATGLKRVMETKIQTPMTTGKNEGHLVLAEEPSTLMVLQAAVKDRRIQLMFTKFVRELREEPVLMIRVSWNVFLISVSSAAVGLHRFLVFFLKEDGARFLDDKVKKMKIWLMEFSKRTANLEIQGIL

SEQ ID NO: 217175 - protein, 162 aa, Zea mays
  Clone ID: MRT4577_129665C.1.pep
MASGIMFRRLSKTLTMSPATALASGMTSQHHQLQQRAPVSGTSKGKAKLKAGMPLRRSVIAKKGGAPATAGSGGAGRGRREAMERITQIAESCLKSSTPLRHLSPKERLREAKREELGLISMERQRELDAAKAKAKAKSKGASGGDGDRVLMGPPGLDYISL

SEQ ID NO: 217176 - protein, 395 aa, Zea mays
  unsure (1)..(395): unsure at all Xaa locations
  Clone ID: MRT4577_129666C.1.pep
MLASIVHIVNGDWASVVYDLTEMDVVPPKTNLRRVTMXCLGKIWSVAFKYHFRMPPYYTLVLRSLASLEGLAVAADGTFKTFQAAYPYVVRKLLSENSLETRRLLNQAIFNKRKEFQWQKIDAFLKLASARTNFKYNSEVLPEPDMKSMNVASLVEISDAYSLDRAIATPERALHTANLCVRLLLSKESIVIRRLIMTAXVSHLICTLLYLCCSNGPPDRHLRLTXSSLRILLXNAKSLARDLISRDALMFRVLLSKVIADVVYQWMLSATGLKRVMETKIQTPMTTGKNEGHLVLAEEPSTLMVLQAAVKDRRIQLMFTKFVRELREEPVLMIRVSWNVFLISVSSAAVGLPRFLVFFFKEDGARFLDYKVKKIKIWLMEFSKRTANLEIQGIL

SEQ ID NO: 217177 - protein, 60 aa, Zea mays
  Clone ID: MRT4577_129667C.1.pep
QMRDMYCNLQCSIHYFTSLPHLILPVSILTLSYTVSTSPYVNLVLSSATVPTAHLCYFHV

SEQ ID NO: 217178 - protein, 132 aa, Zea mays
  unsure (1)..(132): unsure at all Xaa locations
  Clone ID: MRT4577_129668C.1.pep
WARRIDAQLMTCMDEFHQNIGGDGTDADPSEKKPGYVIDIGATNRPAAVDQALPRPTRSDREIYAEVPDVNARKQILMMLAQQLRLEGQYDFTKIARATPGYVGADXKALANNARDLAMHRMINKRRAQPCS

SEQ ID NO: 217179 - protein, 56 aa, Zea mays
  Clone ID: MRT4577_129669C.1.pep
DSIHYRRISGSRFHACVVRDINALSTHAHVWSNCMCPVQMLTFRVSLAQLSGWSSI

SEQ ID NO: 217180 - protein, 394 aa, Zea mays
  Clone ID: MRT4577_12966C.1.pep
MAPKRKRQSTIVAIIPPIDPNSHLPFAVNHMSIVSEFDLLHLVEIGVLLPKELCSWRICCGVTVPIEDTHESVIYVPFLILITEAKVLLAEICSLKDGGLTAEAVVADFVFKNIQPLKDRAYPPYLYSGVNDSTWVTNRIIPTKDLLSRLEMILRGRVSNAGARVAYSAWNLPPLRPLSKFVSNPPSCDGSLGLRVRPSSEDIEALIAPLRSLPEDERQTHFEMPACTDDAEIDVVLSLLAGESSDSTRTEPMAITTGQAFDEEVEIRKPEGARPKRPRRVNRPTALVKEKRKKRRLQRLSCLDQDAGPSVPVPDDVPAEAIPEVGAKGCDPAQATSCMFNEDEGEEEEAVPLIRKNSRHYRGSEGGRDIPSLALSALVSLQGLLISDFDQVLE

SEQ ID NO: 217181 - protein, 111 aa, Zea mays
  Clone ID: MRT4577_129670C.1.pep
GWNPPMNLDFLRSLGGVGPLSYSPPGFAMLGVPPPRVFDKAFFNNLRYNKGLFASDQVFFSDGRFRPPVNLFAANAPAFFEAFVAPMAKLGRMGLKTGADGEIPRVCPPVN

SEQ ID NO: 217182 - protein, 59 aa, Zea mays
  unsure (1)..(59): unsure at all Xaa locations
  Clone ID: MRT4577_129671C.1.pep
KAVATSHGLWITRREPVHLFATHLLIEKKLRDVFANLQTKEGRIAWLRNAYEIDLXKCT

SEQ ID NO: 217183 - protein, 224 aa, Zea mays
  Clone ID: MRT4577_129672C.1.pep
MGLEMVEVMSETVPTVVPAAARENGVDIYPLSRYYFGARDAAGVPRGLETAADRALRLKANFAAHGLRTSVHGVLLVELFDHPHVLLLQVRNSSFLLPGGRLRPGEEEVRGLKRKLSSKLSVVDDAEAVQEEDWQIGQCIGMWWRSEFEAIPFPYMPPRFRAAKECMKLFLIRLPMSRQFIVPRNMKLLAVPLSQIHGNAQVYGPIIAAIPSLLSKFSFNVISD

SEQ ID NO: 217184 - protein, 84 aa, Zea mays
  unsure (1)..(84): unsure at all Xaa locations
  Clone ID: MRT4577_129673C.1.pep
LASPADMLVLVVFFSEPPAPRAQLSLVEDLSSRSSCFLLYMNSYSSQPQVYPLGASRLRSTLGGQSGPIXXGESRLFLCKWGFC

SEQ ID NO: 217185 - protein, 54 aa, Zea mays
  Clone ID: MRT4577_129674C.1.pep
RNLNCCAPKSEARPPPPAPELGHSLIVSMIDAIRHSETWIKERAWDTMIVCLVL

SEQ ID NO: 217186 - protein, 185 aa, Zea mays
  unsure (1)..(185): unsure at all Xaa locations
  Clone ID: MRT4577_129675C.1.pep
APDPSPPEKLTAXMTDXTXATLTSLDANGQPXXGPPFSKGSYYHPRGMLNVMEHFKTKYGDPLIYVTENGFSTSGGPIPFTEAFHDYNRIDYLCSHLCFLRKAIKEKRVNVKGYFVWSLGDNYEFCNGYTVRFGLSYVDFNNVTADRDLKASGLWYQSFLRDTTKNQDILRSSLPFKNGDRKSLT

SEQ ID NO: 217187 - protein, 67 aa, Zea mays
  Clone ID: MRT4577_129676C.1.pep
FALSFLSSSDFPESSPTYCVWLYFLVCLQVLVPLPFCSNAHKLSIASFHPPYLSPSSSILIVKNPNL

SEQ ID NO: 217188 - protein, 72 aa, Zea mays
  Clone ID: MRT4577_129677C.1.pep
RSPHSDGHRRCCNITLKSLQSFLLRNKPDTSLGMVKLYEIPRGEAEATYAMETALQVPVTDMDAALLTGGSK

SEQ ID NO: 217189 - protein, 95 aa, Zea mays
  Clone ID: MRT4577_129678C.1.pep
LKPQWEMALPMRGYSQLSSDPCSWLHCPDLIVGGTRGHQATLNLISGDRSQLYSRPHGKLFTFQLCTPLAPTVLISEVHTWSMCAVPESQQTTSL

SEQ ID NO: 217190 - protein, 59 aa, Zea mays
  Clone ID: MRT4577_129679C.1.pep
GGEYLWGCVMQAGLVLGKGVPHMAHIGPSQRVRLYLWGRPRSYEAPWSMEGVVFYKALL

SEQ ID NO: 217191 - protein, 159 aa, Zea mays
  unsure (1)..(159): unsure at all Xaa locations
  Clone ID: MRT4577_12967C.1.pep
MGGEGDGPAIEIDLGTTYSCDGVWQHDRVKIIGNDQLNRTTPSDVAFTESKRLIIEAGLNQDSMIHINTVFDVKLLIAMRLNDAVXQNDIKLWTFWVISDTEGKSKIXAGNXGDANQGACEHISPRVLIENNEIAXVSCVNAIKKAVVTKPAYFDDSTR

SEQ ID NO: 217192 - protein, 129 aa, Zea mays
  Clone ID: MRT4577_129680C.1.pep
MAPKVALFLALSLLFAATAHGCEPNCSGPVVPTPPVVPTPSSHSHGRWPIDALKLKGCANVVRLLKGRLTQYQQWCPLLEGLVELHPPLWLWTAIKGKGLRIHLKGALNLNFILHKWGRIWPEEFTWPN

SEQ ID NO: 217193 - protein, 43 aa, Zea mays
  unsure (1)..(43): unsure at all Xaa locations
  Clone ID: MRT4577_129681C.1.pep
WLSVVMTCNCEQFRFLCSLXRXADYEQHGIQFIDSENCWTDNF

SEQ ID NO: 217194 - protein, 171 aa, Zea mays
  unsure (1)..(171): unsure at all Xaa locations
  Clone ID: MRT4577_129682C.1.pep
HTTRSQAIRXHWWSRSGCRHESETQGCHSQRGHSDRRENRALSNRKPKRSPACTACASHGLQTQHPVSESESETETETSRCSDAAARRGRPKLTGMDGRGAVGYQSIGISWESALGCRRRGAAPCGRLEGRPYYWFGRESGRLLQLQVIYQLPLVRHQACQTLESIQRFAI

SEQ ID NO: 217195 - protein, 75 aa, Zea mays
  Clone ID: MRT4577_129684C.1.pep
SLRFGNPRPLVIADPCLPLGAGPWFLLMMPSLYFYVLALDYSLVFQLNDWLVLLPEKLVLCLCWDFRQCPAATFI

SEQ ID NO: 217196 - protein, 164 aa, Zea mays
  Clone ID: MRT4577_129685C.1.pep
GRPKLTGMDGRGAVSSQSIGIAWESGLGCRRRGAAPCGKLEGRPSLFSRESGSLLHLQVIHCFWYIHTGTSHFEVNSEIRPLIDGTCGCLLVLCYMRMTRPLKIEAKQERRQQLLPSSLAKPHTLSPVVPPARSGHRSSSCRGFRTRSESAQPGSQAGRADRGQ

SEQ ID NO: 217197 - protein, 79 aa, Zea mays
  Clone ID: MRT4577_129686C.1.pep
PAPSGPSFFSRQFLIFGMKSPFVNFFLGVQVPYAPFVFSPPLGLFLIRGPPLVTRQAVWFFFPQVRQRNPRNEVISPYF

SEQ ID NO: 217198 - protein, 226 aa, Zea mays
  Clone ID: MRT4577_129687C.1.pep
HTTRSQAIRCHWWSRSGCRHESETQGCDSRHGHSDRRENRALSNRKPKRSPACTACCASQSLQTQHPVTETETETSRCSDAAARRGRPKLTGMDGRGAVSYQSIGIAWESGLGCRRRGAAPCGKLEGRPYLFSREYGRLLQLQVINCFWYMTTGTSDFEVNSEICNLIDGTCGCLLVLCYMRMKQNLSPVVRRGRSGHRSSSCRGFRTRSESGQPGSQAGRADRGQ

SEQ ID NO: 217199 - protein, 80 aa, Zea mays
  Clone ID: MRT4577_129688C.1.pep
RRQSRLLNVTPIGSMSEQLLHLLAISDTLGGSTPVITLVYNDALWLNANPTSKNSIHLSLGRCTGLKARGASSPRASIGG

SEQ ID NO: 217200 - protein, 37 aa, Zea mays
  Clone ID: MRT4577_129689C.1.pep
TFITWMDCRMSERSITRSPVWIMPLALSSEQVQFRLL

SEQ ID NO: 217201 - protein, 77 aa, Zea mays; identical to SEQ ID NO: 217136
  Clone ID: MRT4577_12968C.1.pep

SEQ ID NO: 217202 - protein, 161 aa, Zea mays
  Clone ID: MRT4577_129690C.1.pep
IPSSSPPVWSQVVRRALVCNWVHLPATSASSLLITLNTSRKFLDRTAHSKVCLPLPRSELSPALPDLGDHEASRSAHVCASRRPSAAALWDSMDEARPCSPLRSVSTSPCFSLVSAKKRFLQICYIKVLYMSYDLSWSYMFDCVRVCMFIHGCKYSSRDFI

SEQ ID NO: 217203 - protein, 207 aa, Zea mays
  Clone ID: MRT4577_129691C.1.pep
MATRKPRDAANKLCLAIPPVKGALAVLPSVCKLNTIPVMLLINDIMLSGCTRCCIRRQEELSKLTAPGLVAQKKAFFEEYYKRARHLKAQGVLHQAGAAVEENDSSQADELPAAMSEPSTDVESKCQDAHEHGQQACQTFRRRVLALDSSDQEMVLNHGSVSFGRFAAESLSWERRSVFEHNRRQEELSKLKAPGLVAQKKAFFEEY

SEQ ID NO: 217204 - protein, 165 aa, Zea mays
  Clone ID: MRT4577_129692C.1.pep
SPFPEIEVRHEIKKLEGNGKSSLAGKHKTTLHWFGTGATLYIDPVSGRGDQGQVGWSEYGVDYGKSGSIQTTLTEWLPGMGYNEVDPVVMGGLLDALSGRQDYTMLFIKAALILRTLSVAYSVNESELEGPDELPSVQVGTKRAKIGAIGKVSVQSTWMLSQTGK

SEQ ID NO: 217205 - protein, 59 aa, Zea mays
  Clone ID: MRT4577_129693C.1.pep
LGFCSSAALALFFFFLDLHGDGVIRQLSKLLHQRWVIFTYSGPFNLNAHLKLFEVAIIH

SEQ ID NO: 217206 - protein, 45 aa, Zea mays
  Clone ID: MRT4577_129694C.1.pep
THLRPLLLKETIPSPLFTKTRGIRPRPPTVQGTSLSPSHERTARG

SEQ ID NO: 217207 - protein, 100 aa, Zea mays
  Clone ID: MRT4577_129695C.1.pep
MAVTRSKGSSSSSSAQRAAAAVLLVAVSVLEVGSAAVCDMSNEQFMSCQPAAVKTTDPTDAPLQACCNALAAAEPKCLCGYKNSTGMGVYNIDHKRAMEL

SEQ ID NO: 217208 - protein, 112 aa, Zea mays
  unsure (1)..(112): unsure at all Xaa locations
  Clone ID: MRT4577_129696C.1.pep
KKKXLFEQKKKNKKKKKKRGAKQKKGEEKKQKKKKKKGRPGRPLQGIHPYPPRHWTFLWSFIVPPKFGRPGPLFTPVKPGKPPRYPPFNPFPLSPFCPLAKLPKAPPLSPFP

SEQ ID NO: 217209 - protein, 71 aa, Zea mays
  Clone ID: MRT4577_129697C.1.pep
AKLAPLAIPAQAHELPGQAVHGSGEKHGFRARLKLHVQLWQLAGSSFISTARRLGLFFGGICYTTTPTDPH

SEQ ID NO: 217210 - protein, 66 aa, Zea mays
  unsure (1)..(66): unsure at all Xaa locations
  Clone ID: MRT4577_129698C.1.pep
MGERERDPRRSKMIYRKWSLLSSTVVIWCGVATAGLAGIFLLGGKEKFSQXERLRQQDRATIGMQN

SEQ ID NO: 217211 - protein, 74 aa, Zea mays
  Clone ID: MRT4577_129699C.1.pep
PLAYKITTPGWHPYRPSWCLGGIMNKGCLWQTTPPGDEKAWAPDRRGLPFFLVIPRPCPGSLPWAAGDRGPRYF

SEQ ID NO: 217212 - protein, 34 aa, Zea mays
  unsure (1)..(34): unsure at all Xaa locations
  Clone ID: MRT4577_12969C.1.pep
HTTPASPYCXMTXPDHTVRGVIIDCPXDTSPKGX

SEQ ID NO: 217213 - protein, 54 aa, Zea mays
  unsure (1)..(54): unsure at all Xaa locations
  Clone ID: MRT4577_1296C.1.pep
MHAIAYAEGDKXYGAKSIINVWEPKIHHANKFGLSXLWIFGGSFKEDVNSIEAG

SEQ ID NO: 217214 - protein, 93 aa, Zea mays
  Clone ID: MRT4577_129700C.1.pep
FDDSYVVDFKCDVFIGKGVTNACTHLLTCVLQGGVHLVVVDLLLRLHRYVLELTDTWPSDGLPSNNMFPCFMPNGGHGHIAKWMEYVIGFLAN

SEQ ID NO: 217215 - protein, 39 aa, Zea mays
  Clone ID: MRT4577_129701C.1.pep
CQPSHCLTQHHSNPKLKSTKVLNDQGTKNLPRKNPNASR

SEQ ID NO: 217216 - protein, 277 aa, Zea mays
  Clone ID: MRT4577_129702C.1.pep
MPPPPPQRPASSHVGRANLFSASPPPLSNRRYPHHRSLPLPPVSPRRRDPKKHSQQPSQEEPTDSGPTRTVTTNPAFRAAHLRTAYRKPVPPAAAAGEGEALLAADPTDAASGRAVVVGPSGLSFRLPGAPFDFQFSYSEAPRAPPLAIREPAFLPFAPPTMPRPWTGKAPLLTKEEKARRRGVRLHTPLGQETPQTVSAHGIMMEVRERRKMDLARVSPGDGRSREEVLGEPLTPSEVRALVKPHISHNRQLNIGRDGLTHNMLEMIHCHWRRQEI

SEQ ID NO: 217217 - protein, 83 aa, Zea mays
  Clone ID: MRT4577_129703C.1.pep
MGANCCIAAKQRPEPSVASVEVSAYRTRHSPSWSFRWDNRTHIEDIMENAALFSNHSSGNIRPELKSGSIAPTEGHPNEDNLS

SEQ ID NO: 217218 - protein, 95 aa, Zea mays
  Clone ID: MRT4577_129704C.1.pep
MDALTATNKCSSPSMTTFPIPIVKPPTSPHQASHHLEDLLQEQHKLGPYQHLLPIYLKPFNQYIIRTSNLIYNFRARRNQMLPPIATTNHMHPLP

SEQ ID NO: 217219 - protein, 78 aa, Zea mays
  Clone ID: MRT4577_129705C.1.pep
ANNLLRPLALLLAVLGCALCARADATEFEVGGDDRWVAPAASDGEMYNQWASKNRSLRRDVIHLKYREDSELLVTEAR

SEQ ID NO: 217220 - protein, 107 aa, Zea mays
  Clone ID: MRT4577_129706C.1.pep
KLGVAPSPRLQKPLEGSSPFPFPFPTAHGARKRFPFPPPMQSFKRLFQRNWGVPPPGPPGFLKRASPQLFCYFRCKPVYATGVSPNSPWTLGGFVSKNFFFLGLPSP

SEQ ID NO: 217221 - protein, 88 aa, Zea mays
  Clone ID: MRT4577_129707C.1.pep
WQGPSYCAVGPRQAPTGGTSWTRTTRPAYTPASTSHGIIGEVIPGQVQRAALAPLSFPAHRTLHTAQLVSMLPSLLTHGLFRVQSEFQ

SEQ ID NO: 217222 - protein, 103 aa, Zea mays
  Clone ID: MRT4577_129708C.1.pep
STPLHLINFQCIAKTRMLSFLAMPSIARPPSHKRACHGPWPPRRAMPSSYIRRTCAKLAAACDRASPSAQASKQASYLPFPCDGSEASSLACLHSQPAKPPAS

SEQ ID NO: 217223 - protein, 76 aa, Zea mays
  Clone ID: MRT4577_129709C.1.pep
QSATVMYQVASESGMVRARCHDRVHRRYGIRAQHVDRLPVTLRPRAILSVPRACPHARSSRNGGHGRRVTRRRSGR

SEQ ID NO: 217224 - protein, 244 aa, Zea mays
  Clone ID: MRT4577_12970C.1.pep
MIFVCKTDYWSVGVGPVCIVLKLKKKKKKKKKKKKKKKGRQDKLARKARDPMDKYEPVREIGAGNFGVAKLMRNKDTRELVAMKFIERGNRIDENVFREIVNHRSLRHPNIIRFKEVVLTPTHLAIVMEYAAGGELFERICDAGRFHEDEARYFFQQLVCGVSFCHAMNICHRDLKLENTLLDGSPAPRLKICDFGYSKSSVLHSRPKSTVGTPAYIAPEVLSRREYDGKHADVWSCGVTLYVM

SEQ ID NO: 217225 - protein, 118 aa, Zea mays
  Clone ID: MRT4577_129710C.1.pep
PLTTPGGGGGPLKTIHIFSPVRGGPGVGPFFPYLAPSACLSPLACFLLVGGLLLKKNPPRARGPWVWVCVEKKRRGKTAPALLGVWVIFGFPGVFFFFPGRGFLGNPLLFFPRPACSF

SEQ ID NO: 217226 - protein, 92 aa, Zea mays
  unsure (1)..(92): unsure at all Xaa locations
  Clone ID: MRT4577_129711C.1.pep
TTTAEREXXRDXKEKXAPXAQDXEQEXETXKSSXAGGRSXXXPXGQXNTNGAERXRSPEXXXQPTXXGKEATGNHETTNNGNXKXDKKKRKD

SEQ ID NO: 217227 - protein, 135 aa, Zea mays
  Clone ID: MRT4577_129712C.1.pep
IGTEVELGCSNLTRWLVTSGGLGRVPPERGRRRPRASPGDVRVGARPRPFRQRSARRRPGDLQWRLRPVDARRSPASLGHGGAAQQPALVCCALLVAPLHRRLRALRTSILPLHPCLSPVSGVSEVATGSVSGTR

SEQ ID NO: 217228 - protein, 213 aa, Zea mays
  Clone ID: MRT4577_129713C.1.pep
MARWRPAALLVVALAAVLSAAWRADALSVTVTDTECIHEFVPYEGDTVSGNFVVVDHDIFWSSDHPGIDLTVTSPGGNTVYTLKGKSGEKFEFKAPRGGMYKFCFHNPYGAPETVSFYIHVGHIPNEHNLAKDEHLDPINVKIAELKEALESITAEQKYLKAREARHRHTNESTRKRVMFYTMAEYLAFMAASALQVLYIRRLFSKNVGYNRV

SEQ ID NO: 217229 - protein, 168 aa, Zea mays
  Clone ID: MRT4577_129714C.1.pep
IRHEVDFPGPPASSPPLGHSLPFPRSTFPPAHLLPFPQPVSAHSLVLLAFSCGVAAGRFRSPWLPRRRSCPSSGLGFAAGDSGGFVIRPRAPAAGAERRRLSRSPQRVLRASARSVTPASLPPASTPLAITGKRRRRGPSTGECGQWWCQQSLALLYFFFSMVARVAS

SEQ ID NO: 217230 - protein, 51 aa, Zea mays
  Clone ID: MRT4577_129715C.1.pep
YGKTFKKPKTSYDNDRLDAALKLILYYRLWPKPQLLRDQNTLSNILNTSWH

SEQ ID NO: 217231 - protein, 43 aa, Zea mays
  Clone ID: MRT4577_129716C.1.pep
VPLPLLKHIIQADLRRGDPSVLYDAHTGTYRQLLHADLLIKLN

SEQ ID NO: 217232 - protein, 58 aa, Zea mays
  Clone ID: MRT4577_129717C.1.pep
MACIYCDDVTGLGFSLPLSDHSVIRRMFFIMLAYLLKATSIAYMVKADIALFALRAQH

SEQ ID NO: 217233 - protein, 232 aa, Zea mays
  Clone ID: MRT4577_129718C.1.pep
RQGFLQESKRLDSILAMSFDDLPHDLKSCFLYFAALPMNTPVEARKLVCMWMAEGFLRPKDGRTMEKVGRIYLKELVMRHLVKLVKTDNAGGGDEFVAVHHKVHEFLQHEAQEANFVDIHNGDDIPSLATTRRLSLQNYTDKYAALSSSLPKLRSILSNFQEEVEDDEEDEDNEESEDDEEDEDSEESEDDEEDSEEEGAMEAGHKVEGDGDGEVEVEVEEDEILRLCYVET

SEQ ID NO: 217234 - protein, 182 aa, Zea mays
  unsure (1)..(182): unsure at all Xaa locations
  Clone ID: MRT4577_129719C.1.pep
MSLDGVFSTTEALARLLARCPTLHSDPRLHELASSPAAAPPARDDVTAALAEPLLHPRYTIPVLGCFLPLAPALINQAVALLRARLHACNDDARARLQAWNDDAAHLEDEAXERDVRVIEFYLSRRRLLRLHEIACLALARALDLAPYLLRSVLNYYKFSPPPFQRLLCASLTSQVPSKELH

SEQ ID NO: 217235 - protein, 75 aa, Zea mays
  Clone ID: MRT4577_12971C.1.pep
KTNLKNICWENGRVTYLRGGGGKNKQGRGGFLREKLTRRKWTLGRGDDIETFGGIRKNSEQAAQFKKWKKGRIFF

SEQ ID NO: 217236 - protein, 89 aa, Zea mays
  Clone ID: MRT4577_129720C.1.pep
APKNTFAFVKRGFFLLTETPGLGYKNIFWAFPKTQRPPTRFGEPIRSSMSKGGGRVKRDPPLAPKGPGIKHFWGPVDGPYKKNPPVFGS

SEQ ID NO: 217237 - protein, 52 aa, Zea mays
  Clone ID: MRT4577_129721C.1.pep
RPAPVNKRQGAPRAASPRGREPPRKRGDSPEHTPAEPATNRKSTKAQKRACP

SEQ ID NO: 217238 - protein, 109 aa, Zea mays
  unsure (1)..(109): unsure at all Xaa locations
  Clone ID: MRT4577_129722C.1.pep
SFSFAFSFPATGGINFPLKGLVLGGPIIFFQNLNFFGFCPFSPGGGGFPCPVKGHLVLXNFVGAIPLGRGFWGAHPLLRGAVYPKKKNLGPKPVFPQEISGGFPQNAPY

SEQ ID NO: 217239 - protein, 114 aa, Zea mays
  unsure (1)..(114): unsure at all Xaa locations
  Clone ID: MRT4577_129723C.1.pep
NLEREVINLAGQLSSTHGEQASSIVHTILXAYILRADNVQLHDHLHDANEQLRHYESLLEDIHKESKRKIKSLTDSLNVSKQNEXMLNIDADDVIKLIEAAKFNEENFIITSNE

SEQ ID NO: 217240 - protein, 130 aa, Zea mays
  Clone ID: MRT4577_129724C.1.pep
MYNNMGPRPGMAMPQANPQPSPFGNPFSGPGSGLIRSGLGAYGEKIFGSSSEYVQSNISRYFSDPQYYFQVNDQYVRNKLKIGLLPFLHRGHWTRISEPVGGRLSYKPPIYDINAPDLYIPLMAYGTYAV

SEQ ID NO: 217241 - protein, 87 aa, Zea mays
  unsure (1)..(87): unsure at all Xaa locations
  Clone ID: MRT4577_129725C.1.pep
DVGXASPGGSDWWSLDHWCDKRRISRPGDCGGTTVHRCELMRECAGVNVFHASLHLRHRLQGDATWIIMWPCFNRMEPLGPNTGCEI

SEQ ID NO: 217242 - protein, 67 aa, Zea mays
  Clone ID: MRT4577_129726C.1.pep
RRSPSVLTAHPPSTGPTIRVHMKSFSSARLTDRMRMLAQNLEYQIMARDCSVHGVLICDRFCPNWSR

SEQ ID NO: 217243 - protein, 68 aa, Zea mays
  Clone ID: MRT4577_129727C.1.pep
AGVAPAHGTVVSGSWSRRVASPARVSELRSRQWPALYSGEDMAADSAGHGPAPWWRPRVELRLDSRFT

SEQ ID NO: 217244 - protein, 49 aa, Zea mays
  Clone ID: MRT4577_129728C.1.pep
LQKLIISFTFLYQIKNILAPRAAHPYGKWQSCQLDIKNFHPSQIKVMQG

SEQ ID NO: 217245 - protein, 192 aa, Zea mays
  unsure (1)..(192): unsure at all Xaa locations
  Clone ID: MRT4577_129729C.1.pep
MTAMEESQSDISLELPLSQETFSGLWKLLPPEDILPSPHCMDDLLLPQDVEEFFEGPSEALRVSGAPAAQDPVTETPGPVAPAPATPWPLSSFVPSQKTYQGNYGFHLGFLQSGTAKSVMCTYSPPLNKLFCQLAKTCPVQXWVSATPSAGSRVRAMXIYKRXQHMTEVVRXXPHHERCSDGDGLAPPQHLI

SEQ ID NO: 217246 - protein, 585 aa, Zea mays
  Clone ID: MRT4577_12972C.1.pep
VECVLQQSVIKGLQEVSLSNPADAESLVSRGMLKRSTVATNANSNSSRSQCIITIRADSEHLLSSAVLTIADLAGAEREKRTRNQGSRLLESNFINNTSMVFSLCLRSLLEHQKNQKKPLEKHFKNSMLTRYLRDYLEGRKKMTLILNVKPGDDDYLDTSFLLRQASPYMKIKYTSLDDSFDLASQKRINVSLICQENKKKRKVQKPAVLVVERKENVDTDDISKVSEKDGVHHVSLNPEMPRVSRSEAIMTNFARALLTVLRQYKHKLLESENAVESMKELIRDKDIEIMELKKELKAVRYCSCKSSPINEDDSVDHDDSSSFGQAAQSLVNISNQADLGSNDASEDNFHVELQALHKESDKSESFTVPTPAPTGGAMPASSYSDQSFTGQSDEETEELSKITLENKDIQLDINIREEKHHESCSSSQQVNFDTEGTRSSEASLLGTVGSEKKLEELKQKSGRCVSAVEKANVELEHGIDGGQAPDEKCDHASAKAAKAPPSKGREADETADTDKEAFGSRTEKTRRRLQPAAAMLLREFTGADIDADNEREERGRSSSSVATGRSDALVQLLMKGRPVRGLAS

SEQ ID NO: 217247 - protein, 84 aa, Zea mays
  Clone ID: MRT4577_129730C.1.pep
YVSYKRVAGHQGWPHGGLGHYLVLRRRQELFHLRGPYGERARNGDDLPGTRASLEMVHLNRDDSGLGPFELDALQDCRIQIHDT

SEQ ID NO: 217248 - protein, 152 aa, Zea mays
  Clone ID: MRT4577_129731C.1.pep
MSTPARKRLMRDFKRLQQDPPAGISGAPHDNNIMLWNAVIFGPDDTPWDGGTFKLTLQFTEDYPNKPPTVRFVSRMFHPNIYADGSICLDILQNQWSPIYDVAAILTSIQSLLCDPNPNSPANSEAARMFSENKREYNRKVREVVEQSWTAD

SEQ ID NO: 217249 - protein, 69 aa, Zea mays
  Clone ID: MRT4577_129732C.1.pep
FKIKARIDYNQRKEEPVNNMTSNKVKANGRLEHQSVKRRQRQQLTPGYSAKRSPTDRCVTPAPTSSTTP

SEQ ID NO: 217250 - protein, 152 aa, Zea mays
  Clone ID: MRT4577_129733C.1.pep
MSTPARKRLMRDFKRLQQDPPAGISGAPYDNNIMLWNAVIFGPDDTPWDGGTFKLTLQCTEDYPNKPPTVRFVSRMFHPNIYADGSICLDILQNQWSPIYDVAAILTSIQSLLCDPNPNSPANSEAARMFSENKREYNRKVREVVEQSWTAD

SEQ ID NO: 217251 - protein, 162 aa, Zea mays
  Clone ID: MRT4577_129734C.1.pep
MSTPARKRLMRDFKRLQQDPPAGISGAPYDNNIMLWNAVIFGYQPAYFCDVRPDDTPWDGGTFKLTLQCTEDYPNKPPTVRFVSRMFHPNIYADGSICLDIPQNQWSPIYDVAAILTSIQSPLCDPNPNFPANSEAARMFSENKREDNRKVREVVEQSWPPD

SEQ ID NO: 217252 - protein, 121 aa, Zea mays
  Clone ID: MRT4577_129735C.1.pep
MSTPARKRLMRDFKRLQQDPPAGISGAPYDNNIMLWNAVIFGPDDTPWDGGTFKLTLQFTEDYPNKPPTVRFVSRMFHPNIYADGSICLDILQNQWSPIYDVAAILTSIQVSLILSLNLSC

SEQ ID NO: 217253 - protein, 69 aa, Zea mays
  unsure (1)..(69): unsure at all Xaa locations
  Clone ID: MRT4577_129736C.1.pep
MWTPARKRLMRDFKRLQQDPPAGISGAPHDNNIMLWNAVIFGPDDTPWDGGTFKLTLXFTXDYPIXPAT

SEQ ID NO: 217254 - protein, 121 aa, Zea mays
  Clone ID: MRT4577_129737C.1.pep
STRAPTRTPTRAFTGAARNNGDHSAVALAPCALALPISGAGSRPYISYTPSTRKRGGCAFGGRAAPCSAKFGKVDTADAPAEAEEAGGATDGGLAQPAEEDDSCLPSALEGAIPQSGKASA

SEQ ID NO: 217255 - protein, 152 aa, Zea mays; identical to SEQ ID NO: 217248
  Clone ID: MRT4577_129738C.1.pep

SEQ ID NO: 217256 - protein, 49 aa, Zea mays
  Clone ID: MRT4577_129739C.1.pep
NNNNILHNILIHTSKTTMIHVFIITFIHFIYVLFYILHVIIHPTINLLH

SEQ ID NO: 217257 - protein, 98 aa, Zea mays
  Clone ID: MRT4577_12973C.1.pep
GGESATGTLGTGIGKRGLKHNQGPPMGPLALTSVFLAHGTCTTFGWDRYAWDGSSFYPILGLGLVGGLGATCGSLSLCFMHWPPFPGVEENGFLALLM

SEQ ID NO: 217258 - protein, 143 aa, Zea mays
  Clone ID: MRT4577_129740C.1.pep
FAVCYTIRRGSPQCLLLAAEQTVCFLILTVSLLTYVKFTLVGTFKLTLQFTEDYPNKPPTVRFVSRMFHPNIYADGSICLDILQNQWSPIYDVAAILTSIQSLLCDPNPNSPANSEAARMFSENKREYNRKVREVVEQSWTAD

SEQ ID NO: 217259 - protein, 126 aa, Zea mays
  unsure (1)..(126): unsure at all Xaa locations
  Clone ID: MRT4577_129741C.1.pep
KAGQGRPGGEPNRAGPRTKERQAKTKPGGKGKKGKPPERKEPKPRKKKKKNPKKKKKKQKAQKGNEPKLKGKTGKPRXQKKKKKPRQKKKRKKPPKGPVGYWNTAPLPSVVPGRGGVPGCRKGGLP

SEQ ID NO: 217260 - protein, 135 aa, Zea mays
  Clone ID: MRT4577_129742C.1.pep
MSCDWKPPAFGTPVWMGIPATDVTRASEFYKTVFNFSFGEATEKYPKDQLMKFDFNPSLGLSGGIQKAPDHTGNFAPGKGGICIYWYVENVDTISPIIEKAGGKMLSEKEKEGEHGLYRFFEDTEGSVGAVYQMA

SEQ ID NO: 217261 - protein, 63 aa, Zea mays
  Clone ID: MRT4577_129743C.1.pep
IHSTGFYNSTLGKSISIPPLTDSSCITYFLDEADNLRLPLHLVFLTIPLPKIILDISLSFFFN

SEQ ID NO: 217262 - protein, 52 aa, Zea mays
  Clone ID: MRT4577_129744C.1.pep
IKCSASFVPSEVPFNMSPIGAWPMRSICFFSSRLMEANLCNTKLENLQLRVT

SEQ ID NO: 217263 - protein, 101 aa, Zea mays
  Clone ID: MRT4577_129745C.1.pep
SISLVSVLQGQSLRSDFQGPCLEVTRDWEWGLRADETMGPCRRARPQSFQGLGGSLLLGPSSWLVSLLRKDSSNPTLDHPTGPSGKDNAYQPLSPASVSGT

SEQ ID NO: 217264 - protein, 75 aa, Zea mays
  Clone ID: MRT4577_129746C.1.pep
PASMTTSHNPQTTYKAGNLAPSTSSHTVSLTSNTATSSFINAVTVDFIPITLTSNSYTVTLARDHAKPIPRTWRP

SEQ ID NO: 217265 - protein, 115 aa, Zea mays
  Clone ID: MRT4577_129747C.1.pep
THHQVCPLAVWSPFLSKPSPAKPKTSRFKNTSPFSRLRKKSRPKRASPPHLRVFFSPATNLGMGAPFPWESSPRRALFPRWGAPPGVSKPMGFLTTPVTGDMGSLETYWGAPPRK

SEQ ID NO: 217266 - protein, 104 aa, Zea mays
  Clone ID: MRT4577_129748C.1.pep
FMPNILALFAPVSAHDVPASIGVPTLTSFEGTSLYVPTGPVLDLSCTVHKSGCILMALGLAFHSVVQRLFVVFLLVFNGVLLFRCSTRSRITRYIKSAVSPSSR

SEQ ID NO: 217267 - protein, 123 aa, Zea mays
  Clone ID: MRT4577_129749C.1.pep
MSLTTQVFGPPGYRRWWIYYIVNDTDQLSKALNRPDHLVVFMFSAEWNEPCKAMKKPFRDMARARKMQAVFCLVDIDKLKDAVAQQFQVEALPTFVLYKNGIQKGRVVGAKVDDLRAAIDSNI

SEQ ID NO: 217268 - protein, 132 aa, Zea mays
  unsure (1)..(132): unsure at all Xaa locations
  Clone ID: MRT4577_12974C.1.pep
LPVRSYESSHSSCQDEKQHHFFNHHKKVRETAXGGEYGYSETEVVTASGEGEXKQEKKDXKEHKYNLNLCEVGVIAVGVFSLYENHEAWKEPEHAQMHXITEEVAGATSGRAGGYLFHELRDNNKDTQGTAR

SEQ ID NO: 217269 - protein, 166 aa, Zea mays
  unsure (1)..(166): unsure at all Xaa locations
  Clone ID: MRT4577_129750C.1.pep
MCGVVVKVKPAASSGAVKPVDIVGNIFYRVXCMPHFLPFVFGPEQAFYVIVESVRDSPHPXWIVTFLLFXHKIDPKQTYYLSMDYLQGRALTNAVVNLVISGVYAEAVLKFGYELEALAGSCXDAALGNGGLGRLASCFLDXMATLNLPAWGYGLRYRYGLFKHYI

SEQ ID NO: 217270 - protein, 96 aa, Zea mays
  Clone ID: MRT4577_129751C.1.pep
GCPNCLRSITWTRLLMMICSIFKTVHTPSMTSVSPRCSLVFVLMDSTLPMTAVPSWDPHALWALAHTGKNLLSVQGDTPNAADGTQTLRGTKLKIP

SEQ ID NO: 217271 - protein, 82 aa, Zea mays
  Clone ID: MRT4577_129752C.1.pep
HVRYGVSPFGFHRWPCRQRGLDAVGSCAVVAGAEGSNRGLLLHWLKPALFLRTIYKSPLGPLLLLLVHDEWRGPFADVDVAM

SEQ ID NO: 217272 - protein, 75 aa, Zea mays
  Clone ID: MRT4577_129753C.1.pep
HLCFAPPWSHLVGVPSLLVHSSSSPSPFSAVPSLQAGYRRSPLFSCCRHLVLFSTSEFLPHRDRHSPRTPRRSGV

SEQ ID NO: 217273 - protein, 112 aa, Zea mays
  unsure (1)..(112): unsure at all Xaa locations
  Clone ID: MRT4577_129754C.1.pep
MNCAADYLLADLAGNASPSADDLTAILEPPVCDTDNEKMELLLSQLSGKDITELIAAXLRQFASLPCVGRGAAVAASAPAXGGAAPAAEAKKEXNVQDKEQSDDDMGFXLFD

SEQ ID NO: 217274 - protein, 173 aa, Zea mays
  Clone ID: MRT4577_129755C.1.pep
LFPSFLSRHALSLLVRFQPLVFLPLVVLLSRGCEDSPCNRLLHVGIFPHLSNAVQPLSSSPEQQRSTPAPSICASPHRGVTSSASPHSSSIHRARRAPAQPCRVSKPAIDARLCFRVAGTQSFSPRQSACLTVTGTPRDPWEHHVAVSERRFEPIALWTGQFECSLIEFARAP

SEQ ID NO: 217275 - protein, 63 aa, Zea mays
  Clone ID: MRT4577_129756C.1.pep
IALLGAVCRFFMRIVENNIASKLYISSWSRSFVIFSREDMVDSLSISEYARDQEALCYVGWGV

SEQ ID NO: 217276 - protein, 75 aa, Zea mays; identical to SEQ ID NO: 217272
  Clone ID: MRT4577_129757C.1.pep

SEQ ID NO: 217277 - protein, 102 aa, Zea mays
  Clone ID: MRT4577_129758C.1.pep
HLCFAPPWSHLVGVPSLLVHSSSSPSPFSAVPSLQAGYRRSPLFSCCRHPVLFSMSESYLTVTGTPRDLWKHHVAVSERRFKPIALWTGQSECSLIEFAVAP

SEQ ID NO: 217278 - protein, 99 aa, Zea mays
  unsure (1)..(99): unsure at all Xaa locations
  Clone ID: MRT4577_129759C.1.pep
TPSNTTSSRCYRSRCSREVDRGTRELYGLRWSYPQRQITATCPCLSQPSHDKVITRVNVVTRLGVGARSSGQPTLGWGEEFGLQHKPPRRQITSWIXPG

SEQ ID NO: 217279 - protein, 52 aa, Zea mays
  Clone ID: MRT4577_12975C.1.pep
VSTESASFVSFLQLTRLMSYFSFFRLEPFPFSYIVFFGLCGYTGYASTYTST

SEQ ID NO: 217280 - protein, 48 aa, Zea mays
  Clone ID: MRT4577_129760C.1.pep
FKKKKKKKKKKKKKKKKKKKKKKKKKKKKKKKKKKKKKKKKKKRGRAL

SEQ ID NO: 217281 - protein, 217 aa, Zea mays
  Clone ID: MRT4577_129761C.1.pep
LAFDEAQSPSHMDNLVWLPPGAVIQQNAGFPGDLSKHNKFLDGNSGCDHCGSLFHKGQGSVTDPIYMNPRWTRPVQQHFDHDLVPHADPGHHANSCPDYCRPGDHYVGGQDVRLENGVYVKEQNGGHPPMFYNESHPHDRVWHVHTKQSHQRYQDPRLHHPANGRVIEPYIMDANKVYEVHSASLARSSHESPHYYHGSSEVINDTYHNRQVRGSGL

SEQ ID NO: 217282 - protein, 88 aa, Zea mays
  Clone ID: MRT4577_129762C.1.pep
DPHVRVHIFFFITQQFNSHPIPHNSVNMYKTFFILTHFSLFIPKYNQNIFPFYNNNIFFHLTNILLQILPLLFNPPHIFLPSFKFFIY

SEQ ID NO: 217283 - protein, 128 aa, Zea mays
  Clone ID: MRT4577_129763C.1.pep
IFNRITQKDVASWNTMILGYGMHGQIDVAFELFDLMKDDGIEYDHVSYIAVLSACSHGGLVDRGKKYFSQMIAQNIKPQQMHYACMVDLLGRAGQLSESAEIIRNMPFRANSDVWGALLGSCRIHGDI

SEQ ID NO: 217284 - protein, 88 aa, Zea mays
  Clone ID: MRT4577_129764C.1.pep
PDQDDVCEGSADSTGTTQRKDTLVYPRTCSERIKVYYLRECARATSPLPRSWTWSPAPCQPMSCSPFSESSAHDAFPRDGHGGESNWV

SEQ ID NO: 217285 - protein, 68 aa, Zea mays
  unsure (1)..(68): unsure at all Xaa locations
  Clone ID: MRT4577_129765C.1.pep
KALVILXFKTALLPFGFSPDDPNPFGSRIPRMLKLGLSIHKDKEAPEAYPPMPPLEDYPGETKMEEVP

SEQ ID NO: 217286 - protein, 172 aa, Zea mays
  unsure (1)..(172): unsure at all Xaa locations
  Clone ID: MRT4577_129766C.1.pep
GLVVLVATSSKEDDFLSAATHGAARAXVCTLHADKEDLRVHKEASNSXXANDSPVTLDTCSTGFANAKVTILVATKEIXAVLKGLITAGLGLDTNNCNEAQLYYLTIMKDTLQVKYEELPHLAKDIRSRYATIXKEIADKLTETADAAETAASAAHTMDEQTHPLSSEHARL

SEQ ID NO: 217287 - protein, 62 aa, Zea mays
  unsure (1)..(62): unsure at all Xaa locations
  Clone ID: MRT4577_129767C.1.pep
FLSADVIVGXDCRVWAHSQSFPXLKPDXDAGIITDFDEPGTLAPTGLFVGGTNHIVIQGQPG

SEQ ID NO: 217288 - protein, 37 aa, Zea mays
  Clone ID: MRT4577_129768C.1.pep
SYHTNLWASDLDTIHALCHANQARHSQMYTSTRGQVL

SEQ ID NO: 217289 - protein, 113 aa, Zea mays
  Clone ID: MRT4577_129769C.1.pep
DSRYQLALRMTRILTHSRRRRCGRSTLQCRPRIPGEDSANHRQAIRLPRQLPCSADHMHHLHDLVISPDPPAIERLGDGEREAWSQWLYSLSLLLVVVLQRNHPCKVALAPKP

SEQ ID NO: 217290 - protein, 107 aa, Zea mays
  Clone ID: MRT4577_12976C.1.pep
VMLETHTQLWERSSDVISSPFMIDVHLIQIQRIGHRGSMSMPEGGRSSSPDQRDLGDAVRSQRSLSTLEVDAVEGVAPSYAWSLRRSSHALLHAPVPKDDGASPSQP

SEQ ID NO: 217291 - protein, 146 aa, Zea mays
  unsure (1)..(146): unsure at all Xaa locations
  Clone ID: MRT4577_129770C.1.pep
MSVLLTAGSSPRKPDEDSGGATLNTLDSDSLGDVIVLMTPDSSDNQRQFGETIDVPIXLDNYDLQKDKCFDASGELALMPHANMHVRMLDDDHYVVYAERMDIYNMDVRVLKNMXMPEADVLXLPHKYHAFLGSQAIIXQIPLLLE

SEQ ID NO: 217292 - protein, 108 aa, Zea mays
  unsure (1)..(108): unsure at all Xaa locations
  Clone ID: MRT4577_129771C.1.pep
DIHTRAQGTNNQNRAGTPKAPDPXGPERKPGKKKPTEPDPGPPPGRRGPQDRPAPRGPGXPRGTRTPPGXPGGPSPGRGPPPRRRAGGPAGQQGXPPKPGPGDKGATP

SEQ ID NO: 217293 - protein, 88 aa, Zea mays
  Clone ID: MRT4577_129772C.1.pep
MSALLDLLMGIFRQQTLGGAALELTALTAPLSLAALVGLLIGWAWRPRWAGVVTVDNAQQMAQLPAAAPPPDRATATAVVSRNEAAAV

SEQ ID NO: 217294 - protein, 55 aa, Zea mays
  Clone ID: MRT4577_129773C.1.pep
QRGVQPKCLRRYNLRFVTSSVQDKAEASPDQKQERSTKKDESGDQESEAVGNAVP

SEQ ID NO: 217295 - protein, 158 aa, Zea mays
  unsure (1)..(158): unsure at all Xaa locations
  Clone ID: MRT4577_129774C.1.pep
GFLGPSFVIPRFLPPVTSMAMEHSAVQTYSLQPASVTSVLQHPLAHVHQQSLVHLTXIHTIASHQQLQFLPALIRLVMVNPVAYLLHDMLASSPLDLAGVVATHHQLLIQQFLSALSHLTMVTPAAYLQQQQVLSYRPLSVVDAPTYVHXQNMLQQSV

SEQ ID NO: 217296 - protein, 76 aa, Zea mays
  Clone ID: MRT4577_129775C.1.pep
VAAKNHRHAEGHAPVRPSSRLSLSPSLPRRVELFPSPSSPYLRPDSPAQSPPLLFFISPLKQKWSGVLQSTTSTSK

SEQ ID NO: 217297 - protein, 92 aa, Zea mays
  Clone ID: MRT4577_129776C.1.pep
KLFPPTRRILQPAASTRHSYHINLNLVSSCFSHRTSVNAILHHDRTQAHQGHRNAFQYNLQRLWRPRRVFIGRDEFSQPVVRCGAKESGGKH

SEQ ID NO: 217298 - protein, 104 aa, Zea mays
  Clone ID: MRT4577_129777C.1.pep
MALACATHARRFLLAGPARSFHAQPYQAKVGVVEFLNGVGKGVEAHAAKLEEAVGGDMQRLLEARTLRLKKLGIPCKHRKLILSFAHKYRLGLWKPQAEPRKVE

SEQ ID NO: 217299 - protein, 64 aa, Zea mays
  Clone ID: MRT4577_129778C.1.pep
VIDYHRGLHLLRFVIPREVGNFLEKIAQWMQISMARDREQRFVAPKLQKEIFKMSQTSLSPTVD

SEQ ID NO: 217300 - protein, 75 aa, Zea mays
  Clone ID: MRT4577_129779C.1.pep
ENWSLIWASLWGFGRWFFFNLCKRVVVFWVKKRWAVKKKVIRSIIGVGHCKKLQFGNIVSCELKMHGSGGVLAPA

SEQ ID NO: 217301 - protein, 64 aa, Zea mays
  Clone ID: MRT4577_12977C.1.pep
MQCRASWRGSIPLTISKVLLSISSLLTDPNPDDPLVPEIAHMYKNQRPRYEETARAWTQKYAMG

SEQ ID NO: 217302 - protein, 83 aa, Zea mays
  Clone ID: MRT4577_129780C.1.pep
RKKKETNMNPLQNLGEELGYGGHFGQQTQPAVCYLDMELNGHQTVHLHDSYMNHPNIPQHLVVSQLQQQQQNLRPFPSTSASS

SEQ ID NO: 217303 - protein, 82 aa, Zea mays
  Clone ID: MRT4577_129781C.1.pep
TAPKYMNTRKSKGCYIDYMKAQKLTKLTQRLLTHKNWTYPEQLKHVPYVEISPEKGGRTNNQSCSLCYILEMVSQELRVKRK

SEQ ID NO: 217304 - protein, 634 aa, Zea mays
  unsure (1)..(634): unsure at all Xaa locations
  Clone ID: MRT4577_129782C.1.pep
MGKEQYHNNFGCYGFIARPNASHPVPTFRKRWPRAWMEEWFYVKNDXKQGKILRKSLCAPFGPASASEGRRDLIQKHIAFRVWPLVESXEMPKETXNSSEGDLVRLKYTFRFGEKFDEPNDDWLKCIEATSDELLGAYSKAEDNALSVAFGGWGKKRLNRVFYVIGFVYPDYRYPLWGQGKKRKAATSATPDEPVPKGKKLKVLTHRPRYIELVVLPKFDEGTSSAAKTKETAPPAKRTEEPAIMPKLPSVKVVETKVDKAEKPEIEEIMKMPEVLSSLEKEENGKCIGCARNNRNLEFHSYRESCRSFQGTNEADAKQAEVEAAVIEAETDAGPSVPAETKLAATEQKTEGKSPDTGIVFEKNNKELSICREMARSMGFPKLEAGLCAMTKDNLADSLAYNSLKGLILSNALRAQKNAEDESCTMAFNNLRSEVIRLRNEATENDKILLSLVDKVEEDEASFKTQSEAQKIEIEDLQKQLAEAKEKCTLAEAKRGISEYWTNYLEKNVEELRTSKERCFEKSLDCVKKIKTSFANVGAYSSEENFIRGDPEGVIEWISWEAKAFEEILSDRGDVCAFSGARGISAILEKAECDLIKTMALGEAVFSVDDTKDPSAEASLIGRKFYSDIWANGG

SEQ ID NO: 217305 - protein, 510 aa, Zea mays
  Clone ID: MRT4577_129783C.1.pep
IAKDLHGMKWRFRHIYRGQPRRHLLTTGWSSFINKKKLVSGDAVLFLRGNDGELRLGVRRAVQLKNEALLEAVNCTDSKLLMLSAVANSLDNRSIFHICFNPRVGASEFIVPYCKFLKSLNYPFSVGTRFKVGCENEDAKEAHASVIIGISEVDPIHWPGSKWKSLLIKWDGATKYSHQNRVSPWDIEGVGSSVLVTHRLSSSVSKRTKLCFPPSDLDTPILDGNGRPDSVETERFHRVLQGQELVHPSIHGAACSHSSDSPRCQGSYGRRFSADVWNCKMNDVMSGPRHLNATGFAYQPLGFSESVKFSEVLQGQEMSQAVPSFMRSAFNSGTQNGRVRPFDYVQRSDATQGYALQQFNLPATEVHSPSSVLMFNQTMVPHAELDGATNREEVHGSRYLSSNAIGREAEPWPSMQQQRASVNGSEPLDTTEASAPARNAESGSVGRGAGRSNCKLFGFSLTEKILGTDGGGVKEGNYEVDRQTPRVLDLFGHGSTPGALHALCAAPLGI

SEQ ID NO: 217306 - protein, 38 aa, Zea mays
  unsure (1)..(38): unsure at all Xaa locations
  Clone ID: MRT4577_129784C.1.pep
YYTTTDGXGTGGFLIGASPYHATPMLSHGCLRWLLTDS

SEQ ID NO: 217307 - protein, 36 aa, Zea mays
  unsure (1)..(36): unsure at all Xaa locations
  Clone ID: MRT4577_129785C.1.pep
RVQTVLACISSIGLXLLKMCSVSQSQSDDFWKIIYT

SEQ ID NO: 217308 - protein, 59 aa, Zea mays
  Clone ID: MRT4577_129786C.1.pep
LMLTRRGNGFCCSMQSNQFPSVAASMAIHKSAMVSRRPSFLSNLYRSPICVSEEIKKTS

SEQ ID NO: 217309 - protein, 78 aa, Zea mays
  Clone ID: MRT4577_129787C.1.pep
MDDPSSASNKHKRKRGRKPKASPPSLDRSSPSPSVAPTPTGHHGRKPRRHEALADMDATRTPCPPCRGEPKAGGNRGD

SEQ ID NO: 217310 - protein, 58 aa, Zea mays
  Clone ID: MRT4577_129788C.1.pep
LAAAPESRQHASRGARRRSYGSVVSPRGGSGRRPDPRVLLRPMPRQAVRCEGTLGPQL

SEQ ID NO: 217311 - protein, 58 aa, Zea mays
  unsure (1)..(58): unsure at all Xaa locations
  Clone ID: MRT4577_129789C.1.pep
IRPILFSRLGPNSIFSSLFXMIPCQPFHRDVFFPHHCPVALTVQIQICPVSSMRWSAS

SEQ ID NO: 217312 - protein, 130 aa, Zea mays
  Clone ID: MRT4577_12978C.1.pep
MASKRIQKELMDLQKDPPTSCSAGPAGEDLFHWQATIMGPSDSPYAGGVFFINIHFPPDYPFKPPKVNFQTKEQWSPALTISKVLLSISSLLTDPNPDDPLVPEIAHMYKNQRQRYEETARAWTQKYAMG

SEQ ID NO: 217313 - protein, 142 aa, Zea mays
  Clone ID: MRT4577_129790C.1.pep
LCFFFFFFFFFGVFFFFFFFFWGGPLTSFGFKIDPPPLVIKKNPDRGNFRGGHFTPFTPTTPGTPFFFTTPRGARKVWGNVFHPGGNLATQGMGANLFDRAEANFPTGFQWVFRGQARGNPPLIWPNWLALKRPLLLGLGGF

SEQ ID NO: 217314 - protein, 58 aa, Zea mays
  unsure (1)..(58): unsure at all Xaa locations
  Clone ID: MRT4577_129791C.1.pep
IQEFNIHKLMFNWKKWNLKRFILRKKVDLDCRVAAAVKDLXCFXGPDRLFYCPISRKN

SEQ ID NO: 217315 - protein, 122 aa, Zea mays
  unsure (1)..(122): unsure at all Xaa locations
  Clone ID: MRT4577_129792C.1.pep
MGSLTNRMMCMGDVLAALVAGGSCGPPKAPTGPDITTNYSGKWLTAGATCLGQPSGAGAPDNCRACGIKNVNXLPPYSGMTACGNDPIVKDGKGCRSCYEGRCKEIPECSSNPVTVYITDMN

SEQ ID NO: 217316 - protein, 41 aa, Zea mays
  Clone ID: MRT4577_129793C.1.pep
KFLTKQKLYSTISKISQVEVDPLTTWAFIFPPCGIKHQNGS

SEQ ID NO: 217317 - protein, 175 aa, Zea mays
  unsure (1)..(175): unsure at all Xaa locations
  Clone ID: MRT4577_129794C.1.pep
PTPCCLPVIPPRASAHPDPSRIISPAMFQNMPSHXSYISCHGDFYNYDIFFDAALEIPGFNANAXTNIRTLVSSPPFFDQTCXHHATEAWLTAPKGPFACXLTFRGNKTRHDSPYYXQVPIQLYLEYNYPLCGKXLNLNLMAYPILXRSTPNITFLTDIWIWITPQTPKPKVTQR

SEQ ID NO: 217318 - protein, 393 aa, Zea mays
  Clone ID: MRT4577_129795C.1.pep
MMRRCVSALARRRRPDRTVDTMKARFQCLVNISSSIRDTDSQRCSSTCANSCATDPDVLSRETSSSEMLVDSFGRFHNYLRISLTERCNLRCQYCMPAEGVELTPKSELLSHDEIIRIADLFVTSGVNKIRLIGGEPTVRKDIEDICLHLSSLKGLKTLAMTTNGIVLSKKLPKLKECGLNALNISLDTLVPAKFEFMTRRKGHSKVLESIDAAVELGYSPVKVNCVIMRGINDDEICNFVELTRHKPINVRFIEFMPFDGNVWNVKKLVPYAEMLDKVRQSYKGVERLQDHPTDTAKNFRIDGHVGTISFITSMTEHFCAGCNRLRLLADGNLKVCLFGPSEVSLREPIRTGVDDAGLKEIIGAAVKRKKAKHAGMFDIAKTANRPMIHIGG

SEQ ID NO: 217319 - protein, 67 aa, Zea mays
  unsure (1)..(67): unsure at all Xaa locations
  Clone ID: MRT4577_129796C.1.pep
XAWVRTGLLCHLMGLEGRTFFSCAAIDRIVACNGAFSRGGCVVIDSRVLGKMEGVESYKRKTWWDIL

SEQ ID NO: 217320 - protein, 199 aa, Zea mays
  unsure (1)..(199): unsure at all Xaa locations
  Clone ID: MRT4577_129797C.1.pep
MMRRCVSALARRRRPDRTVDTMKARFQCLVNISSSIRDTDSQRCSSTCANSCATDPDVLSRETSSSEMLVDSFGRFHNYLRISLTERCNLRCQYCMPAEGVELTPKSELLSHDEIIRIADLFVTSGVNKIRLTGGEPTVRKDIEDICLHLSSLKGLKTLAMTTNGIVLSKNXPKVKXCGLNAXNISLDTLVPAKXFEFM

SEQ ID NO: 217321 - protein, 60 aa, Zea mays
  Clone ID: MRT4577_129798C.1.pep
DIFDSFLVRSSIERVQKGILAVTGVASKVLTKLPVESHECLHRTNATISPLSSVANGKSF

SEQ ID NO: 217322 - protein, 393 aa, Zea mays
  Clone ID: MRT4577_129799C.1.pep
MMRRCVSALARRRRPDRTVDTMKARFQCLVNISSSIRDTDSQRCSSTCATSCATDPDVLSRETSSSEMLVDSFGRFHNYLRISLTERCNLRCQYCMPAEGVELTPKSELLSHDEIIRIADLFVTSGVNKIRLIGGEPTVRKDIEDICLHLSSLKGLKTLAMTTNGIVLSKKLPKLKECGLNALNISLDTLVPAKFEFMTRRKGHSKVLESIDAAVELGYSPVKVNCVIMRGINDDEICNFVELTRHKPINVRFIEFMPFDGNVWNVKKLVPYAEMLDKVRQSYKGVERLQDHPTDTAKNFRIDGHVGTISFITSMTEHFCAGCNRLRLLADGNLKVCLFGPSEVSLREPIRTGVDDAGLKEIIGAAVKRKKAKHAGMFDIAKTANRPMIHIGG

SEQ ID NO: 217323 - protein, 149 aa, Zea mays
  unsure (1)..(149): unsure at all Xaa locations
  Clone ID: MRT4577_12979C.1.pep
MASKRIQKELMDLQKDPPTSCSAGPAGEDLFHWQATIMGPSDSPYAGGVFFINIHFPPDYPFKPPKVNFQTKVYHPNINSNGSICLDILKEQWSPALTISKVLLSISSLLTDPNPDXDPLVPEIAHMYINQRQRYEETARAWTQKYAMG

SEQ ID NO: 217324 - protein, 111 aa, Zea mays
  unsure (1)..(111): unsure at all Xaa locations
  Clone ID: MRT4577_1297C.1.pep
MQHAIACAEGDKXYGAKSSINVWEPKIQQANKFGLSXLWIFGGSFKVDVNSIEAGXEIXNNAYQATGCXXMLCSGFIQINTKMAIATSILNISNYAGSQCDISILIYKVNI

SEQ ID NO: 217325 - protein, 57 aa, Zea mays
  Clone ID: MRT4577_129800C.1.pep
PSYSSRSPSAIGQADGPKPTPCLLRSPGACVPPCALSWRTREEHYWEVPGSMTMAAK

SEQ ID NO: 217326 - protein, 47 aa, Zea mays
  Clone ID: MRT4577_129801C.1.pep
MPLPAFLAAAARLAVLLAAAVTAANAGSFARYRRAGLRQILNPIDDT

SEQ ID NO: 217327 - protein, 147 aa, Zea mays
  unsure (1)..(147): unsure at all Xaa locations
  Clone ID: MRT4577_129802C.1.pep
GIPMGVVLVKEKIAAAIMSGVHGSTFAVGPIACQSAITVFVKITRPGFLNXVSRKGESFKHLLRAKMIGNPQVREVLGVGLLVGVYLDVTDGPLVDACMDTGVFALTAGKGNVVRLVPPLLVSEKKLEHAPHVIRACHGALDLHHGP

SEQ ID NO: 217328 - protein, 105 aa, Zea mays
  unsure (1)..(105): unsure at all Xaa locations
  Clone ID: MRT4577_129803C.1.pep
NWVKKRXGGPYSKKVSSFGGPKRVNPFGKKINPNWALTRPSGWAXEFLGDLTCIFLRLLLLQNGEKKKDNLILKNMGAPKDGEKKKKARVSGKPKKKLLKIIFSP

SEQ ID NO: 217329 - protein, 52 aa, Zea mays
  Clone ID: MRT4577_129804C.1.pep
IRESLRKGPVNKGNPQEGQKELHLRAALGKRIQVGQAKKPGVFLRRGVPSKL

SEQ ID NO: 217330 - protein, 31 aa, Zea mays
  Clone ID: MRT4577_129805C.1.pep
GDNGDPVMVTGRRNTWRRRVIENREKHKGSF

SEQ ID NO: 217331 - protein, 54 aa, Zea mays
  Clone ID: MRT4577_129806C.1.pep
SQSKPRATNTLISDFASSVFFLGNSGGSTWGAKGAVAPPQFLVSLICKYRKKMF

SEQ ID NO: 217332 - protein, 92 aa, Zea mays
  Clone ID: MRT4577_129807C.1.pep
ACVQRTASLSAMQSSPVPLALRKQWDGRARRVIESKIYAAGLSLSTSTAHNVQPRRWLVGKRKMSSIRHPSVGERRVRYSDTSAATPFMSLC

SEQ ID NO: 217333 - protein, 85 aa, Zea mays
  unsure (1)..(85): unsure at all Xaa locations
  Clone ID: MRT4577_129808C.1.pep
MSRSGQPPDLKKXRPHLYMDKKLQIKMNANRVVIGTLRGFDQFMNLVVDNIVEVNGNDKTDIGMVVIRGNSVVMIEALEPVARSQ

SEQ ID NO: 217334 - protein, 67 aa, Zea mays
  Clone ID: MRT4577_129809C.1.pep
RHRQPPRANAICATSLVFCRRRSARMSHTILPDMHRRSGTREPASFDVAVLPERQYGSDAPERHTTG

SEQ ID NO: 217335 - protein, 58 aa, Zea mays
  Clone ID: MRT4577_12980C.1.pep
YPCRVSVWFVQTKVNTLRSDLGHKGLCPSDRAVSFFPYPRFSLLFGLAPLRLLTCLNT

SEQ ID NO: 217336 - protein, 67 aa, Zea mays
  Clone ID: MRT4577_129810C.1.pep
TIQQKSLPIHTIGNSLSPQKTGCQKGYKHQTTGDPNTPHRPRQGVRNPGPPPNGKGGGGRAWANLTP

SEQ ID NO: 217337 - protein, 106 aa, Zea mays
  unsure (1)..(106): unsure at all Xaa locations
  Clone ID: MRT4577_129811C.1.pep
GTEPESSGRPTRPIKTRADNQNLLIKRKPRRTPPKEKKXKEGDPKQTERKQPPGKKKETTKKSKKKRHGKEKTKGSAKKVNRQRNQKTGNHQKKHQKKKKARTKKR

SEQ ID NO: 217338 - protein, 102 aa, Zea mays
  Clone ID: MRT4577_129812C.1.pep
GVSWLTLFAVHSLPDLPARKPCCASRGAAWGGPPPTVRWGDLTPFLSVDNSPPRPRYYRLPPPAGGGSLAGGPFSPFSVNYPGGIVRAGAGGGPAIFRGPRR

SEQ ID NO: 217339 - protein, 179 aa, Zea mays
  Clone ID: MRT4577_129813C.1.pep
EVRLPRSAPPLLLVLLCETCSSFLRAPAASSSSTSSHGAPARRDFPSPEFSLPWRTLPARPLLLWRHGILACVKLPARRRSSLRPAKPLHRAQPLSFLLRTALLCSSPPSSSPELLPCFHGRCALAPARLPFLRVPSRGLQLTGRGPLSVPCSLRAWSCHLHGTRPRSVFLSHGEFLAA

SEQ ID NO: 217340 - protein, 382 aa, Zea mays
  Clone ID: MRT4577_129814C.1.pep
MDPAPEPIAGGGGLQRRPAAAARSGVGAQEPPPRGQLAIHADVEPPPRPWPGMQKLAIVAIVHEGCLQFLPATHFRDPNDPQRNWIPFDGSRNPTGSLNDVGSVDVFSWISCLDLRTLAVLTNSTLSSSSDPHNISFHYLIPEGGNDKLSYLKLKVLLPDSDLTVTSQKQIKDKLNVATPEGNFLWLFHTELSPFLIAKSQLSKKRFVYIAADSIIKGKVEDLGRMELGGYAIGAVEDCSKRLSDYISMDVLSAIQRAGAAFSWVPKEPYNEDACLLDFDVLLMEPRKLEKTLITSIMWWADAIRLANQRDLIRLAVTLSFNGKYTRLPSNWKRADDDNADILNFDGPKNVCSEDGRQHEQPGYGATWQQYLHQKSEAILST

SEQ ID NO: 217341 - protein, 55 aa, Zea mays
  Clone ID: MRT4577_129815C.1.pep
PFPIFPASFYAPLYRDPWYAIRVRPGVSGSTPGADLGVSKKYLKKNPKKKKYFKN

SEQ ID NO: 217342 - protein, 60 aa, Zea mays
  Clone ID: MRT4577_129816C.1.pep
FKSSGDGMIVGGLANISNTQKSIRGICYISCSFWVTKQSPQKHWCLLVSEHYLMFISVLC

SEQ ID NO: 217343 - protein, 609 aa, Zea mays
  Clone ID: MRT4577_129817C.1.pep
MDQLALLATELGDSSDFEVEGIQNLTENDVSDEEIEPEDLARRMWKDRVRLRRIKERQHKLALQQAELQKLRPKPISDQAMRKKMSRAHDGILKYMLKLMQVCNARGFVYGIIPDKGKPVSGASDNIRAWWKEKVKFDKNGPAAIEKYESDNLVSATAQSGGTKSQHSLMDLQDATLGSLLSSLMQHCDPPQRKYPLEKGASPPWWPSGKEEWWTALGLPSGQVPPYKKPHDLKKVWKAGVLTGVIKHMSPNFDKIRNHVRKSKCLQDKMTAKESLIWLGVLQREESLVHRIDNGVSEITQRSMPEDRIADTNSSSNEYDVYGFEDAPVSTSSKDDEQDLSPVAQSAVEHVPKRGRERAYNKRPNQIIPGKAKEPPKRKRTRHSSTVTEPDAHRVVDAPENSRNLIPDMNRLDQVEIPGTSNQIVTFDHGGTTTEALQHRGDAQVQVHPPGAEVNSFYSAPTANPTPISIYMGDQPIPYQNNDSTRPRSENSFPVDAHTGLNNLPSSYQNLPPKQSLPLPMMDHHVVPMGIRAPTDSIPYGDHILGGGNSTSVPGDMQQLIDFPFYAEQDKFVGSSFEGLPLDYISISSPIPDIDDLLHDDDLMEYLGT

SEQ ID NO: 217344 - protein, 506 aa, Zea mays
  Clone ID: MRT4577_129818C.1.pep
YCRASVQHPSRNSERMPGSIHISATQPPVITPLFLQVTVGNREYSGNIEQDALSFPVTSLRESMVIMLYSADGALISKSELKTKEIVESGTMDTVFALDSGGEIVLQIQFLLNDDDRKRIQEMRNSAMKMKQQGLLGDGNELNFSDSALSKRLTEKISNIRSKAAERSELQKSMSLDDLQERAVFPGIDADPRVKASRDSLLQGGVRLEDPGGSKQRLSQAEVEALASPVEGERRRLGLDVASSGGRGVVGEAEQEVSDGAGAVDAISTWPPDRPGPGSKKGDSIPESSKSSSAVKTMISSFEGTTTPQGIVSETDSGSRSTQAGKTAIIPVDDHHKASNHRSQHILVETIAPAQLQTIRTPKAAESRSRRRASKQHNELHPRTRVRSQAKQMQMQMQPRDYVERPLNYLVATSSTWIHPHICVTGATKQLKDLLELEHLNFQRTATKGQQGTRERKSDESIAAAAARARSGGFLMINGWLIVQGVRAAVVLTVCCGAMFFSSSSR

SEQ ID NO: 217345 - protein, 80 aa, Zea mays
  unsure (1)..(80): unsure at all Xaa locations
  Clone ID: MRT4577_129819C.1.pep
RALGPHTHQPSPSIXRQQRGAHRLGVQCLTDPDCRRAVTALVPTITGMGDLVSGRVRRAICCQVQSGTRLTDLPYFSVYV

SEQ ID NO: 217346 - protein, 67 aa, Zea mays
  Clone ID: MRT4577_12981C.1.pep
VRQGPQFSIRCLVFVHFYHYSLFRLVMFMFFAWVFDRVLLLCAFCICDKMRAVNKARPFCFNRSMLL

SEQ ID NO: 217347 - protein, 122 aa, Zea mays
  unsure (1)..(122): unsure at all Xaa locations
  Clone ID: MRT4577_129820C.1.pep
DPREXERGKEXXXXLKKXGDNXRKRAXXPRGGXEXDNTXERXTNRDRXKGPTXXEAXDQXTEPKRPSDKPLRLPLQDVYKIGGIGTVPVGRVETGVIKPGMVVTFGPTGLTTXVKSVEMHHE

SEQ ID NO: 217348 - protein, 54 aa, Zea mays
  Clone ID: MRT4577_129821C.1.pep
RAPGVGRTSVGVLQAVKGLIQLMRQRSRCGRAIQSIPPRWARRVCLQGRRPHAS

SEQ ID NO: 217349 - protein, 62 aa, Zea mays
  Clone ID: MRT4577_129822C.1.pep
STKAQWSGSRPHAPTPRILVRANYPEHKHIHRGGNLASRCHADPWTAGKPSKRKAYPRSCKT

SEQ ID NO: 217350 - protein, 48 aa, Zea mays
  Clone ID: MRT4577_129824C.1.pep
VPGSTMRDSFLVNGVAFKKTFSYAGFEQQPKKCGWLQFALCLYEHKPL

SEQ ID NO: 217351 - protein, 22 aa, Zea mays
  Clone ID: MRT4577_129825C.1.pep
SAPHRPATRRPTHMLMLTCVYA

SEQ ID NO: 217352 - protein, 82 aa, Zea mays
  Clone ID: MRT4577_129826C.1.pep
IRLDILLGTRGITLNTKTMGYLWTCCRHAVLTHVIQKGMTNPSLYQKPQIFFRWLPSSGLVWVFNLNGHWLFFDLAGSSITW

SEQ ID NO: 217353 - protein, 143 aa, Zea mays
  Clone ID: MRT4577_129827C.1.pep
MAGTRGYANDRPKDMGARHRNKQGKQRRERAPQGRSWGLAHGWKRLRPWGKQGDGEEAIGELAEDPPPGAQLPWSGEPWPGAQEARRARTEPEGREGDALEKMGGPRAREEKATALSGEVATRHGVLWRGARPGVNTGRPWVL

SEQ ID NO: 217354 - protein, 77 aa, Zea mays
  unsure (1)..(77): unsure at all Xaa locations
  Clone ID: MRT4577_129828C.1.pep
SLTLSLVPSSSFSRVRRALSVSGGGDWAASAAALRQDPRLHLPYARMRASPQLXWSGDEXGRRGAADSHLMCRCRYG

SEQ ID NO: 217355 - protein, 1438 aa, Zea mays
  Clone ID: MRT4577_129829C.1.pep
MDGDRRVMYDGWRKDGAHSNEWMGVTKAFLEHAFKDATGRLVKCPCNRCENKWPQKKEEMEKHLCKSGFMSNYLVWYRHGESIRHVDADVELDDDHDRMDDMLHDLGREVEMNAEEPGQLPRDAQEFFRLLAAGEERLHEHTQMSVLGTLTRLMAIKSKHNISNSAYNDIVQLMGEVLPENHKLPKNMYFAKKMLAGLGMTYEKIDVCPNSCMLFFEEDDKLDRCKHCEASRYVEVTNDEGELVVTKVAAKQLRRLPIIPRLSRLFLNKEIALHMTWPKNGVRLVTDPDLMVHPSDGDAWKALDEFDPEFANDPRSVRLGLSTDGFTPFNTSASPYSCWPVFIVPYNLPPELVNKEEFMFLALVIPGPEHPGPKLNMFVRPLIEELKQLWRGVKAYDSHTEKEFTMRAAYLWSVHDLLVYGDWSGWCVHGRLCCPICMNDTDAFRLKHGGKVSFFDAHRRWTPFKHDFRNSLTAFRSGAKIRNGPPKRQTAPQIMAWHACLKQGENDRFQGYGEDHNWTHISSIWDLPYAKALIMPHNIDLMHQERNVAESIISTCFDVTDKTKDNMKARKDMAEICKRPMLELKVSDKGHESRPRADYCLKPDERKEIFKWLKNLKFPDRYAANLKRAVNLKTGKLIGLKSHDYHIIMERLMPVMFRGYFKDELWSIFAELSYFYREVCAKTISKRLMQKFEKEIPILICKFEKVFPPGFFNVMQHLIVHLPWEALVGGPVQFRWMYPIERALKKLRASVRNKARVEGCIAEAFALKEISQFSTRYFARANNVFAPSVRLHVENESPQSTLQIFANPGKAVGKGSVRHIEGSDLNTLMLYMYSNIDSTQEAFDMFDEECWKSTSKPTAIQLENLRRDGLKGGPNFVQWFRNYVSKNSVHPDLQQMAHTSVSVRNYTRYDVNGYRFRTAKLEKSRPLAATTNSGVLASSYVDDDKVVDYYGVLQNIIELIFDGPKELKVVFFECDWFDAHSGTRVDKYGNVEVKHSSRIPSSMSDVVLANQAKQVYYLPYPHPSLRAWWVAIKVNPQVVAPESADYKIKGQKMSKALGANEIYLTEEQYLESVVDWLAKDMEAWRWLAKRWASPDWIAESNKHRVNRGTEGPGHRYGADGHLGTARRMEAESGVAPSFMEVYVRGHRGPDPANPDELCSEAAREKMNAYGEEMTQRHGPDFDWMHSDLDASALYHSGGGRKHGRFAFGTGVVEYNRTLGQGKTSSSAGSSRSSKSAREAQLEEETRAAQEQARAAQEQARAAQEQVGQLTQYMTSYFQEMTTRLGPDMNLPAFRPPQAQGWGQWPGQAPASQPQWTGVGWTQAPSGTWTPPPPQGSQPVPGWVPPVFQPPAGSQPFQAWMAPPPTGWVPPPQGWPAQQYPWMHAQPPPHHGSQGSASHAQGSEGAVNVQDFLVHGSGGSGHLPGGGGGSGQNSHSPPE

SEQ ID NO: 217356 - protein, 77 aa, Zea mays
  Clone ID: MRT4577_12982C.1.pep
GGYARGGRAKCAPCTAMPGILFVAVNMAERGAGGMASVPHFALPRFTIFVVANRKNPPSLVSCLSALKNAGGGCLVV

SEQ ID NO: 217357 - protein, 61 aa, Zea mays
  Clone ID: MRT4577_129830C.1.pep
QGNRSLHRQPIAQLGPPRSLAGGAFLLAHRARTSQGLPPRGRPYLPLVPQPSSPNSPPTIS

SEQ ID NO: 217358 - protein, 1339 aa, Zea mays
  unsure (1)..(1339): unsure at all Xaa locations
  Clone ID: MRT4577_129831C.1.pep
MGIDSHLSTCVGTQSPKYLEMAHRHISLSLSRLFLNKEIALHMTWQKNGVRLVTDPDLMVHPSDEEFMFLALVIPGPEHLGPKLNMFVRPLIKELKQLWRGVKAYDSHTEKEFTMRAAYLWSVHDLLAYGDWSGWNSLTAFRGGAKIRNGPPKRQTALQIMAWHACLKQGENDRFQGYGEDHNWTHISSIWELPYAKALIMPHNIDLMHQERNVAESIISTCFDVTDKTKDNMKARKDMAEICKRPMLELKVSDKGHESRPRADYCLKPDERKEIFKWLKNLKFPDRYAANLKRAVNLKTGKLIGLKSHDYHIIMERLMPVMFRGYFKDELWSIFAELSYFYREVCAKTISKRLMQKFEKEIPILICKFEKVFPPGFFNVMQHLIVHLPWEALVGGPVQFRWMYPIERVLKKLRASVRNKARVEGCIAEAFALKEISQFSTSMFDEECWKSTSKPTAIQLENLRRDGLKGGPNFVQWFRNYVSKNSVHPDLQQMAHTSVSVRNYTRYDVNGYRFRTAKLEKSRPLAATTNSGVLASSYVDDDKVVDYYGVLQNIIELIFDGPKELKVVFFECDWFDAHSGTRVDKYGNVEVKHSSRIPSSMSDVVLANQAKQVYYLPYPHPSLRAWWVAIKVNPQVVAPESADYVSTSRDNDDAIFQPEAASTQDIAHRFHVTNGEGLENLYCNSSYLIEEPRSKRKRPVVVRRSLNMFKHRRSRRSGGSAASEDSSGSGLFQGTSQSRQRQQQLLNCLDEVQGEEGEQETPQQDAHVQGEEGEQDEEVDPMGAGSAGDASDGSTSFRYKKSNALGPRPAERRLIRPHGEWSWEDLTWDGTGRRPKVNAVLGSLCRFYYPGMVELNGERFAAMQWADWGLKDYVQPGESGESSSGGGSSEKKRRTCQVAVWDEFWGRFQLPDDIEDDQAQWARVKRHFRKCADKVIKDAMYNARIAAVNYYYKKIKGQKMSKALGANEIYLTEEQYLESVVDWLAKDMEAWRWLAKRWASPEWIAESNKHRVNRGTEGPGHRYGADGHLGTARRMEAESGVAPSFMEVYVRGHRGPDPANPDELCSEAAREKMNAYGEEMTQRHGPDFDWMHSDLDASALYHSGGGRKHGRFAFGTGVVEYNRTLGQGKASSSAGSSRSSKSAREAQLEEETRAAQEQARVAQEQVGQLTQYMASYFQEMTTRLGPDMNLPAFRPPQAQGWGQWPGQAPASQPQWTGVGWTQAPPGTWTPPPPQGSQPVPGWVPPVFQPPAGSQPFQAWMAPPPTGWVPPPQGWPAQQYPWMHAQPPPHHGSQGSASHAQGSEGXCQRPRLPRPWFWXGVATFLVAEEGVAKTHIARRS

SEQ ID NO: 217359 - protein, 84 aa, Zea mays
  Clone ID: MRT4577_129832C.1.pep
RYLPRRVDRIGLRQHSYHKSLSVLRQQGEERDLHQGRPAARELLDHEQSYRRLREDQPAHPMGDRLNVWRREGQRRPMRGTGDR

SEQ ID NO: 217360 - protein, 1606 aa, Zea mays
  Clone ID: MRT4577_129833C.1.pep
MDGDRRVMYDGWRKDGAHSNEWMGVTKAFLEHAFKDATGRLVKCPCNRCENKWPQKKEEMEKHLCKSGFMPNYLVWYQHGESIRHVDAEVELDDDHDRMDDMLHDLGREVEMNAEELGQLPRDAQEFFWLLAAGEERLHEHTQMSVLGTLTRLMAIKSKHNISNSAYNDIVQLMGEVLPENHKLPKNMYFAKKMLAGLGMTYEKIDVCPNSCMLFFEEDDKLDRCKHCEASRYVEVTNDEGELVVTKVAAKQLRRLPIIPRLSRLFLNKEIALHMTWPKNGVRLVTDPDIMVHPSDGDAWKAFDEFDPEFANDPRSVRLGLSTDGFTPFNTSASPYSCWPVFIVPYNLPPELVNKEEFMFLALVIPGPEHPGPKLNMFVRPLIEELKQLWRGVKAYDSHTEKEFTMRAAYLWSVHDLLAYGDWSGWCVHGRLCCPICMNDTDAFRLKHGGKVSFFDAHRRWTPFKHDFRNSLTAFRGGAKIRNGPPKRQTAPQIMAWHACLKQGENDRFQGYGEDHNWTHISSIWELPYAKALIMPHNIDLMHQERNVAESIISTCFDVTDKTKDNMKARKDMAEICKRPMLELKVSDKGHESRPRADYCLKPDERKEIFKWLKNLKFPDRYAANLKRAVNLKTGKLIGLKSHDYHIIMERLMPVMFRGYFKDELWSIFVELSYFYREVCAKTVSKRLMQKFEKEIPILICKFEKVFPPGFFNVMQHLIVHLPWEALVGGPVQFRWMYPIERALKKLRASVRNKARVEGCIAEAFALKEISQFSTRYFARANNVFAPSVRLHVENESPQSTLQIFANPGKAVGKGSVRHIEASDLNTLMLYMYSNIDSTQEAFDMFDEECWKSTSKPTTIQLENLRRDGLKELIFDGPKELKVVFFECDWFDAHSGTRVDKYGNVEVKHSSRIPSSMSDVVLANQAKQVYYLPYPHPSLRAWWVAIKVNPQVVAPESADYLNMFKHRRSRRSGGSAASEDSSCSGLFQGTSQSRQRQQQLLDCLDEVQGEEGEQETPQQDAHVQGEEGEQDEEGEQDEEVDPMGAGSAGDASDGSTSFRYKKSNALGPRPAERRLIRPHGEWSWEDLTWDGTGRRPKVNAVLGSLCRFYYPGMVELNGERFAAMQWVDWGLKDYVEPGESGESSSGGGSSEKKRRTCQVAVWDEFWGRFQLPDDIEDDQAQWARVKRHFRKCADKVIKDAMYNARIAAVNYYYKKIKGQKMSKALGANEIYLTEEQYLESVVDWLAKDMEAWRWLAKRWASPEWIAESNKHRVNRGTEGPGHRYGAYGHLGTARRMEAESGVAPSFMEVYVRGHRGPDPANPDELCSEAAREKMGIFLTEMTQRHGPDFDWMHSDLDASALYHSGGGRKHGRFAFGTGVVEYNMTLGQGKASSSAGSSRSSKSAREAQLEEETRAAQEQARAAQEQARAAQEQVGQLTQYMASYFQEMTTRLGPDMNLPAFRPPQAQGWGQWPGQAPASQPQWTGVGWTQAPPGTWTPPPPQGSQPVPGWVPPVFQPPAGSQPFQAWMAPPPTGWVPPPQGWPAQQYPWMHAQPPPHHGSQGSASHAQGSEGAVNVQDFLVHGSGGSGHLPGGGGGSGQNSHSPPE

SEQ ID NO: 217361 - protein, 1540 aa, Zea mays
  Clone ID: MRT4577_129834C.1.pep
FEMDGDRRVMYDGWRKDGAHSNKWMGVTKAFLEHGFKDATGRLVKCPCNHCENKWPQKKEEMEKHLCKSGFMPNYLVWDVEMNTEEPGQLPRDAQEFFRLLAAGEERLHEHTQMSVLGTLTRLMAIKSKHNISNSAYNDIVQLMGEVLPENHKLPKNMYFAKMMLADLGMTYEKIDVCPNSCMLFFEEDDKLDRCKHCEASRYVEVTNDEGELVVTKVAAKQLRRLPIIPRLSRLFLNKEIALHMTWPKNGVRLVTDPDIMVHPSDGDAWKAFDEFDLEFANDPWSVRLGLSTDGFTPFNSTASPYSCWHVFIVPYNLPPELVNKEEFMFLALVIPGPEHPGPKLNVFVRPLIEELKQLWRGVKAYDSHTEKEFTMRAAYLWSVHDLLAYGDWSGWCVHGRLCCPICMNDTDAFRLKHGGKVSFFDAHRRWTPFKHDFRSSLTAFRSGAKIRNGPPKRQTAPQIMAWHACLKQGENDRFQGYGEDHNCHISSIWELPYAKALIMPHNIDLMHQERNVAESIISTCFDVTDKTKDNMKARKDMAEICKRPMLELKVSDKGHESRPRADYCLKPDERKEIFKWLKNMKFPDRYAAILKWAVNLKTGKLIGLKSHDYHIIMERLMPMMFRGYFKDELWSIFAELSYFYREVCAKTVSKRLMQKFEKEIPILISLVGGPVQFRWMYPIERALKKLRASVRNKARVEGCIAEAFALKEISQFSTKYFARANNVFAPSMRLHVENESPQSTLQIFANPGKAVGKGSVRHIEASDLNTLMLYMYSNIDSTHEAFDMFDEECWKSTSKPTTIQLENLRRDGLKGGPNFVQWFRNYVSKISVHPDLQQMAHTSVSVRNYTRYDVNGYRFRTAKLEKSRPLAATTNSGVLASSFVDDDKAKQVYYLPYPHPSLRAWWVAIKVNPQVIAPESADYVSTSRDNDDVVFQPDAASNQDIAHRFHVTNGEGLENLCCNSSDLIEEPRSKRKRPVVVRRSHRRSRRSGGSAASEDSSGSGLFQGTSQSRQRQQQLLDCLDEVHGEEGEQEAPQQDAHVQGEEGEQDEEGEQDEEVDPMGVGSARDASDGSTSFRYKKSNALGPRPAERRLIRTHGECLCRFYYPGMVELNGERFAAMQWADWGLKDYVQPGEPGESSSGGGSSEQKRRTCQVAVWDEVWGRFQLPDDIEDDQAQWARVKRHFRKCADKVIKDAMYNARIAVVNYYYKKIKGQKMSKALGANEIYLTEEQYLESVVDWLANDMEAWRWLAKRWASPEWIAESNKHRANRGTEGPGHRYGTDGHLGTAHCMEAESGVAPSFMEAYVRGHRGPDPAKLDELCSEAAREKMNAYGEEMTQRHGPDFDWMHSDLDASALYHSGGGRKHGRFAFGTGVVEYNRTIGNSSISSRVIEFKEMTTRLGPDMNLPAFRPPQAQGWGQWPGQAPASQPQWTGVGWTQAPPGTWTPPPPQGSQPFQAWMAPPPTGWVPPPQGWPAQQYPWMHAQPSHHHGSQGSASHAHGSEGAVNVQDFLVHGSGGSGHLPGGGGGSGQNSHSPPE

SEQ ID NO: 217362 - protein, 97 aa, Zea mays
  Clone ID: MRT4577_129835C.1.pep
ATALRRCPSKMGAVRRPSAVRRLRVVPRRRHRLLVAAAAAADVLPRAVAVQRVQRVQDRARDQVQLRGVPFQCMCHHVIFAPTCVLRLLSPEFWSNE

SEQ ID NO: 217363 - protein, 190 aa, Zea mays
  unsure (1)..(190): unsure at all Xaa locations
  Clone ID: MRT4577_129836C.1.pep
KSPKRKPTQVANHAQKNLIRLNSGGKDKKRFSIHXITPVNLTDDERGPFPSRSSLITXPPQPTKRAGFGRNFYKRPLFVVVGGGGRGRGQTAPPAPARFLKPFPEPDLRCSGFFQDGRFSGPRPSIWPFWSSTGCQPPQRFFFWASAIPLLGAPMSWIHPSGGGKGGGVSKRGVAVASAPGFKFFLLGKF

SEQ ID NO: 217364 - protein, 1081 aa, Zea mays
  Clone ID: MRT4577_129837C.1.pep
MDGDRRVMYDRWRKDGAHSNEWMGVTKAFLEHAFKDATGRLVKCPCNRCENKWPQKKEELEKHLCKSGFMPNYLVWYRHGESIRHVDAEVELDDDHDRMDDMLHDLGRDVEMNVEEPGQLPRDAQEFFRLLTAGEERLHEHTQMSVLGTLTRLMAIKSKHNISNSAYNDIVQLMGEVLPENHKLPKNMYFAKKMLAGLGMTYEKIDVCPNSCMLFFEEDDKLDRCKHCEASRYVEVTNDEGELVVTKVAAKQLRRLPIIPRLSRLFLNKEIALHMTWPKNGVRLVTDLDIMVHPSDGDAWKAFDEFDPEFANDPRSVRLSLSTDGFTPFNSSASPYSCWPVFIVPYNLPPELVNKEEFMFLALVIPGPEHPGPKLNMFVRPLIEELKQLWRGVKAYDSHTEKEFTMRAAYLWSVHDLLAYGDWSGWCVHGRLCCPICMNDTDAFRLKHGGKVSFFDAHRRWTPFKHDFRSSLIAFRSGAKIRNGPPKRQTTPQIMAWHACLKQGENDRFQGYGEDHNWTHISSIWELPYAKALIMPHNIDLMHQERNVAESIISTCFDVTDKTKDNMKARKDMAEICKRPMLELKVSDKGHESRPRADYCLKPDERKEIFKWLKNLKFPDRYAANLKRAVNLKTGKLIGLKSHDYHIIMERLTSFRYKKSNALGPRPAERRLIRPHGEWSWEDLNWDGTGRRPKVNAVLGSLCRFYYPGMVELNGERFAAMQWADWGLKDYVQPGEPGESSSGGGSSEQKQRTCQVAVWDEFWGRFQLPNEIEEDQAKWARVKRHFRKCTNKVIKDAMYNARIVAVNYYYKKIKGQKMSKALGANEIYLREEQYLESVVDWLAKDMEAWRRLAKRWASPEWIAESQKHRTNRGTEGPGQRYGADGHLGTARRMEAESGVAPSFMEVYVRGHRGPDPANPDVLCSEAAREKMNAYGEEMTQRHGPDFDWMHSDLDASALYHSGGGRKHGRFAFGTGVVEYNRTIGQGKASSSGGSSCSSRSAREAQLEEETRAAQEQARAAQEQVGQLTQYMASYFQGSASHAHGSEGAVNVPDFLVHGSGGSGHLPGGGGGSGQNSHSPPE

SEQ ID NO: 217365 - protein, 1304 aa, Zea mays
  unsure (1)..(1304): unsure at all Xaa locations
  Clone ID: MRT4577_129838C.1.pep
MTWQKNGVRLVTDPDLMVHPSDGDAWKALDEFDPEFANDPRSVRLGLSTDGFTPFNTSASPYSCWPVFIVPYNLPPELVNKEEFMFLALVIPGPEHPGPKLNILKHGGKVSFFDAHRRWTPFKHDFRNSLTAFRGGAKIRNGPPKRQTAPQIMAWHACLKQGENDRFQGYGEDHNWTHISSILELPYAKALIMPHNIDLMHQERNVAESIISTCFDVTDKTKDNMKARKDMAEICKRPMLELKVSDKGHESRPRADYCLKPDERKEIFKWLKNLKFPDRYAANLKRAVNLKTELSYFYREVCAKTISKRLMQKFEKEIPILICKFEKVFPPGFFNVMQHLIVHLPWEALVGGPVQFRWMYPIERALKKLRASVRNKARVEGCIAEAFALKEISQFSTSMFDEECWKSTSKPTAIQLENLRRDGLKGGPNFVQWFRNYVSKNSVHPDLQQMAHTSVSVRNYTRYDVNGYRFRTAKLENSRPLAATTNSGVLASSYVDDDKVVDYYGVLQNIIELIFDGPKELKVVFFECDWFDAHSGTRVDKYGNVEVKHSSRIPSSMSDVVLANQAKQVYYLPYPHPSLRAWWVAIKVNPQVVALESADYVSTSRDNDDAIFQPEAASTQDIAHRFHVTNGEGLENLCCNSSDLIEEPRSNRKRPVVVRRSLNMFKHRRSRRSGGSAASEDSSGSGLFQGTSQSRQRQQQLLDCLDEVQGEEGEQETPQQDAHVQGEEGEQDEEGEQDEEVDPMGAGSAGDASDGSTSFRYKKSNALGPRPAERRLIRPHGEWSWEDLTWDGTGRRPKVNAVLGSLCRFYYPGMVELNGERFAAMQWADWGLKDYVQPGESGESSSGGGSSGKKRRTCQVAVWDEFWGRFELPDDIEDDQAQWARVKRHFRKCADKVIKDAMYNARIAAVNYYYKKIKGQKMSKALGANEIYLTEEQYLESVVDWLAKDMEAWRWLAKRWASPEWIAESNKHRVNRGTEGPGHRYGADGHLGTARRMEAESGVAPSFMEVYVRGHRGPDPANPDVLCSEAAREKMNAYGEEMTQRHGPDFDWMHSDLDVSALYHSGGGRKHGRFTFGTGFVDYNRTIGQGKASSSGGSSRSSRSAREAQLEEETRAAQEQARAAQEQARAAQEQVGQLTQYMASYFQEMTTRLGPDMNLPAFRPPQAQGWGQWPGQAPASQPPGTGAPPGSWTPPPPQGSQPVRGWVPPVFQPPAGSQPFQVWMAPPPTGWVPPPLGWPAQQYPWMHAGSQGSVSNAQGSEGXCQRPRLPRPWFWXGVATFLVAEEGVVKGKCALGPFLSILVI

SEQ ID NO: 217366 - protein, 78 aa, Zea mays
  Clone ID: MRT4577_129839C.1.pep
LGGRKDPHHLQQGGLKGPNKVPYKLGGDPGGGGHLLPVPPKPLAVKGGGLPAGAKKFLPFQLGGGGQALNPGVGLVLQ

SEQ ID NO: 217367 - protein, 86 aa, Zea mays
  unsure (1)..(86): unsure at all Xaa locations
  Clone ID: MRT4577_12983C.1.pep
DLNKYQXLTTRGXHRYGRIQDXNXXLLXXSTIETXVAAKPXXXGXXXANENXXXXQGPXXPXXSXEGWGHPWAGWNGVWRSGKKRR

SEQ ID NO: 217368 - protein, 1161 aa, Zea mays
  unsure (1)..(1161): unsure at all Xaa locations
  Clone ID: MRT4577_129840C.1.pep
MRQRRGVVGTVTGVGDSATEGAATVVGAAAAEAELAQRDDMGEFGENNSVVVIELGISGEEVGTFEMDGDRRMMYDGWRKDGAHSNEWMGVTKAFLEHAFKDATGRLVKCPCNRCENKWPQKKEEMEKHLCKSGFMSNYLVWYRHGESIRHVDAEVELNDDHDRMDDMLHDLGRDVEMNAEEPGQLPRDAQEFFRLLAAGEERLHEHTQMSVLGTLTRLMAIKSKHNISNSAYNDIVQLMGEVLPENHKLPKNMYFAKKMLAGLGMTYEKIDVCPNSCMLFFEEDDKLDRCKHCEASRYVEVTNDEGELVVTKVAAKQLRRLPIIPRLLRLFLNKEIALHMTCPKNGVRLVTDPDIMVSKNFVHPDLQQMAHTFVSVRNYTRYDVNGYRFRTAKLEKSRPLAATTNSGVLASSYVDDDKVVDYYGVLQNIVELIFDGPKELKVVFFECDWFDAHSGTRVNKYGNVEVKHSSRIPSSMSDVVLANQAKQVYYLPYPHPSLRAWWVAIKVNPQVVAPESADYVNTSRDNDDAVFQPEAASNQDIAHRFHVTNGEGLENLCCNSSDLIEEPRSKRKRPVVVRRSGEEGEQDEEGEQDEEVDPMGAGSAGDASDGSTSFRYKKSNALGPRPAERRLIRPHGEWSWEDLTWDGTGRRPKVNAVLGSLCRFYYPGMVELNGERFAAMQWADWGLKDYVQPGESGESSSGGGSSEKKXRTCQVAVWDEFWXFTFGRFQLPDDIEEDQAQWTRVKRHFRKCADKVIKDAMYNARIAAVNYYYKKIKGQKMSKALGANEIYLTEEQYLESVVDWLAKDMEAWRWLAKRWASPEWIAESNKHRANRGTEGPGHRYGADGHLGTARHMEAESGVAPSFMEVYIRGHRGPDPANPDVLCSEAAREKMNAYGEEMTQRHGPDFDWMHSDLDASALCHSGGGRKHGRFAFGTGVVEYNRTIGQGKASSSGGSSRSSRSAREAQLEEETRAAQEQARAAQEQVGQLTQYMASYFQEMTTRLGPDMNLPAFRPPQAQGWGQWPGQAPASQPQWTGVGWTQAPPGTWTPPPPQGSQPVPGWVPPVSQPPAGSQPFQAWMAPPPTGWVPPPLGWPAQQYPWMHAQPPPHHGSQGSASHAHGSEGXCQRPRLPRPWCWXGVATFLVAEEGVAKTPTARRS

SEQ ID NO: 217369 - protein, 301 aa, Zea mays
  unsure (1)..(301): unsure at all Xaa locations
  Clone ID: MRT4577_129841C.1.pep
MGAGSAGDASDGSTSFRSWEDLTWDGTGRRPKVNAVLGSLCRFYYPGMVELNGERFAAMQWADWGLKDYVEPGESGESSSGGGSSEKKRRTCQVAVWDEFWGRFQLPDDIEEDQAQWTRVKRHFRKCADKIIKDAMYNARIAAVNYYYKKIKGQKMSKALGANEIYLTEEQYLESVVDWLSKDMEAWRWLAKRWASPEWIAESNKHRANRGTEGPGHRYGADGHLGTARRMEAESGVSPSFMEVYVRGHRGPDPANPDVLCSEAAREKMXFAFGTGVVEYNRTLGQGKASSSGGSSRSSRK

SEQ ID NO: 217370 - protein, 143 aa, Zea mays
  unsure (1)..(143): unsure at all Xaa locations
  Clone ID: MRT4577_129842C.1.pep
PHPPFSFSXGLFICRKGQIRGFRPFFARCRCLLVSYLRNSFGFWFTRPKIFRPVLLAWGPPPCAGFPAQKVFLGVFPNIIGFLNGPPSGGFLPPCFRLPGPASPTIVIFVLALVFFAIRVGRLAFFYLPLVGLLLFFWLTGGF

SEQ ID NO: 217371 - protein, 970 aa, Zea mays
  unsure (1)..(970): unsure at all Xaa locations
  Clone ID: MRT4577_129843C.1.pep
MYPIERALKKLRASVRNKARVEGCIAEAFALKEISQFSTRYFARANNVFAPSVRLHVENESPQSTLQIFANPGKAVGKGSVRHIEGSDLNTLMLYMYSNIDSTQEAFDMFDEECWKSTSKPTAIQLENLRRDGLKGGPNFVQWFRNYVSKNFVHPDLQQMAHTSVSVRNYTRYDVNGYRFRTAKLEKSRPLAATTNSGVLASSYVDDDKVVDYYGVLQNIIELIFDGPKELKVVFFECDWFDAHSGTRVDKYGNVEVKHSSRIPSSMSDVVLANQAKQVYYLPYPHPSLRAWWVAIKVNPQVVARESADYVSTSRDNDDAIFQPEAASTQDIAHRFHVTNGEGLENLCCNSSDLIEEPRSKRKRPVVVRRSGEEGEQETPQQDAHVQGEEGEQDEEGEQDEEVDPMGAGSAGDASDGSTSFRYKKSNALGPRPAERRLIRPHGEWSWEDLTWDGTGRRPKVNAVLGSLCRFYYPGMVELNGERFAAMQWADWGLKDYVQPGESGESSSGGGSSEKKRRTCQVAVWDEFWGRFQLPDDIEDDQAQWARVKRHFRKCADKVIKDAMYNARIAAVNYYYKKIKGQKMSKALGANEIYLTEEQYLESVVDWLAKDMEAWRWLAKRWASPDWIAESNKHRVNRGTEGPGHRYGADGHLGTARRMEAESGVAPSFMEVYVRGHRGPDPANPDELCSEAAREKMNAYGEEMTQCHGPDFDWMHSDLDASALYHSGGGRKHGRFAFGTGVVEYNRTLGQGKTSSSAGSSRSSKSAREAQLEEETRAAQEQARAAQEQARAAQEQVGQLTQYMTSYFQEMTTRLGPDMNLPAFRPPQAQGWGQWPGQAPASQPQWTGVGWTQAPPGTWTPPPPQGSQPVPGWVPPVFQPPAGSQPFQAWMAPPPTGWVPPPQGWPAQQYPWMHAQPPPHHGSQGSASHAQGSEGXCQRPRLPRPWFWXGVATFLVAEEGVAKTHIARRS

SEQ ID NO: 217372 - protein, 85 aa, Zea mays
  unsure (1)..(85): unsure at all Xaa locations
  Clone ID: MRT4577_129844C.1.pep
YLWLVSIYHSIFLYIIKFYYNFFFYFLSSFFYSSYFYIFLFFIFYLYIYFFNFIFYYLLYLXFINFFIFFIYYFMFYRWVFVLFF

SEQ ID NO: 217373 - protein, 85 aa, Zea mays
  Clone ID: MRT4577_129845C.1.pep
RFASKVKILCACFKKNFYCSPGVLARSGVFVSNFGLFELSAVLSLYQPFSIWYSRAGDVHVYCMVWLVWSGIGVYKRAIRHIYNI

SEQ ID NO: 217374 - protein, 66 aa, Zea mays
  Clone ID: MRT4577_129846C.1.pep
LMICFLQRLLRLALVKRGGLHNRSLVSGMLRGIDSNTEFVLYLQVEGTAQSMGLCVHVCDVIGRAS

SEQ ID NO: 217375 - protein, 58 aa, Zea mays
  Clone ID: MRT4577_129847C.1.pep
HGIKTQTIDKLIETGDGEQIFQRAIQEQGRGRVLDTLQEIQERHDTVKEIERKLFDLQ

SEQ ID NO: 217376 - protein, 88 aa, Zea mays
  Clone ID: MRT4577_129848C.1.pep
SNYAAMGEVFFFSSLVYLIRRSMSQGISKLTKLECHQFQHLHGSLSIRGAMYVCHEGRTDERVSGKDLRWISSLSLFCATVAERKGTA

SEQ ID NO: 217377 - protein, 59 aa, Zea mays
  Clone ID: MRT4577_129849C.1.pep
MAGHCILAGLRKSVDQNMPLLHFPFPFLASMAITMTCIKQRRGLRNFIYSRPLCLSLCL

SEQ ID NO: 217378 - protein, 69 aa, Zea mays
  Clone ID: MRT4577_12984C.1.pep
VCMCFVVKSKARKALGDLWWCTDSPIGCLLIVLFWLGIMQPVLTAPSREKGFPGKSKGGRSHESSSPRE

SEQ ID NO: 217379 - protein, 317 aa, Zea mays
  unsure (1)..(317): unsure at all Xaa locations
  Clone ID: MRT4577_129851C.1.pep
AASAAAVNFNRHDASTTLQSAATCIPPPTTVRSVSMRDMGTEMTPIASQEPSRTGTPVRATSPNCSQPTTPRRTLGGPSAVGSFISHGGECSSSELSEQELQTKTRREIMLLGTQLGKTSIAAWASKKEEEKDASLSLKPVPMDQSTQNITAIRAAAWEEAEKAKYLARFKREEIKIQAWEDHQKAQIEAEMRKIEVRXCFLFFCSVCHRCSGSEEHTKPKGAARSCVCGYCIVGIDSFNHGPCFAFLSSRXVERMRARAQDKLMTKLASARHSADEKRAAAELKRNRAAARTAEQAEHIRRTGRVPPSFGCWNWCS

SEQ ID NO: 217380 - protein, 47 aa, Zea mays
  Clone ID: MRT4577_129852C.1.pep
WMFQVWNSSSLRSGHPIKGLPWAVIHPCAWWAQRCRRHVFASGLSNS

SEQ ID NO: 217381 - protein, 48 aa, Zea mays
  unsure (1)..(48): unsure at all Xaa locations
  Clone ID: MRT4577_129853C.1.pep
RYYGCHMGWNLVQTKFHSIGATLVRVDKFGNIYSEKLHDTQYXRHTWV

SEQ ID NO: 217382 - protein, 49 aa, Zea mays
  Clone ID: MRT4577_129854C.1.pep
GPGSIFCAQDLRLPVRTLCRSPAQRTVSPARHQGKHRPDLATCRSRPTM

SEQ ID NO: 217383 - protein, 96 aa, Zea mays
  Clone ID: MRT4577_129855C.1.pep
TKFLCKAWFKIAIGAPKPEIRWVFPPLGSGFGPFFIPRGLLMGINVSPRGSWGGVCSYGPPPRDPWGFFTPPPPGPIGILFLKMTPNLVFFFFPPP

SEQ ID NO: 217384 - protein, 58 aa, Zea mays
  Clone ID: MRT4577_129856C.1.pep
CARGGPAHLGRADYAVALNTTVMTRSRRGWYVSSSSTSTRRRGTHNPTHLYCELSLVH

SEQ ID NO: 217385 - protein, 55 aa, Zea mays
  Clone ID: MRT4577_129857C.1.pep
QYHHAPGVGPSKPDHAYMFINAVRDHNYIRTKTVLTYKPCPKNHLTNSRLQNNRS

SEQ ID NO: 217386 - protein, 89 aa, Zea mays
  Clone ID: MRT4577_129858C.1.pep
HQLSVLSAQQQSPSPKGMARYGARPRSSDALSWHRRWCDCDLNQRTGSQFFSLCYLHAMMATPCRSYGQGSANVPIYIPNASPRTRPNP

SEQ ID NO: 217387 - protein, 66 aa, Zea mays
  Clone ID: MRT4577_129859C.1.pep
GGGQSASGESWHIIRCKVSPVSLECQFDRVVNRFISCNKGNAKTVGYSNVVWQDANVMPLWLSWLR

SEQ ID NO: 217388 - protein, 164 aa, Zea mays
  unsure (1)..(164): unsure at all Xaa locations
  Clone ID: MRT4577_12985C.1.pep
AGQALLSGRQLLGRPVQSVVSMSSGRNAPFDDEVISSPPVKEGDDRKMRFAAKKSLSYLDGTLAGDYGFDPVRLSDPEGTGGLHRSPSELDYXEAINXRYLMIGRGCAPSTPDIFXKMSIIPPKTALPWFKTEDIPSAGTYKYCADSYRLVIFNMVLMGYHRAP

SEQ ID NO: 217389 - protein, 38 aa, Zea mays
  Clone ID: MRT4577_129860C.1.pep
KNFSHILTITRFSFWFGVWSIVLVCDCTKTSHHNGSRE

SEQ ID NO: 217390 - protein, 47 aa, Zea mays
  unsure (1)..(47): unsure at all Xaa locations
  Clone ID: MRT4577_129861C.1.pep
XEVRISPSSEGISPTRYCGPPTPPKNNGIHTPPXFFSPPPTNLTXED

SEQ ID NO: 217391 - protein, 292 aa, Zea mays
  unsure (1)..(292): unsure at all Xaa locations
  Clone ID: MRT4577_129862C.1.pep
MAAVAEGSASAAAKEVEYQAGVQKLVDLLSNLNPAAKEFVPSSAPAAAASPPKKALSADAPVFDYRSTAGGNGATDDPFYVGFGNQQRKRGNGYINQGRRRTNDRLRRADREDSVRRTVYVSELDHTVTEERLADIFATCGQVVDCRICGDPHSVLRFXXXXXXXXXXXRPALNLGGQIXGFYPVRVLPSKTAILPVNPKFLPRTDDEKEMVMRTVYCTNIDKMVTQLDVKKFFEELCGEVSRLRLLGDNVHSTRIAFVEFVHAEGAIMALNCSGMILGTLPVRVSPSKTPV

SEQ ID NO: 217392 - protein, 299 aa, Zea mays
  Clone ID: MRT4577_129863C.1.pep
MAAAVAEGSASSAAKEVEYQAGVQKLVDLLSNLNPAAKEFVPSAAASPPKKALSADAPVFDYHSIGGGNGATDAAFYVGFGHQPRTRGNGYINQGRRRTNDRLRRADREDSVRRTVYVSELDHTVTEERLADIFATCGHVVDCRICGDPHSVLRFAFIEFSDEEGARTALNLGGTIFGFYPVRVLPSKTAILPVNPKFLPRTDDEKEMVMRTVYCTNIDKMVTQLDVKKFFEELCGEVSRLRLLGDNVHSTRIAFVEFVHAEGAIMALNCSGMILGTLPVRVSPSKTPVKPRVNRVGSN

SEQ ID NO: 217393 - protein, 85 aa, Zea mays
  unsure (1)..(85): unsure at all Xaa locations
  Clone ID: MRT4577_129864C.1.pep
AWWKNQQXEYPILSKLVRDVLAMQASTVASESAFSTGGRVVDPYRSPLDPEIVEALVCTRDWILAAKKVQERFLQLFLILRSLRI

SEQ ID NO: 217394 - protein, 174 aa, Zea mays
  Clone ID: MRT4577_129865C.1.pep
MAASLRASSSSLRSRLLSSPASWSPWRLLLSSSVHSDAAHQTETLAFHEIQLSPEKPPTATAFVLHGLLGSGRNWRTFSRTLASRLRDRSPADEWKMVLVDLRNHGSSARIKGLSPPHDMSSAAKDLADLVKARGWTWPDVVVGHSMGGKVALDFAESCSRGDYGESAALPKQL

SEQ ID NO: 217395 - protein, 57 aa, Zea mays
  Clone ID: MRT4577_129866C.1.pep
RCKLLGPESDGFCWENSCRGISLWLQVRIYLCPYGLMVTCTNNGPWSPEISPYSERV

SEQ ID NO: 217396 - protein, 211 aa, Zea mays
  Clone ID: MRT4577_129867C.1.pep
MASAAYLDDIDAEVIDPPKIEMLDVTELVGDLIEHSPKPNVIVSSNVRELLECPVCLVAMYPPIHQCSNGHTICSGCKPRVHNRCPTCRSELGNIRCLALEKVAASLEVPCKFQNFGCVGIYPYYCKLKHESQCQYRPYTCPYAGSECTVTGDIPYLVNHLKDDHKVDMHSGSTFNHRYVKSNPHEVENATWMLTVFSCFGQYFCLHFEAF

SEQ ID NO: 217397 - protein, 127 aa, Zea mays
  Clone ID: MRT4577_129868C.1.pep
APRRSTERYPSRLSSGSDGVDQQQQHSFEASRTPSRWGDSFGNDSTSHSQTSTSSWCSQPPDEMEAEMKRLRLELKQTMDMYSTACKEALSAKQKALELQRWKMDEEQRSQETRLTEESAMALIEQE

SEQ ID NO: 217398 - protein, 82 aa, Zea mays
  unsure (1)..(82): unsure at all Xaa locations
  Clone ID: MRT4577_129869C.1.pep
RCLLISLRIRCSSDHNSLPDVMLRPRRLATKSASISXRSPSTCATSAAATATPCSQMGDRSNRMMDTMTVECGDCNDLSYLS

SEQ ID NO: 217399 - protein, 121 aa, Zea mays
  Clone ID: MRT4577_12986C.1.pep
VGQVDPVVNKAFKMGKTHALRAVDEAEFKKLLPQVFGAVILQLDASPVAVSPNPVVPEAMGPPSSSSALLLPPPPFPKGSSPAREKEKTFPLSEEMPMEMGPPGPSRPVFFFLGPRGLKTC

SEQ ID NO: 217400 - protein, 71 aa, Zea mays
  Clone ID: MRT4577_129870C.1.pep
RRPRNHGSCWQASYQACGSSSFCRDPQQAVVQVRCSRPGHTMLGIQSEHAHISWWDEGYEASNMTEGMDRE

SEQ ID NO: 217401 - protein, 249 aa, Zea mays
  Clone ID: MRT4577_129871C.1.pep
MAMNYYEDHSMSSSSHADDTDERKSTVSVSVSPEASADEESFSFFGLLCYADTVDWLLMALGTLGSIIHGMAFPVGYLLLGKALDAFGTNINDPEGMVHALYKVVPFVWYMAAATLPAGMVEISCWIYSSERQLARMRLAFLRSILNQEVGAFDTDLTTATIITGVTNYMSVIQDAIGEKLGHFVASFSTFFAGVIIAFISCWQVAMLSFLVIPLILIIGAAYTKKLNVLSLSRNAIVSEAVSVVEQVL

SEQ ID NO: 217402 - protein, 73 aa, Zea mays
  unsure (1)..(73): unsure at all Xaa locations
  Clone ID: MRT4577_129872C.1.pep
GGALAKVQRPVCFFSTSPSVVGVFFRIAPKFALLFPKGAFVPWFFGKGLEKGDFFXAREVLAALQKDFQEVGF

SEQ ID NO: 217403 - protein, 987 aa, Zea mays
  Clone ID: MRT4577_129873C.1.pep
MYKAANARLLLRSLSPNSAALASVNPGRAASSARLALSLPCGAWVGRSGLVRRAAAFSGTRPRFAGARAQIGAAVPAVEQFQRRMATQATVHAFKDILTSLPKPGGGEYGKFYSLPALNDPRIDKLPYSVRILLESAIRNCDNFQVTKNDVEKIIDWENTSPKLAEIPFKPARVLLQDFTGVPAVVDLAAMRDAMAKLGSDANKINPLVPVDLVIDHSVQVDVARSQNAVQANMELEFSRNKERFGFLKWGSSAFQNMLVVPPGSGIVHQVNLEYLGRVVFNTDGILYPDSVVGTDSHTTMIDGLGVAGWGVGGIEAEATMLGQPMSMVLPGVVGFKLTGKLRSGVTATDLVLTVTQMLRKHGVVGKFVEFYGEGMGKLSLADRATIANMSPEYGATMGFFPVDHVTLDYLKLTGRSDETVSMIEAYLRANKMFVDYNEPPTERIYSSYLELNLDEVEPSMSGPKRPHDRVPLKEMKSDWHACLDNKVGFKGFAVPKEQQDKVVKFDFHGQPAEMKHGSVVIAAITSCTNTSNPSVMLGAGLVAKKACELGLEVKPWVKTSLAPGSGVVTKYLLQSGLQEYLNQQGFHIVGYGCTTCIGNSGDLDESVSTAITENDVVAAAVLSGNRNFEGRVHPLTRANYLASPPLVVAYALAGTVDIDFEKEPIGFGKDGKEVYFRDIWPSTEEIAQVVQSSVLPDMFKGTYEAITKGNPMWNQLTVPEASLYSWDSKSTYIHEPPYFKDMTMSPPGPSTVKDAYCLLNFGDSITTDHISPAGSIHKDSPAAKYLMERGVDRKDFNSYGSRRGNDEVMARGTFANIRIVNKFLNGEVGPKTIHVPTGEKLSVFDAAMRYKSEGHATIILAGAEYGSGSSRDWAAKGPMLLGVKAVIAKSFERIHRSNLVGMGIIPLCFKAGEDADSLGLTGHERYSIDLPTNLSEIRPGQDVTVTTDNGKSFTCIVRFDTEVELAYFNHGGILPYVIRNLAAAHN

SEQ ID NO: 217404 - protein, 57 aa, Zea mays
  Clone ID: MRT4577_129874C.1.pep
VDKMETKEKSKGLHVRAGSVDREIEEIHEQGSSCYLGLFGYSNSMWIEVYWNVLGRF

SEQ ID NO: 217405 - protein, 252 aa, Zea mays
  Clone ID: MRT4577_129875C.1.pep
KDFRVCQGPYDPFLISAWEDYDAKRGSENDHPKEFTREQCYIVFVLADGGTDLESFALVEYNEVHSLLVQVTASLAVAESACEFEHRDLHWGNILLAQEETPDTNHTMSFTLQGKRMHARTFGLNVSIIDFTLSRINTGTAILFLDLSADPALFQGKKGDKQAETYRRMKQITQEHWEGSFPKTNVVWLIYLVDMVLQKLKSPAHGNKIERELRSLKKRLASYESAGDCLRDPFFADVLLIEDDQVPSMPPL

SEQ ID NO: 217406 - protein, 40 aa, Zea mays
  Clone ID: MRT4577_129876C.1.pep
LPGEVGTGVRHLGLIPMYSICPASTSRQLRLSSRKAASRA

SEQ ID NO: 217407 - protein, 450 aa, Zea mays
  unsure (1)..(450): unsure at all Xaa locations
  Clone ID: MRT4577_129877C.1.pep
MGGKESDRTLMTVESSIGGREDGFMXASDIWSQPSSTNFRQCIVSNSHKKQDSHTNGYILINANGGLNQMRFGICDMVAVAKILKATLVLPSLDHTSYWADDSEFKDLFNWRHFIESLKEDIDIVETLPPEYSDIEPLAKAPVSWSKVHYYRDEILPLLKKHKVIYFTHTDSRLANNGLPSYIQKLRCRVNYRSLKYSHTIEDLGNTLVSRMRQDRSPYLALHLRYEKDMLAFTGCSHNLTSEEEEELRKMRYEVSHWKEKEINATERRSLGGCPLTPRETSLLLKGLGFTRSTRIYLVAGEAFGNGSMNALKDDFPNIYSHSTLATEEELAPFKNHQNMLAGLDYIVALQSDVFIYTYDGNMAKAVQGHRRFENFRKTVNPDRMNFVNLIDEFDGGRVPWDIFSSEVKRLHKDRIGAPYFREPGEFPKLEESFFANPLPGCICEQHSEE

SEQ ID NO: 217408 - protein, 108 aa, Zea mays
  unsure (1)..(108): unsure at all Xaa locations
  Clone ID: MRT4577_129878C.1.pep
LLWANYYKEVLFVFRSVRNQNVMDMNAVGRGFEGSLAKDPXVWDMNVVYFYSPNCLGVVYDRGLIGVNHYWGEEISTYPRTXDLPQPEGLFTGDPNRGQMNYELLEMD

SEQ ID NO: 217409 - protein, 111 aa, Zea mays
  Clone ID: MRT4577_129879C.1.pep
ARLDEGFIGSVSFCSLCSVHFHGPLGSSTSVISFVIAIYGVWNIYYFIFTSSSMTLSILPLQIQPFCLISKNLPAMGGDYRLAFNAIVKVYSCSYLHSKLLSVRTGCPVDF

SEQ ID NO: 217410 - protein, 61 aa, Zea mays
  Clone ID: MRT4577_12987C.1.pep
FGSMGKAILFLTFMLLDAEEIFGNRCWIYQKYYPPLTLVLQRPREFTQRQPELYSSNSSYM

SEQ ID NO: 217411 - protein, 168 aa, Zea mays
  unsure (1)..(168): unsure at all Xaa locations
  Clone ID: MRT4577_129880C.1.pep
ILPCLSASAESATIKGIQQGMYMDNEGDANVVSPGYTNADGLRAXIVQTFILAYNAFSGSDAKRNTRDSHVPILDPLLIVFGVFLDHLAAILITGTLINPERKLXAAVIYYHYHGCXEHCIFCIDHFIXLSMIDIYHQTVIEATTPHRDYLNQTKMPAASDSRRVLKA

SEQ ID NO: 217412 - protein, 105 aa, Zea mays
  Clone ID: MRT4577_129881C.1.pep
LESTLSDIDKVLSDMAAEEAAAATEVMAAAPEKGKEISEETSEDKGFNFQNLVGQELSKAEKEELQEFAESCGYQPRALLFGGINKEALGCIRDRTKAKIISTLS

SEQ ID NO: 217413 - protein, 67 aa, Zea mays
  Clone ID: MRT4577_129882C.1.pep
SANALTWVGAAGSRGDKLLATFMIKGANTYYRTHMLSPTVYETMGDDQVGERTGPLVLGRMTIEMRS

SEQ ID NO: 217414 - protein, 53 aa, Zea mays
  Clone ID: MRT4577_129883C.1.pep
NCTPIQSPRLTNRIRPLNRCTISCICSGHITLYVSTLKSVSKYSTSNYFGSWI

SEQ ID NO: 217415 - protein, 120 aa, Zea mays
  Clone ID: MRT4577_129884C.1.pep
MSGNGAKKVVDAAVKAGRTIIDWDGMAKLLVTDEARKEFAALRRAFDDVNHQLQTKFSQEPQPIDWEYYRKGIGSKVVDMYKEAFESKYPCTPNLISIIESKRRVFCEHQGYSKVFVVLC

SEQ ID NO: 217416 - protein, 98 aa, Zea mays
  unsure (1)..(98): unsure at all Xaa locations
  Clone ID: MRT4577_129885C.1.pep
HTASISTAASMYTKVNNSRSMXATFRAINSDHRVRTSANERNLSFSLAQTRWLSSCTGSXGPSCSPTSXLHASVRXVDHXRVVAPPPKAKGRPPTNEL

SEQ ID NO: 217417 - protein, 147 aa, Zea mays
  unsure (1)..(147): unsure at all Xaa locations
  Clone ID: MRT4577_129886C.1.pep
RQRPAGGGALXQXRQTSQPGARPRRRRRARAARPRPQXAGPARPRPRQSARQGGATRGGRRRSRPPPARRAGRRGSRPRPATAPRAARATSPAKADQPXXRRRPGRRAXHXPAPXRXASTRGGPXXEPNRDQAPAXQRRPRTRGTPR

SEQ ID NO: 217418 - protein, 106 aa, Zea mays
  unsure (1)..(106): unsure at all Xaa locations
  Clone ID: MRT4577_129887C.1.pep
LSPNGIKLWEAVSFKTEYDIFNDYLLYYLWNPSLIHTQIIITIXSXQVVLMGSGDRYHNLLCPYHEVVDPFYLLLSYDPLGLDXDLKAFFELKDNELKNCLLSMIS

SEQ ID NO: 217419 - protein, 116 aa, Zea mays
  Clone ID: MRT4577_129888C.1.pep
MSYNKAEKDFGEGPKIHKIRITLTSRNVKSLEKVCQELIDRAKNKELRVKGPVRLPTKHLKITTRKTPCGEGSKTWDTYEMRIHKRLIDLHAPTEVVKQIIINIEAGVEVEVTIAA

SEQ ID NO: 217420 - protein, 53 aa, Zea mays
  Clone ID: MRT4577_129889C.1.pep
FSYYFFFFAGLITGYSQGFSKNELKHELGGPVYGQKKLHKNNYKIHFVIDPII

SEQ ID NO: 217421 - protein, 25 aa, Zea mays
  Clone ID: MRT4577_12988C.1.pep
LTVPTEAWPVGLLARPLKSTLESLH

SEQ ID NO: 217422 - protein, 143 aa, Zea mays
  Clone ID: MRT4577_129890C.1.pep
MENPYTSFFNSHPQHHRYYYHPAPPPPAPAPAAYHPSLPFFAAHRQPPAPTAPAPPSPPLREALPLLSLAPTRHEERERRARPPAPALEDSEENGRDEGEEEQEEEEGPTASSKSNHGQHQRLGVGRQRGFFADLNASAGGDD

SEQ ID NO: 217423 - protein, 139 aa, Zea mays
  unsure (1)..(139): unsure at all Xaa locations
  Clone ID: MRT4577_129891C.1.pep
GAKRGPPLPTKQGDSRVPPGGGGAQKQTPKTPRGAGKRAXKPGGPQTKKPGRAPQKKLLXGPKPGKDPFAGPEKXKPQIPPLFSRPSQPNPMFPPGGTPPWGGGGXPPWPGARRPLPPFPGGPPFGAPPRGRGLAKQKD

SEQ ID NO: 217424 - protein, 189 aa, Zea mays
  unsure (1)..(189): unsure at all Xaa locations
  Clone ID: MRT4577_129892C.1.pep
MDPTKFRPSSSHDTTVTTTNAGAPVWNDNEALTVGPRGPILLEDYHLIEKGAHFPRERIPERVVDPRGASPQGFFQXAPHLTALTWGQFLGAARGGTPRNRGFSTGVHQRGAPENIPEPRGVPREVYPPQGNWELVGNNFPRFFIREGIKFPHVVHAVQPHPRSHVEEYWRVVQFLAHLPERLDTFFFL

SEQ ID NO: 217425 - protein, 83 aa, Zea mays
  Clone ID: MRT4577_129893C.1.pep
FSFPMPYFVVCYFLNVSRHRILLVFCFFLLKKVYCNFAKKNLTVRRKDGHHQLSPIVIYFGYPLGFCWYKIGLLNHVHGSVFQ

SEQ ID NO: 217426 - protein, 118 aa, Zea mays
  Clone ID: MRT4577_129894C.1.pep
PGGFPRVRARLRGAINPCGGNDSPLYIAERTRIVSQRSSTSSSIQDRGGMCETVLRQKSPCTSTRIVCGAHLPLPAIHPCRQLFHAEPLDARLARTESHVPPWALCTRAKDEERHGKL

SEQ ID NO: 217427 - protein, 65 aa, Zea mays
  Clone ID: MRT4577_129895C.1.pep
HHDRSVSRPPVRMSRQREHKLSYRPASEPYAILRHAMHRHIDARSLVHAAWGISSAERCCSCGCC

SEQ ID NO: 217428 - protein, 91 aa, Zea mays
  Clone ID: MRT4577_129896C.1.pep
MAGAHDDLVTYSAKMDLILEQLADINARLDSHDARLAKLDQAWVSPFASTAGCLGASEGGLGAGRGGRIEDDGGNGLQPNTPKEVEAAFYV

SEQ ID NO: 217429 - protein, 91 aa, Zea mays
  unsure (1)..(91): unsure at all Xaa locations
  Clone ID: MRT4577_129897C.1.pep
QTVGPAYYKYSRWRTQKRRNPLFMPSPPSQXKEKXXRRLEXIIPLPTXXDFXQXXIXXLVPLDKXCVXIIXXPPXGCTDXSTPSAKQQTTK

SEQ ID NO: 217430 - protein, 107 aa, Zea mays
  Clone ID: MRT4577_129898C.1.pep
RDSVGMCFPYIPGKSCFAKELEALTKSNENIKKTRSIICHNPSIAAAIPAMYIYARQISNSPYKRWVLQQHLEHFFHHCFPVGRATKLIRHHIDITPTTEMGGPKKK

SEQ ID NO: 217431 - protein, 49 aa, Zea mays
  Clone ID: MRT4577_129899C.1.pep
PFKYILYLFFSFFFIFFFFILFLHSHLYHYIINQFKLYKTHPTKSPTHT

SEQ ID NO: 217432 - protein, 984 aa, Zea mays
  unsure (1)..(984): unsure at all Xaa locations
  Clone ID: MRT4577_12989C.1.pep
MAAATAADMVWVRVLEDGVFRFDASEAARAAAGPSLSFADPRRREAPHDGADMPAVVPVCEVAAGGSQKVVIKLPPGTSFYGTGEASGPLERTGKRVFTWNTDAWGFGPGTTSLYQSHPWVLAVLPDGKALGVLADTTRRCEIDLRQESTIKFSALSAYPVITFGPFNTPADVMTSLSHAIGTVSMPPKWSLGYHQCRWSYDSSEKVLKVVRTFREKDIPCDVVWMDIDYMDGFRCFTFDSIRFPDTISMVDDLHSIGCKAIWMLDPGIKKEEGYFVYDSGSKSDVWIQKADGSPFVGEVWPGDCVFPDYTSEKTRAWWASLVKDFISIGVDGIWNDMNEPAVFKTTTKTMPESNIHRGDADIGGVQNHSYYHNVYGMLMARSTYKGMEMGNAAKRPFVLTRAGFIGSQRYAATWTGDNLSNWEHLHMSLPMVLQLGLSGQPLSGPDIGGFAGNATPKLFGRWMGVGALFPFSRGHTETGSIDHEPWSFGKECEEVCRLALLRRYRLLXPHIYTLFYHSHTKGIPVATPVFFADTQDPELRKVETSFLLGPLLVCASTLPNKGAHEYAHKLPKGIWLSFDFADAHPDLPVLYLQGGSILPVGLPIKHVGEASLEDDLSLIIALNENGKAEGVLFEDAGDGYAFTQGDYLLTYYIAELHSSVVTVKILKSEGSWKRPKRNLKINILLGGGAMISTDGVDGEVIHLTMPSESEVSSLVATSEFEHKKRMEMIQPIPDIEEPSGQEGAELSKIPVDLKSGDWFLKIVPWIGGRIISMAHIPSDSQWLHSRIEINGYEEYSGAEYRSAGCTEEYKVIRRHLEQSGEEESICMEGDIGGGLVLQRQISILKDNPKIVQIDSSIQARSVGAGSGGFSRLVCLRVHPTFTLLHPTEVVVAFTAINGSKQEISPEAGEITFEGDLKPNGEWMLVDKCVGLSLVNRFNPREVSKCFVHWGTGDVNMELWSEERPVSNETPLRICHQYEVQQTT

SEQ ID NO: 217433 - protein, 54 aa, Zea mays
  unsure (1)..(54): unsure at all Xaa locations
  Clone ID: MRT4577_1298C.1.pep
RSPCWXNXMMDFAFPYLLQFIREYTSKVDDLVKDKIESQKEERAKESSCAYMFC

SEQ ID NO: 217434 - protein, 69 aa, Zea mays
  Clone ID: MRT4577_129900C.1.pep
IYKREENVYINKLAEQYQRHEENVAILRRRLTLNMWNMLLLRTETFRWSHTKMRVALAELDGATRLVLN

SEQ ID NO: 217435 - protein, 233 aa, Zea mays
  unsure (1)..(233): unsure at all Xaa locations
  Clone ID: MRT4577_129901C.1.pep
DACRFRSGIPGSTHASGESSXDSSRCSTPSLDPERHERLREKMRRRMDSGDKWFSLEFFPPXRFDRMAAGGPLFVDVTWHPAGDPGSDKETSSMMIASTAVNYCGLETILHMTCCQQRPEEITGHLHRAKQLGLKNIMALRGRCGASTPPLWVLAFLKASPVXDKSFTFLGLCTKHIQGQLAAGGSVINRCGNPADPVGDHEAEEGGFSYATDLVKHIRTEFADYFDICVAGK

SEQ ID NO: 217436 - protein, 48 aa, Zea mays
  Clone ID: MRT4577_129902C.1.pep
HRSAILVIQHHARYRGWNAMLTIVAYCHYDSMHSINLSCCKRRSSRCY

SEQ ID NO: 217437 - protein, 72 aa, Zea mays
  Clone ID: MRT4577_129903C.1.pep
MTESLVRNKPGMASIKEMPVLQDGPPPGGFAPVRYARRIPTSGPSATAILLTAFGAFAYGMYQVGQGNKVRR

SEQ ID NO: 217438 - protein, 55 aa, Zea mays
  Clone ID: MRT4577_129904C.1.pep
LTRSITLPSTQTYKDHWGSVSCTLHFTQQQEQHTTSHFCLLHSYVFIYNNQVQMY

SEQ ID NO: 217439 - protein, 139 aa, Zea mays
  unsure (1)..(139): unsure at all Xaa locations
  Clone ID: MRT4577_129905C.1.pep
GQAAAEADVVFTSTASETSLFAKEHAEALPXLSLFVDISVPRNVSACVSEVGAARVYNVDDLKEVVEALKEDRLMKXLXALTFISDYLLRFVAWWDSLVSVPXFXLLWSFAVWFWASVLSLCLLFVCVAPLPLFFFVCL

SEQ ID NO: 217440 - protein, 86 aa, Zea mays
  unsure (1)..(86): unsure at all Xaa locations
  Clone ID: MRT4577_129906C.1.pep
TVHERCTHEKCRMHADVGQAIARQMTVAYMGPEGVGEGGKMVFLRRMWIVIGNVGMKERPDRVKGGGGKQACKEKVERMRGSRRXF

SEQ ID NO: 217441 - protein, 112 aa, Zea mays
  unsure (1)..(112): unsure at all Xaa locations
  Clone ID: MRT4577_129907C.1.pep
QIHGDSHKILFSLTTKXXINYXHILYKINTYHSIIILNNVPTFVTKSQKKHAIQIPATYKLYHYILFRRTYINDLQVKSSPPPPPPQTSSLHNNPTINQTHYSQPSSTYQNF

SEQ ID NO: 217442 - protein, 77 aa, Zea mays
  Clone ID: MRT4577_129908C.1.pep
EDQANWLEGSYQKCSGGLLISLESGNSLTFQLDKEKNMWFKRSHTSRSSIRSRWRLPVDFMATRMILSSFYIYLLFL

SEQ ID NO: 217443 - protein, 184 aa, Zea mays
  Clone ID: MRT4577_129909C.1.pep
LHSVHVRRRSCHPPAAVTPSPFLLSPQASSRPHHPSLLVLPAVAGDRDHGTHVVVLALLAMLLLQGVILMSTVEGLVWIMQEAPQVPHQEDQANWLEGSYQKCSGGLLISLESGNSLTFQLDKRGYKSPEDYPGTWNLMSQEKNMWFKRSHTSRSSIRSRWRLPVDFMATRMILSSFYIYLLFL

SEQ ID NO: 217444 - protein, 141 aa, Zea mays
  Clone ID: MRT4577_12990C.1.pep
HIKNPVPGRAAACRTKLKQTEVDCEHLKRCCEKLTGENRRLHKELAELRALKAVRPLLHMHLPATTLSMCPSCERVASTSSVAPAAPAPASPSPAAGIAASAPDPEQRPSSFAALFSSSPRNRALAAQAQRQPRPQAPGGS

SEQ ID NO: 217445 - protein, 76 aa, Zea mays
  Clone ID: MRT4577_129910C.1.pep
GAGRGDGWVHHEVCHGLAWRDWTGGRITSAGAPCEASCSRGQPIRPPHLRSAVTSHLKIILVPGISSPRSRAGTTG

SEQ ID NO: 217446 - protein, 73 aa, Zea mays
  Clone ID: MRT4577_129911C.1.pep
VDAVIVYIRAQIPCPRVISVSRSVGPTKSGGKGYLCLLSFELCMSFWHFTIPMSSSYVWQFHPIRRFFSWQNS

SEQ ID NO: 217447 - protein, 119 aa, Zea mays
  Clone ID: MRT4577_129912C.1.pep
ELLLQAEGAYPAAGDRLRGAGVGRPVRVLAAVLDSVQRRRRRRRGAVVLVPRARRGHGRRVRSLLLPHGCSSPAGNTLSAACFLAGGTHGRARTGNGKEDTSLAFSYTAAMRSMEKLGR

SEQ ID NO: 217448 - protein, 80 aa, Zea mays
  unsure (1)..(80): unsure at all Xaa locations
  Clone ID: MRT4577_129913C.1.pep
HAPDDGGLEQNXGKEERRQKNQLSVSASKMXGQNRGEYLAAQGDRYTKTKKSTYTGWEXGRIKEREIPNEGLELGNKNDK

SEQ ID NO: 217449 - protein, 41 aa, Zea mays
  Clone ID: MRT4577_129914C.1.pep
KLHFPFLVQVETTGNFYNIFLFIRTGLRHQLINCCFCNRRA

SEQ ID NO: 217450 - protein, 105 aa, Zea mays
  Clone ID: MRT4577_129915C.1.pep
KENAPMGQNERGVSGKPLSWKKKTTAWTQNSTKPPKGHGRTSLSFFFKHTTKPQGHLPGGGFFPTVGPLARGNMQGSTKIRRQLNMGKTGQPRAPHQRGDKYGSY

SEQ ID NO: 217451 - protein, 97 aa, Zea mays
  Clone ID: MRT4577_129916C.1.pep
PASAQRPAYVFSYTECHLHIKKVGYAVQTHGCMSYSFEAGRCTAFCRQHCLREPTDLLHWSPDSFVPYNRKTAPIREKDMLGNSLSSSTYSLLVRNH

SEQ ID NO: 217452 - protein, 104 aa, Zea mays
  Clone ID: MRT4577_129917C.1.pep
TETGGASDSDSSSPHRPKQSKYLLKNRLNLRRFDYYTLSTYYQTAKRYLPDYPAGDERHLLFDYSNFYSSKTFFDPMKLTMFLWGWVNKSDISAYIVAKGWAGI

SEQ ID NO: 217453 - protein, 51 aa, Zea mays
  Clone ID: MRT4577_129918C.1.pep
KSAYCVPLTPKLSKSKLILSFYICSTLWHFYHDHKFCSGLYNTLGVNPSCI

SEQ ID NO: 217454 - protein, 45 aa, Zea mays
  Clone ID: MRT4577_129919C.1.pep
ERKRSKEDQVQPKTVKGRRKKKKKGGRRLVSSSTRELIPDRYLQA

SEQ ID NO: 217455 - protein, 51 aa, Zea mays
  Clone ID: MRT4577_12991C.1.pep
RWYTMVISFTDEYFSNKCSTYDVPLLQLMINTRSSTPRQLPSTITRSDNDG

SEQ ID NO: 217456 - protein, 109 aa, Zea mays
  Clone ID: MRT4577_129920C.1.pep
MGDDDYNKIDMRYEDDPTEPEIEEGAEEKPDNNEDAPNDVISGEVEHNEQEKTKHQRKTANHITKYERARILRSRAFAISMKAPVPAELEGETELMESVMKELTAPMIL

SEQ ID NO: 217457 - protein, 67 aa, Zea mays
  Clone ID: MRT4577_129921C.1.pep
IGEHKGGGASSGTCYADLSVICSLCGGDRQFVSSSVGIQYLLVNRTHAYYSWHRNHDGAKVVADGVW

SEQ ID NO: 217458 - protein, 52 aa, Zea mays
  Clone ID: MRT4577_129922C.1.pep
RQPEFQGPCCSILTNVRGTQRHSGSKMPESSKQLINPQNSLETPRNIFPCST

SEQ ID NO: 217459 - protein, 86 aa, Zea mays
  Clone ID: MRT4577_129923C.1.pep
GHGLHGYADVGVHLLQHVQDVDHVRHHAVDGILLHVLLAVVHAGGSGCEQQLLVVWLHLALGVIGIIVSGRIIILRVFIGFLCDLE

SEQ ID NO: 217460 - protein, 78 aa, Zea mays
  Clone ID: MRT4577_129924C.1.pep
PRNIEKARLPRTGTYGHERTSARLKYEHGIFKPAGANFFTGHAGQTCLGFQLTLFFLDRKLQGTKPPAGGHLSKRVEP

SEQ ID NO: 217461 - protein, 68 aa, Zea mays
  unsure (1)..(68): unsure at all Xaa locations
  Clone ID: MRT4577_129925C.1.pep
GGRVSXPRTAAILNAYIPGHDTKGASHSRGSNSRLLPSRRHSMITPSGVLTTPTNLQGTPQSADYTPG

SEQ ID NO: 217462 - protein, 133 aa, Zea mays
  Clone ID: MRT4577_129926C.1.pep
PPSQGPCLTKTPSPFFPFPRFSSPRRCLPAQPPPPLWPPPPPGPPPPQPGQPRRPPERGRTPPTKLSSPPALRGGGQDFAPAPGPARGVEWWCIALGYLLPPLVLDPGLRQSPPVFNFCPLFFFSLFFLCGFA

SEQ ID NO: 217463 - protein, 53 aa, Zea mays
  Clone ID: MRT4577_129927C.1.pep
GMGSSLDHRVGDHQGLEVKFHYVRCLLSQLTLSLLVLIRGVIELRVSTPSLRD

SEQ ID NO: 217464 - protein, 46 aa, Zea mays
  Clone ID: MRT4577_129928C.1.pep
FYSGFGLHFFFGCLPGIHGSKGSPVFGPFFSVLWFSLKLAPRRLDP

SEQ ID NO: 217465 - protein, 535 aa, Zea mays
  Clone ID: MRT4577_129929C.1.pep
MALDLAIGGSAARRAETQTLAPVLLMGPPPPPPIPPMTGLYFAGPPTPGALLPLPIPVALPHEVIMYMDECRSRSLLKFISNAGIEPSLEDERRRERVVRELGKIVMDWARRVAYEQGKQHWITSATVLTFGSYALGAYGPEFDIDVLCIGPYIASLQHHFFVVLRQMLEGRPEVSELHSIEGAKVPLMRFKFNGILVDFPYVQLPVINAAEAMHAFDPHVLENVDGPSWRCLSGVRANRQIIQLVPNMKKFQYLLRCLKLWARKRGLHCHLLGFFAGIHLAILAAYVCRRHPNASINTLLSLFFDIFVHWPWPLPVSLLDPPVPCRGPDGCSLMPIMLPCIPPEFCSSSTTESTFSKIKEELWRGYALSKDTRSTDFNWSWLFAPFPYGARYKCFLRIVLSAPMGEELRDWVGWVKSRFRNLLLKLESLGVYCDPDPSEQVDHTITDPNVVFFWGLIYRRNIQICISSLKEDFMKSVCNNIYGKEKCAHSDITMSIVGPPQLPKSVFDLSVYSEKLPQHMMGHQLMKQNYNAVS

SEQ ID NO: 217466 - protein, 87 aa, Zea mays
  Clone ID: MRT4577_12992C.1.pep
SDPRVPVGQGGRPVPPQQHVIGNDFIGKHLSTALVLLGYDPTVDITGTCYGFSLNLQSSGCKGLKIKCVISLDHNGPGQFFCLHDCP

SEQ ID NO: 217467 - protein, 55 aa, Zea mays
  Clone ID: MRT4577_129930C.1.pep
DGGTGAYHYGSDDGAPRRTLSYLLTEIATLIETKTVLDTVKPCRYSYTISSLHLA

SEQ ID NO: 217468 - protein, 101 aa, Zea mays
  Clone ID: MRT4577_129931C.1.pep
MGRICCYCYVYTHSTQQSCHNCGHGICDNCEHDGQDSLRVSSARGNNELETRLIAYGKDDKTAMPPSALFLQEEKAYTLPIPAGITEEDNILQKSYIHPFV

SEQ ID NO: 217469 - protein, 514 aa, Zea mays
  Clone ID: MRT4577_129932C.1.pep
MVLDHAIRGSAARRAETQTLAPVLLMGPPPPPPIPPTTGMYLPGPPPPGTLLPHPMHMALPREVIIYMDECRSRSLLKFISDAGIVPSLEDERRRERVVRELGKIVMDWAKRVAYEQGNRHWIASATVLTFGSYALGAYGPESDIDVLCIGPCIASLQHHFFVVLRQMLEGRPEVSELHSIEGAKVPLMRFKFNGILVDFPYVQLPVINAAEAMHAFDPHVLENVDGPSWRCLSGVRANRQIIQLVPNMKKFQYLLRCLKLWARKRGLHCHLLGFFAGIHLAILAAYVCRRHPNASINTLLSLFFDIFVHWPWPLPDTRSTDFNWSWLFAPFPYGARYKCFLRIVLSAPMGEELRDWVGWVKSRFRNLLLKVISSFLWACMLFFSTFLGCVDVDVDLELSNDVLQLESLGVYCDPDPSEQVDHTITDPNVVFFWGLIYRRNIQICISSLKEDFMKSVCNNIYGKEKCAHSDITMSIVGPPQLPKSVFDLSVYSEKLPQHMMGHQLMKQNYNAVS

SEQ ID NO: 217470 - protein, 56 aa, Zea mays
  Clone ID: MRT4577_129933C.1.pep
PGNVAGHPACYDPHSPHSLLVMVIAYLHPWAEHFSLWPVRLDLGVIKLITTHWDTV

SEQ ID NO: 217471 - protein, 98 aa, Zea mays
  Clone ID: MRT4577_129934C.1.pep
ESLDSRTQFFYSLKNKSGSNRSKTLAFAYWPGIYSFHSWPPYQPQHLCPEAALTGSNLHISAAEYKHYIYSLHTAIPYLPLTRTVRNEIPLSANRTRG

SEQ ID NO: 217472 - protein, 172 aa, Zea mays
  unsure (1)..(172): unsure at all Xaa locations
  Clone ID: MRT4577_129935C.1.pep
VHASADAWVQKFQYLLRCLKLWARKRGLHCHLLGFFAGIHLAILAAYVCRRHPNASINTLLSLFFDIFVHWPWPLPASLLDPPVPCRGPDGCSLMPIMLPCIPPEFCSSSTTESTFSKIKEELWRGYALSKDTRSTDITGVGSLHLLHMVRXYTCFLRIVLSAPMGEELRDW

SEQ ID NO: 217473 - protein, 45 aa, Zea mays
  unsure (1)..(45): unsure at all Xaa locations
  Clone ID: MRT4577_129936C.1.pep
WSLSSXXRLAYVSSLCASSEFPTNLSCLIKARDASIEILQKSWYA

SEQ ID NO: 217474 - protein, 120 aa, Zea mays
  unsure (1)..(120): unsure at all Xaa locations
  Clone ID: MRT4577_129937C.1.pep
SFQDKARHCAPCVQYGDEPDSIAAQRGRIVADAGGACDGPAIQLLTEIDGLNAKKTXVILLXATNKPXMIHPCLHGPVRFDQHIYIPLPYHASRLHILKGMIKEIAQYKDXDLNALPKYT

SEQ ID NO: 217475 - protein, 86 aa, Zea mays
  Clone ID: MRT4577_129938C.1.pep
SQRPVSQKNGALLLRYGFSINSKRYKSLFQEVLSCSTCSCPCVSSLPVCNPFPLMWCPQPCGSISPWVFNPTGVILTCGNFPPLST

SEQ ID NO: 217476 - protein, 119 aa, Zea mays
  Clone ID: MRT4577_129939C.1.pep
HKLVEESLDGIIILIGFHTGFSSARTLDMKVYMNKALHTALTTYLNTYTHSVTPCILTVIQKRLVDMFYDILYDPTHIPTYKLAFNLAYHHKFQDEIQEVNLEAFLIAFTITQTVTKPV

SEQ ID NO: 217477 - protein, 127 aa, Zea mays
  Clone ID: MRT4577_12993C.1.pep
NLLSATKDEHLHQLAVGDAASRRRKRLGCPFLGAYEAMARLWVVVVLLCPLERLPARVGSGLDTLVLFLMLGAVIAKHNMAWRAIDYEVRDQNGFNCIIVKRIREVHSKSVVTKNSKREKILDQPLR

SEQ ID NO: 217478 - protein, 115 aa, Zea mays
  Clone ID: MRT4577_129940C.1.pep
NSHPLGRSCPYATFESIVFLSGIRTSAALLYGSHTDPTCINMDVCAGSRVVDTVLQSRRSRSTQWWFDLGWSLSAWTIARARPGRGRGSRPCPGWAIPLRCRRKQCALSIIIRTV

SEQ ID NO: 217479 - protein, 47 aa, Zea mays
  Clone ID: MRT4577_129941C.1.pep
VFKHLLNLSKGHEFKEKKAYVHLLVVGLQTPKKFSNQVLLFQMNDPL

SEQ ID NO: 217480 - protein, 96 aa, Zea mays
  Clone ID: MRT4577_129942C.1.pep
AALVGGVAAAGGVDGGQLHGRATRRGGTRTRTTQRGRRTTKPSTKQNDSSPSTKHLSRHVAHPQHPGDDNCDKTKTMSRYSKTNTYDAPTNDRDEE

SEQ ID NO: 217481 - protein, 566 aa, Zea mays
  Clone ID: MRT4577_129943C.1.pep
PNKNKEKLAQCNSKTALAFRVRDECFQPHIDDRSGINMIHNVAYNCGSDFSRLDFSGFYAFILERGDEVIAAASVRIHGTDLAEMPFIGTRGMYRHQGMCRRLLNGIESALGSLSVQKLVVSAVTEMENTWTTGFGFKPVAPSKKQRMKSLNLLIMNGTGLLEKRLLPTQTVDGQITTKTANAVGSDKMDAKMLGEASGSVTPIHVSSEPDASDNHEINRHESPHPLGNSAGLTLDQSPAADENEAKITTERTPPVSIGDAKTVKVNTLPGATCGVNLQCMVEAENIQQEKYKETNGRLIAENTISEQKCEDRSNSSRSNSCATPVTVDQCSHLSNEIGKGDNCLSSELSVGAAPITGKTESSLTSVHCANQEDEKAYAAPVDTKIPLVIMDEKPDKHEFKTMVVGCSQGSMEPKSLENRTSIVNGTSMDAYRDKSTNEDHSASAVDTGVSVKLYAQQMETIEEKTGSVLPDSGHSSSCKDVLVTLTESKPLKNDMLETDDAIIKVGMTGQSFNEAGITAPALNISDPVGENVVKPTQTCGEGQLRGEDVIYSNNVMEDDLTSRAC

SEQ ID NO: 217482 - protein, 73 aa, Zea mays
  Clone ID: MRT4577_129944C.1.pep
PVFMYSTLGTGGKLIRNGTKCKLKITGCLVYCLNRNNATVQGPKVDLFSQFSTGLSKPKNSIVSYLANSGNSR

SEQ ID NO: 217483 - protein, 129 aa, Zea mays
  Clone ID: MRT4577_129945C.1.pep
MKITVSSAVDTGVSVKLYAQQMETIEEKTGSVLPDSEHSSSCKDVLVTLTESKPLKNDMLETDDAIIKVGMTGQSFNEAGITAPALNISDPVGENVVKPTQTCGEGQLRGEDVIYSNNVMEDDLTSRAC

SEQ ID NO: 217484 - protein, 89 aa, Zea mays
  unsure (1)..(89): unsure at all Xaa locations
  Clone ID: MRT4577_129946C.1.pep
TPPPAPSPCFSASPSACSWPPRSRRCSAPPPSAWAAPPPTASPWPSSPCAPXASADAXPSPRGSPPVSTPASSAPTRSAAASPSLPCPC

SEQ ID NO: 217485 - protein, 66 aa, Zea mays
  Clone ID: MRT4577_129947C.1.pep
LRPTSNIVFLFFVPTISSERLCLLMLATSLCTCCYGYHFPLMQASSYTFRFYRIHTITMWIGVIKP

SEQ ID NO: 217486 - protein, 38 aa, Zea mays
  Clone ID: MRT4577_129948C.1.pep
DSDVSLYAFKIGVGVVSYVHIQYVQYLVAAPQQCSPLR

SEQ ID NO: 217487 - protein, 66 aa, Zea mays
  Clone ID: MRT4577_129949C.1.pep
EGFVSELWDVLAAALQDVVAGSWPECQASQGRGSCSPRLGSLGSSRRLPGGGSFGVPRRAFKMGSP

SEQ ID NO: 217488 - protein, 55 aa, Zea mays
  Clone ID: MRT4577_12994C.1.pep
VCGLLRHGRVCPPQQQQCVARIHSKNVLDNAESVEGASHKKKTPHIQGRPPTRGL

SEQ ID NO: 217489 - protein, 77 aa, Zea mays
  Clone ID: MRT4577_129950C.1.pep
EPSNIEVSKEKFQCLRRGCWLNDEVINLYLELLKEREKREPNRFLKCHFFNTFFYKKLACGKNGYDYKSVKRWTSQR

SEQ ID NO: 217490 - protein, 122 aa, Zea mays
  Clone ID: MRT4577_129951C.1.pep
MVKKRASNGRNKKGRGHVKPIRCSNCSRCTPKDKAIKRFTIRNMVESAAIRDISDASVFPEYTVPKMYLKLQYCVSCAIHGKIVRVRSREGRRNRAPPPRVRYNKDGKKINPNQAAAKTTTA

SEQ ID NO: 217491 - protein, 51 aa, Zea mays
  Clone ID: MRT4577_129952C.1.pep
AAPYLTRLPPLRGPSSSVLDQHSPPPRPLPPPPHPRLDPLARAAHKYPTAP

SEQ ID NO: 217492 - protein, 217 aa, Zea mays
  Clone ID: MRT4577_129953C.1.pep
MRAMAEVMQEGCVENRQPLAASSSSVSDGSSCGGGERAGTSPPVSSSGNSISVLRRTSGPIRRTKGGWTLKEDETLRKAVEAFKGRNWKKIAEFFQDRTEVQCLHRWQKVLNPELIKGPWTQEEDEKIIDLVRKYGPTKWSIIAKSLPGRIGKQCRERWHNHLNPEIRKDAWTPEEERALIDAHQVFGNKWAEIAKVLPGRTDNSIKNHWNSSLEKK

SEQ ID NO: 217493 - protein, 131 aa, Zea mays
  Clone ID: MRT4577_129954C.1.pep
LSEDGKHYIVNGEKKWITNGIWSDYFTVAVRTGGEGMNGISVLLIERENGGVSTRRMDCQGVWSSGTTYITFEDTKVPGENLIGKENQGFKVIMTNFNHERIGIVIQSLRFSRVCYEESVKYANKRPTLAR

SEQ ID NO: 217494 - protein, 78 aa, Zea mays
  Clone ID: MRT4577_129955C.1.pep
YPLNNPRGETERERYEIKFKPKEENNTKPPTQFRTESPPVDLAIRHISLADAIALESVTGNPATICYEGLPSSRIDAS

SEQ ID NO: 217495 - protein, 155 aa, Zea mays
  unsure (1)..(155): unsure at all Xaa locations
  Clone ID: MRT4577_129956C.1.pep
ATRPALVIAVAGISLPSSWGIXTPFVLKHTDPGGLPTARFLVCMGVALSITAFPVLARILAELKLLTTDLGRMAMSAAAVNDVVAWILLALAIALSGTGSPPVSLWVLLAGTGFVLAAFLLLRPGLTWMARXSSEGEPVKELYICTTLAIVLAAG

SEQ ID NO: 217496 - protein, 169 aa, Zea mays
  unsure (1)..(169): unsure at all Xaa locations
  Clone ID: MRT4577_129957C.1.pep
MAAAPAVRFPVFGLVRLLGLAAAAAILFWAVHFRGGMALSTEEESKLPLFNVHPVLMLIGLVALNGEXWAAGFWTFWYPGGSRSGRAFLLPWHVFFGIFIYVLAIATSVTGLLEKSIFMQSAKMIERFSTEAMFMNSLGMLLVLLSSLVILALVSPGPSMIDTYRGSSE

SEQ ID NO: 217497 - protein, 191 aa, Zea mays
  unsure (1)..(191): unsure at all Xaa locations
  Clone ID: MRT4577_129958C.1.pep
MAAAPAVRFPVFGLVRLLGLAAAAAILFWAVHFRGGMALSTEEESKLPLFNVHPVLMLIGLVAMNGEALLAYKTVPGTKKLKKLVHLAVQFLAMFLSLIGLWAVWKFHDERKIDHLYTLHSXWAAGFWTFWYPGGSRSGRAFLLPWHAFFGIFIYVLAIATSVTGLLEKXIFMQSAKMIERFSTEAMFMNS

SEQ ID NO: 217498 - protein, 192 aa, Zea mays
  unsure (1)..(192): unsure at all Xaa locations
  Clone ID: MRT4577_129959C.1.pep
EVSKCLLLLTAARNHLAVHTGLMRHLARTNNERYLKQPLTTYSPQSSERRRKLRYYTRSXAREPNQNGLXVAAHSEIPHKGXVPXCTSPFERPTTYRATKVEGAXNEDGIRDKATEXTSCHKHAQRILDGSRSDIEWNXYHMYEKDVRWCKEMLMDAHKXSIYWCRXLCEPQLKERGINPDGLLHYINHINL

SEQ ID NO: 217499 - protein, 72 aa, Zea mays
  Clone ID: MRT4577_12995C.1.pep
RARPDDANPSARPPGADQKARNGREPAVKRERSTTHGTTRGARAKRTREPKGEDGESSRRAGAGHRTQAEQA

SEQ ID NO: 217500 - protein, 235 aa, Zea mays
  Clone ID: MRT4577_129960C.1.pep
MAAAPAVRFPVFGLVRLLGLAAAAAILFWAVHFRGGMALSTEEESKLPLFNVHPVLMLIGLVALNGEALLAYKTVPGTKKLKKLVHLAVQFLAMFLSLIGLWAVWKFHDERKIDHLYTLHSWLGLTCFIFFSLQWAAGFWTFWYPGGSRSGRAFLLPWHVFFGIFIYVLAIATSVTGLLEKSIFMQSAKMIERFSTEAMFMNSLGMLLVLLSSLVILALVSPGPSMIDTYRGSSE

SEQ ID NO: 217501 - protein, 56 aa, Zea mays
  Clone ID: MRT4577_129961C.1.pep
TQGPPTEFRVNLTFVLFFGFGFFNIQRNIFFSAPVPGEYINFFFYKKGFPETFFTV

SEQ ID NO: 217502 - protein, 61 aa, Zea mays
  Clone ID: MRT4577_129962C.1.pep
SSKRPELDCTHIYLSEKFLVTLRSIDVKKKEKKKKEKIKKKKKKKGGKHKRRENISGGSSK

SEQ ID NO: 217503 - protein, 87 aa, Zea mays
  Clone ID: MRT4577_129963C.1.pep
MGPWPSNLFSEFTFTLCLWPFCRYVAPEYAMTGHLLVKSDVYSYGVVLLELLTGRRPVDMSQPSGQENLVTWVTLLSFRSILSSVPV

SEQ ID NO: 217504 - protein, 39 aa, Zea mays
  Clone ID: MRT4577_129964C.1.pep
SRYFYHVHTLKQKEDARVKLVQRVIAQEEEEDLNWEGDD

SEQ ID NO: 217505 - protein, 34 aa, Zea mays
  Clone ID: MRT4577_129965C.1.pep
MEFAKANAQVPYPGVFKEAPPKTFPALGDSLLKN

SEQ ID NO: 217506 - protein, 130 aa, Zea mays
  Clone ID: MRT4577_129966C.1.pep
PCDRLPSWRRRRIRRVHCGVWCRVRLARRSQPPEARRWQACRRYGEACCARLSPLQSFLCRSTPTTLLTACVCLSPASDRCCRLAAAASRLCLPSVLGSPFCPALHVRCRHLSARLLLSRFVGSPEFPAG

SEQ ID NO: 217507 - protein, 138 aa, Zea mays
  unsure (1)..(138): unsure at all Xaa locations
  Clone ID: MRT4577_129967C.1.pep
THSSAWGRGGXRSHTLHGSGNGSKSRCYRSSRLAKLVDYLHSLNENTDELDVHLILLSLDKQITPSLQQPHLCCRPTLSVKHLCEYVAHQTPLLVEEVEILAIKGSCSTVCDKSFDETSFSDELTTLGIDPSQDELET

SEQ ID NO: 217508 - protein, 69 aa, Zea mays
  Clone ID: MRT4577_129968C.1.pep
LRRTSFHCYFGWLYTSPWVLFRWLKNIVSSPTFLVWGDLPKNLLTPPLCGHLLGCPTSGFRPRAEFRAS

SEQ ID NO: 217509 - protein, 48 aa, Zea mays
  Clone ID: MRT4577_129969C.1.pep
LEIGFLLFQDAGIIDLLQICADGLGFTTPIPKLSWLFLVYSFAMHLDI

SEQ ID NO: 217510 - protein, 53 aa, Zea mays
  Clone ID: MRT4577_12996C.1.pep
KTLKRPSFRGFLRPKKHNNFGQFLALKNQFHALKLLRGVSPLKKKICFRKTAG

SEQ ID NO: 217511 - protein, 217 aa, Zea mays
  Clone ID: MRT4577_129970C.1.pep
KVSSLEKERQHLQSTVKALQEEKKLLRNIPVNEKATTTVEKPWVDKRDASTATEDLDIGENSSSETLTSTVDTWEDAGISVLRSNIMSDFSSLEEVSSSIPDDQLRMIDNINSLMSELVVEREALLRALRIESSNCSKLKELNKDLTQKLEIQTQRLELLTSQRMANENALAKPIDTRSINDATMYADEGDEVVERVLGWIMKLFPGGPKRRTSKLL

SEQ ID NO: 217512 - protein, 471 aa, Zea mays
  unsure (1)..(471): unsure at all Xaa locations
  Clone ID: MRT4577_129971C.1.pep
MAVAVPNAPGRLFLLQSTPFPNPSSSASAARAQXPSAYHPXRLSLFRRMAGRSLTVIAGASGGSERDLSASAVSVEALDSVASDSDLETKEPSVSTMLTSFENSFDKYGALSTPLYQTATFKQPSATDYGTYDYTRSGNPTRDVLQSLMAKLEKADQAFCFTSGMAALAAVTHLLQAGQEIVAGEDIYGGSDRLLSQVVPRNGIVVKRVDTTKISDVVSAIGPSTRLVWLESPTNPRQQITDIKTISEIAHSHGALVLVDNSIMSPVLSRPIELGADIVMHSATKFIAGHSDLMAGILAVKGESLAKEVGFLQNAEGSGLAPFDCWLCLRGIKTMALRVEKQQANAQKIAEFLASHPRVKQVNYAGLPDHPGRALHYSQAKGAGSVLSFLTGSLALSKHVVETTKYFSVTVSFGSVKSLISLPCFMSHASIPASVREERGLTDDLVRISVGIEDVEDLIADLDRALRTGPV

SEQ ID NO: 217513 - protein, 55 aa, Zea mays
  Clone ID: MRT4577_129972C.1.pep
SHSQAQAEALLISKQHKDTQTQCYVLRVHTPVFLFAMNQQWQCLVVSRVFQHFFY

SEQ ID NO: 217514 - protein, 56 aa, Zea mays
  Clone ID: MRT4577_129973C.1.pep
PTRPPTRPASLGAYLLNKNVLTMSFAPRDNHEAQVQFALERGVPAYIGVLGSIKLP

SEQ ID NO: 217515 - protein, 91 aa, Zea mays
  Clone ID: MRT4577_129974C.1.pep
GPSAGPPLRCSILRSPMILWSAASQLIEQADERPLIRTTYAQRLEVTLNDRYQRPRRFPPLSASRPMQSSIWQTALWACQADSYRRPSLMC

SEQ ID NO: 217516 - protein, 49 aa, Zea mays
  Clone ID: MRT4577_129975C.1.pep
RVGTDFFYNKKRTKVLPTDYFHQLSGTTQTNFGNNVTQGGSGPMGAHAW

SEQ ID NO: 217517 - protein, 35 aa, Zea mays
  Clone ID: MRT4577_129976C.1.pep
TRVLHERGHVTAVKVRHHKLGETNEPGMDRINDDL

SEQ ID NO: 217518 - protein, 41 aa, Zea mays
  unsure (1)..(41): unsure at all Xaa locations
  Clone ID: MRT4577_129977C.1.pep
SFLVNQSTKSLYCDDGYITDIHSSIHASAHASAHALXTRGG

SEQ ID NO: 217519 - protein, 75 aa, Zea mays
  Clone ID: MRT4577_129978C.1.pep
SVACRVDEWSFSPASDTADARYGGMWDPLGVFAVSFGQSVARPMHHEVQSQGGRYGSFLLALWSPLAFCVVSADA

SEQ ID NO: 217520 - protein, 645 aa, Zea mays
  unsure (1)..(645): unsure at all Xaa locations
  Clone ID: MRT4577_129979C.1.pep
MSEYDERYQGNGDMPAAEGGYPQAEYAAAAAPAAGGSPPADSKPSGFSDHADGRSSQHQHETQSHDSGSSKSRERDRERDKGKDRERDRDRGREKGRDRDRDKDRERSDRDRDRHHRDHRERSEKREHRDRSDDRDRHRDGRDRHRDDRDSERRRDRDRDGHRRHRSRSPSKSRDRDRRSRSRSRSRSKSKRVSGFDQAPPQHALPIVAAGAIPGQLPGITAPIPGVGVLPNLYNLAAGQFNPLVIQPQAMTQQATRHARRVYVGGLPPTANEQTVAIFFNGVMAAIGGNTAGPGDAVLNVYINHDKKFAFVEMRSVEEASNAMALDGIMFEGAPVKVRRPTDYNPSLAAALGPSQPNPNLNLAAVGLTPGSAGGLEGPDRIFVGGLPYYFTEAQVRELLESFGPLRGFDLVKDRETGNSKGYAFCVYQDLNVTDIACAALNGIKMGDKTLTVRRANQGASQPRPEQESILLQAQQQVQMQKLVYQVGGALPTKVVCLTQVVTADELRDDEEYNDIVEDMREEGRKYVPHNAIAECFXPTLCNIGNRALTHRRHYSFEFXNHYIISLLPIYLYSLTLXGNLVKVVIPRPDPSDAPVAGVGKVFLEYADVEGSTKAKTGMHGRKFGGNQVVAVFYPEDKFAAEQYD

SEQ ID NO: 217521 - protein, 70 aa, Zea mays
  Clone ID: MRT4577_12997C.1.pep
RKKALNFVGNHEPGRPTFKGEGKKGSHPIPQNGNQNDIHIHPRAFRLLGRSRVLFEDPLGAHKDPGQKLS

SEQ ID NO: 217522 - protein, 424 aa, Zea mays
  unsure (1)..(424): unsure at all Xaa locations
  Clone ID: MRT4577_129980C.1.pep
CQLPGVTAPIPGVGVLPNLYNLAAGQPQAMTQQATRHARRVYVGGLPPTANEQTVAIFFNGVMAAIGGNTAGPGDAVLNVYINHDKKFAFVEMRSVEEASNAMVLDGIMFEGAPVKIRRPTDYNPSLAAALGPSQPNPNLNLAAVGLTPGSAGGLEGPDRIFVGGLPYYFTEAQVRELLESFGPLRGFDLVKDRETGNSKGYAFCVYQDLNVTDIACAALNGIKMGDKTLTVRRANQGASQPRPEQESILLQAQQQVQMQKLVYQVGGALPTKVVCLTQVVTADELRDDEEYNDIVEDMREEGRKYVPHNAIAECFXSDPMQYWQSGXPTEDTILLSLINHYIISLLPIYLYSLTXTGNLVKVVIPRPDPSDAPVAGVGKVFLEYADVEGSTKAKTGMHGRKFGGNQVVAVFYPEDKFAAEQYD

SEQ ID NO: 217523 - protein, 195 aa, Zea mays
  Clone ID: MRT4577_129981C.1.pep
TLPQRHVNNLTSVAALPCCSLSFPCSCSPCPSGSCIQWSWALDHERSTWEETSAVHIQSLFLCFFSLFSLLFVRSGQFAVRRSVGWQWLVDRLASFSTCAGPSFLIWFGPTPRLTVAEPELVREIFLTRAEAFDRYEAHPVVRQLEGDGLVSLHGDKWALHRRVLTDAFYPDNLNRLVPHVGRSVAALAAKWNAM

SEQ ID NO: 217524 - protein, 61 aa, Zea mays
  unsure (1)..(61): unsure at all Xaa locations
  Clone ID: MRT4577_129982C.1.pep
PQEEMPRRHQRPWAAAQSVLTSISSSISSLMKDFKMPVAAAIVHSRQSPLTRXRMCIWTCM

SEQ ID NO: 217525 - protein, 61 aa, Zea mays
  Clone ID: MRT4577_129983C.1.pep
LPHAPFIVYVGGLPPTGNEQTVAIFFNGVMAAIGGNTAGPGDAVLNVYINHDKKFAFVEMN

SEQ ID NO: 217526 - protein, 53 aa, Zea mays
  Clone ID: MRT4577_129984C.1.pep
NAGCIPSKALHNNSHLYHQILDDTKGRGIEVDDVKLNLPAMMNAKESSVSGHT

SEQ ID NO: 217527 - protein, 676 aa, Zea mays
  unsure (1)..(676): unsure at all Xaa locations
  Clone ID: MRT4577_129985C.1.pep
MSEYDERYQGNGDMPAAEGGYPQAEYAAAAAPAAGGSPPADSKPSGFSDHADGRSSQHQHETQSHDSGSSKSRERDRERDKGKDRERDRDRGREKGRDRDRDKDRERSDRDRDRDRHHRDHRERSEKREHRDRSDDRDRHRDGRDRHRDDRDSERRRDRDRDGHRRHRSRSPSKSRDRDRRSRSRSRSRSKSKRVSGFDQAPPQHALPIVAAGAIPEGNLGPLCHLLPXIELTAVALMYEDTIWFGQLPGITAPIPGVGVLPNLYNLAAGQFNPLVIQPQAMTQQATRHARRVYVGGLPPTANEQTVAIFFNGVMAAIGGNTAGPGDAVLNVYINHDKKFAFVEMRSVEEASNAMALDGIMFEGAPVKVRRPTDYNPSLAAALGPSQPNPNLNLAAVGLTPGSAGGLEGPDRIFVGGLPYYFTEAQVRELLESFGPLRGFDLVKDRETGNSKGYAFCVYQDLNVTDIACAALNGIKMGDKTLTVRRANQGASQPRPEQESILLQAQQQVQMQKLVYQVGGALPTKVVCLTQVVTADELRDDEEYNDIVEDMREEGRKYVPHNAIAECFXPTLCNIGNRALTHRRHYSFEFXNHYIISLLPIYLLTNTWTGNLVKVVIPRPDPSDAPVAGVGKVFLEYADVEGSTKAKTGMHGRKFGGNQVVAVFYPEDKFAAEQYD

SEQ ID NO: 217528 - protein, 213 aa, Zea mays
  Clone ID: MRT4577_129986C.1.pep
RPGRTLCRSLSFSLRVALSSPASAFLLQLRCRGALRTVVLLSLLVLPSSSPDRATPWSSLQFSSITPCPGLRSCVARLARRCSGRGFLLQLRSAKSSAPPARCPSLCPPMESPGQAVLDLASAPSFPPSSPSALVSKSPRLTSPNSAAPALRRTPCSPPMPPQPPTPTTPAPPLVAVSDQPSKIHRVGAMSVLDAGPALRVCRIWDRSGSQDL

SEQ ID NO: 217529 - protein, 152 aa, Zea mays
  Clone ID: MRT4577_129987C.1.pep
TITEPEGKMAPSLRHRKNMVQDKNPSQDTVQKGGHTAVLENVSYDKDVVEIEPADAIDSAHYGGSFVKDVCVDEGTRTASEENPLDRRSSPNFSRQVIGADSDIGYEKKGCSRVSVHGLKTRVVSPVGFASHCNGKSVVLKMGSMLQQANLA

SEQ ID NO: 217530 - protein, 199 aa, Zea mays
  Clone ID: MRT4577_129988C.1.pep
VRELLESFGPLRGFDLPTRRETGNSKGYAFCVYQDLNVTDIACAALNGIKMGDKTLTVRRANQGASQPRPEQESILLQAQQQVQMQKLVYQVGGALPTKVVCLTQVVTADELRDDEEYNDIVEDMREEGRKYGNLVKVVIPRPDPSDAPVAGVGKVFLEYADVEGSTKAKTGMHGRKFGGNQVVAVFYPEDKFAAEQYD

SEQ ID NO: 217531 - protein, 187 aa, Zea mays
  Clone ID: MRT4577_129989C.1.pep
KVPPPKKTSQFKGGPPPPLRNRGCFFCSPPPFLKIPSPFRKGPPGFHFLSPTPSPPSKKRPLQRPPLGGKILPRRGPEIFLWGGRRPKVFLPGRGPQKVFLQKRGGPLFLPGGIKTASIFLGLSKIQKTFFCFPEFLLKRGGLFPFWAPPDRGFFFFVPLAPQGLFFFLKKLGPGKRGGEPFPFWGP

SEQ ID NO: 217532 - protein, 114 aa, Zea mays
  unsure (1)..(114): unsure at all Xaa locations
  Clone ID: MRT4577_12998C.1.pep
LKNVFPRFLLWAGSCVSGSLRFVLPWSAARGRYRVREGLLVRGHGGXXXXXLXRXRPPLSAGGARCDENETGREVSGVVDWVAHGAARPDGRTGGGGGMETARARRDWXGGGNV

SEQ ID NO: 217533 - protein, 74 aa, Zea mays
  Clone ID: MRT4577_129990C.1.pep
KVNSFFPQITNIFPYFSTKFKFNSQYKNFCFPPNSGPKSPGWTPGSQKKNKNIFPKKNKKKLKTKKKNKKKKKK

SEQ ID NO: 217534 - protein, 33 aa, Zea mays
  Clone ID: MRT4577_129991C.1.pep
SWTKSTTCTSAFFSAAIAAETSMNQFRGLCGPA

SEQ ID NO: 217535 - protein, 87 aa, Zea mays
  Clone ID: MRT4577_129992C.1.pep
GACSYGGWWRGFCVRIRTPNAYLLNRGGMGTIPSTCTATTCNLKKKDSWNIAGAKYRLLLGPKGHHEQEMAIPAWAHDPHLLSRKHW

SEQ ID NO: 217536 - protein, 108 aa, Zea mays
  Clone ID: MRT4577_129993C.1.pep
ARVDGAYFQSFVDWASSGAVDKEGLQTTAVLKDVLCPDLEVDSWLTFPFYELDFGTGSPTYFMPSYFPTEGMLFLVPSYLGDGSVDAFVPLFEHNLEAFKQCCYSMEE

SEQ ID NO: 217537 - protein, 43 aa, Zea mays
  Clone ID: MRT4577_129995C.1.pep
FRVLMRPHRRGRGHLDGPAHKKHQKKNTGGPVLKACKAQYDVR

SEQ ID NO: 217538 - protein, 40 aa, Zea mays
  Clone ID: MRT4577_129996C.1.pep
LKMVVNFSILKGGGGGLTTREIFPNGLKKKIHGVTYGLKF

SEQ ID NO: 217539 - protein, 223 aa, Zea mays
  Clone ID: MRT4577_129997C.1.pep
MSAMGYDQGLSTHGASWPQRSDYDPYSYSYAYSHHIVAAAASYHQPPPPGTEHAAPTSAASSWSSAAGASNNVVVGGPGANPLTVSALSQPTIFAASIGWSGHGVGHLPYYDPQYPPAQHPTAVGGVSRGGEPSHGGGRGLSPMYHPLTWNAGITSPCGRGRGHGNKSSDRQLALGASSGSSASEAQPGTVCAPAHVVQATTINFTRGTVVPAAWCDLCPSGV

SEQ ID NO: 217540 - protein, 93 aa, Zea mays
  Clone ID: MRT4577_129998C.1.pep
ALNGLVNTWLPWQFLIDGIYLYLSGCNMSIMAPFVPVFFPYFGCHKLLWIVKHSTFQPAFIRILLVKSAKNKCEHLIDRVVAIAGVRHSLSTS

SEQ ID NO: 217541 - protein, 90 aa, Zea mays
  Clone ID: MRT4577_129999C.1.pep
KRDDQGLPKAGSRRRRPGRDTFTLTHVQVDIRGHTHIDVDIVGGRADETSRDGRTQRLSLASSCPRSLATLVTPTTSTPVRDNISLISPF

SEQ ID NO: 217542 - protein, 238 aa, Zea mays
  Clone ID: MRT4577_12999C.1.pep
MAAALRCPASVRVSGPAAAGLAKVRQASRVVAVSGARQSRGGGVAVRASLFSPKPAAAKDARPTKVQELYVYEINERDRESPAYLRLSAKQTENALGDLVPFTNKVYNGSLDKRLGVTAGICVLIQHVPDRNGDRYEAIYSFYFGDYGHISVQGPYLTYEESYLAVTGGSGVFEGVYGQVKLNQIVFPFKIFYTFYLRGIPDLPRDLLCTPVPPSPTVEPTPAARAAEPHASLDNYTN

SEQ ID NO: 217543 - protein, 127 aa, Zea mays
  Clone ID: MRT4577_1299C.1.pep
PKSVKKGPKRGASICQTGGKRGRNAKRGRPEKEKYCQRKRCETPGKLVGARQGKRRERALKKGRAKRPERGQEKTPHTAPKRRMGQRTRSGKESRKKSAQGVVSYLCTIFIFFFFFFFFSFLEQILF

SEQ ID NO: 217544 - protein, 70 aa, Zea mays
  Clone ID: MRT4577_129C.1.pep
SHSTNNTSVLTMLCNSRVQRLIHSFINNTCMVIFTCSCTFLVNKTPTHGGGQARIKVTISSRFYTIKFND

SEQ ID NO: 217545 - protein, 44 aa, Zea mays
  Clone ID: MRT4577_12C.1.pep
KLIKDMIPVCNMTNDPFCRSIGKSFRSSSNAREHYMFISANVNA

SEQ ID NO: 217546 - protein, 329 aa, Zea mays
  Clone ID: MRT4577_130000C.1.pep
LPATASIRSSARLCSPWTPTRSPSTTGSSSPRPPTTTSESSRSRPAPAPTPSPITPPDPPTSSPPPLTPTTPRACTRCRTPRTPTRLCSLPRGCPTRSRDSCTTRWPGTSPTPPSTRCLPPPSSWSRTPPSPPSFPSPSPRSPPPAASSASAAPAPPPTTSPTRPPSPASASRPPPATTAPTATPPSSSPSTSTSTPTPATPTPSAPSLRARGSTATTTSSSRSPSGKASTLSSPSRPGPGRGQPEAGSPTLRPSCQAPGSARSAARSGAPPWACSSATTPSRAARTSSPRPPRSCSGPTGSLARWTARSASLAWAPASTPSSSSASTS

SEQ ID NO: 217547 - protein, 85 aa, Zea mays
  Clone ID: MRT4577_130001C.1.pep
RPKSPLIFPSKPFIFNMTLGTNHIRQPAYTNSVYKAGANKRTWTALIEGISWWLPGFQYLRTGSRGVNRTFRGWFFLGLLDSAKI

SEQ ID NO: 217548 - protein, 81 aa, Zea mays
  Clone ID: MRT4577_130002C.1.pep
RKRWGSISRSAGLPILGFIPLARAMIRELIMNPRMYFMADASVISAYKDVVRLGPGTPRFSPLQLKPPSSQVNYTSKKNIR

SEQ ID NO: 217549 - protein, 160 aa, Zea mays
  Clone ID: MRT4577_130003C.1.pep
HTNPDSQSTRHHQKPASNSTNQRPDPERKRQRLVTFSESFFSRTNSMGGASSSIFVFLLFPPWPALPPPPPKPPPRQLRPDRAASSPSPSAGAPSGSCPTAGRSCPPRRCRRPSSGVSIGGNGDDASGGMIGRVEGPRRWNGLGARLSHPASPNTSGGGG

SEQ ID NO: 217550 - protein, 74 aa, Zea mays
  Clone ID: MRT4577_130004C.1.pep
KMRILNLPINGNFQSCYVIKEKMIFLVPLVPPRTKLSRGKMLVCTLKCTAGVFCPPPDVNPGTPKKKKKKKKKE

SEQ ID NO: 217551 - protein, 63 aa, Zea mays
  Clone ID: MRT4577_130005C.1.pep
KNTGTIHDCLPPRYSKWPMTTSFLVPNTTRKWLLQKCPTLSRGSTQCLVAIYFRNGLFRGSAN

SEQ ID NO: 217552 - protein, 128 aa, Zea mays
  Clone ID: MRT4577_130006C.1.pep
APPLVPFIHARLLCFSSRGVFPARAWIFPLPAVSVARLSAPPGPGSTAFSPARMPPWPRALKLQLTRPDQASARIRAVFQPLLSLPAERLPLWPRILPLVSLHGALGRSSAPLILCVAPLSSAGASSR

SEQ ID NO: 217553 - protein, 722 aa, Zea mays
  unsure (1)..(722): unsure at all Xaa locations
  Clone ID: MRT4577_130007C.1.pep
MESEAGLLVRSSLNGEGLCMPAPRADPLNWGKAAEGLSGSHLDEVKRMVAEFREPLVKIQGASLSVAQVAAVAVGAGGGEARVELDESARERVRASSDWVMGSMMNGTDSYGVTTGFGATSHRRTKEGGALQRELIRFLNAGAFGTGADGHVLPAEATRAAMLVRVNTLLQGYSGIRFEILEAIAKLLNANVTPCLPLRGTITASGDLVPLSYIAGLITGRQNSVAVAPDGRKVGAAEAFEIAGIEHGFFELQPKEGLAMVNGTAVGSGLASMVLFEANVLAVLAEVMSAVFCEVMNGKPEYTDHLTHKLKHHPGQIESAAIMEHILEGSSYMALAKKLGELDPLMKPKQDRYALRTSPQWLGPQIEVIRAATKSIEREINSVNDNPLIDVSRGKALHGGNFQGTPIGVSMDNTRLAXVAAIGKLMFAQFSELVNDFYNNGLPSNLSGGRNPSLDYGFKGAEIAMASYCSELQFLANPVTNHVQSXAEQHNQDVNSLGLVSARKTAEAVDVLKLXLSSTYIVALCQAVDLRHLEENIKTSVKNTVTQVAKKVLTMNPSGDLSSARFSEKELISAIDREAVFTYAEDAASASLPLMQKLRAVLVDHALSSGDAEREXLRLLQDHQVRGGXLRAVLPQEVEAARVAVAEGTAPVANRIADSRSFPLYRFVREELGCVFLTGEKLKSPGEECNKVFLGISQGKLVDPMLECLKEWDGKPLPININ

SEQ ID NO: 217554 - protein, 119 aa, Zea mays
  Clone ID: MRT4577_130008C.1.pep
DYPLLEIEQNFSREHFTKLVARTRWTLTLGYWLCTQHRTPLTLAVLMLALEEQTHDMVPYLRVELKILNMKKMRKPSKDNGEVLQLRRLMGTDGRPRTRLLHTRKSEPRAPDSGPFTEA

SEQ ID NO: 217555 - protein, 717 aa, Zea mays
  Clone ID: MRT4577_130009C.1.pep
MESEAGLLVRSSLNGEGLCMPAPRADPLNWGKAAEGLSGSHLDEVKRMVAEFREPLVKIQGASLSVAQVAAVAVGAAGEARVELDESARERVRASSDWVMGSMMNGTDSYGVTTGFGATSHRRTKEGGALQRELIRFLNAGAFGTGADGHVLPAEATRAAMLVRVNTLLQGYSGIRFEILEAIAKLLNANVTPCLPLRGTITASGDLVPLSYIAGLITGRQNSVAVAPDGRKVGAAEAFKIAGIEHGFFELQPKEGLAMVNGTAVGSGLASTVLFEANVLAVLAEVISAVFCEVMTGKPEFTDHLTHKLKHHPGQIEAAAVMEHILEGSSYMKLAKRLGELDPLMKPKQDRYALRTSPQWLGPQIEVIRFATKSIEREINSVNDNPLIDVSRGKALHGGNFQGTPIGVSMDNTRLALAAIGKLMFAQFSELVNDYYNNGLPSNLSGGRNPSLDYGFKGAEIAMASYCSELQFLGNPVTNHVQSAEQHNQDVNSLGLISSRKTAEAIDILKLMSSTFLIALCQAIDLRHLEENVKAAVKNCVTQVAKKSLSLNARGGLHNARFCEKDLQTAIDREAVFAYADDPCSPNYALMQKLRAVLVEHALANGDAERDVDTSIFAKVAEFEQQVRAALPKEVEAARAAVENGSPLVPNRIKECRSYPLYRFVREEVGTEYLTGEKTRSPGEELNKVLVAINQRKHIDPLLECLKEWNGEPLPLC

SEQ ID NO: 217556 - protein, 238 aa, Zea mays; identical to SEQ ID NO: 217542
  Clone ID: MRT4577_13000C.1.pep

SEQ ID NO: 217557 - protein, 619 aa, Zea mays
  unsure (1)..(619): unsure at all Xaa locations
  Clone ID: MRT4577_130010C.1.pep
MSSMMNGTDSYGVTTGFGATSHRRTKEGGALQRELIRFLNAGAFGTGADGHVLXPEATRAAMLVRINTLLQGYSGIRFEILEAIAKLLNANVTPCLPLRGTITASGDLVPLSYIAGLITGRQNSVAVGPDGRKVGAAEAFRIAGIEHGFFELQPKEGLAMVNGTAVGSGLASTVLFEANVLAVMAEVISAVFCEVMTGKPEFTDHLTHKLKHHPGQIEAAAIMEHVLEGSSYMKLAKKLGELXDPLMKPKQDRYALRTSPQWLGPQIEVIRFATKSIEREINSVNDNPLIDVSRGKALHGGNFQGTPIGVSMDNTRLALAAIGKLMFAQFSELVNDYYNNGLPSNLSGGRNPSLDYGFKGAEIAMASYCSELQFLGNPVTNHVQSAEQHNQDVNSLGLISSRKTAEAVDILKLMTSTFLIALCQAIDLRHLEENVKAAVKNCVTQVAKKSLSLNARGGLHNARFCEKDLQTAIDREAVFAYADDPCSPNYPLMQKLRAVLVEHALANGDAERAAETSIFAKVAEFEQQVRAALPKEVEAARAAVESGSPLVPNRIRECRSYPLYRFVREEVGTEYLTGERTRSPGEELNKVLVAINQRKHIDPLLECLKEWNGAPLPLC

SEQ ID NO: 217558 - protein, 69 aa, Zea mays
  Clone ID: MRT4577_130011C.1.pep
PTLLCVQCPRAPFIYIKAGHPVGPLLILPAAQMRTKSRAPLGWPSLTRYRRRVRNYGGGIASTCSSPAL

SEQ ID NO: 217559 - protein, 114 aa, Zea mays
  unsure (1)..(114): unsure at all Xaa locations
  Clone ID: MRT4577_130012C.1.pep
PTRPPTRPAFMAYEENVAGVLAPTMAAVSPYPTMHDDVTSAAEEHXLALILVPFHKHPSVDRGLEVFHPEIQALNQSIQRFSSCAVGILFYRGLGGVPGARCPVVALFFCGRHH

SEQ ID NO: 217560 - protein, 254 aa, Zea mays
  unsure (1)..(254): unsure at all Xaa locations
  Clone ID: MRT4577_130013C.1.pep
MSQVISMPNFTVTSVHQTEQVPRDVRERILRSVQYNVFAFPASLVAVDFLSDSGTAAMTTNQWSAIMQGDESYGRNCGYYYFLEAVRDIFERGEHRLNAFQEMRPDLKSNTAFERYLDYQEGGFVNGGLAQMTRPNCFLVPQGRCAESLLFQATADAFSQPDSQQPIVISNGFFDTTSANASAAGFRLMTFAQEGWMHSEPXSGLAEQDTFKGNLDISAAGRVLSNREPQXRVALIYWTIINNXAAGQXCVHGK

SEQ ID NO: 217561 - protein, 340 aa, Zea mays
  Clone ID: MRT4577_130014C.1.pep
DAWAWMYLAVPVVFYASERSIRKIREQSYRVSIIKAAIYPGNVLSLYMTKPPGFKYKSGMYMFVKCPDVSPFEWHPFSITSAPGDDYLSVHIRTLGDWTSELRNLFGKACEAEVTSKKATLARLETTVVAHGLAEDTRFPKVFIDGPYGAPAQNYRKYDILLLIGLGIGATPFISILKDLLNNIKSNEEMHDAELGCSLKTNGPGRAYFYWVTREQGSFEWFKGVMNDVAESDRDDVIEMHNYLTSVYEEGDARSALIAMVQSLQHAKNGVDIVSGSKIRTHFARPNWRKVFSDLANAHKNSRIGVFYCGSPTLTKTLRDLSIEFSSTTTTRFHFHKENF

SEQ ID NO: 217562 - protein, 47 aa, Zea mays
  Clone ID: MRT4577_130015C.1.pep
ACLRLATDHLICTRRGTCWEKLRKEKLAGYDKKIRSRMQLPREAIKD

SEQ ID NO: 217563 - protein, 63 aa, Zea mays
  Clone ID: MRT4577_130016C.1.pep
MEPPAAKEAPPLQPAAEEDAMLSATAAMAKEAAVAFQGCRYADCAAVLTRLLDKKEGDLKVHL

SEQ ID NO: 217564 - protein, 74 aa, Zea mays
  Clone ID: MRT4577_130017C.1.pep
KPHFFSYREGSGWPKTSLTNLLMYITLSHTLNFHNSNVQIITQSLILPLLLQSRSTFLPAGVLDQLQTWDPTNY

SEQ ID NO: 217565 - protein, 58 aa, Zea mays
  Clone ID: MRT4577_130018C.1.pep
PTTSTQRHKIEAGVATAAALGAGGYAYHEHREQKDAHYDSKQQEQKVAHGQWQGQRYS

SEQ ID NO: 217566 - protein, 84 aa, Zea mays
  Clone ID: MRT4577_130019C.1.pep
RTCARRTSIKRQLSTLMTYGFTKSTICAMNASSRSDRTAKSSLAACGTGEHADTATKIITRYLETHRETTKKPHSEMNFYQLYL

SEQ ID NO: 217567 - protein, 45 aa, Zea mays
  unsure (1)..(45): unsure at all Xaa locations
  Clone ID: MRT4577_13001C.1.pep
APFMVLPLATKHPKXTSSAGPAHIFLGDYXHLNILDIEHFNYMTY

SEQ ID NO: 217568 - protein, 46 aa, Zea mays
  unsure (1)..(46): unsure at all Xaa locations
  Clone ID: MRT4577_130020C.1.pep
SSAGGEKPERGAARTIDRPAPRQIYRSIARSIGXLVAPGGGXRGGG

SEQ ID NO: 217569 - protein, 87 aa, Zea mays
  Clone ID: MRT4577_130021C.1.pep
LCRRREVRLNCWRRARHPLSICSRRCAMLRSCLALYSSISTWHLDRHRIYGKVRRDRPSSSVLRGLGNADMNEWIPRDEGRLHQCEI

SEQ ID NO: 217570 - protein, 135 aa, Zea mays
  Clone ID: MRT4577_130022C.1.pep
MASRKCLGGEGSAPAPHVLAVDDSSVDRAVIAGILRSSQFRVTAVDSGKRALELLGTEPNVSMIITDYWMPEMTGYELLKKIKESSRLKEIPVVIMSSENVPTRINRCLEEGAEDFLLKPVRPSDVSRLCSRVLR

SEQ ID NO: 217571 - protein, 108 aa, Zea mays
  Clone ID: MRT4577_130023C.1.pep
LPIRVMTILLMGIAFVPHLALWLPLCLLVLNRRVFHLLVEGLQETLISSIFVFLVIDPVYSVLIFGISHVASCRFHLHNTSVYHPLQAPSKQYVHHVPHDHPAAVSNE

SEQ ID NO: 217572 - protein, 112 aa, Zea mays
  Clone ID: MRT4577_130024C.1.pep
PLHGRLRRRPARHPRARRRGACPRPPARCRGPAGSRQGQQRLEPGAPCLSRYHRWRKSWRCERWSRYVVAPCVVVFPINWVRNPLLRVVQVSLPTAIHPFFPYDSSVLPAAL

SEQ ID NO: 217573 - protein, 58 aa, Zea mays
  Clone ID: MRT4577_130025C.1.pep
TARPSSCAPQTITAASRLAAHKPYRVFTRQLPACFGQPKDQSESAKRSCHFKFDLAIC

SEQ ID NO: 217574 - protein, 226 aa, Zea mays
  unsure (1)..(226): unsure at all Xaa locations
  Clone ID: MRT4577_130026C.1.pep
LDNRLPDDXVYGIHLHAPMAAESKAWLDAQQAGSVLYVSFGSMASLSPEQMGEIAEGLYGSGKPFLWVVRATETAKVPRGFADRAQATRGLLVSWCPQLEVLAHPAVGCFFTHCGWNSTVEALSAGVPMVAMPDWSDQTTNAKYIQDVWRVGVRVRPDGRGVVRSEEVERCVRDVMEGEMGEEFRARASHWSSKARKAMGEGGSSDVAISNFLSCFGHSAHVTAAN

SEQ ID NO: 217575 - protein, 66 aa, Zea mays
  Clone ID: MRT4577_130027C.1.pep
PNGKPHRIPHLTSNKNNKLISLHFQGKTKAFIEVYLLHTSKFGNQIITCSTMVSSNHLILFLTCTT

SEQ ID NO: 217576 - protein, 59 aa, Zea mays
  Clone ID: MRT4577_130028C.1.pep
VPLCKHRVFSGEHSIDEDLKGAHWFASTCCLTSFSVWSSWLPDILIQFSLITLGLFCLG

SEQ ID NO: 217577 - protein, 72 aa, Zea mays
  Clone ID: MRT4577_130029C.1.pep
FRLSIVTGNLGPCHMCLIAPLCMCHFVGKIWCLFLESLGSNPFFHVFLHKKSFYHSCNVYSSLNSPSMTVSF

SEQ ID NO: 217578 - protein, 94 aa, Zea mays
  Clone ID: MRT4577_13002C.1.pep
TEQQWEGVVHPTKVQNGGKQKRQRGGGERFFNYKIGGRVSPAVLDGTPLGPIFTQPQDKNTGWGWPLQIEAFTGQTRAISLTWRGPLGTRFWGT

SEQ ID NO: 217579 - protein, 86 aa, Zea mays
  Clone ID: MRT4577_130030C.1.pep
KKGNEKTMVSTLQQICCKQHNKPDENTVTSITRRPPQLTAKHHLLDYTSKVLRTLPKKVWVALYKPTIQKRPPLHWRGKKTTNRPG

SEQ ID NO: 217580 - protein, 82 aa, Zea mays
  Clone ID: MRT4577_130031C.1.pep
IPELKTLKLWKQHRPKSQMLSTHTLGINKCILFSFETGSHSAAQATVQWHDYDSLMQENCMNLHHGGSTELKSHHCTALHPG

SEQ ID NO: 217581 - protein, 82 aa, Zea mays
  Clone ID: MRT4577_130032C.1.pep
RSPDSKLAPAFLALTVAPALCTTAHSCSCCAHRRCSQDTVTPLGLIISDQTNFQWTWHLTIIYLMLMIQNLRPQAMSISHLL

SEQ ID NO: 217582 - protein, 70 aa, Zea mays
  Clone ID: MRT4577_130033C.1.pep
GGEGLSIFHSGHHPLRNSQMGPVLKGPPTLFFRHYPAQQLRGDSSSPFAPGAGGELGVLGHNGDPFGVGG

SEQ ID NO: 217583 - protein, 156 aa, Zea mays
  Clone ID: MRT4577_130034C.1.pep
AYILKFDDTTTIHKTPAEKKEPSPDHRGRRKDSSETCSTEQGSGSDTEECEPVLKGKDACKEYIKSFLAAIPIRELQADIKKGLMASTPLHHRPQIEFPYTEPRPAEIAAPSGPLGFEAPFEFCWPEPPSPPAATESTVTHPPAMEAGITQAVAVV

SEQ ID NO: 217584 - protein, 83 aa, Zea mays
  Clone ID: MRT4577_130035C.1.pep
SRRAARNWGRPQPPRAGSGYPHHHQCTTTPPAWQRRCCCRPVRPGVSLAYLTRKDTRPFRRASSSLKLGLARRQNKCTRDRAT

SEQ ID NO: 217585 - protein, 111 aa, Zea mays
  unsure (1)..(111): unsure at all Xaa locations
  Clone ID: MRT4577_130036C.1.pep
MRGVYFTASSDEMLTQKLCRWTGYSGEEARATTMRTEMNIRVTCTQKEMREKGGKNLGRTLGGEKRCNFPLNGGEVXAQKVANRWLCAIGEDETLRFKVLRGVADRGNMYG

SEQ ID NO: 217586 - protein, 190 aa, Zea mays
  Clone ID: MRT4577_130037C.1.pep
PVPKLYRSVIEDVIEGVRNLFAEEGIEEQVLKDLKQLWETKVLQSKATEDFFRNSIQSPLFTLQLPHSLHQTLQSSTASLVIPAGRTLPSFTTAELGTSNSSANFTFPGYPIHVPAGVTLQTVSGHLYKVNVPIMVTETSGRAGILQHPIQQVFQQLGQPSVIQTSVPQLNPWSLQATYLYQRRILILRW

SEQ ID NO: 217587 - protein, 179 aa, Zea mays
  Clone ID: MRT4577_130038C.1.pep
MAAAEARRRSAVWALLPLLLRLLHPVALVLANTEGAFVAGQFSGRASVSVFGYATQSDLNFNNIFSIHDAHLHLSRHHIVPQLIDWHEGGYLTVDLPMSRGEVVIGGPNVSSFLPTAVPLLQNTVKQKSFIGSSHLGSHAVLEYQFLPEQPSDAYERGSQLRFYDALAEVLNSRKEEQM

SEQ ID NO: 217588 - protein, 197 aa, Zea mays
  unsure (1)..(197): unsure at all Xaa locations
  Clone ID: MRT4577_130039C.1.pep
MDGSGRALDCRSFWKAGAYEAPXAPTREFQDVLETGDFDRARVHPKFLHTNATSHKWAFGAIAELLDNAVDEISNGATFIKVDKSINLKDNSSMLVFQDDGGGMDPEGVRRCMSLGFSTKKSKTTIGQYGNGFKTSTMRLGADAIVFTRAIRGGNVTLSIGLLSYTFLRKTLKDDIVVPMLDFKIQDGDIVPRPRPR

SEQ ID NO: 217589 - protein, 93 aa, Zea mays
  unsure (1)..(93): unsure at all Xaa locations
  Clone ID: MRT4577_13003C.1.pep
KFSFIAANTWVVSGSPQTKKXQDILPQIISQLGPDNMDNLKKLAEQFQKQASGEGNAASATIQEEDDDDVPELVGETFETAAEEKAPAAAASS

SEQ ID NO: 217590 - protein, 55 aa, Zea mays
  Clone ID: MRT4577_130040C.1.pep
TPLLASLQRVKSGLMSCFCLVSILKLLDLTKVKLPIIAFFVLYYNVSTVDNRIHL

SEQ ID NO: 217591 - protein, 62 aa, Zea mays
  Clone ID: MRT4577_130041C.1.pep
LALQVPCPLLTTGGQLTIHHIQNSTVSYNVWRDIRKQAPVDRPGHKLTGRRAAHAVNTAHVE

SEQ ID NO: 217592 - protein, 85 aa, Zea mays
  Clone ID: MRT4577_130042C.1.pep
RRAPVWACPKRERTVLFMDGVVIRPVTSLKGILKNNTSTGSYASCYLNIYLHQHDLVHACLTGFTSEHYSCGRIRSTCDQIILGK

SEQ ID NO: 217593 - protein, 58 aa, Zea mays
  unsure (1)..(58): unsure at all Xaa locations
  Clone ID: MRT4577_130043C.1.pep
KKLDLMXXKSAXVNWXXGKGMEEGEFFEEXEEVVEVEKEXEEVGVEXDEGEDGEEGEE

SEQ ID NO: 217594 - protein, 60 aa, Zea mays
  unsure (1)..(60): unsure at all Xaa locations
  Clone ID: MRT4577_130044C.1.pep
KHIDILHHFLRDHXQQRGDIDVCHISTENQLADIFTKPLDEKRFCMLCSELNILDSWNLG

SEQ ID NO: 217595 - protein, 122 aa, Zea mays
  Clone ID: MRT4577_130045C.1.pep
DAAGQGQRVLVRDDDLLLRLVPALRGGSGQRRRLRRRSRLLIQRLQEVVRLQEEITLDAHNRSTSIVAPRHHCLWTRNSLGPVGIVASCCLRRRPSACDRTGTGRARRAEGVRRSGGSGDSC

SEQ ID NO: 217596 - protein, 418 aa, Zea mays
  unsure (1)..(418): unsure at all Xaa locations
  Clone ID: MRT4577_130046C.1.pep
MSRMKHLLRKLHLAGGPAGAGGAAPDHHRSRHRRSGHPTPTPTPGAAAAAXSRRNRRLLLPRLCRSPPWWRSLEASGXGAATTRLEEDYQVRLALAISASDHAGLVDADSVQIRAAELISLGAGAGSGHDRSPAEALSARYWNHSVVNYDEQLPDGFYDVCGAQLHPGFQAKFPSLEYLRAVPLGRDAPFLAILVDREHDPALKRLEDRAAQIAAQTRAGHGGAASAELAQRIVGLIVNAMGGLVEDADGMNREWSIKSRELSLQLNSVVLPLGSLRVGLSRHRSLLFKVLADRVNLPCKLLKGICYTGTDEGAVNLVKVDFDSMEYIIDLMGAPGTLIPSDISGSQFQDSNNSQLSSDAIEESVAELCLALEQINGGYENKNTIGGCSSGHSSILALTSSHLGDLSQTELKQNVVSE

SEQ ID NO: 217597 - protein, 50 aa, Zea mays
  unsure (1)..(50): unsure at all Xaa locations
  Clone ID: MRT4577_130047C.1.pep
NVSDVDMSAYVKLVPLESMAVVFWCHFFMYNSFLLYLGYVLQXAWXGFLI

SEQ ID NO: 217598 - protein, 368 aa, Zea mays
  unsure (1)..(368): unsure at all Xaa locations
  Clone ID: MRT4577_130048C.1.pep
MASAGHQQQWALPFAGSLQVSPPPQQAPPDRKGRGGAGGGVMESGSRSSGGAGFDDDDGLTTRREVSSSLQDLAVRVDRKGGSCSDGGTDQGPNTPRSKHSATEQRRRSKINDRFQILRELLPHNDQKRDKATFLLEVIEYIRFLQEKAQKYEATFPEWNQENPTMLPWSKGQXQEIPRLTLHISMRNGSSPGSNFTGKLDDNHNIVTSAAASGAQDQAETDHMASGCYRSAETTANFTNNAMSQSQPQWTGPSPVDDSAVNSETLNNQQLVIDEGTIRVSSNYSQELLNSLTHALQSSGVDLSQANISVQINMGKRAAKRPAAGVSSNSKEPADPASSNELGHQLTLSGAGADCLSHATKRHKRSNS

SEQ ID NO: 217599 - protein, 331 aa, Zea mays
  Clone ID: MRT4577_130049C.1.pep
MGIQGNKAATHEHDFLSLYAAAAAKDAPLLLHDSKAPPPSQGNFLLKTHDFLQPLDQKPGAPPEPSPLPASAAESRHQPQQQVVVANQHALPLPGGVGTFSISPAPVSVALPAAVVKSEPPFVLWGQPAATLHPGARGHQQQWALPFAGAGQVRLPPQQAPPDRKGRGGAGGGVMESGSRSSGGAGFDDDDGLTTRREVSSSLQDLTVRVDRKGGSCSDGGTDQRPNTPRSKHSATEQRRRSKINDRFQILRELLPHSDQKRDKATFLLEVIEYIRFLQEKVQKYEATFPEWNQENAKMLPWVIASFSKAPMLASCYCCQGRNSQFLIVCV

SEQ ID NO: 217600 - protein, 70 aa, Zea mays
  Clone ID: MRT4577_13004C.1.pep
KGKRKKKKKKKKKKKKKKKKKKKKDKKKEGLKRKKQHIKEQKTAITEQKSEKNGTCEKIGRPGKNVSASN

SEQ ID NO: 217601 - protein, 36 aa, Zea mays
  Clone ID: MRT4577_130050C.1.pep
IDRPVNYHSRHHSFLSSTKQRVWQIVRSYRISVRVN

SEQ ID NO: 217602 - protein, 275 aa, Zea mays
  unsure (1)..(275): unsure at all Xaa locations
  Clone ID: MRT4577_130051C.1.pep
MIRHSLAFHQFPMKKILSRTFATATAQKVTLIPGDGVGHELAESVKAIFKASNAPVEWEQFNLSGHDSSNDDLMKETLASLRRNKVGLKGILYTPVSRLGHASFNVSMRKDLDIYASISLVKNIPGVTSRFNNVDLAIVRENTEGEYSGLEHQSHPGVVESLKIVTRRKTERIARFAFDFALKNHRKKVTCVHKANIMKLGDGLFLRTVKDIYEKEYSQTDILLNDMIVDNASMQLVSRPQQFDVVVLPNLYGNILSNVGAGPDGGPXLIPGSSI

SEQ ID NO: 217603 - protein, 68 aa, Zea mays
  Clone ID: MRT4577_130052C.1.pep
MRGLKKKLCILGLWCVPMKAQDQQAMSEVIEMVQISVYGKQMPPRPFFCDFEGESFWFAIFHLGPIEG

SEQ ID NO: 217604 - protein, 127 aa, Zea mays
  unsure (1)..(127): unsure at all Xaa locations
  Clone ID: MRT4577_130053C.1.pep
GGKNPKGGKKKRKRKLKTPGEKATKREKRRKGKTTSRRQQGRSXEGGAPGQKRPPPRLKGPKGGGASPKQAKGKKWKGGQKGVKFGKLRGPSEKRGYLKKGPKRWETGGVKGFNWGLKKKDQRAIKG

SEQ ID NO: 217605 - protein, 101 aa, Zea mays
  Clone ID: MRT4577_130054C.1.pep
YTAKKKISVRDICVGKEGRGMREKASDAFGATTGAELREVRQWQSIFFTNHTGEGVSSGGAGRQAGQLQKSREGKVISVRLMKRIETGGCRSSWDRGNEQD

SEQ ID NO: 217606 - protein, 76 aa, Zea mays
  Clone ID: MRT4577_130055C.1.pep
MDICRSSLAGVTTQSTRGVKKKKKKKKKKKKKKSTHEKKQQKKGRKKKKKKKKKKKKKASGVGPPVEGGIPAPWGP

SEQ ID NO: 217607 - protein, 58 aa, Zea mays
  Clone ID: MRT4577_130056C.1.pep
LLQYSARGPTRGSIKYPRLSCAGAVSTTWRTNSWVSYSNDIHNLCTRHSGSFVPILTY

SEQ ID NO: 217608 - protein, 50 aa, Zea mays
  unsure (1)..(50): unsure at all Xaa locations
  Clone ID: MRT4577_130057C.1.pep
RAAARAGTCKKKKKKKKKKKKKKKKKKKKNKKKKTPKKKXKKKKKNSLAP

SEQ ID NO: 217609 - protein, 1004 aa, Zea mays
  Clone ID: MRT4577_130058C.1.pep
MGEEAESTCKRKAPDSSVEEQPSLAPAPAQSQADPAAKRPNISRSCVHEVAVPNGYESVKDEAVHGTLASPAFNGEMAKQYPFKLDPFQSVSIACLERNESVLVSAHTSAGKTVVAEYAIAMAFRDKQRVIYTSPLKALSNQKYRELSQEFTDVGLMTGDVTLHPNATCLVMTTEILRAMLYRGSEVIKEVAWVIFDEIHYMKDRERGVVWEESIIFLPPAIKMVFLSATMSNATEFAEWICSLHKQPCHVVYTDFRPTPLQHYMFPIGGSGLYLVVDENGQFREDNFAKLQDSFAKPNNQLDGRKGGGPKASGRIAKGGSASGNSDIYRIVKMIMERKFQPVIIFSFSRRECEHHAMSMSKLDFSTEEEKECIEQVFCNAIGCLVEEDRSLPAIELMLPLLKRGIAVHHSGLLPIIKELVELLFQEGLVKALFATETFAMGLNMPAKTVVFTSVKKWDGDSNRYIGSGEYIQMSGRAGRRGKDERGICVIMIDEKMEMSVIKDMVLGKPAPLVSTFRLSYYTILNLMSRVEGQFTAEHVIRHSFHEFQYEKALPEIAQKITRLENEATLLDSSGETDLAEYHKLGLDISELEKKIMSEMIRPERALLYLVPGRLVRVRDGSTDWGWGVVVNVVKKPPASGTLPPALSASRSNNYTVDTLLHCSSNSSENGSRSKPCPPRPGEKGEMHVVPVPLPLVSGLSSVRINIPPDLRPPEARQNILSAVQELGKRYPQGLPKLHPINDMGIQEPELVDLVHKLEDLEQKQCSHRLHKSGQSEQELSWYQKKADLNTEIQQLKSKMRDSQLQKFRDELRNRSRVLKMLGHIDADGVLQLKGRAACLIDTGDELLITELMFNGTFNDLDHHQVASLASCFVPCDKSSEQIRLRNELSRPMMQLQEAARKIAEVQRECKLEVNVEEYVESTCRPYLMDVIYCWSRGATFAEVMEMTDIFEGSVIRLARRLDEFLNQLRAAAEAVGEVNLEKKFKNASESLRRGIMFSNSLYL

SEQ ID NO: 217610 - protein, 55 aa, Zea mays
  Clone ID: MRT4577_130059C.1.pep
FGGQHTINCAIEYCHHNHISSNKLTQHQKTVSGASPCLSTLIHAIRGCCNMNTKH

SEQ ID NO: 217611 - protein, 77 aa, Zea mays
  unsure (1)..(77): unsure at all Xaa locations
  Clone ID: MRT4577_13005C.1.pep
ESDKGPCTLVRVCYECNYVSFHRRRVICGGVAISHAYYRGECTHXERDWYGCAXIVNLGSAEIDLFYECNKYGFRKR

SEQ ID NO: 217612 - protein, 120 aa, Zea mays
  unsure (1)..(120): unsure at all Xaa locations
  Clone ID: MRT4577_130060C.1.pep
VDTLLHCSSNSSENGSRSKPCPPRPGEKGEMHVVPVPLPLVSGLSSVRINIPPDLRPPEARQNILSAVQELGKRYPXKDMGIQEPELVDLVHKLEDLEQKQCSHRLHKSGQSEQELSLYQ

SEQ ID NO: 217613 - protein, 60 aa, Zea mays
  Clone ID: MRT4577_130061C.1.pep
FLQPGYPCIRRRCYMPVLPGVVTLIGRISSSRSMFVSYSCFCVNNSRCECRQSDIRCRYD

SEQ ID NO: 217614 - protein, 566 aa, Zea mays
  Clone ID: MRT4577_130062C.1.pep
MVADRPSGRHGQSGPLARIVRTLTESCTFFLYDCGVINNSPMVISHIYCSGLGGLRKKLAGRFKSKSPRADDADYNPTTDSEAQSSAGGSVSMDTEDVPHAHPDYLIDITGWTYPKRRFSMVEYCSRRTINQYALPSDTNIQFFHTQLQFDVFWGTLMDTNFHKHQVIDWTFMPGQSVMEDLIPKFEACGLYHFMGQRTDFSEMAVKQFLATAEIDIDEESITWMTGFKRYSATFAEFATANSFDYNTISARIDLYTEDNFEEFVQFYEPARLGIPRRFGETAGLRHHLAVINKIARVTILPKSGDKSKIRDKFWNIIHHVMNGEVMNVVLFMMRQLNNLKMDKNQNLAYAPYIMALIKAKTIFEGHCEKVHTPFRPFKNETGFLTRPLTPFPDDEEDAGYDAGEAPEADAEQMPPPPPPPRPQQYWQPGPGYFDPYFQNIQQGLQTHMDGRFQGMMTHMDQRMDAIQSRFDDNLDALNSELSEFRSHIQDHVTDPIMTKLNNMQQSFQDNMGALSSQFDNLSTNESMQEISQRQQQLQQDFGHFSSLFDTFSTHYYSMYPPPSGQ

SEQ ID NO: 217615 - protein, 178 aa, Zea mays
  Clone ID: MRT4577_130063C.1.pep
NSARGEFVWKDRYHGMSERCGRVGEDSENDTIYHSELFTLTKKMARGTPTKISFNVPIFEPHPPQYYIHAISDSWLHAETLFTVSFHNLTLPQTQITHTELLDLKPLPLSALGNKTYEDLYRFSHFNPIQTQAFHVLYHTDNNVLLGAPTGSGKTISAELAMLHLFSTQPDMKVVYIA

SEQ ID NO: 217616 - protein, 114 aa, Zea mays
  Clone ID: MRT4577_130064C.1.pep
RCGGLVNVVNAGGRLEKGGRGPRGAPRMGRGGREEAAVGDAGGAGADGGGRGRARLARTRPGSVAPGKMPRTWWLVPRLHQSDGVDSLGASNPINNTTTDMGISTRVGKFKKHP

SEQ ID NO: 217617 - protein, 162 aa, Zea mays
  unsure (1)..(162): unsure at all Xaa locations
  Clone ID: MRT4577_130065C.1.pep
MKNGHTTTHIPCRGMTRNTTVGRKRGREERAQKKKTKNPEPEPRGGXPPGPHLPGSRTGAAAGGPIHRAQSGLTRERPPFNGPWFKKTRAGQHXATQRKRPSPXGLKQKRPAPKGPPQRGLHNRGNAQXVGPPLSQGMEGAPTRGAPQRAPPKGQPPKGRSL

SEQ ID NO: 217618 - protein, 122 aa, Zea mays
  Clone ID: MRT4577_130066C.1.pep
PTVCTLPPNNAGGYLESLAGSLRPHPRDAYTPVLYSRAPPRKKKGRLLKKRSPSFSGTGFPYLQSTPRGINGNSHRPFSVQMENRWLTNHFVDPALVMGLRRWPTIRKGSIKPNKCCSGTKL

SEQ ID NO: 217619 - protein, 61 aa, Zea mays
  unsure (1)..(61): unsure at all Xaa locations
  Clone ID: MRT4577_130067C.1.pep
LEPIRLEVPIAIGATGLAPGLRFRNDVPTGGLANVAATLTNLHGFEXPSDYETTLVEVVDN

SEQ ID NO: 217620 - protein, 102 aa, Zea mays
  unsure (1)..(102): unsure at all Xaa locations
  Clone ID: MRT4577_130068C.1.pep
LGGKTPPPPKKKPGPGAXPRGPLVPPPPQKPKQMLRKPGPPPPVGPKGAPPGRPGMLGPIMGGSAPIIAKPPNFPPDPPRFRRFNAPHAPDEGGSGPAPQSL

SEQ ID NO: 217621 - protein, 92 aa, Zea mays
  unsure (1)..(92): unsure at all Xaa locations
  Clone ID: MRT4577_130069C.1.pep
MALPNXGTVDXPQLKLVSXGDGGTGKTTFVKRHLTGEFEKKYEPTIGVEVHPVDCTTNWGKIMGVAXDTGGQETVGGAHXGCCMHGQGAIMV

SEQ ID NO: 217622 - protein, 115 aa, Zea mays
  Clone ID: MRT4577_13006C.1.pep
MSDLDVQLPSAFDPFAEANAEDSGAGPGTKDYVHVRIQQRNGRKSLTTVQGLKKEFSYNKILKDLKKEFCCNGTVVQDPELGQVIQLQGDQRKNVATFLVQAGIAKKENIKIHGF

SEQ ID NO: 217623 - protein, 104 aa, Zea mays
  Clone ID: MRT4577_130070C.1.pep
TTGIFIDRLGFTTSKLTAHFCNPPQGGGAFVKTQASRPFWGLPPFMGLVYKCCFLCHPRIEGYSGFPPSRSIKNLFLVPTLKLAFRCVRLHREKTQNVGNFVGF

SEQ ID NO: 217624 - protein, 47 aa, Zea mays
  Clone ID: MRT4577_130071C.1.pep
KKKKKKKKKKKKKKKKKKKKKKKKKKKKKKKKKKKKKKKKKKAWHLG

SEQ ID NO: 217625 - protein, 95 aa, Zea mays
  Clone ID: MRT4577_130072C.1.pep
HFYIKTHWCMRLMYLVMGAKGEEYPWNCQVLSFLFILTDHKSHGATTIYHSGELAWINEQNDTIFYTRLIAWGATLTPLMIFGRQEEADGQHANN

SEQ ID NO: 217626 - protein, 129 aa, Zea mays
  unsure (1)..(129): unsure at all Xaa locations
  Clone ID: MRT4577_130073C.1.pep
VGAPCVRLRSAIHSRLGEFSCSSSWALGMVPRSPDGRALRPFYSLLFAGAASLPGGCLCDSGGFGVVRLWRQGFFWFLFRCTCSWCDLWXWSVSRRVDLLLSSLRLVVRFCRLRTLLSPVCVGRRGSSR

SEQ ID NO: 217627 - protein, 99 aa, Zea mays
  Clone ID: MRT4577_130074C.1.pep
YIGKKDVWKKKKKKKKKKKKKKKKKKKLKKKKKKKKKTKKKKKKKKKKIPFFFGPPAMTPVYSTVPPISTPTGHEPPFWPTLLPTPTPCAKPLPTPVCP

SEQ ID NO: 217628 - protein, 63 aa, Zea mays
  Clone ID: MRT4577_130075C.1.pep
TPWIEHSRNLAIFELLLEEDLPCNVGDRGERYKSHHGVRLTLAPLQIGTAQIVYLCKLPSGRP

SEQ ID NO: 217629 - protein, 138 aa, Zea mays
  unsure (1)..(138): unsure at all Xaa locations
  Clone ID: MRT4577_130076C.1.pep
GXXXRKRKXXGEPMGNDXFLXXXVEDXXLLTVPLRDEFXENXXLIRFETYCKIXQRIDMGVLXXKLNLNYEEAERWIVNLIXTSKLDAKIDSESGTVIMEPTQPNVHEQXINHTKGLSGRTYKLVNQLLEHTQAQATR

SEQ ID NO: 217630 - protein, 79 aa, Zea mays
  unsure (1)..(79): unsure at all Xaa locations
  Clone ID: MRT4577_130077C.1.pep
ARGGGGNQTRGRDKPTRSMPTQHTIRGIDTKTSANTGQHETNPGSNREVARGTKXXKTKHTPKTPXIPYPYLHXYHLSL

SEQ ID NO: 217631 - protein, 47 aa, Zea mays
  Clone ID: MRT4577_130078C.1.pep
MTMSYYAKVPGRRQTVCVTSTGGYLGSWIAKLLLERRYGVRGTARKP

SEQ ID NO: 217632 - protein, 145 aa, Zea mays
  unsure (1)..(145): unsure at all Xaa locations
  Clone ID: MRT4577_130079C.1.pep
MGTVVDAPAVVAEEVTENMLGGKKVTAVFVLGGPGSGKGTQCANIVEHFGFTHLSAGDLLRAEIKSGSENGTMIENMIKEGKXGRVDNKLESFKKRFKXLLTQLLPVIEHYNSKDKVKKIDAAKPIPPVFEDVKAIFAPYSLKAE

SEQ ID NO: 217633 - protein, 102 aa, Zea mays
  Clone ID: MRT4577_13007C.1.pep
CVLDGKCSTPKSPTAAVLMRIPQTVFSKPGAAGSMFQHPHMAKQKIKTLSRLLADKTLALDVHGGASTSACWVSRCSNRGRKSRSGGRISAPSTPPWFVRRA

SEQ ID NO: 217634 - protein, 65 aa, Zea mays
  Clone ID: MRT4577_130080C.1.pep
GSHLQTCLCSMSWLPKRSIFRRRKQVSRPGKCSLIERWLTLIAGLQITVQGYYVFALCRMDVGTI

SEQ ID NO: 217635 - protein, 67 aa, Zea mays
  Clone ID: MRT4577_130081C.1.pep
EVVRGIAGDLVEEVKLIDNFTNKKGMTSHCYRIAYRSMERSLTDEEINNLQLNVREAVKDKLKVELR

SEQ ID NO: 217636 - protein, 235 aa, Zea mays
  unsure (1)..(235): unsure at all Xaa locations
  Clone ID: MRT4577_130082C.1.pep
MGTVVDAPAVVAEEVTENMLGGKKITAVFVLGGPGSGXGTQCANIVEHFGFTHLSAGDLLRAEIKSGSENGTMIENMIKEGKIVPSEVTIKLLQEAMIKSENDKFLIDGFPRNEENRAAFENVTKISPAFVLFFDCSEEDMEKRLLGRNQVSFIFLCFLVTKFLFPIFLTVYXGRVDDNIETIKKRFKTFVDSTLPVIEHYNSKDKVKKIDAAKPIPEVFEDVKAIFAPYSLKAE

SEQ ID NO: 217637 - protein, 161 aa, Zea mays
  unsure (1)..(161): unsure at all Xaa locations
  Clone ID: MRT4577_130083C.1.pep
QTSFGRRRRRSGLARLETTGHKQQDXGVWYLFFWAPVPAPTXGELLFLQRKPPAPTTPKRSAXPPRPMQGAAAHFAASTVLGLSLEXRPTQHILAISALSASLSREILPTAVTGDPVGXGEAAALGSPSTPWAHHQLRLPVVPAIAVSDRSLMFTHVLYNL

SEQ ID NO: 217638 - protein, 62 aa, Zea mays
  Clone ID: MRT4577_130084C.1.pep
GRVGFKPAFFFKQICRATLYVCPFGKCGITLSPQMFCPIKLGFPCEPPVLKIDYPPKSPPQL

SEQ ID NO: 217639 - protein, 52 aa, Zea mays
  Clone ID: MRT4577_130085C.1.pep
INDSENLFFLRAAAPKSYCLLSSSRPYIKVHFQILTRTLTLHECAAFIFYKF

SEQ ID NO: 217640 - protein, 47 aa, Zea mays
  Clone ID: MRT4577_130086C.1.pep
GGTAFLLDNSPIVFTLFNIWGYQGSGVLLVVVKADGHGSGKRGKRSA

SEQ ID NO: 217641 - protein, 71 aa, Zea mays
  Clone ID: MRT4577_130087C.1.pep
NPTFTHFYSLPKIKFIARFLKTSSIEKPLAFPNLSPFKKITLFPTCIISKNPPPISLSNNLPTSIPNMAPP

SEQ ID NO: 217642 - protein, 105 aa, Zea mays
  Clone ID: MRT4577_130088C.1.pep
ISLSYRVNWAVYMRARLAASVMYICRICHSSAVAMDDTGVAVSVDSGSHRMDVSVGIDQVIAVHKPVSVGSLAYPCAYDPVPVGVYVVLSNADGSGSARLTVLVL

SEQ ID NO: 217643 - protein, 91 aa, Zea mays
  unsure (1)..(91): unsure at all Xaa locations
  Clone ID: MRT4577_130089C.1.pep
GSRRNAAAEAWACVKQVAKEEPFDRGEAASVVVPDRGPRKQRRRSDAGGKQAGXECGREVCMTGECSGGTSGQRAGGWCAWRGMLVLQARG

SEQ ID NO: 217644 - protein, 60 aa, Zea mays
  Clone ID: MRT4577_13008C.1.pep
GLSRDDKALKLAFQHWIEAMSTNGQWGLVGFTAHSCSFHGTIILFFSYSDVLFCGTIFRP

SEQ ID NO: 217645 - protein, 55 aa, Zea mays
  Clone ID: MRT4577_130090C.1.pep
PRVRSLLVPVHQSIFFLLTFSYPRGGVSFIRERKCNQPSDGLQKSYLQNPTLPNL

SEQ ID NO: 217646 - protein, 191 aa, Zea mays
  Clone ID: MRT4577_130091C.1.pep
VSLAGRSRCSREWRLLWLLLACSWVAAASPQQTARTDPAEAAALSTILGRWGLKASPGWNISGELCSGVAVDDTDVDNSPTINPGIKCDCSYSNITVCHITKLRVYGLNVVGQIPAELENLTYLSNLNLTRNYLTGPVPSFIGKFPMQYLSLAINLLSGTLPKELGNLTDLRALKSTGGSRGAIYEDFDLI

SEQ ID NO: 217647 - protein, 115 aa, Zea mays
  Clone ID: MRT4577_130092C.1.pep
MRDSEHRFPARVLSCRFLEQPSQSGASQGSAHRRNPSRLSAADPPGGGRQGRGREPGREREQSVGSSSLPPPPWQLMQARSCWPSGWVGGVGSTAEVAGRRPPGSDVACAPTPSR

SEQ ID NO: 217648 - protein, 139 aa, Zea mays
  unsure (1)..(139): unsure at all Xaa locations
  Clone ID: MRT4577_130093C.1.pep
MSGNVLGAIVXSIGNLLQERDNANIAVAGLHIXERISIQNDPCVEGLXIVSMSLIDATXVTTFSGTLSNSIGRPPMLILSSILHFFSGLIMLWPPXXYVLLLPRFLNGFDIALYVKIVPLHMSEILPXHMIGLLNTTTT

SEQ ID NO: 217649 - protein, 135 aa, Zea mays
  unsure (1)..(135): unsure at all Xaa locations
  Clone ID: MRT4577_130094C.1.pep
QLAHRLHIGELDTGKVGIVALALLALAASAASSTSXGVARYTPTFHLTPXNNIDYKLSAVETYCQIHANYXIKLTHLMPCQQFRSXSDTSVSIPFLGQNVKLLKHHCIPTATPYXSPQCQTLQQHCXHQITQVEP

SEQ ID NO: 217650 - protein, 205 aa, Zea mays
  Clone ID: MRT4577_130095C.1.pep
MDHTQPRDGHGNEPVPLGQMLFEHSGSDAPLRLGPPGFGSMASRSNDVPSSSHATQFPGHRVLNVGTSHVSFVPYRTAISSSHVPYDAQPKPALSSHVDNRMVAMKRKSLLPSVEGMDAVDYYVGSSSNSHFSDFVQPNPSALTEPLHPQMPLNIGPSNWIDQRLVNQEGSQRNVRARHDSANISLGPRPTSTYTPKYNHQLPHS

SEQ ID NO: 217651 - protein, 64 aa, Zea mays
  Clone ID: MRT4577_130096C.1.pep
IAASNIPLWPLLFQQSPALFLVQSLGQTIRAQQVQQLGLPVVNQLGLANPAAFYQQPIIGGAPF

SEQ ID NO: 217652 - protein, 92 aa, Zea mays
  unsure (1)..(92): unsure at all Xaa locations
  Clone ID: MRT4577_130097C.1.pep
MATKRLSIIALNALFASATNASIXPQCSLAPSSIITQFHSPDTXNDXEHSTVQADRLQQASEAIVLQQPIAXLQQQSLAHLTIQTIATQQQQ

SEQ ID NO: 217653 - protein, 160 aa, Zea mays
  Clone ID: MRT4577_130098C.1.pep
MNYYITGCRYVLMPWKFNECYTLFVIDHVKKHVTFIDFTPTEDWYKHMPYKRFAKAIIMVSKKYKIAYSKKCSGWAEDIFKWEHTIQTGIPIDLRGLNTSYLVLKAMTMWGNDRQMEFIRDAKILRSNSVIDLLSYEDNLCRYTIPSNIQQRLIDITKKD

SEQ ID NO: 217654 - protein, 123 aa, Zea mays
  Clone ID: MRT4577_130099C.1.pep
RENPWGSYLALWQGLNVYNPNKEFFFKKHWKKGFGPYPPPSSLGGGTTQKGYFFFFFFPNRDILHSKMVFGQPDAQPSLLSKYLIHWAQVGGGTPLGFYFLLVPLSHLFFFIGWGGGGKLFFF

SEQ ID NO: 217655 - protein, 133 aa, Zea mays
  Clone ID: MRT4577_13009C.1.pep
TPGHSENFETPGVEVTTGPLGQGIANAVGLALAEKHLAARFNKPDSEIVDHYTYCIVGDGCNMEGILTEACSLAGHWGLGKLIVFYDDNHISIDGDTGIAFTEDVSGRFEALGWHTLWVKNGNDGYDEIRKAI

SEQ ID NO: 217656 - protein, 67 aa, Zea mays
  Clone ID: MRT4577_1300C.1.pep
MAASTAQSLALLTSASALLGVGLVAASAMRSLAFLASASTSFGVGQRAQGNLSISSSSSSAGSASLV

SEQ ID NO: 217657 - protein, 124 aa, Zea mays
  unsure (1)..(124): unsure at all Xaa locations
  Clone ID: MRT4577_130100C.1.pep
AVLTRYNSIISSTSLDDHFLFKESLTPSCPDTESIPWYYSSFQGSHFVGYTFNKMHISFTFYSINSFPYNHSILFSPFILCIQPRIPIPSLYESELALRGDEGKLHYLLSSNHLSFGIPNNIPX

SEQ ID NO: 217658 - protein, 88 aa, Zea mays
  Clone ID: MRT4577_130101C.1.pep
MSGSRSSSSHNVTIDSEWSKKENKLFEEALACYGAGTPDRWHKVARAMGGIKTADEVRRHHEILNEDVTLIESGRVPFPNYNTQGAWN

SEQ ID NO: 217659 - protein, 93 aa, Zea mays
  unsure (1)..(93): unsure at all Xaa locations
  Clone ID: MRT4577_130102C.1.pep
IDDRSFVHLATCTYSRYALSDKHKYYLYSMHLQVFPLTPXILFQPLYLISISSCAQLLTTHQKSNSYLYTSQILPTLQMFAYTHNILLTYNET

SEQ ID NO: 217660 - protein, 88 aa, Zea mays
  Clone ID: MRT4577_130103C.1.pep
RRIQLYLPLSVVFFKIQGRIQHCHDIQKFQPPPIYHSLLRPSKHSSKIELTQRLNIAKTVIFKELTSLLPIHKLHQDSISHKEHLINT

SEQ ID NO: 217661 - protein, 79 aa, Zea mays
  Clone ID: MRT4577_130104C.1.pep
PTRPRTLGLGPASPLDSTFYRSLLEDDDMGDLVAAEEYLVPQQGFFCPDPAPGAGGMVHHRHRSSSTRSGGGDLTLGLE

SEQ ID NO: 217662 - protein, 140 aa, Zea mays
  unsure (1)..(140): unsure at all Xaa locations
  Clone ID: MRT4577_130105C.1.pep
AANTKXQVIYIQSCPSRLRLQTLRRIRLSPQDNNTTTTTKTNETTSSQFTSPRQYNDPITTEKHHRPLTSTKYNETTSSQFTSPRQSDDPVTETHYRRLAPERTFQARLLTENWPSQVDRSTGRPPAHPQAHKSAQSSRA

SEQ ID NO: 217663 - protein, 73 aa, Zea mays
  Clone ID: MRT4577_130106C.1.pep
PTRPTRLPIPYFPTLIPKGAKEAFTNKHSTTSSYHITYGPSPHVERSTGLTLLVQAIHDGNSMSGKSLGATVH

SEQ ID NO: 217664 - protein, 226 aa, Zea mays
  Clone ID: MRT4577_130107C.1.pep
MASLSPSLHLPCNSRTGFLGKTRGIRPCVFPAGRVGFVRTVVECKESRIGKQPIEVPSNVTLTLEEQFVKAKGPLGELSLSFPGDLKIVKEESGNLRVYKTAETKRANQMHGLFRTLTDNIIVGVSKGFDKKLQLVGVGYRAAVEGNDLVMNLGFSHPVRMAIPEGLAVKVEENTRIIVSGYDKSAIGQFAATIKKWRPPEPYKGKGIRYMDEVVRRKEGKAGKKK

SEQ ID NO: 217665 - protein, 236 aa, Zea mays
  unsure (1)..(236): unsure at all Xaa locations
  Clone ID: MRT4577_130108C.1.pep
MASLSPSLHLPCNSRTGFLGKTRGTRPRLFPAGRVGFVRTVVECKESRIGKQPIEVPSNVTLTLEEQFVKAKGPLGELSLSFPGDLKIVKEESGNLRVYKTAETKRANQMHGLFRTLTDNIIVGVSKGFDKKLQLVGVGYRAAVEGNDLVMNLGFSHPVRMAIPEGLAVKVEENTRIIVSGYDKSAIGQFAATIKKWRPPEPYKGKGIRYXDXKAESVRRKEXXAGRRIKGFFFFF

SEQ ID NO: 217666 - protein, 256 aa, Zea mays
  unsure (1)..(256): unsure at all Xaa locations
  Clone ID: MRT4577_130109C.1.pep
MASLSPSLHLPCNSRTGFLGKTRGTRPCVFPAGRVGFVRTVVECKESRIGKQPIEVPSNVTLTLEEQFVKAKGPLGELSLSFPGDLKIVKEESGNLRVYKTAETKRANQMHGLFRLVREIRLWIFLSCPSMSSSKYPGANIQRRTLTDNIIXVGVSKGFDKKLQLVGVGYRAAVEGNDLVMNLXFSHPVRMAIPEGLAVKVERDTRIIVSGYDKSAIGQFAATIKKWRPPEPYKGKGIRYMDEVVRRKEGKAGKKK

SEQ ID NO: 217667 - protein, 73 aa, Zea mays
  Clone ID: MRT4577_13010C.1.pep
LHCEELQVDYDISGSLGNVLDSVLAHRFGKKFEARVEIAFKQVCEWCAEFPGLQESVSALSSCKISIKGIFVS

SEQ ID NO: 217668 - protein, 227 aa, Zea mays
  unsure (1)..(227): unsure at all Xaa locations
  Clone ID: MRT4577_130110C.1.pep
MASLSPSLHLPCNSRTGFLGKTHGIRPCVFPAGRVGFVRTVVECKESRIGKQPIEVPSNVTLTLEEQFVKAKGPLGELSLSFPGDLKIVKEESGNLRVYKTAETKRANQMHGLFRTLADNIIVGVSKGFDKKLQLVGVGYXRAAVEGNDLVMNLGFSHPARMAIPEGLAVKVEENTRIIVSGYDKSAIGQFAATIKKWRPPEPYKGKGIRYMDEVVRRKEGKAGKKK

SEQ ID NO: 217669 - protein, 87 aa, Zea mays
  Clone ID: MRT4577_130111C.1.pep
MAVAAAAHHLPVVPHRLVPVRHTSSSPPPHPASRCSAAGKPPVQLHAAQARASGFAARVAFNPSGNYDLSLSMGEDGDLLSFLFPSH

SEQ ID NO: 217670 - protein, 54 aa, Zea mays
  Clone ID: MRT4577_130112C.1.pep
NSPLITHAAWSFYGKIIYSSFIHTTVGIFNASTLTTLIYHTPILLFTSKYNSYC

SEQ ID NO: 217671 - protein, 226 aa, Zea mays
  Clone ID: MRT4577_130113C.1.pep
MASISPSLHHPCNSRTGFLGKTHGTRPRLFSAGRVGFVRTLVECKESRIGKQPIEVPPNVTLTLEEQFVKAKGPLGELSLSFPGDVKIVKEESGNLRVYKTAETKRANQMHGLFRTLTDNIIVGVSKGFDKKLQLVGVGYRAAVEGNDLVMNLGFSHPVRMAIPEGLAVKVEENTRIIVSGYDKSAIGQFAATVKKWRPPEPYKGKGIRYMDEVVRRKEGKAGKKK

SEQ ID NO: 217672 - protein, 62 aa, Zea mays
  Clone ID: MRT4577_130114C.1.pep
CCTKRSCPPPSTYSPFNSTQNSEFRTSDVDPHHNHASWMTRDDFSLVEPRIMDEGRWYLVCA

SEQ ID NO: 217673 - protein, 38 aa, Zea mays
  Clone ID: MRT4577_130115C.1.pep
YLLMSIDLPTAPRLCTMVYGRIDDSPNDTRKPRDAKHS

SEQ ID NO: 217674 - protein, 87 aa, Zea mays
  unsure (1)..(87): unsure at all Xaa locations
  Clone ID: MRT4577_130116C.1.pep
QHGLHKILHLLALIALAASASNAHIIPQCSLAPRAIXIHDYLPPVTIXMAFKHXAAQGNTQHQAHAESVLQLPIAEWQQQSLPHLTI

SEQ ID NO: 217675 - protein, 47 aa, Zea mays
  Clone ID: MRT4577_130117C.1.pep
KAIKANFNAKCDEYRKKWGGGIMGLKSQAKTRAKEKLLAKEAAQRMN

SEQ ID NO: 217676 - protein, 146 aa, Zea mays
  Clone ID: MRT4577_130118C.1.pep
MRATFHATALRNPIVRFVILILRSPLIALPAIQKLPNPTLLLPPPSLPPFKDFRNPHPPKPMQSLAKSRSLESVLSLAVHLQSMAYVNVTMRWKKDSSFDAIPEISHARDIRPLVSLAHILSPSPTPVSAVSKLGPLLEIPDRRVT

SEQ ID NO: 217677 - protein, 82 aa, Zea mays
  unsure (1)..(82): unsure at all Xaa locations
  Clone ID: MRT4577_130119C.1.pep
PGRXTPTHPPVPISLASTLSFFYSLLPSLFRAFFFFFFFPQKKPLFPCFIPKHFFQSYGFPPSLLFPTQILLFIMLFQHMSF

SEQ ID NO: 217678 - protein, 87 aa, Zea mays
  Clone ID: MRT4577_13011C.1.pep
RAAASSSSLHPYLRCVRTSQMQTRSGKGQGESTVFAKFGSSHGAPHAPFLSKQELASTGARNHPDRHGRRRRTEQEVKNWRASGRVE

SEQ ID NO: 217679 - protein, 324 aa, Zea mays
  unsure (1)..(324): unsure at all Xaa locations
  Clone ID: MRT4577_130120C.1.pep
MAAAGRPWRVIPRPLLETVLHNYALHPRVPQPLLFHGPRGVGKSTLLLHRLLPRWSDQPHAVAFINFLHPSPSSPAAAPWSLLPADPASPHSLHDLRLRLESALEGLARAAVLCGAVGSKDVLAALSRNHGVSTALSRLLIPPATRSSATSVPARRSSSTSVPALWSRAVLAAVHRDDTAFCIGEGEATSCSMEEKAYMQEAMAALRVAKEVLGMQEGWRKEAIREMNRTGRFSRSLANSATDWPCLLLDVLSRAAEEEFFQPKLILNNVDVLRKAICEDETMVPAAMYHDSFIWRVIALGANEKCLPVIMSTSDXVLFFSSIR

SEQ ID NO: 217680 - protein, 107 aa, Zea mays
  Clone ID: MRT4577_130121C.1.pep
PPLPGEQGYFPIIIPRIIYPELGGAAASRNNMGRLPRLKHQPKTLVALLFTRPMQSTAKWPPGGRPISRTRKSSPPAWVPVWAQPSTGSAPRKNKTGLCPSLPGGGG

SEQ ID NO: 217681 - protein, 415 aa, Zea mays
  Clone ID: MRT4577_130122C.1.pep
MAFNKIKVANPIVEMDGDEMTRVFWKSIKDKLIFPFVDLDIKYFDLGLPHRDATDDKVTVEAAEATLKYNVAIKCATITPDEARVKEFGLKAMWKSPNGTIRNILNGTVFREPIICKNIPRLVPGWTKPICIGRHAFGDQYRATDAVIKGPGKLKLVFEGKEEQVELEVFNFTGAGGVALSMYNTDESIHAFADASMATAYEKKWPLYLSTKNTILKKYDGRFKDIFQEVYEAGWKTKFEAAGIWYEHRLIDDMVAYALKSEGGYVWACKNYDGDVQSDFLAQGFGSLGLMTSVLVCPDGKTIEAEAAHGTVTRHYRVHQKGGETSTNSIASIFAWTRGLAHRAKLDDNARLLDFTQKLEAACVGAVESGKMTKDLALLVHGSSNITRSHYLNTEEFIDAVADELRSRLAANSNL

SEQ ID NO: 217682 - protein, 83 aa, Zea mays
  Clone ID: MRT4577_130123C.1.pep
CSSLVFLICPNLNGLFGRQSGTTTGYSYSAGNKNKAVIWEENTLYDYLLNPKKYIPGTKMVFPGLKKPQERADLIAYLKEATA

SEQ ID NO: 217683 - protein, 91 aa, Zea mays
  Clone ID: MRT4577_130124C.1.pep
FFFDFVLIFLYVFIYYKWGVIIYLRNGLLLFVFLTAKRKKRDAFFIFGPRKGLYKRGQPEKKKIAKKEKKCIGLEFFSKKKIVFIKGRTSA

SEQ ID NO: 217684 - protein, 192 aa, Zea mays
  unsure (1)..(192): unsure at all Xaa locations
  Clone ID: MRT4577_130125C.1.pep
MPRITSVESPGCPPLRAITTDILGLIKVVEARARPAGVAKVVETWGEPDASRAILVASLADRAVDPVLAVARKNGVVELLNPLNGDXLWLLSSPLGQTKLSEXENDPLVALHLFRKHAPDLTTLGTFLACTEKGKASVRSVAKENTVSDSDVGPSSTWEVCNKGTLAVSSVEVGENXYAMVGGNGMKVNLWD

SEQ ID NO: 217685 - protein, 226 aa, Zea mays
  unsure (1)..(226): unsure at all Xaa locations
  Clone ID: MRT4577_130126C.1.pep
MTLHCSLPATCSTLWLRAAGRPDPRFPRSRARLVGLALSGPRHRRLVHTGCARAGTSDSKAVELVLGGRARGDDGDTDSESSDDEDAQDRMTDEERRTLRRKIREMMDRVPETAELTDPEERRVKMRELLTKYELVVEEEDPDWPEDAEDGMGFSLGQFFDKITIKAEKKDDTEEDDASGYQSDKEIVWEDDNYIRPVRDVRTQDWDXSVFTDFXPMVXLLHNRYK

SEQ ID NO: 217686 - protein, 119 aa, Zea mays
  unsure (1)..(119): unsure at all Xaa locations
  Clone ID: MRT4577_130127C.1.pep
TARTLRQAVPTVLLPLHLLASSASQSITCGQGGSSMATXIPDATGSASALPASSCKGDXSLNSARRTSANRQAGXRCLERHPNSGKRVNMGTACTITRKRGGSDQYHIGMSTXDCNQIS

SEQ ID NO: 217687 - protein, 99 aa, Zea mays
  Clone ID: MRT4577_130128C.1.pep
EPHPGKGRERVYLRGSSVESRVGEEDTAFARRDRNVQGDVPPEMRGIRRKATSSRCNCCRHTTEQKVICEATSKLTLVQVRQSPMSRQRTPYKKPVKDR

SEQ ID NO: 217688 - protein, 45 aa, Zea mays
  Clone ID: MRT4577_130129C.1.pep
SGLTNCASVFLASHLVFTVAVLYLCPDCALCCPVYFEIFDVVPFS

SEQ ID NO: 217689 - protein, 50 aa, Zea mays
  Clone ID: MRT4577_13012C.1.pep
SLSASLHYFFTFVYWYLANSLMNSFLIINHYIMYLHPNSTHYSIKYLIIQ

SEQ ID NO: 217690 - protein, 360 aa, Zea mays
  Clone ID: MRT4577_130130C.1.pep
MDAGDDEPPVLLDRAARASRGKRITKLLEDEVEQDEAFWNQEALKDEENDDNYVEEPDAGDEFDSDFGEDESETDDEPEKEVRERLPIKKRLMFPGKTLRKTSVKKKKATPKPEDGTKADKSADKPSSSTQADIPDELEAEKAIRKSTRTSVIVRQAEREAIRAEKEATAKPIKRKKEGEEKRMTQEEMLLEAAETEIMNMRNLERVLAREEEVKKKAVVHKDTYEGPTVRFFSRDGESRLEFINGASFGSELCTTSSPYPEKPVCVVTGLPAKYRDPKTGLPYATMEAFKIIRESFLKEEADRKRPNMSNMGELFESITGGHLMPKKRRVEIRSPNMLGGSRHGGRTWRIPAFDMVDED

SEQ ID NO: 217691 - protein, 231 aa, Zea mays
  Clone ID: MRT4577_130131C.1.pep
HEVPPVKNLSKPESLTDRQQENHDALIKSMVEDRRFDDKKSAAACIVYKSLLHWHSFEAEKTNIFDRIIQIIRSSVEGAESSGELAYWLSTTSTLLYLLQNTLKASSSLSKGTNRSRTTTGSLFSRMVQSARTSSGLGIASGYSGMVGRPDTDASMVEAKYPALRFKQHLTAYVEKIYGIIRDNLKKEISPFLTMCIQAPRANRVRPSRGSLKSIHSNALARQASSLHWQN

SEQ ID NO: 217692 - protein, 330 aa, Zea mays
  unsure (1)..(330): unsure at all Xaa locations
  Clone ID: MRT4577_130132C.1.pep
MDAGDDEPPVLLDRAARASRGKRITKLLEDEVEQDEAFWNQEALKDXASSSYHEENDDNYVEEPDAGDEFDSDFGEDESETDDEPEKEVRERLPIKKRLMFPGKTLRKTNVKKKKATPKPEDGTKADKSADKPSSSTQADLPDELEAEKAIRKSTRTSVIVRQAEREAIRAEKEATAKPIKRKKEGEEKRMTQEEMLLEAAETEIMNMRNLERVLAREEEVKKKAVVHKDTYEGPTIRFFSRDGESRLEFINGASFGSELCTTSSPYPEKPVCVVTGLPAKYGFLTPVYDIPSCSLHSHTSFNPSPLFCCSYMFHFNTSNRLDRHESFNV

SEQ ID NO: 217693 - protein, 53 aa, Zea mays
  unsure (1)..(53): unsure at all Xaa locations
  Clone ID: MRT4577_130133C.1.pep
VLRKKGPTAAQARSKQAIXAAQRRGEDVETSKKWAAGQNKQHAITRNTATLNR

SEQ ID NO: 217694 - protein, 60 aa, Zea mays
  Clone ID: MRT4577_130134C.1.pep
LGQYSFSHVRGDLGVELALKQLNMHEDDVRVDQIFVQALTSRRQRHSVPAQLTLLAPTGL

SEQ ID NO: 217695 - protein, 166 aa, Zea mays
  unsure (1)..(166): unsure at all Xaa locations
  Clone ID: MRT4577_130135C.1.pep
MEATASAMSFALPSTKAQAXPTPDPAHQSIHXSLPXRPAHRPAARLLTIRDAIPRIKKEEMXMTSAISWVEEXYLARRHEXKGFAEEQVQEILEMLPEITILIGEKNEIDYEDEVREACETLNTGLNGMIAGVXVHHEEIPFGVKLYENLDNEKILEDDDFGDGDI

SEQ ID NO: 217696 - protein, 96 aa, Zea mays
  Clone ID: MRT4577_130136C.1.pep
MASAFFFDAEPDCEPSLLPTLDACALCARPLGRDCDIFMYRGDTPFCSEECRDEQMQLDAIRARQRAARSAARRQQQHSSRTESRHQESMEVSVAT

SEQ ID NO: 217697 - protein, 75 aa, Zea mays
  unsure (1)..(75): unsure at all Xaa locations
  Clone ID: MRT4577_130137C.1.pep
RGDPRRTLQPIDTCYPKXXXHAARGKNYPTESADHTQAXEKARRKLRALSAEKSGAPLMHRLAWHSAGTGDGTTR

SEQ ID NO: 217698 - protein, 96 aa, Zea mays
  Clone ID: MRT4577_130138C.1.pep
MASAFFFDAEPDCEPSLLPTLDACALCAKPLGRDCDIFMYRGDTPFCSEECRDEQMQLDAIRARQQAARSAARRQQQHSSRTESRHQESMKVSVAT

SEQ ID NO: 217699 - protein, 94 aa, Zea mays
  unsure (1)..(94): unsure at all Xaa locations
  Clone ID: MRT4577_130139C.1.pep
PFTPYLLLSCRRLCAPLFPTAFYDSEGIRPILWRVYPVPLIVLVVPTLHQMLPAGRAARTAALSFVSPGYCRGAKXCCFFVMVXPPPPXPPPPP

SEQ ID NO: 217700 - protein, 56 aa, Zea mays
  Clone ID: MRT4577_13013C.1.pep
NHLSGNCIFLGIVLVYGEPNNPEKDHVYKKIDYTRSLNIHDSSKSIKGVPLPRISS

SEQ ID NO: 217701 - protein, 99 aa, Zea mays
  Clone ID: MRT4577_130140C.1.pep
MASAFFFFDAEPDCEPSLLPTLDACALCAKPLGRDCDIFMYRGDTPFCSEECRDEQMQLDAIRARQAARSAGRRQQHQQQRSSRTESRHQESMKVSVAT

SEQ ID NO: 217702 - protein, 55 aa, Zea mays
  Clone ID: MRT4577_130141C.1.pep
LPNLVKLQPVSIPSLLPFVPSNPPSTLLSVTNYFLEIRSLFPGGYQILSNSTVQK

SEQ ID NO: 217703 - protein, 474 aa, Zea mays
  Clone ID: MRT4577_130142C.1.pep
GRLLLLAGTNQEQQAPASGLTHPLGHCGDLNRNVLAPAAPYVKKDILFAQQTAENIAALLTPQSGAYYDLWVDGEKIMSAEEPPEVTKARNDNSHGTNFPDSPEPIYGTQYLPRKFKVAVTAAGDNSVDILTNDIGVVVVSDDAGEPIGFNIYVGGGMGRTHRVETTFPRLADPLGYVPKEDILYAIKAIVVTQRENGRRDDRKYSRMKYLIDRWGIDRFRAEVEKYYGKKFESFRPLPEWQFNSYLGWQEQGDGKLFYGVHVDNGRVGGQAKKTLREIIEKYNLDVSITPNQNLILCGIDQAWREPITTALAQAGLLEPKDVDPLNLTAMACPALPLCPLAQTEAERGILPILKRIRAVFNKVGIKDSESVVVRITGCPNGCARPYMAELGFVGDGPKSYQIWLGGTPNQSTLAESFMDKVKLDDIEKVLEPLFTYWNGTRQEGESFGSFTNRTGFDKLKEVVNKWAESPSAA

SEQ ID NO: 217704 - protein, 44 aa, Zea mays
  Clone ID: MRT4577_130143C.1.pep
NGAGFLCALLLLTAEIEFVGVGNACSQHIHPFPWITFGEDLSTG

SEQ ID NO: 217705 - protein, 86 aa, Zea mays
  Clone ID: MRT4577_130144C.1.pep
PWGEMRVYLFELIFKMLRQNYFKCMYLGQSSFFLNHPIFFLPPTKKGVWQSSPLCKKNPRNPFQRRFSVFIQNFTLGVCPGPVDIP

SEQ ID NO: 217706 - protein, 56 aa, Zea mays
  Clone ID: MRT4577_130145C.1.pep
TTKPKSARDRLYQRSKTPYCAFIVDPGTRDPKEKHGLPHLKAKNQLLWRGRSPWRK

SEQ ID NO: 217707 - protein, 68 aa, Zea mays
  Clone ID: MRT4577_130146C.1.pep
GQTRGPRAYKTGKNPGSLKGQGGQGNLSGGVFLQGPGLRGFFKNPVWSPPSPEPPGQDHHKKTQFTGP

SEQ ID NO: 217708 - protein, 66 aa, Zea mays
  Clone ID: MRT4577_130147C.1.pep
INRSDLIWVGLEQLLILINHDINCFTRPHEICSYKLPRSLQGSSTNYSLVATFKPLYNTLTQLQIT

SEQ ID NO: 217709 - protein, 47 aa, Zea mays
  Clone ID: MRT4577_130148C.1.pep
DTKPDSYSAPPTDDTYTKGGVSDPEACSLNEPTAPEPTYCYILGAPK

SEQ ID NO: 217710 - protein, 98 aa, Zea mays
  Clone ID: MRT4577_130149C.1.pep
PGGGKKKVFFGGLGGPPLFRGGPPQNSAPGGGPHSLAPGGGFKKPFGVLGKRNFFRPGDLRAFKGEKSLLGAPFIKNRGEVIQKRGQKGWVHQPLLGP

SEQ ID NO: 217711 - protein, 115 aa, Zea mays
  unsure (1)..(115): unsure at all Xaa locations
  Clone ID: MRT4577_13014C.1.pep
XASSAARVGMARLFSALSRRRPSDTRQGRTINNSGHTHTERPRSTRTMLDTLFARVLLKPRHLLASRFIEPRRNRVLWINHTTTLYEHCGHDQPCSARSPSAMSGRERMATSILC

SEQ ID NO: 217712 - protein, 50 aa, Zea mays
  Clone ID: MRT4577_130150C.1.pep
NLGSFFQGERLCPSNQIDKKTCWLVVSNSFVQVSPGPQYQNRTLLCSPIL

SEQ ID NO: 217713 - protein, 676 aa, Zea mays
  Clone ID: MRT4577_130151C.1.pep
MALPLPPLGLPPPPLRLPPLAGASAPSSHSLTPVLIPRPAATTLPSPASAASPIPSRSPGSLPGGRSKAQRWREEGGSSSAVAQDHSEVQRSFKDVLLAVKPPAPGGAGGVDADDAWVRVEGRQARRRASNRSKPLPRPVPVDLRGKCFNCFSPSHRAAFCRRPGHRAIVCPCRRTALPPPRRALVWRPVSRKPPSTDSPAGDMEGCSLAGMAGPSGGLKKRTRRGQRRKTGPEGGHPVLVAPPPTPVSPARHVRIIERSREVDRAEADLRRALIVTVLGHMSSDSAAIVLDALASRFSFEADALHLRRAASNSFLVFFPSEDHATRVFNGGQSLFIPPVRLHLKRWSRQALASGGSALPLLLDIELRGIPAHLWELGTTEVLLNGFCLIQELHPESVEGIDMSVLKLRAWSFNPDCLPAVLDLHVQEPLVEGEDGAIFPRSLVYHITVKVTRSGVWPEGSLPPPPPSPPGDVDEDHDQDHQRRRLLQHGPSASSFRTSVHSRLGPRAPSSSVAGGPVDAAILPSASGEELTAPVSSSPLVSSVQMLGAPVEAATLPITSVVELAAPGPPPPCLDASPAAGSRLSSAGSRAVDVELGFQGDCSLEALSSIIDLPMGPAMPLACRLNAKPPCFKVYSRRKKAIVVEELMLSTPLQEFKDGLTKPTDELLPPPALIVK

SEQ ID NO: 217714 - protein, 76 aa, Zea mays
  Clone ID: MRT4577_130152C.1.pep
MLLLAQQPRVVVSAEPLPRGHCDHVPHPMQPLSENAEQHASRVLLRFSSHGSHHWRRFATCVRERKQKSLDVGRLV

SEQ ID NO: 217715 - protein, 133 aa, Zea mays
  unsure (1)..(133): unsure at all Xaa locations
  Clone ID: MRT4577_130153C.1.pep
MAASDVESRCFVGGLAWATDDHFLHNAFSTYGEVLESKIILDRENHKFRRFRFVNLFNEEAIPNRLQGLDXKELNGRTITVNEAQSRGGREGGGGGYGGGRGGGGYGGGGRRDGGGGYSGGGGYGGGGGYGGG

SEQ ID NO: 217716 - protein, 64 aa, Zea mays
  Clone ID: MRT4577_130154C.1.pep
LQAESCTTLIGVNSLDLIFIDYGINKMYTILMQHTYLLPNCINPPLHSNQVALKCLTITVKYHI

SEQ ID NO: 217717 - protein, 61 aa, Zea mays
  Clone ID: MRT4577_130155C.1.pep
TPPGLGFSSFQVKAQNFFFFESKRGFSKFGMSNKKLGWFYQKLGTLWVLNYNLILGGPQFP

SEQ ID NO: 217718 - protein, 149 aa, Zea mays
  unsure (1)..(149): unsure at all Xaa locations
  Clone ID: MRT4577_130156C.1.pep
AHARPPHTRGERAANPPGRPGEPNPRAATEPYKHRPARGSNTRGRTTNAGAPTRNNNGGHTXGQRGASPHERXQRKEKRAQSDRERSPETREQARRASAKGYFEGTHDDAHLTXAADLRAPGGQTPAIERRSTAGHERGSPETKREPRG

SEQ ID NO: 217719 - protein, 42 aa, Zea mays
  Clone ID: MRT4577_130157C.1.pep
IVSSHGGICFCAPIKSDHHYLDHEYFPVHMNLLVHYLWICTY

SEQ ID NO: 217720 - protein, 69 aa, Zea mays
  unsure (1)..(69): unsure at all Xaa locations
  Clone ID: MRT4577_130158C.1.pep
MEEGRQLEAAAFGFPAPVQPGATRVGWIGIGVMGGAMAKRLLAVGYAVTAYARAPSRAESLXAAGASLA

SEQ ID NO: 217721 - protein, 314 aa, Zea mays
  Clone ID: MRT4577_130159C.1.pep
MQAATRSVSCIGAQPSVLIRCGGGALSASPGGLGGGGCRVRVVAVLRCCAQEKRPPRVRKSKEERREMVESFINSYRASNEGKFPSVNLTHKEVGGSYYIVREIVRDIIQENRVLGPGGLDAMVLNFEDFADSSGSSMKHELGQDNIEILDTSGSEVSKSYVPEISSTDGSFLLQGNAISNHRLLGSSNILEVGVLNSVVQNGSVADAIFMETNLAKQDEVPSRGSIEFDLNTSEEQARLFAQVSDSDEEVTLNNQADAQDGTTNSGTDRVILPLESFAVYENNASLLRDHEAHCLMIIMMDQLIGPWMTQVFP

SEQ ID NO: 217722 - protein, 82 aa, Zea mays
  Clone ID: MRT4577_13015C.1.pep
FFFFFFNCSLPLAYLSLRLRDFSSERIYKMDPVHFSQAVELLSCNLHCNASYDNTLNSLHMGHVHRCELVGRGSATNAGRER

SEQ ID NO: 217723 - protein, 57 aa, Zea mays
  Clone ID: MRT4577_130160C.1.pep
VSEPAKGNFASTKRPPPLSGFSQPCSELCNKLRVRDRPIHYFIPFLKALSGVIIFFF

SEQ ID NO: 217724 - protein, 233 aa, Zea mays
  unsure (1)..(233): unsure at all Xaa locations
  Clone ID: MRT4577_130161C.1.pep
KKRRKKKKRXXREGXPIGYLVAGREFLSKTQIFASHFSRRCSSSSPVVAMDRGATAPPCLPIRLILMTLTALETVTVHATVECITLTEETFTDDTKEKDTESFEIYRIPWRRPAKTLQHYRRTSQKGYGTCKRTSYWFFDRRARKPGCSTGDIHSPPTFKEVHAGDEPAKKKDPRTRNPSKTSCRMHPQEQVRQRLPLLEARKIRQSCVECIRQRTMLCNVDNLSWNIRRHRA

SEQ ID NO: 217725 - protein, 77 aa, Zea mays
  unsure (1)..(77): unsure at all Xaa locations
  Clone ID: MRT4577_130162C.1.pep
ISPTARTNQTWTKSTVRKAXRXQLVTKGASKGVPATGVVKKLYRLLPCIGAMRQIRRSHKSRXWLIRYVPLQKLQIE

SEQ ID NO: 217726 - protein, 390 aa, Zea mays
  unsure (1)..(390): unsure at all Xaa locations
  Clone ID: MRT4577_130163C.1.pep
MALPKPRPPTPTASAATGTSSSRIDSPSLKAALAMALIHYNRLPGKANATAGTSPPSLLHWKRKAKDRKREILRLREELKVLQDGVRGEEMEPPVASCRCHFFDGCRDLRPQQGGGGGEHWVDEVLRRRFLRLVRWKEKRRRVDRSLPSSSLIDFNSEDEMQQLSMSTDFLVELSDGIFAKSEAGHSFATFSHQAVDFILATLKNILSSEREKDLVGEIIDSLVTRLMKRMCTVPEKXSHQIQDQLAAQMXFSVQHLFRKLGNDEFIGQRVILVVSQKISNVSERLFLADPFADAFPDMHDNIFIMIQLLEFLISDYMKVWLCCEHINKRLFEECTRSILKARNDLQILENMNGLYVVYIERVVGRLARDVAPAAHQGKLDLEVFSKLLC

SEQ ID NO: 217727 - protein, 75 aa, Zea mays
  Clone ID: MRT4577_130164C.1.pep
SPLILGQKENEIRVQKKHLGAVYSNLKGLKNRVFFSVSQGGGPFYRPRNPPQNIRLACGRPNPLVVYPPRGNRPD

SEQ ID NO: 217728 - protein, 93 aa, Zea mays
  Clone ID: MRT4577_130165C.1.pep
KKKKKISSLIYPLPQFFFPSFSSPPRTAGRLKLISSSDFFLQPCPTKLLPPLTAARRRGDFFVRRSSPANIQPPSFSIYLPSRSFQRLISFDL

SEQ ID NO: 217729 - protein, 152 aa, Zea mays
  Clone ID: MRT4577_130166C.1.pep
ILFTGATKLTGRRHLDQVEGLSVRRLLFDHMFFSFNELLLNRFYQLRPWILCSLLIRILNARLDLAMKAGPVRCQPRPSTVRPPGVRCEIPTVVQLSRDPRFQVVMRQCFARTPQRPCPAPCLKPQRHQNPLHPWPSLSAFSLLGSCLLLRL

SEQ ID NO: 217730 - protein, 72 aa, Zea mays
  Clone ID: MRT4577_130167C.1.pep
PAGSGRLRSKYKITYQFYRVFPNGEVQYLHPKDGVYPEKVNPGREGVGQNFRSIGKNVNPIDVKFTGKATFD

SEQ ID NO: 217731 - protein, 140 aa, Zea mays
  unsure (1)..(140): unsure at all Xaa locations
  Clone ID: MRT4577_130168C.1.pep
VSGQALASYCIEFSLLSIPNHESSILISSNSSQCQIIVIRSATIPRRAAAFILPAAEPSGASAASSLLFLCAGASAAGPPAVRASDAGPSAVGPSAAGPGASAGASALASSDGAGAGASSSLXGGAPFFPFVAGPGAGAV

SEQ ID NO: 217732 - protein, 166 aa, Zea mays
  Clone ID: MRT4577_130169C.1.pep
MAMSTQASAATRHLLAAAWAPAAKPRQLSSQLALPSSSSRGPAPLRASTEEAVEAPKGFVAPQLDPSTPSPIFGGAAIMREGPNLLKLARKEQCLALGTRLRSKYKITYQFYRVFPNGEVQYLHPKDGVYPEKVNPGREGVGQNFRSIGKNVNPIDVKFTGKATFD

SEQ ID NO: 217733 - protein, 137 aa, Zea mays
  Clone ID: MRT4577_13016C.1.pep
RVDPCVRPRVRANDRVRQVERHIRPPSKSMPSRPVSSNGIRDDHAKRKQVVKRRFDDDDDEDDPLAMIRNMFGYDPSRYAGRDEDVSDMEADFATIEMEEKRSARIARQEDEEQLRLIEEEERREQERKRRKMARGR

SEQ ID NO: 217734 - protein, 199 aa, Zea mays
  Clone ID: MRT4577_130170C.1.pep
MAMATQASAATRHLLAAAWAPAAKPRQLSSQLALPSSSSRGPAPLRASTEEAVEAPKGFVAPQLDPSTPSPIFGGSTGGLLRKAQVEEFYVITWTSPKEQVFEMPTGGAAIMREGPNLLKLARKEQCLALGTRLRSKYKITYQFYRVFPNGEVQYLHPKDGVYPEKVNPGREGVGQNFRSIGKNVNPIDVKFTGKATFD

SEQ ID NO: 217735 - protein, 100 aa, Zea mays
  unsure (1)..(100): unsure at all Xaa locations
  Clone ID: MRT4577_130171C.1.pep
NFYPFFPQGGLRFLNLLPFRKLLRLPXRKVFFLGGKAKGGGYPFGEKVNLFCQVFSVLFFFANARFFLNQIFFFLHFRLFFKAFGFWFKVPPPPFFFLTF

SEQ ID NO: 217736 - protein, 134 aa, Zea mays
  unsure (1)..(134): unsure at all Xaa locations
  Clone ID: MRT4577_130172C.1.pep
VAVGELWVXQIRAGNCCKGTMSRRGYNILADKYYISTGLKHDKTQLKNRRDQLKGLYGFWLQLNKRSGLGKNPDGTVDAPDWWWKQNAKTLEWKKLKYGSPGYIDELEEMFQDIVVDGSSSYIPGQEFDEPTAT

SEQ ID NO: 217737 - protein, 59 aa, Zea mays
  Clone ID: MRT4577_130173C.1.pep
VQLRTDVRFYSPKDIRSFIPQELRASFCGLLALLSNLVVVPRNADLSTFPLQLQLAKFK

SEQ ID NO: 217738 - protein, 287 aa, Zea mays
  Clone ID: MRT4577_130174C.1.pep
MILRSAPRRLHLLRPHHLRLLSAAALASAVPVPAPAQSPIEWAEAPLASVRPATADASLFHVSLDLSAHRGLLASHTAAGQFLRFRLPASSYHIFLAIASPPPPPALETLALAGPPSCFEFLVKRLPGTPSARLCDLRPGDLVHVGASVVGRGFDVARISDARDVLVFATGSGISPIRSLIESGFAENKKTDVRLFYGVRNLQRMAYQERFEDWESRGVKIVPVLSRPDSQWTGERGYVQNVFSRMKSTVNPPSVGVILCGHKQMSEEITRVLVADGLSKDRILTNF

SEQ ID NO: 217739 - protein, 56 aa, Zea mays
  Clone ID: MRT4577_130175C.1.pep
EALGGSRRLQKGCWCEPLKPPQGKLGWPEGSSPQVVCFPVLFLGEFGPGVAFTVTL

SEQ ID NO: 217740 - protein, 153 aa, Zea mays
  Clone ID: MRT4577_130176C.1.pep
MFSGAGLAPLMDMLHWGPAALLLLICTCATTGLLLKPPPKAEGHTPHELFPTVSASIVARDSTLTSPSSAGLPRQRRGAHNHRLCVYAHTPTQTYYHPYCLTEYAYVRSRRTTSTPTTMTTSYSLLTNPCCWLTHMACIGNQVWDDNIPRKLA

SEQ ID NO: 217741 - protein, 66 aa, Zea mays
  Clone ID: MRT4577_130177C.1.pep
PRSRFASDMAGSVSCIQIHLAKNYAKCFCSKYTPGLLVLLMHVPPRCFLNDAYNSGTSKPIKKNDE

SEQ ID NO: 217742 - protein, 67 aa, Zea mays
  Clone ID: MRT4577_130178C.1.pep
SFPCLNRAPISLFTPPPNRGASKSLLIGGRSSLCGPLVVKPQRKPARFCLAQGSQIAIRAPLVGLWL

SEQ ID NO: 217743 - protein, 145 aa, Zea mays
  Clone ID: MRT4577_130179C.1.pep
SGGGRIPTRDNRKQSKLHNNLHLPNLAHTPPSPGPEPDEQDAQPPNCYLRLSQPPRPALPPLGHHDNNNSDVDIHNSVDMNNINLPLLLHAVGLVPVCGYEKIKSLLGTSLQAQKMIAFNITERQKGTDLQSTETAKCFIDCDEA

SEQ ID NO: 217744 - protein, 50 aa, Zea mays
  Clone ID: MRT4577_13017C.1.pep
VMTIDAGRYSPAGRIKRREVRTRPEEDAGRLYATLRVGLRDERTRIPTRE

SEQ ID NO: 217745 - protein, 117 aa, Zea mays
  Clone ID: MRT4577_130180C.1.pep
GPVGFSFPCLSRAPLSLFTPPPSRGASKSFLIGGRSSLCGPLVVNPQSKPARFCLAQGSQIPIRAPLVGLCLLKKFFWAVNCGKNFCRLLAVKKLNPFGGNPKKALKVLPKMFSPFP

SEQ ID NO: 217746 - protein, 46 aa, Zea mays
  Clone ID: MRT4577_130181C.1.pep
APGLLNLHIIKPFQLYLSQYRLHIYCVSRSIRTQWLQPEENPSSTL

SEQ ID NO: 217747 - protein, 93 aa, Zea mays
  Clone ID: MRT4577_130182C.1.pep
LLWLSGINSPVSCEPTRLWAVPASTSTSPRPPPATRPSFRKDRWHGTRLQLPSSASGPPSRYQPTKAGLSSSAENDPTVTVTDRGGRDKHKDG

SEQ ID NO: 217748 - protein, 38 aa, Zea mays
  Clone ID: MRT4577_130183C.1.pep
KKKRGTIGKIMGRGGPVFIKDTTLLTPACHYFIFYWGT

SEQ ID NO: 217749 - protein, 75 aa, Zea mays
  Clone ID: MRT4577_130184C.1.pep
MSLADELLADLEEAAEEEEGGSYGEEEEEPAIEDVQEETQLDLSGDSVKTIAKLWDSKMFAEIMMKIEEYISKQA

SEQ ID NO: 217750 - protein, 101 aa, Zea mays
  unsure (1)..(101): unsure at all Xaa locations
  Clone ID: MRT4577_130185C.1.pep
MTFCRLLNRCGEAARXLPLGARCFGVRVSPTGEKVTHTGQVYDDKDYRRIRFVGRSKEVNENFAIDLIAEQPVSEVETRVIACDGGGGALGHPKVYINLDK

SEQ ID NO: 217751 - protein, 244 aa, Zea mays
  unsure (1)..(244): unsure at all Xaa locations
  Clone ID: MRT4577_130186C.1.pep
MFGRMPRKTSNNTKYYEVLGVSKTATPDELKKAYRKAAIKNHPDKGGDPEKFKELAQAYDVLNDPEKREIYDQYGEDAIKEGMGGSGGADMHSPFDIFEQLFGGGGGGFGGGSSRGRRQKRGEDVVHTMKVSLEDLYNGATKKLSLSRNVLCGKCKGKGSKSGATATCSGCRGAGMRMITRQIGPGMIQQMNTVCPECRGSGEMINDKDRCPSCRGNKVSQEKKVLEVHVEXKGMQHGQKIVFQ

SEQ ID NO: 217752 - protein, 100 aa, Zea mays
  Clone ID: MRT4577_130187C.1.pep
HNKRAIKHKSSCYMRVVIGIRAVRSSLWWPINATTGNSLVGGTWDVIFPQSGSGSMVSAVRHTYVQLDVGRPSPSSNMLYLLCPAYVDQGKQEFLFNETK

SEQ ID NO: 217753 - protein, 120 aa, Zea mays
  unsure (1)..(120): unsure at all Xaa locations
  Clone ID: MRT4577_130188C.1.pep
GDYLRPWRGILLLALAYRLYWRPYATHPSRRPPPRFLSSAVSGTLDHLKSPPFARPAARNPAYYPWYRXXGRHKRTLFIHTHLTTHPLSLMFYPGXPAMEIGSSDFPNARTAGTSASAKS

SEQ ID NO: 217754 - protein, 157 aa, Zea mays
  Clone ID: MRT4577_130189C.1.pep
TGAVHVFLDVYYVSKDWLLEKRVIGLRLIETAHTGENIAEGVMSVLDDYGVVNKVFSITLDNASSNSKAMEKLSPSLSGYVGTLFLHQRCACHIINLIVKCGLKRLQPYLDSFRTAIVFLNASNQRIAAFKSYCVAMNVRPRKFGIDMAVRWNSTYL

SEQ ID NO: 217755 - protein, 138 aa, Zea mays
  Clone ID: MRT4577_13018C.1.pep
MPTLGVSVRSARVTSNPVGLDTNNPHKQLNALRTGTRTNTKHHHSPMAYFQEVDYCSEEVRSVAPAGGFGRYGGGVQQHVVKEKFEEVDTVSRAGGHHHGHGHHGHGVVVRETRVEEDFNTCTGEFHERKESFLARAN

SEQ ID NO: 217756 - protein, 102 aa, Zea mays
  Clone ID: MRT4577_130190C.1.pep
KIRKVCGHLDHVCKKLEETSIVCEQDLETKNPSWEIDDSPSLDDEHPLDDDELSEGYSTEDPELWEMVFDDLKWEEIKANVSFEEHYRVINYRFEEIIDRNM

SEQ ID NO: 217757 - protein, 106 aa, Zea mays
  unsure (1)..(106): unsure at all Xaa locations
  Clone ID: MRT4577_130191C.1.pep
IRACVSAGLSRACGSRSSGVRAPPLASATAARVRLKSFVXIERVTLVNYDRDYDAVXVIVDVLDQNRALVDAPEMVRGQSNFKRLSLTEHQIEIKRVPXRSTLIKA

SEQ ID NO: 217758 - protein, 58 aa, Zea mays
  Clone ID: MRT4577_130192C.1.pep
PQNSAGERIDGSRPHSVYAPANSTLPHQLLSKSRVSVLPQHQLMPLCKEFPASPPTLW

SEQ ID NO: 217759 - protein, 67 aa, Zea mays
  Clone ID: MRT4577_130193C.1.pep
VGVNEGPVQVNVEGVPVGDGNPNHPPVIQPLTIGQTAAKNFPKGPEKERDQGMTSASAARRPVRVTG

SEQ ID NO: 217760 - protein, 271 aa, Zea mays
  unsure (1)..(271): unsure at all Xaa locations
  Clone ID: MRT4577_130194C.1.pep
MSSRDTLILSGQRRPQATAAPTATMAATATATSLGLALHRRDHDPSSHRRPVPSSCLTSTSAYRIRRAKCCRRGVPPPSAAAAAGGGLEGNDISTILKHSLNNETMPSSSTKATSSMADHVSLSSLHHHPSSQSSCFATSKPNHDSTHKYNHSPKIPRRSLALLPASSLLFSASSSFAIDNANAPSSSTIDTTITDRIFMDFSICPSFFSNDRTLGAELASCPDSEPLGRVVFGLYGRLLPITTANFKTTCTTSAYRGTLVHXVLQGQFFA

SEQ ID NO: 217761 - protein, 71 aa, Zea mays
  Clone ID: MRT4577_130195C.1.pep
MARACVFLVVLLLAAVAMAPFAGAARIDVVEGRSMASADAPEAAADAPAPAPGPDSSSTPSPAPSSSSSSD

SEQ ID NO: 217762 - protein, 62 aa, Zea mays
  Clone ID: MRT4577_130196C.1.pep
LLGATQEQGSETPAAGRAFPFSSTRGSERNTRPAPWVTSNDRRRRCCPRSSVARPSPGAVSP

SEQ ID NO: 217763 - protein, 357 aa, Zea mays
  Clone ID: MRT4577_130197C.1.pep
MVVLVATAARWPGGSTAARARPPAARGRAPIRFAAEPEHKAATVRFEKYRLLSWMKPIRHDVRAQMSNVNVGAGSYGGDEANGHGEHLDTSATGDPNKLAKQLSGSRYLQPVGVMLFLCALATSFFVFFKGQSSAVVAMLAKSGFTAAFTLIFVSEIGDKTFFIAALLAMQYQRALVLLGSMAALSLMTIVSVIIGRIFQSVPAQFQTTLPIGEYSAVALLAFFGFKSIKDALALPDNANGNLQGNSESGELAEAEELVKEKVSKNLTSPLEVLWKSFSLVFFAEWGDRSMLATIALGAAQSPLGVASGAIAGHLIATAFAILGGAFLANYLSEKLVGLLGGVLFLLFAAATLFGVF

SEQ ID NO: 217764 - protein, 56 aa, Zea mays
  Clone ID: MRT4577_130198C.1.pep
SLRSFHIRIRRFSCQHLQTCAAKGSYVGWRFMWSSRNSLRRHAVNSCRARFCLVHN

SEQ ID NO: 217765 - protein, 162 aa, Zea mays
  unsure (1)..(162): unsure at all Xaa locations
  Clone ID: MRT4577_130199C.1.pep
NPKPLPYFPGPPLPQRVPXPPPYVPRNPXNPPKNPPFPPKKKISPNLKRPLPPPXPXDPPPPSPKYPLPPHPPXQFPPPPIQPPGFSPPPPPKVKPQVPPPPPXLKPIPPPPESXDSKPPLNPXRSPLSPPPEPQPPQSPPNTRGQRPSPHPPPIQGNQFPT

SEQ ID NO: 217766 - protein, 79 aa, Zea mays
  Clone ID: MRT4577_13019C.1.pep
GEAPPRLDPLVLLRIPRQLRADACRRQRASSCSASTWRCAPPSRPSTCRTVQLRSIDLRDAGLSMDLHETIDSHLLNER

SEQ ID NO: 217767 - protein, 40 aa, Zea mays
  Clone ID: MRT4577_1301C.1.pep
APRVQVLSPVDPFLRLFSMFDVVLSLSFRTGSLSLVSAHS

SEQ ID NO: 217768 - protein, 115 aa, Zea mays
  Clone ID: MRT4577_130200C.1.pep
SPSRYHGSVARCLGPSTDPEDKVALKAAPWARRLDQPLQQRIQLLQPLPCLIRRLSPRSLLAPLSRRREADYLPTRPPLHSRTDRTRTVQNAHHPPALGASGRKSPRNGSVSGAP

SEQ ID NO: 217769 - protein, 121 aa, Zea mays
  unsure (1)..(121): unsure at all Xaa locations
  Clone ID: MRT4577_130201C.1.pep
VIRSHARCAKDILNLAARDGXSCLGNAIGNIRHVVTTLRRSPLQLEAFDKCAKDCGLDPKKTLPLDAATRRNSTYIMTRDAAYYKNAVDTGAKKDMDKYGHINPPSTDGSNAPTMRELPEK

SEQ ID NO: 217770 - protein, 68 aa, Zea mays
  Clone ID: MRT4577_130202C.1.pep
RSMSTRTNAESQNPNLVFFQVIHEINEQGDFTWSTGCFAGSGGGQEVVDGHLLVLVLLVWNLARAGNK

SEQ ID NO: 217771 - protein, 142 aa, Zea mays
  Clone ID: MRT4577_130203C.1.pep
SSRPGDSFVQLTPIRILITPTRFQELQSYNMSEDTHPRTPEIPHQKRVGREPRSVRPCHGSQRCTGYHQRCQCWMKDLDLTAIASVCSAKLRAISAVCRKKAPHSWNVLLTCHPRQDALARAHARRPRWRRPLPHGTCNACP

SEQ ID NO: 217772 - protein, 649 aa, Zea mays
  Clone ID: MRT4577_130204C.1.pep
MAKGEGPAIGIDLGTTYSCVGVWQHDRVEIIANDQGNRTTPSYVAFTDTERLIGDAAKNQVAMNPTNTVFDAKRLIGRRFSDPSVQSDMKLWPFKVVAGPGDKPMIVVSYKGEDKQFSAEEISSMVLTKMKEIAEAYLGSTIKNAVVTVPAYFNDSQRQATKDAGVISGLNVMRIINEPTAAAIAYGLDKKATSSGEKNVLIFDLGGGTFDVSLLTIEEGIFEVKATAGDTHLGGEDFDNRMVNHFVQEFKRKHKKDISGIPRALRRLRTACERAKRTLSSTAQTTIEIDSLYEGIDFYTTITRARFEELNMDLFRKCMEPVEKCLRDAKMDKSTVHDVVLVGGSTRIPKVQQLLQDFFNGKELCKSINPDEAVAYGAAVQAAILSGEGNEKVQDLLLLDVTPLSLGLETAGGVMTVLIPRNTTIPTKKEQVFSTYSDNQPGVLIQVYEGERARTKDNNLLGKFELSGIPPAPRGVPQITVCFDIDANGILNVSAEDKTTGQKNKITITNDKGRLSKEEIEKMVKEAEKYKAEDEEHKKKVDAKNSLENYAYNMRNTIKDDKIASKLGADDKKRIENAVDGAISWLDSNQLAEVDEFEDKMKELEGICNPIIAKMYQGAGADMGAAAGMDEDAPAAGGSAAGPKIEEVD

SEQ ID NO: 217773 - protein, 78 aa, Zea mays
  Clone ID: MRT4577_130205C.1.pep
HPSSVAAAVDVVRCSIIRILQYRHDSCRRPIGRLFPPVRPAATVAASLLEAIHPPTTHRPLKNLKESPPPVKFCPRKA

SEQ ID NO: 217774 - protein, 46 aa, Zea mays
  Clone ID: MRT4577_130206C.1.pep
LKDFTHNNPINLLTKHTKTHLDTNANIQCTKSTVLQCHIAHSPDVH

SEQ ID NO: 217775 - protein, 599 aa, Zea mays
  unsure (1)..(599): unsure at all Xaa locations
  Clone ID: MRT4577_130207C.1.pep
RFFKYSICSTTFQLAHASFRLYCVRNSHVQSVKLGPRLLGDAPKINISPPETEMVDEEGSSEVTPALKLYDEEINMKLLLCGVPCTLIRGSKLQNRISASPPPLEAASLPRGMVTMRCDISTCSSSHVSLLVSGSAQTCFDDQLLESHIKNEIIEKSQLVRALSNSEDKLPSSEPLTSMSTACGASTFEVWMSLPKWAAQVLKHLAPDISYRSLVALGIGCINGTPVASFERRDADRLLFFCTSQCKDLANENGPYFHLPRWXQPPLPRTEQSLGSESKQNLLGANGVLEDKKHMMEGPSSFSAVKAKLKPATMRPIPHSQKQQMHPFMCLPETSFHETSIVKPSLTVAPTVKHNSVSYAPTTHRKSTSGPSHTPSVIQLNPLPMKKHGCDRLSIQVCSEEDFLKDVMQFLIQRGHNRLVPHGGLAEFPDAVLNXKRLDLYNLYKEVVSRGGFYVGNGINWKGQVFSKMRNHTATNRMTGVGNTLKRHYETYLLEYELAHDDVDGECCLLCHSSAPGDWVNCGXCGEWAHFGCDRRQGLGTFKDYAKTDGLEYICPPCSLANYKKKPPPPKAANVSLVWINQTFDATARKCEVLKLLAQ

SEQ ID NO: 217776 - protein, 124 aa, Zea mays
  unsure (1)..(124): unsure at all Xaa locations
  Clone ID: MRT4577_130208C.1.pep
FRKVYGIILESNFVESGAQTNSTLESXKVWKELYPEEPFXLLFTRTFDTAVDVNPXVXEDITYDLVLAVNRQSSFYYHVXTPTMHDPRFLQEALSRYKVFFYLIKINHLKXISSLSXPTYYVDL

SEQ ID NO: 217777 - protein, 61 aa, Zea mays
  Clone ID: MRT4577_130209C.1.pep
SSRKKNIMIHNWEHEERRERQMKASRMRAAHIPVNSTDRVSGGHHQILGAIGHGDLCYTTR

SEQ ID NO: 217778 - protein, 71 aa, Zea mays
  Clone ID: MRT4577_13020C.1.pep
PPVMAKSFLPPRTTNGIWFAGKVCLGSKTLLCCLCLYVCIIYVHYPGSRCGTPMYLMAKLLSRLVLVLSEV

SEQ ID NO: 217779 - protein, 130 aa, Zea mays
  unsure (1)..(130): unsure at all Xaa locations
  Clone ID: MRT4577_130210C.1.pep
GPLPRGPLPFXRSPRQRRTXGARAPPQDXGGGFGGGGRGLRGFPLPRAPREKKGPQGPRGGRRGKKAPLFRLIDPPVWWSXPFATGGCVKXIERPPFCGGVRMYALVLCPNKGGSVIFGMYTCVYAWACV

SEQ ID NO: 217780 - protein, 101 aa, Zea mays
  unsure (1)..(101): unsure at all Xaa locations
  Clone ID: MRT4577_130211C.1.pep
MFGRAPXKSDNTKYYEILGVPKSASQDDLNXAYRKAAIKNHPDKCGDPDMFNGLAXQASEVLSDPHKRXIHYHYGDNALNERMCCAGSHVXDPFRILCLFL

SEQ ID NO: 217781 - protein, 114 aa, Zea mays
  unsure (1)..(114): unsure at all Xaa locations
  Clone ID: MRT4577_130212C.1.pep
TSALTNARHGAHQGDNDSAWREAHXHDPACKQAAQHAEKTIQERSMSLFPYELLXILRAHVQVAEHFGKFDNLMKLKTCTEEDKMIDDVHNTLECVFVINSASTEXHDEYSSQR

SEQ ID NO: 217782 - protein, 277 aa, Zea mays
  unsure (1)..(277): unsure at all Xaa locations
  Clone ID: MRT4577_130213C.1.pep
HWVPRGRPRISRHLTMVNPNTTGNPLSAGSLALFMATALPRGEDAKLKNGTEAVALAVHAGMLAVGFRLDGIGEDEKTESYADAENPNPLPKTWNASSLYTFRYKHAQSAMDYHINVHKLGGKAAVSAIAIGDDKPKNFDVTTKEYLSESMLPLSIPEDVSTEDAAKKLMDLFISSGRLNDLGSLLKISVIQKLAPSLQKSGYEEDSGASRTQEGATXGDNSAPRPAHPSXPRQPEDPEPARPYPLSRSSGRTASARETSTRAHTXIRGRVRGQSSP

SEQ ID NO: 217783 - protein, 223 aa, Zea mays
  unsure (1)..(223): unsure at all Xaa locations
  Clone ID: MRT4577_130214C.1.pep
YSHSSVCRHCLLHGTCNGIVFWHQSDRLILLLTHNVHGQAFLQCCPTHDNPRPSVSIGPRESGPKTSTATLAXELPGVATYQDARYPQLSSQTTNSSLKYTXSLDQLEGLCAIGMTTXCAPWHXETXEYYCSGIDXPGHSLHFIYNMFCGTFQGDCAVLIIDSXTDGFDAGISNDGQTREHDLLAFTLVVKHMICCCNKMDATTPKYSKARYDEIVKEVSSYL

SEQ ID NO: 217784 - protein, 61 aa, Zea mays
  Clone ID: MRT4577_130215C.1.pep
HGHRDYINDAPYHNALDYYTESALIGPVAQTLYIIQHQSSAKPQTVTYVRTNPPHYEKSRT

SEQ ID NO: 217785 - protein, 60 aa, Zea mays
  Clone ID: MRT4577_130216C.1.pep
SHPIPLQYNSSCLTSIRFCQPNPRAGIAKKSSLATLGESDLKENNVFLRPELNAPLCDAH

SEQ ID NO: 217786 - protein, 131 aa, Zea mays
  Clone ID: MRT4577_130217C.1.pep
PCFYLTPAREAALVSVVWKESTQEHDDEWALATAQGGATAGLGLLHTRAAVAAATRIRPTLIRTPFRRSVWFLRLQPPVSIPRGPSPPAKSNCDRTWWPPVRLRWLSSRRFFCAGMLQCLCVWLWVIRCEV

SEQ ID NO: 217787 - protein, 187 aa, Zea mays
  Clone ID: MRT4577_130218C.1.pep
LAARLAQPPLLSSPSRYLSVGGRFPSRGSPCVPRSCVSQLFPFLALVPCYCIGSSSFLWSRSPLPARLSQAPMAPFFPELPHVAPLARISSLRSPWLPAAARPSSDPLRAHRTASLDRPSFHGCSRIPSVGRVDLLAAGGSGPGCCRALPCKLPRPGGWCSLTSSRPSPGARAGHRPCHGASLPPAA

SEQ ID NO: 217788 - protein, 36 aa, Zea mays
  Clone ID: MRT4577_130219C.1.pep
HASDYMQGWQYPVCCPRNGKSTSTSSRSLRFPFVIN

SEQ ID NO: 217789 - protein, 52 aa, Zea mays
  Clone ID: MRT4577_13021C.1.pep
SGFSGCFFISEKETHFCISGYSCTRVEVKFETRDEELRIKLLEIALVKAKPS

SEQ ID NO: 217790 - protein, 65 aa, Zea mays
  Clone ID: MRT4577_130220C.1.pep
QQPLLSFCAHSASGLELNLVYISFTFPFHPAERDRSLPQELADCSFFLFHFFPSSADGSPSTTRR

SEQ ID NO: 217791 - protein, 145 aa, Zea mays
  unsure (1)..(145): unsure at all Xaa locations
  Clone ID: MRT4577_130221C.1.pep
MNHPSSSSSSAQPPPAPAAADEATSLAXGFRFHPNDDELDSYXSSARTXGRPFKDNGAAMGTFTRXEPWDLNGRSRLRSRESQWHLFMRLNGRDNNXPSTKRCTQPRIXKITVNDRQKHNGPXIVGMRKTIAYKASPCHIDVSLN

SEQ ID NO: 217792 - protein, 206 aa, Zea mays
  Clone ID: MRT4577_130222C.1.pep
AGRENPSPPRFTPPMVAAARIALRPPPLSPFLLATPPPFVHQVTTRLGDGSRGAQQSGQDTLNESFKIAREMEAPPSARNRCITSSDSSPFRSFAFVVDEKKAAKGASEKRAWRRRHTILPLAHGVLKLSPHLAGIPGAIHHLCRQACCPSASLAVLPRAARLCGLVWFGDANTPFVSSSPPNLLHEGIKFHSQAAKWGISGFISE

SEQ ID NO: 217793 - protein, 49 aa, Zea mays
  Clone ID: MRT4577_130223C.1.pep
LEKHNSPLLTDVYNNMLIIFTYPIPLNFLRLLIYTFILLHTITFSNTNL

SEQ ID NO: 217794 - protein, 115 aa, Zea mays
  Clone ID: MRT4577_130224C.1.pep
VSPGGFFGAMVAPPPQNKRRIFLFFTPVGGDKCHGLIPFMRPVVSVFLMGQLKIFPPPPAGVFPGVEVSPKWNGGPEFVLPFGGAPIFVKVSWSMVDPRPLKGSPVCFLASPGEG

SEQ ID NO: 217795 - protein, 115 aa, Zea mays
  Clone ID: MRT4577_130225C.1.pep
ATANASSEGCWLGVFMPHRTICIARTWSKVWPVRLSSASTPVRRRSQGGHTPTGGATHTTTPCLRRWSERRRARRAVWPSTGRGVKRARRPVAQVQALGLSSPWKPRRKRGAWSR

SEQ ID NO: 217796 - protein, 129 aa, Zea mays
  unsure (1)..(129): unsure at all Xaa locations
  Clone ID: MRT4577_130226C.1.pep
PRVRFYFISSRPSRSKGTSYSFIRHNISIIAPTKNKLLAVLQQRDYXXNPVTKQINLVAHHPFFSCCHNKEDATNDRSXQQLSMLNEXYDPRCSASLTAGVVVTTSRITTIVSSVLAPASSAFLPFFVT

SEQ ID NO: 217797 - protein, 43 aa, Zea mays
  Clone ID: MRT4577_130227C.1.pep
MSSGGGRGKPKGSKAVSRSTKAGLQFPVGRIARYLKAGKYSER

SEQ ID NO: 217798 - protein, 50 aa, Zea mays
  Clone ID: MRT4577_130228C.1.pep
MHQLSTGPSAGTGSVRIRPMSALAPVLDNMTPDLAWIGYSYRYRHAASLV

SEQ ID NO: 217799 - protein, 248 aa, Zea mays
  unsure (1)..(248): unsure at all Xaa locations
  Clone ID: MRT4577_130229C.1.pep
GRELISLLPVHLLHPCIHRHPWIHAASLQPLGLHHARSCARPASCSHARPWFHGRCSLKLSFHGRSSWPRFPGIRARPSLCCRPPMDARSSPSPTRASASLFSVPGAGFPAGSLSHGRLLPLAIGCRCITPRKRSTAVPSVGFSSLPWLNAWTPWRSRLHASSSRVFFPIELALNSTAPSSPSFFSSSARAVLPEPRCRLLVAVLPALTQLSLVTAPLYXYSYXMSPPSFRRISNQIEIWVSWITYFT

SEQ ID NO: 217800 - protein, 35 aa, Zea mays
  Clone ID: MRT4577_13022C.1.pep
NYMDLHGSRSGPRLGWPGCRTVDVDPHPPLPTHAP

SEQ ID NO: 217801 - protein, 62 aa, Zea mays
  Clone ID: MRT4577_130230C.1.pep
LPVSSSRFLRRRPRCGQISRRRPLGIAGSPASVHTPHHSPLHSTHTRPAWLRRARSRLRGRH

SEQ ID NO: 217802 - protein, 261 aa, Zea mays
  Clone ID: MRT4577_130231C.1.pep
FFRGASVYLAVQLISLLPVHLLHPCIHRHPWIHAASLQPLGLHHARSCARPASCSHARPWFHGRCSLKLSFHGRSSWPRFPGIRARPSLCCRPPMDARSSPSPTRAPASLFSVPGAGFPAGSLSHGRLLPLAIGCRCITPRKRSTAVPSVGFSSLPWLNAWTPGPLCSSVPRTPWRSRLHASSSRVFFPIELALNSTAPSSPSFFSSSARAVLPEPRCRLLVAVLPALTQLPCWPRLYTLLLPDVASSASFRRISNQIEIW

SEQ ID NO: 217803 - protein, 85 aa, Zea mays
  Clone ID: MRT4577_130232C.1.pep
REAEFSFCSGLLSFFPRLLGIIRKAAIILCSLGTCSILGASCGVGSALMGCPRVNSLLFWVAAGQQKSLFDMALLQNRHVLIMLW

SEQ ID NO: 217804 - protein, 40 aa, Zea mays
  Clone ID: MRT4577_130233C.1.pep
MKLLVGGQRRQRGFGKALKEQRARLYIIQRCVVMLLRWHD

SEQ ID NO: 217805 - protein, 68 aa, Zea mays
  Clone ID: MRT4577_130234C.1.pep
GIKTPPWFFKNPPRGLPGAAPGLFFRGGNRGPFFLGPTWGEILKIVPNARALPESSQSGFGGARGFSG

SEQ ID NO: 217806 - protein, 142 aa, Zea mays
  unsure (1)..(142): unsure at all Xaa locations
  Clone ID: MRT4577_130235C.1.pep
LARVNPAAXVQQQQLLFFSPLVGGNAPKYLQQQLLQQIVPALTQLGGANPVAYLQKVVPFNQLIWWNFVGDLQQGQQLLNPLGGGNPLGAAFLQQQQLVPYNRFSLMNPVLLGQQPMVGGAIFSPTPPNGFDNGAPKPRGVS

SEQ ID NO: 217807 - protein, 115 aa, Zea mays
  Clone ID: MRT4577_130236C.1.pep
TTTYAKNSKKEKRSHKHSKKRGRLLKNQKLEKKQVKNILLWKTTNKLLTWDQQKYNTILEYKSSLSLWESVKSENHGLLLRILNLPCTQFLCHGHHFPIPWAHQPYPSPGVGHNY

SEQ ID NO: 217808 - protein, 77 aa, Zea mays
  Clone ID: MRT4577_130237C.1.pep
MPPRFPVTDLWTEHENKSQSYTDNVWTQWSPDLTRILHVLLQKSHLVLICFTQSLELLCLFIRDSSVLMAFSNRCVY

SEQ ID NO: 217809 - protein, 47 aa, Zea mays
  Clone ID: MRT4577_130238C.1.pep
KYKSLKNRVSKLALIYKTFCLFYVENSLQMEVMIYLSLNICVFFNVV

SEQ ID NO: 217810 - protein, 156 aa, Zea mays
  Clone ID: MRT4577_130239C.1.pep
MAAAEAWVRQEKVRKFEEFVDQRLKPDLANAIAQRNKVFEQQKTFLDLKRNIENLERNGVTSMRSMVNLGSEVYMQAEVPDTRHIFVDIGLGFHVEFTWQEALQFISVREARLTRQIDEYTHLIASIKAQIKLVCEGIREVLQLPAEKELSPRNTW

SEQ ID NO: 217811 - protein, 94 aa, Zea mays
  unsure (1)..(94): unsure at all Xaa locations
  Clone ID: MRT4577_13023C.1.pep
KYKASENAIVWKIXKRMAGMKESQISAEIELLPTNDKKKWARPPISMNFXVPFAPSGLKVRYLKVFEPKLNYSDHDXIKWVXYIGRMAXYXTRC

SEQ ID NO: 217812 - protein, 136 aa, Zea mays
  Clone ID: MRT4577_130240C.1.pep
WEPTLSLATSRTSVSFVSSSSVMSQPSVLTMRPAGVDLLRLAVHDERLLVHVHRHGVADVLALGTQPVPSELVARRTVHRLHLAVGAVPRDSGSRRVAWRWRAVLGMAAVASPEPAIHGTFAPPPRDLPDEDEGLM

SEQ ID NO: 217813 - protein, 70 aa, Zea mays
  Clone ID: MRT4577_130241C.1.pep
TSPPAQAPLVLGVAPKKKAAPEFFKPPAESGEAPPGCNFGGNCKCDPCNFCSHRSPPMDMIFIYLACGGG

SEQ ID NO: 217814 - protein, 38 aa, Zea mays
  Clone ID: MRT4577_130242C.1.pep
KPDHVYVCYMTSEILMLIRTLTSNASMIKACVLLHMHH

SEQ ID NO: 217815 - protein, 96 aa, Zea mays
  Clone ID: MRT4577_130244C.1.pep
MSCNCGSNWGCGSNCKCGKKYPSLEETSPPAQAPFVLGVAPEKKAAPQFFKAPGESGEAPPGSNFGGNCKCAPCNFCSLRSPPMDMIFFFLAWGGG

SEQ ID NO: 217816 - protein, 42 aa, Zea mays
  Clone ID: MRT4577_130245C.1.pep
GPNLPFLINRIGKLQKHTNWITGFLKRKENFLFTVSYNNETG

SEQ ID NO: 217817 - protein, 88 aa, Zea mays
  Clone ID: MRT4577_130246C.1.pep
LLSTRAPTAARSTAADRHRGTPQRPKCRSNPSLSSCLSISGGHGQTDAARRSPRRGRTPAHWDLPACTLDWSSPRASQFFCHVGRRGD

SEQ ID NO: 217818 - protein, 106 aa, Zea mays
  Clone ID: MRT4577_130247C.1.pep
VLQRFSTLHSLGRSARRYHLLDEAVRSAFTSFLNASACICSTVAASSTLGVLCVGPLRRVAQVGVGSLHLDLRHHHDSAACRRRPCVQYRDDSREDDEQCPGSSHR

SEQ ID NO: 217819 - protein, 61 aa, Zea mays
  Clone ID: MRT4577_130248C.1.pep
PPSTKPKLGSYWIKAGKFLGPFLEGGSPDKNKAFAKVGKTHPPVVTLGGLKKDGLQFPTKI

SEQ ID NO: 217820 - protein, 93 aa, Zea mays
  Clone ID: MRT4577_130249C.1.pep
GMGQGHLDEFLAVNRRAEVIDWLGGLLPEFDLPLDSSDEELREYLIDGTGLCYIAEKLMPGIQEEMWGGNALDQRSYVKKLLFFVAEMGMPGF

SEQ ID NO: 217821 - protein, 88 aa, Zea mays
  unsure (1)..(88): unsure at all Xaa locations
  Clone ID: MRT4577_13024C.1.pep
KKQKASKRNSGKSSLRSLILTRLYGKEGQKEKMLPVAPKLLRTISIHYLESNEYVLDSXSTSSGDGSSNSTKPPMQNAGDMMNLHHAT

SEQ ID NO: 217822 - protein, 130 aa, Zea mays
  unsure (1)..(130): unsure at all Xaa locations
  Clone ID: MRT4577_130250C.1.pep
VKRLVNKYHAFLASEAIINQIPXSLVNGLNKXGKFSTMVIPQESLESKVSENKASVELQLKKVLCMGVPVDNLTMQEKQIHQNINMSVNFLVXSLLKKXWXQNVKVPLMSHSAMGEPFRVFISMLFCEVG

SEQ ID NO: 217823 - protein, 54 aa, Zea mays
  Clone ID: MRT4577_130251C.1.pep
SYEDGKKAPNSQMQHWLASFQGWLVCLEFNYGWYVDEENTLTTEKKKPWCNKKG

SEQ ID NO: 217824 - protein, 70 aa, Zea mays
  Clone ID: MRT4577_130252C.1.pep
MWVMPHPLRIVPSERLQVRPAVNGPLYYLTCLMNGLGSDCIIGWHMLAVLKMDTHAIRGFYYGHVHRGRT

SEQ ID NO: 217825 - protein, 104 aa, Zea mays
  Clone ID: MRT4577_130253C.1.pep
FYFNGNYVQTLIMLFRLIQIRQNLTCSQCSRHLSRKLYSRLRPQRVHDRISVTHLDGHVMGNVNTDSTHLYSSPGTDELIEWVVVLQIGNQQLNILVFSPPLPV

SEQ ID NO: 217826 - protein, 60 aa, Zea mays
  Clone ID: MRT4577_130254C.1.pep
YPCRCILLLGTCFLRWHKPWPVPQSWVKGLLANPLVYWGKGPLIVWLILFSAPHLFWGNF

SEQ ID NO: 217827 - protein, 74 aa, Zea mays
  unsure (1)..(74): unsure at all Xaa locations
  Clone ID: MRT4577_130255C.1.pep
KKTYTKPKKIKHKHXNVELGVLQVEGGXXSTGKVTRLRKECPNAXCGAGVFMANHFYRHYCGKVGLTYFYNQQG

SEQ ID NO: 217828 - protein, 159 aa, Zea mays
  unsure (1)..(159): unsure at all Xaa locations
  Clone ID: MRT4577_130256C.1.pep
HTHTNRIGPQHPGGPAPQEQSERTPTGKTTTXEGETADTKDNXKAKTQDKEGNPPDQQRHNXGGGEGEDGRTPADDNTQKESTXHXXXXHRGGTQNEAKTRTGKTNTHEXEXADTKDNGKANXQDKEGSPPHQQRRNXAGKQXQDGRTXADXNTQKEST

SEQ ID NO: 217829 - protein, 64 aa, Zea mays
  Clone ID: MRT4577_130257C.1.pep
KFVGLVLTFPFPGINLYIFPMYPVQGYIISLANYQIGLFKKKKKKKKEGRSIVKHASVTRACIV

SEQ ID NO: 217830 - protein, 216 aa, Zea mays
  unsure (1)..(216): unsure at all Xaa locations
  Clone ID: MRT4577_130258C.1.pep
MDEEYDVIVLGTGLKECILSGLLSVDGLKVLHMDRNDYYGGDSTSLNLNQLWKKFRGEEKPPAHLGASRDYNVDMVPKFMMANGTLVRTLIHTDVTKYLSFKAVDGSFVFSKGKIHKVPATDMEALKSPLMGIFEKRRARNFFIYVQDYNDADPRTHQGLDLTRMTTRELIAKHGLSDDTIDFIGHALALHRDDRYLSEPAIDTVKRMXLYSESLA

SEQ ID NO: 217831 - protein, 65 aa, Zea mays
  unsure (1)..(65): unsure at all Xaa locations
  Clone ID: MRT4577_130259C.1.pep
PAGSTATKHPVCLSFSSLRGGGGSISHKERLHVXNHTFQDPHVIQRPILGQLSSQRQLRQRILRR

SEQ ID NO: 217832 - protein, 63 aa, Zea mays
  Clone ID: MRT4577_13025C.1.pep
KLLASHVFAERLMLDSSISGADHIVCSLTTGAGGSRCSMDGSHDLRRMGGASITSESRAVLVY

SEQ ID NO: 217833 - protein, 69 aa, Zea mays
  Clone ID: MRT4577_130260C.1.pep
VFLHDLGVLEVLLGEVVRHLRDDEAGDVEGREEAPVALLLPAHKGRRRAPRLHLLRLRLLQMSNLGSSA

SEQ ID NO: 217834 - protein, 57 aa, Zea mays
  Clone ID: MRT4577_130261C.1.pep
SLCYKKWYKCYNSMELPKVATITRIYNTNLHLIGIFFFLVITLKTAHILQHTMDKIK

SEQ ID NO: 217835 - protein, 59 aa, Zea mays
  Clone ID: MRT4577_130262C.1.pep
SKDGSMNAADGHLSWDLVASTHLNQLVPNMARLGLGILIFRQMHVLHEVQEAGGHSCEC

SEQ ID NO: 217836 - protein, 96 aa, Zea mays
  Clone ID: MRT4577_130263C.1.pep
ALGNVYNIAWYVAWAPTPSNGRLGQVFIGPNSKLAVGEKLTPDSPMVFLRVPPGTSRWAGVPFVHRTVRRGGHRTSPVRLRTYSPQQHTWTFLGSS

SEQ ID NO: 217837 - protein, 123 aa, Zea mays
  Clone ID: MRT4577_130264C.1.pep
MGSWRRKAYGALKDFTKVGLAKVNSDFKELDIAIVKATNHVECPPKDRHVRKIFVATSINRPRADVQYCIYALSRRLFKTKNWTVALKTLIVVHKLLREGDPTFKEEFLAYLYKGSVLQRAYF

SEQ ID NO: 217838 - protein, 161 aa, Zea mays
  Clone ID: MRT4577_130265C.1.pep
YIGKVAREASKGIADFVDGNQRISVGNAVLLSLVPWIQVSKSRSLILSVQVEAFAAAITVGVLLHIALLAFNIATLHILSHLEKKGDSVFAKKEYTRAVILVTSQKTLPVMITVVEQLGGALGESGLLVIPCVFAHINQIIIDSIIVNWWRRRDQQFSNPK

SEQ ID NO: 217839 - protein, 178 aa, Zea mays
  unsure (1)..(178): unsure at all Xaa locations
  Clone ID: MRT4577_130266C.1.pep
KKKKKREREKKPKGHREKXXQRTHQKGKXRXEKSKKAKKRKKRKKKKKKRREKGKGKKKKKKKDRXRKXXXKKKKGKEGKRKKERXGKEKKEKXRGGGEGEKRKKEKKXXKKKKKXKKKEXXGXXKKKXKKKXRKKERKKKKRKKXXEDGPPPPDPEGQVNGKEGESRISKGQRKATA

SEQ ID NO: 217840 - protein, 51 aa, Zea mays
  Clone ID: MRT4577_130267C.1.pep
IHHSSSTCLYHFYTPILLSVHPCTVTLNLKPHKQVKHHQPLSLSHGLINTV

SEQ ID NO: 217841 - protein, 154 aa, Zea mays
  Clone ID: MRT4577_130268C.1.pep
MASVDLQRLRHMLLTTGAGGGHHQLASAATIPASGPCYGAALPSQRDHHMCADLFSLPPATMTTTSATEQYSEFLAMAAANLAKKGVRPDGGQEMSTNKRKRDGRSSMLAADVLAAHVQQQTIDVDRILLKHAQNLWTTLAEQRQSHTRLIVST

SEQ ID NO: 217842 - protein, 55 aa, Zea mays
  Clone ID: MRT4577_130269C.1.pep
MGQCYARNVRGVDADCGGVGATTITVSAAGGPEDAASVGGGGGRRGGRRSARPST

SEQ ID NO: 217843 - protein, 71 aa, Zea mays
  unsure (1)..(71): unsure at all Xaa locations
  Clone ID: MRT4577_13026C.1.pep
IGFPAKIKVKKDHASLPFDDQRSILDKEAVNXSLENLKTYPFVQEGLSNATLKLVREHYNFSTRELLTWDN

SEQ ID NO: 217844 - protein, 188 aa, Zea mays
  unsure (1)..(188): unsure at all Xaa locations
  Clone ID: MRT4577_130270C.1.pep
RRQRLPVGESVRQGSKVVIDVSSSADYGALASGKKITNTTTSSMSSAAWSLVASDVRGAVESLTVYKYSELEKATAGFAEEHQVPGTSVYRAVINGDAAAVERLAGDVSGEVGILMRVNHSCLVRLSGLCVHRGDTYLVFEFAENGALSDWIHGGXGSCSGSNTLPWRQRVQVAXGIAGGLNYLHHYT

SEQ ID NO: 217845 - protein, 75 aa, Zea mays
  Clone ID: MRT4577_130271C.1.pep
QGLLFSRGKTIIVNSLGTTNLQTKKGFYPYPFSQPFPFTSFSSKLFNGNDWLPPNARLLTPLFVSQKGRTYTTTF

SEQ ID NO: 217846 - protein, 51 aa, Zea mays
  Clone ID: MRT4577_130272C.1.pep
ISDQHGHGFVGLLLICMCAVCFFSSNGSAHYSVTSWELVSNGTVSSYCSTV

SEQ ID NO: 217847 - protein, 112 aa, Zea mays
  Clone ID: MRT4577_130273C.1.pep
GDFPGPYRKLRVTPRLADFRLRADARDWDSVSVVSTEGFCSGARCAQCSVGSVLSPCPSGGMVNYTYRGSVYGNGSFGAAKRVPLNGYICVGDFKACVTKKKKIPAPGKFKS

SEQ ID NO: 217848 - protein, 47 aa, Zea mays
  Clone ID: MRT4577_130274C.1.pep
LPSVEYITSTLGSFILCMWHLSYPIISFVRYVPIPLILKMVYPACFF

SEQ ID NO: 217849 - protein, 73 aa, Zea mays
  Clone ID: MRT4577_130275C.1.pep
PARRPKLGSSILDPRRRGGYEGGRGGGYEGGRGGGYEGGRGGGYEGGRGGSAQGGRGYGGRGRGRMGGRGRGN

SEQ ID NO: 217850 - protein, 77 aa, Zea mays
  Clone ID: MRT4577_130276C.1.pep
GEKPTSNFWGFSDDLPYRGRGLFKINLFGGGFGLPKKKEGVGSALIRCRVARVAPCNSPPFITKVPSFHPGDLFLFP

SEQ ID NO: 217851 - protein, 59 aa, Zea mays
  unsure (1)..(59): unsure at all Xaa locations
  Clone ID: MRT4577_130277C.1.pep
MKLVLVVLAFIALVSRVSCTQTGGCSCCQHHIHDQXHHXHXHHSLKQLHXPPPQHYQHF

SEQ ID NO: 217852 - protein, 48 aa, Zea mays
  Clone ID: MRT4577_130278C.1.pep
LTELLRYYMLYIEAAKDRLYRRTKALIDYENSNKALDKARLKSKDVKL

SEQ ID NO: 217853 - protein, 62 aa, Zea mays
  Clone ID: MRT4577_130279C.1.pep
SFSIAVATLVSQARSIFSLGFYSLVAVPSVVAVMNVFWFWKILKGMVKTLSRRKHSENGRTD

SEQ ID NO: 217854 - protein, 184 aa, Zea mays
  unsure (1)..(184): unsure at all Xaa locations
  Clone ID: MRT4577_13027C.1.pep
YYTYQTLLDCEEICQQQQSNTXKXSLPANTXNYIQKLHEEFETSMSDDLHTSVALAAISEPLKVMNDLLHTRKGKKQDKRLESLSALEEKIRVVLSVLGLLPSSYHEALQQLRDKALRRASITEELVVQKIEERTAARKAKQYEKSDEIRKELAAIGIALMDGPDGTTWRPSLPILEEAVVAKT

SEQ ID NO: 217855 - protein, 72 aa, Zea mays
  Clone ID: MRT4577_130280C.1.pep
HQFYPGQSPELIAGTGLPDRHGQVNANVKLHDRDAQIIGNPEPKLRKSFGIITPCMALSKGRTHLSDNKTNL

SEQ ID NO: 217856 - protein, 147 aa, Zea mays
  unsure (1)..(147): unsure at all Xaa locations
  Clone ID: MRT4577_130281C.1.pep
MARAHLALVSFFAASIIGAASKSFTIANNCEHTVWPGILSSAGSAXVDTTGFALAPGESRALSVPSGWSGRLWGRTLCSTDAATGRFACVTGDCGSGRQDCGGGGAAPPATLAEFTMDGSGGMDFYDVSLVDGYNLPMLVAPQGAAL

SEQ ID NO: 217857 - protein, 60 aa, Zea mays
  Clone ID: MRT4577_130282C.1.pep
ELTSRRPPSLSRCYSETEGFLLGCGRCGWEVKRKRSNGLSCCNGWYTLFTTRDIEKEDDE

SEQ ID NO: 217858 - protein, 31 aa, Zea mays
  Clone ID: MRT4577_130283C.1.pep
MNDTVTIRTRKFMTNRLLQRKQMVIDVLHPG

SEQ ID NO: 217859 - protein, 54 aa, Zea mays
  Clone ID: MRT4577_130284C.1.pep
LTEMNFPEASVVHEVPVTTSFQTLNPFVEEDDLLEVNQSSQTTNDVWLTVLDIA

SEQ ID NO: 217860 - protein, 91 aa, Zea mays
  unsure (1)..(91): unsure at all Xaa locations
  Clone ID: MRT4577_130285C.1.pep
MMCKSIMVPWTGFSSEAFSLYGMWEYEKLSVRLAMMVCLEWWSFEYXLVILYGFLAKPKLESCVLSICVNTPILLYMVPMGLGTADGRTPC

SEQ ID NO: 217861 - protein, 223 aa, Zea mays
  Clone ID: MRT4577_130286C.1.pep
MRTSHEPRATQAEKATQTENDDFQPIAPVVKAQPLKSNWEDEDVDEDDVKESWEEEEEKPKPQPVEKPAPKPSAKAAVKKGKQPSTSTEVVDDDVLDDPISEKLRQQRLVEEADFKATAELFAKKDGSEKSLETFIPKSESDFAEYAELIANKIRPYEKSFHYMGLLKNVMRLSMTPLKGADAKEISSSVTAIANEKIKAEKEAAAGKKKGGAKKKQLHIEKG

SEQ ID NO: 217862 - protein, 147 aa, Zea mays
  unsure (1)..(147): unsure at all Xaa locations
  Clone ID: MRT4577_130287C.1.pep
MGMGLASANGAGILRSALFAPQGAGARVRAERPQAVLGSLHAGKGPGLGPGGVEGQGKGKKKKGAKFGNLSGTLEGKNKEGQEFLGRDPEGPGSKNLSFELIQQKGFNLGNLKKEHQXKKVKVPATWPNXKGGPNFVNKNAKANGKT

SEQ ID NO: 217863 - protein, 91 aa, Zea mays
  Clone ID: MRT4577_130288C.1.pep
KELMSIRQLIATGHLIKIIIGAEVDDFMHEECLGKLKGAPFSPTVNSVEFDFSSRATHSATKTRPTACPWFLAGEWMSRQLMKPYSHFRVD

SEQ ID NO: 217864 - protein, 68 aa, Zea mays
  unsure (1)..(68): unsure at all Xaa locations
  Clone ID: MRT4577_130289C.1.pep
GIKYDPSTGIYGMEFYVVFELSGYRVEGRSRCKSXLGIQHRVTKEGSMKWFQVKYEGVIINKDQASTI

SEQ ID NO: 217865 - protein, 247 aa, Zea mays
  Clone ID: MRT4577_13028C.1.pep
WVPRGRPGVNIQKMSKSLGNFVTIRKVIEMYHPLALRMFLLGTHYRSPINYTIEQLNVTSDRLYYTYQTLLDCEEICQQQQSNTGNSLPANTLNYIQKLHEEFETSMSDDLHTSVALAAISEPLKVMNDLLHTRKGKKQDKRLESLSALEEKIRVVLSVLGLLPSSYHEALQQLRDKALRRASITEELVVQKIEERTAARKAKQYEKSDEIRKELAAVGIALMDGPDGTTWRPSLPLPEEEAVLAKT

SEQ ID NO: 217866 - protein, 65 aa, Zea mays
  Clone ID: MRT4577_130290C.1.pep
VEPEQGPSGPVPSTLPSSQDCGKPLSIEADDNGCFPLDGHVLCRKCHTARAQTLFSRILSRSALL

SEQ ID NO: 217867 - protein, 121 aa, Zea mays
  Clone ID: MRT4577_130291C.1.pep
PPNIDRIKKTPALRTSTKSGYMSPKKTIEIHPQNALIEEPPKRPQAAKNTKSLKDLVIHPFETALLPSGFNPPHPHPFCNPIPPMPNMGLNIPEDQKAPEASPHMPPLEDCADKSKMEEVP

SEQ ID NO: 217868 - protein, 92 aa, Zea mays
  unsure (1)..(92): unsure at all Xaa locations
  Clone ID: MRT4577_130292C.1.pep
GAYLKQHLPFNQVPAIYRQDYLSLSRLAPXNYAAYSQHLQLPPFKHLADVSPLAFLTQQHVLTLYLHAAPNADTLLQLQQLLAFNQLALTNP

SEQ ID NO: 217869 - protein, 126 aa, Zea mays
  unsure (1)..(126): unsure at all Xaa locations
  Clone ID: MRT4577_130293C.1.pep
LTLCLALXVAIASAMHMPCHCAWLYALLGAFSGLTTMMATIMLYPYPEYLTQPLCNPLSAALYYARCYQPSAMLHAMRQQFWQQHMKMMDMQTDAQQLQMMMQIERAVDRSSSLYEPALMQHLLQL

SEQ ID NO: 217870 - protein, 113 aa, Zea mays
  Clone ID: MRT4577_130294C.1.pep
DLMEMLHIPRCIKFVSTVNRPNLFYKVSEKSPVGKVVIDEITKFISESYPNNESGIIYCFSRKECEQVAKELRERGISADYYHADMDIVNREKIHMRYAHNFLSLSICLFLYA

SEQ ID NO: 217871 - protein, 105 aa, Zea mays
  unsure (1)..(105): unsure at all Xaa locations
  Clone ID: MRT4577_130295C.1.pep
HASADACDHSCATISVHLMDTSISMFSNLLPIDDSDQILLSSPSNGRFKNDATEHIALASFNHAKDNNYFYNXSCKLLTLNVMQKVAYDKSFNQPLSCRNYSSTS

SEQ ID NO: 217872 - protein, 77 aa, Zea mays
  Clone ID: MRT4577_130296C.1.pep
GHRAPSLPASLSARASCPCALGSMSSSCSSEFTIRSAIRCVVVWHTLLLFSVNTATARTYPRCILKPPVRPRVPTRG

SEQ ID NO: 217873 - protein, 93 aa, Zea mays
  Clone ID: MRT4577_130297C.1.pep
SPDACLGLMVWSIFGHNMRLSLHQCSGPDTIICLWPWFGPQKPLVSVLVSAVGGLLSTGHLPCQVYVCEGPIWGSAPFIRCCDIIKEICNRAK

SEQ ID NO: 217874 - protein, 55 aa, Zea mays
  unsure (1)..(55): unsure at all Xaa locations
  Clone ID: MRT4577_130298C.1.pep
MNPLTQKKRTQTINHNEALLGITQDASXHSKFNDSAYIYISDVPLHLTEGDLLAI

SEQ ID NO: 217875 - protein, 154 aa, Zea mays
  Clone ID: MRT4577_130299C.1.pep
MAPPSYSIAPVQSELNMTLYNKEVYGGRGTNGVTTLVNRGPIGTTWVFSWPVTDGPAGADANVVGHLQGTGVQVATYPDYMWHYSLGLVFGQGSRFNGSTLQIQGTSKINGEWSIVGGTGELAMAKGTVRRTEISYTGNIRISELNIHVLYTPM

SEQ ID NO: 217876 - protein, 573 aa, Zea mays
  unsure (1)..(573): unsure at all Xaa locations
  Clone ID: MRT4577_13029C.1.pep
MAAAAAAARRAAGLLPLLLSSRSGARIPLHRAVSQIPPPCSYRLLSQQAKPFSASASASASASASNGATAERTRELHLYNTKSRKKEQFRPRDPGGEVGMYVCGITPYDDSHIGHARAYVAFDVVYRYLRYLDYEVRYVRNFTDIDDKIIARANQLGEDPFNLSKRFSDDFLLDMANLQCLPPSVEPRVSDHIDEIINMIKQILDNSCAYVVGGDVYFSVDSFPDYGELSGRKLXDHGAGIRXTCSVDLRTQADFALLKCFFXFSAPIRSIVVTXECTCVVMKIXYEYTMITYSXDIHGAGVGLCFPLHENEIAQSRAACCDSTINYWIHNGFVNVNSQKMSKSLGNFVTIRQVIEMYHPLALRMFLLGTHYRSPINYTIEQLNVASDRLYYTYQTLRDCEEICQHQQSNTGNPLPANTLNYIQKLHDEFETSMSDDLHTSVALAAISEPLKVMNDLLHTRKGKKQDKRLESLSALEEKIRVVLSVLGLLPSSYHEALQQLRDKALRRASITEELVVQKIEERTAARKAKQYEKSDEIRKELAAIGIALMDGPDGTTWRPSLPILEEAVVAKT

SEQ ID NO: 217877 - protein, 68 aa, Zea mays
  Clone ID: MRT4577_1302C.1.pep
GPKTDRLNPAARYFVPARVPCPNLVFNKAGRCAFPSGTKEPAQYLWPNFITCWSILGKTEFLSQSILD

SEQ ID NO: 217878 - protein, 94 aa, Zea mays
  Clone ID: MRT4577_130300C.1.pep
PREKTPGGFKKVSPQNFFPFCPKGGLWLTFPPGFFWDSLGSFFLRGFALFFFCPQKGFFSKAPSTPMPPPFFGGFHSPWGAPFSPPGLAPFLGI

SEQ ID NO: 217879 - protein, 37 aa, Zea mays
  unsure (1)..(37): unsure at all Xaa locations
  Clone ID: MRT4577_130301C.1.pep
LTRYPRLTYYPNTANAIFQHIYYYKSKKKXEKIVLKI

SEQ ID NO: 217880 - protein, 79 aa, Zea mays
  unsure (1)..(79): unsure at all Xaa locations
  Clone ID: MRT4577_130302C.1.pep
LEPAGPGLGGLRAIRLVARGGGRSRTRNFSSIELSVPRPSPFRPNPHTSSLPPTGDGTEPGPRRPWXMSPARLRRSASV

SEQ ID NO: 217881 - protein, 486 aa, Zea mays
  Clone ID: MRT4577_130303C.1.pep
MAADALRGLLPGVYAVLMVIAVTSAASSDASSVVVGLAKCADCTRKNLKAEAAFKGLEVAIKCKNSKGEYESKAMGKLDGFGAFSIPLSTDLHGADCVAQLHSAAGNPCPGQEPSRIVPQSSKGNFVVVPGKTDYPSKECASATLCGSIKKHLLDHFHKKPVPPKPKPEPKPEPEPKPEPKPEPENHPPTPTYGSSTPIYHPPSRQLFDKKHMFDHFHKHHDYHHFFDHFHKKPVPPKPKPEPKPEPKPKPQPEYHSPTPTYGSPTPIYHPPARHLFDKKPLLDHFHKDHDYHHFLDHFHKKPVPQKPKPEPKPEPKPQPKPEYHPPTPTYVSPTPIYHPPAETEMKYDKKHFFDHFHKDHDYHHFFDHFHKKPVPPKPKPEPEPKPKPQPKPEYKPPMPTYGSPTPIYHPPAKKEVAFDKKHFLDHFHKDHDYHHFFDHFHKKPVPPKPKPEPKPEPKPQPEPEYHPPTPTYGSPTPIYHPPAKH

SEQ ID NO: 217882 - protein, 481 aa, Zea mays
  Clone ID: MRT4577_130304C.1.pep
MAADALRGLLPGVYAVLMVIAVTSAASSDASSVVVGLAKCADCTRKNLKAEAAFKGLEVAIKCKNSKGEYESKAMGKLDGFGAFSIPLSTDLHGADCVAQLHSAAGNPCPGQEPSRIVPQSSKGNFVVVPGKTDYPSKECASATLCGSIKKHLLDHFHKKPVPPKPKPEPKPELEPKPEPKPEPENHPPTPTYGSSTPIYHPPSRQLFDKKHMFDNFHKHHDYHHFFDHFHKKPVPPKPKPEPKPEPKPKPQPEYHSPTPTYGSPTPIYHPPARHLFDKKPLLDHFHKDHDYHHFLDHFHKKPVPQKPKLEPKPQPKPEYHPPTPTYVSPTPIYHPPAETEMKYDKKHFDHFHKDHDYHHFFDHFHKKPVPPKPKPEPEPKPKPQPKPEYKPPMPTYGSPTPIYHPPAKKEVAFDKKHFLDHFHKDHDYHHFFDHFHKKPVPPKPKPEPKPEPKPQPEPEYHPPTPTYGSPTPIYHPPAKH

SEQ ID NO: 217883 - protein, 135 aa, Zea mays
  Clone ID: MRT4577_130305C.1.pep
FGLDHFHKDHDYHHFLDHFHKKPVPQKPKPEPKPEPKPQPKPEYHPPTPTYVSPTPIYHPPAETEMKYDKKHFFDHFHKDHDYHHFFDHFHKKPVPPKPKPEPKPEPKPQPEPEYHPPTPTYGSPTPIYHPPAKH

SEQ ID NO: 217884 - protein, 78 aa, Zea mays
  Clone ID: MRT4577_130306C.1.pep
FWLYTSTYILLEFLAYGIPNTYQLSRKKVINDCKHKSYILGITLSQSRYWQFKHSARCTTSRCYCFCTTLSIYGTNSM

SEQ ID NO: 217885 - protein, 476 aa, Zea mays
  Clone ID: MRT4577_130307C.1.pep
MAADALRGLLPGVYAVLMVIAVASAASSDVSSVVVGLAKCADCTRKNLKAEAAFKGLEVAIKCKNSKGEYESKAMGKIDGSGAFSIPLSTDLHGADCVAQLHSAAGNPCPGQEPSRIVPQSSKGNFVVVPGKTDYPSKECASATLCGSIKKHLLDHFHKKPVPPKPKPEPKPEPEPKPENHPPTPTYGSSTPIYHPPSRQLFDKKHMFDHFHKHHDYHHFFDHFHKKPVPPKPKPEPKPEPKPKPQPEYHSPTPTYGSPTPIYHPPARHLFDKKPLLDHFHKDHDYHHFLDHFHKKPVPQKPKPEPKPQPKPEYHPPTPTYVSPTPIYHPPAETEMKYDKKHFFDHFHKDHDYHHFFDHFHKKPVPPKPKPEPEPKPKPQPKPEYKPPMPTYGSPTPIYHPPAKKEVAFDKKHFLDHFHKDHDYHHFFDHFHKKPVPPKPKPEPKPEPKPQPEPEYHPPTPTYGSPTPIYHPPAKH

SEQ ID NO: 217886 - protein, 65 aa, Zea mays
  Clone ID: MRT4577_130308C.1.pep
ASPRVALIIHHPSQIIMLFCKCSRASSIMCVLSVTHALIDAPLCCTDSLLNSPALFLTHASADAW

SEQ ID NO: 217887 - protein, 175 aa, Zea mays
  Clone ID: MRT4577_130309C.1.pep
MDGEGERRMVDSEGQIHMDPALYMAATQGKVSILKQLADPEEPSVLSATTPQLNTALHLAAVHGHAEFAGEVLGMNEELLVTRNGDGDTPLHLAAKAGKLEVARLLVNRAIAWPEDKKSPLIMTNKAGNTALHEAVQYRKGALGGGPARRRPQPAARPQRADGVPAAHGPPRGPR

SEQ ID NO: 217888 - protein, 69 aa, Zea mays
  Clone ID: MRT4577_13030C.1.pep
YFFLGPIKLTGRPLLNKLAPLIINPPLGYLLLTYGGLFIAGGSPQKIIAQQVGGNNGHEPTKGGSPFEG

SEQ ID NO: 217889 - protein, 70 aa, Zea mays
  unsure (1)..(70): unsure at all Xaa locations
  Clone ID: MRT4577_130310C.1.pep
YGELGHLVHGATDHVYQYGNPVGGVEHGTVGLRHCTGTTRVIVHLCXHGCSDIVGVQFQPVREEHKTGGI

SEQ ID NO: 217890 - protein, 52 aa, Zea mays
  Clone ID: MRT4577_130311C.1.pep
RRADITFITPLAKHAYGEKIVQAYPYQLVPHYYILGGPTPGRTRGRTPGRTP

SEQ ID NO: 217891 - protein, 69 aa, Zea mays
  unsure (1)..(69): unsure at all Xaa locations
  Clone ID: MRT4577_130312C.1.pep
PPFGFGPRIXPGPTFGLRPMEIMFPPPMYPFXWGVPNKKKTGGGKVSMDXPFGLILPRNKPLSLFPRAV

SEQ ID NO: 217892 - protein, 61 aa, Zea mays
  Clone ID: MRT4577_130313C.1.pep
HSSYHSSSDSWVFFFFLVFWCFFFCFFIFFLYFFFFQKRDNQIIKICKFNYTNKIILLRKN

SEQ ID NO: 217893 - protein, 123 aa, Zea mays
  Clone ID: MRT4577_130314C.1.pep
TTGNTSPQGGDNESNTAQAYKLARLCGAYANGAYHRSGHGKDHNCWPTRSPGPASAGRRPGVLRGSLVGVPSGTVVPQQSRVQLAPPPQRPPPVESRVAPGREPVANITAAEVVPLGFTLRTL

SEQ ID NO: 217894 - protein, 107 aa, Zea mays
  Clone ID: MRT4577_130315C.1.pep
IQLGKFQNRMTKEKESVVVEHQTSPKTGLLSRSGSEEVASCHRWADQIHGAGIFFLIYCQGMNIIDWLWTREEREIPILTHSALLSHTLCMCSKEWHPTVTQEVCKF

SEQ ID NO: 217895 - protein, 152 aa, Zea mays
  Clone ID: MRT4577_130316C.1.pep
DKSQILQVDQSCRSILHQIECTIQSRKNGLLHLQANSRVVVQHEPSFRRILALGRWIGGKGQVASITDREALTKREARVPPVGEGEEEDEVVFVSSVEGGSRESYIGAQDQDPLSSGRQRREATDRGNHRYGESVSRGNVGREMFSDVALSY

SEQ ID NO: 217896 - protein, 64 aa, Zea mays
  Clone ID: MRT4577_130317C.1.pep
GGNKQLGNLPQEDDRRIVRLRISSSIKSPSKFPASPSDQNISKGELTYGRGSASGGKINAGITR

SEQ ID NO: 217897 - protein, 38 aa, Zea mays
  Clone ID: MRT4577_130318C.1.pep
SSYKILNQVRVSLGSGSDIHSMDPPGVYSPHKSQRDGW

SEQ ID NO: 217898 - protein, 377 aa, Zea mays
  Clone ID: MRT4577_130319C.1.pep
MAPRGGREEASSGSEDEEEEAGFSRSYFLAKEKEPSSVKKRARAAAGKLSDLNLVDEQVLRASLAQIPPKHKEEVESLTRSYKDQYRNWLFELRCGFGLLMYGFGSKKQLLEDFASTTLTNFTVVVINGYLPAVNLKQVIATIAEMFWDQTKAKRRKRAGTRSQLSQQFPSQSTEGIISFLMRQTSDDVDDHVCLLIHNIDGPALRDTESQQCLAQISCCPQIRVVASIDHVNAPLLWDKKMVHKQFKWSWYHVPTFAPYKVEGVFYPLILASGGHAQTTKTALVVLQSLTPNAQSVFRVLAEYQLANEKEEGMPVSSLYTKCRERFLVSSQVTLNAHLTEFKDHDLVKVRKHSDGQDCLRIPLVSDALEKLLQELA

SEQ ID NO: 217899 - protein, 149 aa, Zea mays
  Clone ID: MRT4577_13031C.1.pep
LHDEFETSNADDLHTSVALAAMSEPLKVMNDLLHTRKGKKQDKRLESLSALEEKIRVVLSVLGLLPSSYHEALQQLRDKALRRASITEELVVQKIEERTAARKAKQYEKSDEIRKELAAVGIALMDGPDGTTWRPSLPLPEEEAVLAKT

SEQ ID NO: 217900 - protein, 179 aa, Zea mays
  Clone ID: MRT4577_130320C.1.pep
LKKKKKKKKKKKKKKKKKKKKNKKTKKKKKACKKKKVFSWAEPPLGAIFAVFLPLGGRSPFLLGAPFPPLGGRFPFNGPCFSTSRALGKPRGFPNLTALEPIPFSPVGLFSKGPAPFAFPTISPPLLEMGPPLWRPFNPGGWGGSPQGARFFCQAPSPRSFGFFPFFFRHLPGFSPQTF

SEQ ID NO: 217901 - protein, 121 aa, Zea mays
  Clone ID: MRT4577_130321C.1.pep
FMCLATLSLLTRSLTPSVVLTCLAHLVSGRGEEGETMAEKADVGSLDPDVYPDCSPVRLDVDLDGKAKSSSPSVDCKFGLLSLRRFDRNAVELATHEWSEVSEGKDVASSCVHAGDKFIRC

SEQ ID NO: 217902 - protein, 112 aa, Zea mays
  unsure (1)..(112): unsure at all Xaa locations
  Clone ID: MRT4577_130322C.1.pep
MAATIQYNRXNPAVKRILQEVKXMQSNPSPDFMSLPLEEDIFEWQFAILGPRDSEFEGGIYHGRIQLPSDYPFKPPSFMLLTPSGRFEIQKKICLSISNYHPEHWQPSWSGE

SEQ ID NO: 217903 - protein, 65 aa, Zea mays
  unsure (1)..(65): unsure at all Xaa locations
  Clone ID: MRT4577_130323C.1.pep
GDRVPPRRAKEGLXPEKTRWEFPLSLRSTASGPAGIRASTSASCPPGPAAFGRPKMLIVVDFGSR

SEQ ID NO: 217904 - protein, 79 aa, Zea mays
  Clone ID: MRT4577_130324C.1.pep
VPRGRPGTPDPSRLPNLDRSAPASLARLDHLISSRQMTTILHIMAREDDSTRVQPRAGRPLCDEMCIVLTGRTQCHVLA

SEQ ID NO: 217905 - protein, 176 aa, Zea mays
  unsure (1)..(176): unsure at all Xaa locations
  Clone ID: MRT4577_130325C.1.pep
MAATIQYNRSNPAVKRILQEVKEMQSNPSPDFMSLPLEEDIFEWQFAILGPRXQLPSDYPFKPPSFMLLTPSGRFEIQKKICLSISNYHPEHWQPSWSARTALVALTAFMPTNPGGALGSLDYKPEDRRALAIKSREVPPKFGSPQRQKLIDEIHEQMLSKAPPIPQTLPNVPNEE

SEQ ID NO: 217906 - protein, 120 aa, Zea mays
  unsure (1)..(120): unsure at all Xaa locations
  Clone ID: MRT4577_130326C.1.pep
MAATIQYNRSNPAVKRILQEVKEMQSNPSPDFMSLPLEEDIFEWQFAILGPRDSEFEGGIYHGRIQLPSDYPFKPPSFMLLTXRTALVALIAFMPTNPGGALGSLDYKPEDRRALAIKSR

SEQ ID NO: 217907 - protein, 308 aa, Zea mays
  unsure (1)..(308): unsure at all Xaa locations
  Clone ID: MRT4577_130327C.1.pep
MAATIQYNRSNPAVKRILQEVKEMQSNPSPDFMSLPLEEDIFEWQFAILGPRDSEFEGGIYHGRIQLPSDYPFKPPSFMLLTPSGRFEIQKKICLSISNYHPEHWQPSWSVRTALVALIAFMPTNPGGALGSLDYKPEDRRALAIKSREVPPKFGSPQRQKLIDEIHEQMLSKAPPIPQTLPNVPNEELAPDSCDEHADKVDEXQHIQVHVRLVEWPSCAXAESLAAENTGEASAVEVANHQVPEASRRESIPRVPSSLQNAAIATQKPKHDRLLTLAAFGLTLAIMALVIKKFLKINGLGGFIEGKF

SEQ ID NO: 217908 - protein, 59 aa, Zea mays
  Clone ID: MRT4577_130328C.1.pep
VGLRRRQPGARKAGRRPLHHTYRLLWPLGILYGLWEGVLLMVAVQQFVGVTLSVTATEC

SEQ ID NO: 217909 - protein, 141 aa, Zea mays
  unsure (1)..(141): unsure at all Xaa locations
  Clone ID: MRT4577_130329C.1.pep
HTKHNNIPTIASKTFCFLMRLDLSASVCYXSMYIHCSHATIASILTPYLXPPVSSMRETPIEQPYRIQHSITTGILPXSPLFLQQPIALLHQTLLIHMFAQNIMAQHLQQHALANLATYSHQHHSRACNXLLSLHSAAYFQ

SEQ ID NO: 217910 - protein, 120 aa, Zea mays
  unsure (1)..(120): unsure at all Xaa locations
  Clone ID: MRT4577_13032C.1.pep
LWDPVKPPPVYPTRGFTPGSQSSFDRWHHRLGPXGGQRVPPRLQKGGFVKPPXGSNFHCKGCKLGKQKQPPYLFRGFFPTRPFQLIHFDGWGLPPFPPKRGHKGYVLFKNDPSRKTWVFP

SEQ ID NO: 217911 - protein, 59 aa, Zea mays
  Clone ID: MRT4577_130330C.1.pep
RVPSIKSMGRLRPVTCRFYFYPHNTESRALTQYVVWAPFIMTSTLLRALPRHEETDGED

SEQ ID NO: 217912 - protein, 81 aa, Zea mays
  unsure (1)..(81): unsure at all Xaa locations
  Clone ID: MRT4577_130331C.1.pep
DDPYIYAFDSLKYIGIELWQVXWIVGSSLSCSEGHNSYASFFVFLCTXKSGTLFDNIIITDDPALAKTFAEETWGKHKEAE

SEQ ID NO: 217913 - protein, 45 aa, Zea mays
  Clone ID: MRT4577_130332C.1.pep
KAVGRSCMLYANIEYFVVSQVPKIIIDKGAGCCASKYLLPVLFMP

SEQ ID NO: 217914 - protein, 79 aa, Zea mays
  Clone ID: MRT4577_130333C.1.pep
LIFVDILLALLIVNLTPSVVLSRMTLITNCPSIRRLCFTCRLRELPTLRLRLIPLTVLTRPLYHSGGLRHKPILYLLST

SEQ ID NO: 217915 - protein, 43 aa, Zea mays
  Clone ID: MRT4577_130334C.1.pep
NSQIRRPRQRCSPDVTKSGSGPTKRSSRDRIGNVGGRVGGRVG

SEQ ID NO: 217916 - protein, 51 aa, Zea mays
  Clone ID: MRT4577_130335C.1.pep
ATLSFNDDTITSHLRNKVCQEQGIELVLLRFLYLRIEHTLCKFFIMFRKRP

SEQ ID NO: 217917 - protein, 259 aa, Zea mays
  unsure (1)..(259): unsure at all Xaa locations
  Clone ID: MRT4577_130336C.1.pep
MSTAATKQQPEITKWASKDGEFRRQVSSFRDFVSRDKNARFAAEPDRYHLYISWACPWAHRTAIVRQLKGLDKIIGLSVVDYLLLDKGWKFSTSEETPGAIPDNVNHANYIREIYFKANPDYEGRFTVPVLWDKKHATIVSNESSEIIRMFNEEFNEFIDEDKKKLNYYPENLRSDIDALNEWVYDTXXNNGVYKSGFATKQAAYENNVYPLFKSLDRLEKILAXNEYLVGGTFTEADIRLXDTIXRFDPVYVGHFNGN

SEQ ID NO: 217918 - protein, 70 aa, Zea mays
  Clone ID: MRT4577_130337C.1.pep
GYGVPFGWPHVDSTSCVLRCAVMFTPNTPKVDTERLLGLARRVLAGLGEPNKAYVSIRRVGSPPRWKIGG

SEQ ID NO: 217919 - protein, 272 aa, Zea mays
  Clone ID: MRT4577_130338C.1.pep
MAGRHRAPRQYHDEPRGYRDGPPPPLPRPRPLSPRRMAEELSRRRAEIRRIHEDNQRLADEIVSLKQTMPRLQEDLRISSQAVPKLRAEKELESRELTQRNLKLEAELRALEPLRQDALHLRSEASKLQSLRQELAAKVQGLSKELELQKSESQKMTALVAERDALCQELLQARANLEFEKKAKPELTAQVQAMEKDLVAMAQEAEKLRADIAKRNTPTSFSSRGTYGASLSTPGMGLQGMYDGGGYSMAGSRYGSGTGAWSSHDPHGYPHL

SEQ ID NO: 217920 - protein, 179 aa, Zea mays
  Clone ID: MRT4577_130339C.1.pep
MAGRHRAPRQYHDEPRGYRDGPPPPLPRPRPLSPRRMAEELSRRRAEIRRIHEDNQRLADEIVSLKQTMPRLQEDLRISSQAVPKLRAEKELESRELTQRNLKLEAELRALEPLRQDALHLRSEASKLQSLWLGAATAVALGLGARTIPMATRIFNCASDRCFLLNSSLSTLAKFLVVV

SEQ ID NO: 217921 - protein, 72 aa, Zea mays
  Clone ID: MRT4577_13033C.1.pep
LALIKREWWWSSAHCFFSSFSRCVGRLSCPLVELPSFVHYYYCHPLFCLGLGLKKKNFKPRLVQARELYCFN

SEQ ID NO: 217922 - protein, 272 aa, Zea mays; identical to SEQ ID NO: 217919
  Clone ID: MRT4577_130340C.1.pep

SEQ ID NO: 217923 - protein, 52 aa, Zea mays
  Clone ID: MRT4577_130341C.1.pep
QKIENYTLQNLWFLNVIGQRRAKRWQTLLQFAIPTDKKTKTKSTGPTNQYTW

SEQ ID NO: 217924 - protein, 41 aa, Zea mays
  Clone ID: MRT4577_130342C.1.pep
VVTDVPTPTNYLHDNVFRPDRSSVAGRFIQHERHCTNEDPQ

SEQ ID NO: 217925 - protein, 33 aa, Zea mays
  Clone ID: MRT4577_130343C.1.pep
ISNTFFVFEKPLGYLTYAKLKCYIYHVVGVPHL

SEQ ID NO: 217926 - protein, 38 aa, Zea mays
  Clone ID: MRT4577_130344C.1.pep
RLQVTTSPYYIAPYVLSQLILDSSHPRSDLNIIENITS

SEQ ID NO: 217927 - protein, 251 aa, Zea mays
  unsure (1)..(251): unsure at all Xaa locations
  Clone ID: MRT4577_130345C.1.pep
RPGRLKPGPSALHLRRLLPLSTTSTSASVPAPQFRTLVSAAATDAAATPPEEVSAPAPAGVKVERLQPLQWPPRDALCSELGAGDAGRRVRLCGWVALRRAHAGLTFVTLRDRSGMVQVTVLPEYPEVYNIVNKLRVESVVAVEGVIRPRPVDAINADMRTGTIEVVAHHVLVLNSVTRSLPFPVTISDTVKEKFPEEIRLXEYCRFRMLXDLCRPQMQSNLRLRHNVVKLIRRYLEDEHEFVEVTCSKVD

SEQ ID NO: 217928 - protein, 134 aa, Zea mays
  unsure (1)..(134): unsure at all Xaa locations
  Clone ID: MRT4577_130346C.1.pep
WWLVTVLPEYPEVYNIVNKLRVESVVXVAVEGVIQPRPVDAINADMRTGTIEVVAHHVLVLNSVTRSLPFPVTISDTVKEKFPEEIRLRFRVLXDLCRPQMQSNLRLRHNVVKLIRRYLEDEHEFVEVTCSKVG

SEQ ID NO: 217929 - protein, 494 aa, Zea mays
  Clone ID: MRT4577_130347C.1.pep
GRLGNSVTRSLPGPVSTSDTVKEKFPEEIRLRFRVLDLRRPQMQSNLRVRHNVVKLIRRYLEDEHEFVEIETPVLSKSTPEGARDYLVPSRVQPGTFYALPQSPQLFKQMLMVSGFEKYYQIARCFRDEDLRADRQPEFTQLDMEVAFTSMEDMLKLNEDLMRHVFQAVGDIKLPNPFPRLTYAEAMDRYGTDRPDLRFDWELKDVSDVFLGSSFKVFADTLESGGVIKALCVPGGATVFSNTDLKKGTVYTEASKAGAKGLPFLKVMENGELEGIGPLLSSLKPEKKDQLMELLDTKTGDLILFALGEQSSANQILGRVRLFIAHKLEVIDTSAHSVLWVTDFPMFQWNSDEQRYKALQDTFTAPNPEDMDDLPSARALAYDMIYNGVEIGGGSLRIYKSDVQQRIFEIIGISPEQAEEKFGYLLECFDMGAPPHGGIAYGLDRLVMLLAGESSIRDVIAFPKTTTAQCALTKAPSAVEPQQLKDLAFPKPTS

SEQ ID NO: 217930 - protein, 76 aa, Zea mays
  Clone ID: MRT4577_130348C.1.pep
NVGSLPPPHDQQGPNDLYAAHPPPSERPLRYVCGSHTQKRRLLWTGEHPQSVQSRGAQATHERTSRQRPLHVGNRI

SEQ ID NO: 217931 - protein, 77 aa, Zea mays
  Clone ID: MRT4577_130349C.1.pep
AEEKFGYLLECFDMGAPPHGGIAYGLDRLVMLLGGESSIQNVIAFPKTTTAQCALTKAPSAVEPQQLKDLAFPKPTS

SEQ ID NO: 217932 - protein, 109 aa, Zea mays
  Clone ID: MRT4577_13034C.1.pep
AQDYIFVRARVCVRLNVLPFRLSEYTHGPVLFVDLDNDPEPDYVTLFFIERLPRINLFFLYCLYSPDEAQRFPILEFRLAPDRASVDADLSYIVVSRLVMSIAFLLNFD

SEQ ID NO: 217933 - protein, 59 aa, Zea mays
  Clone ID: MRT4577_130350C.1.pep
LTPSWFYIGGGRKHLDRSSPAKIFIGGLSKDTCMTTSKEHFTKYGHITYSVIFMDPFTQ

SEQ ID NO: 217934 - protein, 41 aa, Zea mays
  Clone ID: MRT4577_130351C.1.pep
VWLVFKNLEMDLLISGKPQTCEHCPGGVAVTHEKSKRGHLQ

SEQ ID NO: 217935 - protein, 58 aa, Zea mays
  Clone ID: MRT4577_130352C.1.pep
LIRSAPRGAVEHLYIYTRIDNVTSKRRRASHCVYADAQRARSCTNALVQGTVTRSLEP

SEQ ID NO: 217936 - protein, 70 aa, Zea mays
  Clone ID: MRT4577_130353C.1.pep
VIISRVQIVVQCKFVKRRRIVLSGGHSLYSQHRETRSEVYSSPEMFHLARDGFSKCESTSPRTVWPAEFR

SEQ ID NO: 217937 - protein, 87 aa, Zea mays
  Clone ID: MRT4577_130354C.1.pep
KGSDVMSGLRRHDHYNLYSRTLTHTHSKRGRHQCSVDGTARWRRQDKRNVNRLNWYEEKTVTRIGHFIHLQPRPFRVSQGSKGASTR

SEQ ID NO: 217938 - protein, 84 aa, Zea mays
  Clone ID: MRT4577_130355C.1.pep
FSPSPLCGFFEKTGPSPPRQGYYQNHLLRRKTKTPHYLRCYTMHQQTMATCLRSSYLCTQRTPFIPIPPSGWYPMNPCDNASTS

SEQ ID NO: 217939 - protein, 51 aa, Zea mays
  Clone ID: MRT4577_130356C.1.pep
RTLVSFPGSGAPCAISVRYLFRAAKVPFMPSLAARPIAEAHRNHSHAVRFA

SEQ ID NO: 217940 - protein, 33 aa, Zea mays
  Clone ID: MRT4577_130357C.1.pep
VGFMADLQGTKCHVFLKDERDLFDLPSLHAVCL

SEQ ID NO: 217941 - protein, 211 aa, Zea mays
  Clone ID: MRT4577_130358C.1.pep
MASSAATTAKLIALPPAPTRGGCCCWRTRRPAIPAAAARLKVSASAASSDVPDFLSSNWLETRKRKPFGPRLNFSAEEAVEYQLESLKYNDLPRPDYGIEVMYRFAGFDPFERSTYFGRQFDLGQFERFRRLFHHSTYRVLLGHRERRILSSLWVEENQFKQRVWIQGARPEEEEIFQFTMVQRVGGSWDGYWLTESLINDGDAFSGGIAY

SEQ ID NO: 217942 - protein, 107 aa, Zea mays
  unsure (1)..(107): unsure at all Xaa locations
  Clone ID: MRT4577_130359C.1.pep
FNTTRERPLIFHPRRLHIAXPPPDHVRRAQEHILLSARVFPPLXVFHEGTAXRFVSPFPGVFWCPPVGAALRFSCVAPPLFPSFLVPLFFSFFSGFFFCFPPPLFFR

SEQ ID NO: 217943 - protein, 378 aa, Zea mays
  Clone ID: MRT4577_13035C.1.pep
MVPEDLLSEPADGGVMDVCADVPDAGLGSSRAASRASSTLERGPEGQEAGLDCTVPTEVTEGPSALEVAVAENLALKDGAGAYLAPEGVAGDDPAWMGSASCDPAPEGVRVGSPSHTSMDVHVGSSPPHSGCMAIAQALGQGVVLEASAPDDRVLFSADDTELVPTDALRVVPTLVDEMVDMARRYSDLEEKCSQGQTELARVSASLNDANMLSSTLHAQLDSRKDEKCALATSRDNLDKLYRDASNSLTILERSHRFTREELDNHRYKLQESLDDVIRLRQLVSTKDTVIKDLCASKKSVVQELETARLAVKAAEDTSATLRARHDRAMDKAIRVGRILMRKPGVVVPNDIVADVNAAPESSSRPSSSVAPEKNIVK

SEQ ID NO: 217944 - protein, 70 aa, Zea mays
  Clone ID: MRT4577_130360C.1.pep
IRLEGSLLASGFQEVGQHHGPGRRMELLEDSGSCKQNQRMDHYAAPVVRALRPHGGQYRYLRTQSTSVIL

SEQ ID NO: 217945 - protein, 97 aa, Zea mays
  Clone ID: MRT4577_130361C.1.pep
KDLLFSRLFIFQDLTCLGRLIPNFNLPLEALIFLGLTGSGFGFVLPNFPPGGPPLVFIYPPPLVPPGAFFYPPPYPPGFWGCVLFYNNSPLSPPVRP

SEQ ID NO: 217946 - protein, 83 aa, Zea mays
  Clone ID: MRT4577_130362C.1.pep
KLCSFLIVKHIQDPTVRVKHSQRFALMKTTQKTFLRLCVDQIHTWQIFEFYILYRKVHLTVIICKTKIYIKSFKNLKPKKKGG

SEQ ID NO: 217947 - protein, 100 aa, Zea mays
  Clone ID: MRT4577_130363C.1.pep
MQDILFVGIGNCVLRIDTTKVGRGKDFTVEDPVKCHLEKLVDGVRLVGKHDGDVTDLSISQWMSTRLASGSKDGSVKIWDDRKQVPLSIFKPHDGQAVYS

SEQ ID NO: 217948 - protein, 76 aa, Zea mays
  unsure (1)..(76): unsure at all Xaa locations
  Clone ID: MRT4577_130364C.1.pep
KSRXPKTMLGALHAFWSKEGIPGFFKGLNAQTLKTVLSPPLLLMIKEKIPKFPWVPLLALGGYLFVFQKRIKRATV

SEQ ID NO: 217949 - protein, 122 aa, Zea mays
  Clone ID: MRT4577_130365C.1.pep
SRRGGPEAQESPAAGRGRFLLYHMPAGPANHARGPPKRRHGSNPNHQLGARTPQGRGVILVPQEGGHIGQGGDTHGQHKHGVVPDDERRARVRKLHDEGRRHRRLGPEAVRHQFLRAPYGLR

SEQ ID NO: 217950 - protein, 71 aa, Zea mays
  unsure (1)..(71): unsure at all Xaa locations
  Clone ID: MRT4577_130366C.1.pep
HPFDFSTQTKLXTPLPFDSSSRLMPTRRRLSSSPLAPPRLPLPHSPPLLLFTRDLNFPLAPLKVFVPPSSP

SEQ ID NO: 217951 - protein, 107 aa, Zea mays
  Clone ID: MRT4577_130367C.1.pep
ASKASCRSTCACATSRLHWAPGKLSFMHPSAHLSLLKQQPLNWRLYDKHGLSSLSVLFSSLSISLSFSWCFSFFIIKACMGMDPTIMASMVPTYAQLRRRSKNRSAP

SEQ ID NO: 217952 - protein, 68 aa, Zea mays
  Clone ID: MRT4577_130368C.1.pep
DHFRLLVPHRTITRSLEVVVHDGAAETANVTMVVKLPAPTSRSLSPKNQTLNTKRWGSTSPNAWADAW

SEQ ID NO: 217953 - protein, 35 aa, Zea mays
  Clone ID: MRT4577_130369C.1.pep
GHSHDECDCDRVLCNSTYSPLTISFVKSVGGWKKR

SEQ ID NO: 217954 - protein, 329 aa, Zea mays
  Clone ID: MRT4577_13036C.1.pep
MHAKSNFRSFIRTNSNIYTYRRRREPEGSGQQYKYALLTNCHKPLEVLTDSPNMIRALHFRDCHGSKGLKDYAFLPAKLSLKVLDLSGCNIAYLPASIGELAVLRYLNAPEIKNEMLPDSLSKLSKLIYLNLSGSNISALPDSIGDIEGLMHLDISNCVLLCELPESFVDLKSLVYLDLSHCQIKITAKVFSGLTNIQHLNLSKSLIHGGDGLEGLQEAVGGLTELRYLNLSGCFENLRPDEVLSSVDRICRLTNLVHLDLSFNLGLVSVPESIGSLRKLHTLDLLCCRNLVTLPKCMLNMDSMKILNVTCCPNLDQSTLPRYRYFTLP

SEQ ID NO: 217955 - protein, 107 aa, Zea mays
  Clone ID: MRT4577_130370C.1.pep
SSFRTGNALQPQEHLEYSSSPYCNKEVSDPSIKYRVRWLPSLDEQALKQTPLQKPLLEFHHLLLLGILTVQVLGGCMKLLGEVVRWPADDETKHDDDLRWRDYVLAT

SEQ ID NO: 217956 - protein, 73 aa, Zea mays
  Clone ID: MRT4577_130371C.1.pep
GFSSRAALLILGGLKWTNLLKKNPNNLGVKKSQRFKELKDQSNFCSLPEKKKKKKAKAKKKKKKKKNRKKKEG

SEQ ID NO: 217957 - protein, 59 aa, Zea mays
  Clone ID: MRT4577_130372C.1.pep
ARVVVRPQVDRAGLEQGTRPRRPRERRPTTTPCLPTAKPSKPVARCPLLLARCLDRDKK

SEQ ID NO: 217958 - protein, 354 aa, Zea mays
  unsure (1)..(354): unsure at all Xaa locations
  Clone ID: MRT4577_130374C.1.pep
MDDDIDSSCSTPFASAPSSPGRXPTPXGGGYFFSAPASPIHHLLLSTSCSASATPSTGGRGCVGDAEFEFGGPGGPMISADELFHNGQIRPLTLPPLPDLDPGSDDDEDCRAPTRGRDLTPRSASVHRRARSMSPLRSASPRXQADQCARRSGAGSRPXPDATGTHGEAAPPVTASSRSSSSSSTSSSSSSGTSSARGSRRWVFIRDMLLHRSKSEPGSGAHAHDVPGAPAANKPERAWPFSSPSWVTRDRLAARLRXLARRQRRRTLAVSVARMAGRXGQGRGRGRGRRRRSTTVAAAHERLYAAPNRAQAEEMRRRTFLPYRQGLLGCLGFSSRGYGALHGLTKTLNPVFSR

SEQ ID NO: 217959 - protein, 208 aa, Zea mays
  unsure (1)..(208): unsure at all Xaa locations
  Clone ID: MRT4577_130375C.1.pep
FLQVRARAADLNLSPTSDINLLESRDIHIHFPAGAVPKDGPSAGVTLVTALVSLFSNRKVRADTAMTGEMTLRGLVLPVGGVKDKVHDHCLTPFSFFLSFYFENVEGLIIFEPLPFCFVXSTILWNXVLAAHRYGIKRVILPERNLKDLSEVPLPILSDMEVCCCIVVCMFLGQLFGTKVLFDLRRFLSLGATKTKARFTCSLGASTN

SEQ ID NO: 217960 - protein, 113 aa, Zea mays
  Clone ID: MRT4577_130376C.1.pep
MDDDIDSSCSTPFASAPSSPGRPQALGGGGGGYFFSAPASPIHHLLLSTSCSASATPSSGVRGCGADAEFEFGGPGGPMISADELFHNGQIRPLTLPPLPDLDPGSDDDEDCV

SEQ ID NO: 217961 - protein, 73 aa, Zea mays
  Clone ID: MRT4577_130378C.1.pep
VWLTIDGNRGRSARESPEYAGLKESQENAVVVDAEDVGVEESQDEAVEAEAGGSSYGAALVRGNLGEEQWVLT

SEQ ID NO: 217962 - protein, 130 aa, Zea mays
  Clone ID: MRT4577_130379C.1.pep
MDEPDSAARSADKLTFDDEDGPTVPEAVQVGSSPKYRVDRKLGKGGFGQVYVGHRMSATGPGAVEVALKFEHRTSKGCHYGPPYEWTAYNAIGGIHGFPRVHYKGRQGDYFCMVMDMRPSLDVWNNKSHI

SEQ ID NO: 217963 - protein, 140 aa, Zea mays
  Clone ID: MRT4577_13037C.1.pep
MYNGIGLQTARGSGTNGYAQSNTFFVKPRSTSGGGPGGPHRPLPPDAAGADGGGMRKPNKEILEHDRKRQVELKLLVLRDALEEHGYTEDEIEERVAEARKAAEAEAEAAVAVAAEEVGIGRGAGRSPLPGRGYGSVGVI

SEQ ID NO: 217964 - protein, 64 aa, Zea mays
  Clone ID: MRT4577_130380C.1.pep
SVNNEDTVGCWSMVIAADVSIERLLPAGVSVTNGTGLIVARATLSRPSTGFVLAPSGYARPGTR

SEQ ID NO: 217965 - protein, 103 aa, Zea mays
  Clone ID: MRT4577_130381C.1.pep
EQKTIIAYLVQKDRGGMTGDHTRSTIPSFYRPKTPPAPYGGAPREFRAPGNFTMGSKSRQGGNLWGELGGDLPRDKGGSLLFGLSGHPLSGRRGKKNLFWGCP

SEQ ID NO: 217966 - protein, 90 aa, Zea mays
  unsure (1)..(90): unsure at all Xaa locations
  Clone ID: MRT4577_130382C.1.pep
ESSEEYXIKDTCTDVLLCVSGMWDDVKISMLSEEDFEEDECNDLLLLAKKELFKRPTVAELEEKEATVHADIVNHGRLVHAQLSRSGLFF

SEQ ID NO: 217967 - protein, 100 aa, Zea mays
  Clone ID: MRT4577_130383C.1.pep
SADAWARFSGETAPMSIPQAGGGRGPMHQHHRNLSEPSRAFMFPPPSPKYLRGEAGRQESPTETNRSFKRADGIRMGDLYANLPSSYKVILLHFVHIKTR

SEQ ID NO: 217968 - protein, 96 aa, Zea mays
  unsure (1)..(96): unsure at all Xaa locations
  Clone ID: MRT4577_130384C.1.pep
FSPPNPSIQPHPXYSSLFTTIXKPLXXTPFQPYXTXSXXPLPXIPIXTFTSTXFNHXIISLPXHPSFSYTLTKXXXHPXXXXXXXTXHLHXXSLNL

SEQ ID NO: 217969 - protein, 128 aa, Zea mays
  Clone ID: MRT4577_130385C.1.pep
SQAQQRFCAGWLHEYKWYRPRSVPSPEGFGSFSDQCNPLRSAQSCSRPQHEPCVRIPLLVDNLFELAQRCPFNECRVNIVGCAPAAPACKCSSGSSKRVFPFLPPSSTAHESLLLGGPNCPHVYRPQA

SEQ ID NO: 217970 - protein, 186 aa, Zea mays
  Clone ID: MRT4577_130386C.1.pep
PPSSSSPKKKLTPKLIPGLMEAMPQLGPFSGGAGFPTGPFLRSSVLSPPHPLGKLKDIFLGDEISMVTPPPGRLKDNFPPMGGPLCSNNLSMDNGFGPGTAKSPARKPGWGNGGVFNICFGGQGPPLEDSGRGHQTSKMFKPQCPRGSLFTGGGFASPSGGGLVWGFAGTYGGLFALPPAQPPVKW

SEQ ID NO: 217971 - protein, 137 aa, Zea mays
  unsure (1)..(137): unsure at all Xaa locations
  Clone ID: MRT4577_130387C.1.pep
GKVLRTNFTPTASIFSWLESGFMKAYDRAEKISHVIXKSDGNTEMPDAVDVAFQTALXYGKSGAANEVLGNQSRSAELYSKAIILLTFLVQEAPMLPLNPPLSLSPLDQQRIRRYIANLKSHLCSAQVPGQRQRSAP

SEQ ID NO: 217972 - protein, 514 aa, Zea mays
  Clone ID: MRT4577_130388C.1.pep
MDEEEREEVGEYKLQGLVGRGSFAEVHRAAHRRTGAPAAVKAIDRRLVDKRVHDGILQEREILRSIDHPNILRLLDTIDTTNMMYLVLEYCDGGDLDAFLHKHGRLPEAVAKDLMRQLVPFNVKDHRHLLKNLLLSTNGDDIVLKIGDFGFARSLVHENLAATICGSPYYMAPEIWQGKDYDAKSDLWSVGIILFQLVTGKLPFTGSNAFQLHQNVMATDDLNFPSEIEADLCPDCIDLCRRLLHRDPSGKCYESRHVLELRDNCQTITSPVVLKTKSGSIESKNPKVFDSWEWIEREYVLVPENCTSMEMSSLNIKSTKDDMDTRTVSYGRSTGKGSVQNQIRDFTDTATGVQSHGCAPVVISQESATVDCRRGKPPDYITRLHSLNQYVLVLADLAREKLSKGLYLEALSIELVLLTIWKEALDACSLLMDTSDGEKFSKSCQEHFLAKSGHSPMNVVQGLDFTRTASIFSWLESGFMKAYDRAEKISHVLRKSDDNTEMPDAVDVTFQTAL

SEQ ID NO: 217973 - protein, 90 aa, Zea mays
  Clone ID: MRT4577_130389C.1.pep
MAIGDDSVARVFDEDEPSLQEVWQAFSVFDHNNDGYFDASDLQRVLGSLGLREGLGMDECEQMIAKYDTNKDGRIDVAEFTRVLESAGIC

SEQ ID NO: 217974 - protein, 129 aa, Zea mays
  unsure (1)..(129): unsure at all Xaa locations
  Clone ID: MRT4577_13038C.1.pep
MYNGIGLQTARGSGTNGYAQSNKFFVEPSSTSGGGPGGPHRPLRSDAAGADGGGMRKPNKEILEHDRKRXQGELKLLVLRNALEEHGYTEDEIQERVAEARKAAEEVGIGRGAGRSPLPGRGYGSVGVI

SEQ ID NO: 217975 - protein, 82 aa, Zea mays
  Clone ID: MRT4577_130390C.1.pep
RDDAMLGNWSWPDVAAQIALAATMNARFQCSANISSSIRDTDCQRSSRSRATFLSYRYQMHYREKHHYLTCLWEQSGGTTLT

SEQ ID NO: 217976 - protein, 374 aa, Zea mays
  Clone ID: MRT4577_130391C.1.pep
MEAAPTTITVQVKFAGRTIPVEVPAAASGAELKRLLQPLTNVLPRGQRLICKGKVLQDAASLSSMQVVGGSKVMLIASQGLHQGDGPITNNSSSSATTVRRPSNVKENQTQKPEVVVTKSRSERWKLTGVVALQDCDLKVIPEEVWDCGTSIRILDISYNCIKEIPHKISALKSLNKLLLTENDIVDDSICWEGLSCLQKLLNLSLSENRLVSLPPTLGSLTSLRELCVAKNRLDNLPVEIGLLKHLQVLIANNNRITSLPSSIGDCESLTVVHLSSNLLTELPETFANLRNLKNLLISNNGLTSLPAAFFKKCSQLTTLDLHGTEITNDVLRQVEGWEEFDQRRRQKHQKQLDFRVGSSGVFDEGADDDNRRR

SEQ ID NO: 217977 - protein, 151 aa, Zea mays
  unsure (1)..(151): unsure at all Xaa locations
  Clone ID: MRT4577_130392C.1.pep
WSIITRAMFHSMLNHRGDSGXTGRXFYTYDACIEGGSKFPGFSTTGDEQTRRWDLGAFFSQTSHXTTGGWGTAPDGTFAWRYCRVEEQKQTDPPYYGRGPIQLTHKCKYRFAGLALKLNLLGDPDLVVRDLEVAFKTVIWVWMKPQLTDSS

SEQ ID NO: 217978 - protein, 96 aa, Zea mays
  unsure (1)..(96): unsure at all Xaa locations
  Clone ID: MRT4577_130393C.1.pep
TVVAEAAVAAAKASAVVFSGCAAMSPGVSDMVRTVPSHRWLARLGVASEARKVAPAALRRLEELEGRIAGLECXSEKVFRRLLQARVVLLNIHSPL

SEQ ID NO: 217979 - protein, 32 aa, Zea mays
  Clone ID: MRT4577_130394C.1.pep
KILLKKVILTNYYCTNKLIDEDPHRGINVVLL

SEQ ID NO: 217980 - protein, 71 aa, Zea mays
  Clone ID: MRT4577_130395C.1.pep
FLCFFSFFSFLKERTQGGVFGCLPSCRMTNIYSSHRRPVSLTKKCGWAPKKKAGGLTRLLFFSPPLLKSGP

SEQ ID NO: 217981 - protein, 216 aa, Zea mays
  Clone ID: MRT4577_130396C.1.pep
MSAPSATRLFSQATRTASRSIIRSRQANAFHLQPCRVVPAIRAVNSSRSFSVSASKATGLMPDTENPSTPKREPLATTLTPANITDEEFHTLSDAFLEKVHEKAEQVQEGREDVEVDYSAGVLNITFPPNGTYVLNKQPPNKQIWLSSPLSGPKRFDWTIQGEGMNYKEGSGEGEWLYIRDGSSLEEILRKELGLSVDISGHEEEMEAALSKDPTE

SEQ ID NO: 217982 - protein, 181 aa, Zea mays
  unsure (1)..(181): unsure at all Xaa locations
  Clone ID: MRT4577_130397C.1.pep
MKFLAALALALSATAGTLAQSSGNATAFADGLLSALRANNLSALADAVGNNSQMLLGALQGGNKTVLAPSNQAIQALGDVDTQALVATIAYHVLNGTVLNSQLGTNNKTIAASALNSSEYVTLPNNRSQXRRALQAGQQQHGLCPARFGQRLFRPDPGRSSVREHPRAAHYAGAHHPRIHL

SEQ ID NO: 217983 - protein, 66 aa, Zea mays
  Clone ID: MRT4577_130398C.1.pep
YKNICFNNKNVRKTNLGLSSVRAISLDSNFHLLMKLNLLLPKKETYLFFNLVQLPQSLIPLLNGYF

SEQ ID NO: 217984 - protein, 104 aa, Zea mays
  Clone ID: MRT4577_130399C.1.pep
KLFETFAPLFTKKGYLLKFPKLEDGSLKANVSALESPVLIPIKNAPHHSRQPGPHGKLSPKLCHMHAQVACFVLQPPFDPSQLSRIISGSCRNPVKNGVYNPFR

SEQ ID NO: 217985 - protein, 158 aa, Zea mays
  unsure (1)..(158): unsure at all Xaa locations
  Clone ID: MRT4577_13039C.1.pep
MSLDPTIPAIEVKVAPISGHAPHRACRSFGAELSSRLQGTHPKTRAAPGVSTAKDCDFAQSSHPDRYSQDRCCTCKVIHYGGAYSDKRFWGYSPRDWAAYDAVWSWVPEKHKXKCDTNCCTTGKVXVTYTPARWHSFHRQPMSAIXCENDACVFMICR

SEQ ID NO: 217986 - protein, 79 aa, Zea mays
  unsure (1)..(79): unsure at all Xaa locations
  Clone ID: MRT4577_1303C.1.pep
LFNRVPSGVGGQIGNVPSFMVRVGXLKXLFFFLSSPFGGGPPGRVKKKIQKKATGGGDPGLWVWEWGWPSSVPPYKKII

SEQ ID NO: 217987 - protein, 95 aa, Zea mays
  Clone ID: MRT4577_130400C.1.pep
CSPRCSRSAKSPRAWFPQVQRTPKKEEPELRAPFFSIWDRTPKTNDPSIMKQRQGPKLPKRPGHLEFLPTARPLNHCLSTLPQWLIPGLVVNVFS

SEQ ID NO: 217988 - protein, 110 aa, Zea mays
  unsure (1)..(110): unsure at all Xaa locations
  Clone ID: MRT4577_130401C.1.pep
GGEEGGGGXXVGGGFYLLFPFRLARALSNHSSCLQFRIEALRPHPPFFLALHGATHSACLDWCSVATSPPTMLNARAMCAVRGGGSYWHSVRRGLWHGRGVPRCFYRAVV

SEQ ID NO: 217989 - protein, 49 aa, Zea mays
  Clone ID: MRT4577_130402C.1.pep
GDEEDPSIVRLPVPYQLPPQPYGTQDVPWSWDRRYPKKDVYGSVWPRYG

SEQ ID NO: 217990 - protein, 343 aa, Zea mays
  unsure (1)..(343): unsure at all Xaa locations
  Clone ID: MRT4577_130403C.1.pep
MDALNFEYPDYERLSKGAKGTKRKRVVSVLSRQVARMVKEDEEALKNRKSNLGPKVVISKKRRAATPEPKAAEIEEETPSMSYAAEVEENLKETPPPALASKMTPAAEVVASTEAATAEATNLESTLSAIDKVLLDLAAEETAAAAEDVLVAVSEKGKEIAEDISEEKGFNFQNIIGQELSKAEKEELQEYDISCGYQPGAMLFGGINEEALGCIRDRTRVLLICDEAKISDEGYFAQSMLLSKALRMQQDLEDKKNEIIIEGLEKKIKDHEASLEKKDFLLQTMEGSLAEAQAKIARLNDELLRKSESFEEENKNFDVKFEAEVEKSSNLXKILKELQDKCL

SEQ ID NO: 217991 - protein, 104 aa, Zea mays
  unsure (1)..(104): unsure at all Xaa locations
  Clone ID: MRT4577_130404C.1.pep
EGEDEKKRKEELKEKXEGLSKVIKEVLGDKEEKXVXXDRVVDCPCCLVTVDXGWTANMERIMNXQALKDSSMXGYMYXKKTMXINQDNXXMEELXXSEEADKND

SEQ ID NO: 217992 - protein, 66 aa, Zea mays
  Clone ID: MRT4577_130405C.1.pep
KVEIAQKDVPSAVFGGIRKREDGDDIHDGDDASAAKEKCSISLLGALERIKRHKQAYKYYTSNSYY

SEQ ID NO: 217993 - protein, 101 aa, Zea mays
  Clone ID: MRT4577_130406C.1.pep
PVQDEENNVRPLVAHVEAWEDGGELHDVEELELLVHPVELVDGVDVEVAERAQVGLVGEGDHRGLAGVALVAQDPHAVRTFLGSSPASSEASQGISRLLKS

SEQ ID NO: 217994 - protein, 46 aa, Zea mays
  Clone ID: MRT4577_130407C.1.pep
ISSVITSRGYVRDRMLSPWHVITNDSRPVNPQQCVSITTPIKGWPQ

SEQ ID NO: 217995 - protein, 104 aa, Zea mays
  Clone ID: MRT4577_130408C.1.pep
MFRQQIVRQARLFSTTPVARKSPVDAIKDAAKTIDKTISGAAVKGIEKGEEVANAVKEATPNTAGEAKGQASQVAGEAKGKASEVAGQAKGKAAEVKGEVKGKM

SEQ ID NO: 217996 - protein, 115 aa, Zea mays
  Clone ID: MRT4577_130409C.1.pep
MATAPRRLLPALLKALAPAGARGLSTEKAVGAAAAAAVAVVGSHTAKWMQDTSKKSPMELINEVPPIKVDGRIAVCEGVAEGVGLGHPIEYICLDLEAPNVCKYCGLRYVQIHHH

SEQ ID NO: 217997 - protein, 84 aa, Zea mays
  Clone ID: MRT4577_13040C.1.pep
LVQASVGGGRAQGLAISRVTGLSSKLNQAMSKQRGRRRRQTRYPPDGLIAGSSRGKRIMASSCQQDCVPGGSAYANGQANTEAP

SEQ ID NO: 217998 - protein, 73 aa, Zea mays
  Clone ID: MRT4577_130410C.1.pep
MSTDMFVMHSDHTPAGDQPEAIARLIAGIEEGATHQTLKGITGSGKTFTMANVIHRLKRPTLILAPNKTLTAQ

SEQ ID NO: 217999 - protein, 112 aa, Zea mays
  Clone ID: MRT4577_130411C.1.pep
MATAPRRLLPALLKALAPAGARGLSTEKAVGAAAVAVVGSHTAKWMQDTSKKSPMELINKVPPIKVDGRIAVCEGAAEGVGLGHPIEYICLDLEAPNVCKYCGLRYVQIHHH

SEQ ID NO: 218000 - protein, 268 aa, Zea mays
  Clone ID: MRT4577_130412C.1.pep
TCVSVICEQRVIIPNGHGEKLVGLLHGTSSKNLVILCHGFQATKDDSILVALANAITKEGISAFRFDFSGNGESGGEFQYGSYRKEAADLRSVVLHFSEQKYDIIALIGHSKGGNAVLLYASKYHDVPAIVNISGRFALERGMEGRLGKNFMRRINEDGYIDVKNKKGELQYRVSKASLDDRLSTDTLFSSRAISEDCRVLTIHGAKDETVPAEDARQFAANIRNHELRIIADANHRYTGHRDELASLVLGFLSSHPYQTTSRLRPRL

SEQ ID NO: 218001 - protein, 576 aa, Zea mays
  unsure (1)..(576): unsure at all Xaa locations
  Clone ID: MRT4577_130413C.1.pep
VPVDIVKLNIPDYFQIVKQPMDLGTIQKRMKAGMYSTPPEFAADVRLTFSNAMNYNPANNDVHLMAKTLSKNFESRWKLIEKKLPKPDEKPPQPDEKPPQPVEKPPVRKPTKKNSTKRVSIEKEDLTKKKPSKKSVPKQYIFRGEDSADSPVLQPKKRKTSPLVQDAPLVGDIVPTRKRIMTSEQKYDLSARLQSYGAFIPDHVVELIRSHADYCDANEEELELDMDALGDDTLFELLRLLDDYDRVNPSRNLTEQDPHEXLSLEVNMNSSMRQCXEEVNELFDEDVDIGENDPPVLTFTPLVLEDETADRSRKHSASSSSSSDGESSSSGSSSSSGSDADAKAAQQNSGSKEKILPVDGVGHEKDSLDTLNLPEQSTDPVSVSAYGEGGYVSEKVSPEKQIRAALLRSRFADTILKAREKALDQTTKKDPEKLRREREELERLQRQEXRARLQAEAKAAEDACKRAEEAAAAEAAAEAKRQRDIEREAARKALQEMERTVDINGGSHFLKDLEMLRGVTGEEMPNLVGEGSPGFQLGSSNALAKLGLYMKDDEDDEEGDLADAPVVVDIEEGEID

SEQ ID NO: 218002 - protein, 278 aa, Zea mays
  Clone ID: MRT4577_130414C.1.pep
MGPVHSDQKAKKLAIICEQRVIIPNGHGEKLVGLLHRTSSKNLVILCHGFQATKDDSILVDLADAITKEGISAFRFDFSGNGESDGEFQYGSYRKEAADLRSVVLHFSEQKYDIIALIGHSKGGNAVLLYASKYHDVPAIVNISGRFALERGMEGRLGKNFMRRINEDGYIDVKNKKGELQYRVSKASLDDRLSTDTLFSSRAISEDCRVLTIHGAKDEIVPAEDARQFAANIRNHELRIIADANHRYTGHREELASLVLGFLSSHPYQITSRLRPRL

SEQ ID NO: 218003 - protein, 80 aa, Zea mays
  Clone ID: MRT4577_130415C.1.pep
YLVRYNHLQVNTPSSFGELCHPWFDLERTSGTCDKLTHLVQMRPNTRTKAYKSWLELSATHLVNTTLEGSDFTLTLENYC

SEQ ID NO: 218004 - protein, 46 aa, Zea mays
  Clone ID: MRT4577_130416C.1.pep
RKKKKKKKKKKKKKKKKKKKKKRKKKKKGEKKFKKGAGLFWRVPLF

SEQ ID NO: 218005 - protein, 92 aa, Zea mays
  Clone ID: MRT4577_130417C.1.pep
NLGVLKYNLKSFYPLAWEGKIPRGREWHYRKGGTRKEIRLIFYGPPTQPGRNNNLPPNKKFHHGLNPWGTKGHFYFKASWPFQSLINRTFGY

SEQ ID NO: 218006 - protein, 629 aa, Zea mays
  unsure (1)..(629): unsure at all Xaa locations
  Clone ID: MRT4577_130418C.1.pep
FNASGIVFMGDNMKPNLESGSINGEANGEDGAKADQKSSQQMGSHAAYPPWAMHPPSGAVVYPPYPMQGMPFYPGVNPYYPPYPPVDDPRYHYSGRKSSRKHSSDSKDSETLDVESDHCSSDRGSSHGRKSHRKGKRSGKKKPSVVVIKNVNVTSKKHGSSESESQSSSEVESADSDNSHSKSSERKHKSSSSKKKEGRRTTFASGDEYSKDEMSNGHDAEQGNWSAFQNFLLRAEEKTRSSDADLFAGEKEPPSRRKQNVNTADPILLAERDGGIVHERNIVGFDSANGRTRAIRVMSNDELVMSGXGNNAEYAGDCEMKEIEAGGGRYRRGTGDDYMVYGQGCQIDRHCLLDPLAEAQYKNPVQQDKNRNGVADESFMIPLRSSLQDNIGAESRTTIDIDVELPSRIHKASDEKAGHQLFYEPDELVPERGSEDVSFGYDPAMDYDSHMQTTVKVEDEKTEDDLPVADNDVQKVEKEKLRNAKDGSDKRRKDALLRRLSAPRTPLNDAQKRAQNLRAYKADLQKLKKEQEEEQIKRLERLKLERQKRIAARGNGKGPGNGSPKANGTNGLSKSVPTFTGLKKEKNGTTESLSDRLKRLSEPKSIAGAEHSLNPKSTGADHSRRRSMA

SEQ ID NO: 218007 - protein, 74 aa, Zea mays
  Clone ID: MRT4577_130419C.1.pep
HMRAVRDDIEEKLGPVTHGHSLSVLYKIGQCPCITSGTYNILITYIYKYVLYDYEMNDNIRKPSRMISKRNSGL

SEQ ID NO: 218008 - protein, 50 aa, Zea mays
  Clone ID: MRT4577_13041C.1.pep
SSTTLPPFQCYWIGFSLDRHEAPSAGGRRALLSSRGQARPFVEKLRRSYG

SEQ ID NO: 218009 - protein, 391 aa, Zea mays
  unsure (1)..(391): unsure at all Xaa locations
  Clone ID: MRT4577_130420C.1.pep
SRRKTRSSDADLFAGXXKEPPSREKXNVNTADPILLAERDGGIVHERNIVGFDSANGRTRAIRVMSNDELVMSGEGRNYMHSEIKEIEAGGGRYRRGTGDDYMVYGQGCQIDRHSLLDPLAEAQYKNPVQQDNNRNGVTDESFMIPLRSSSQDNIGAESRTTMDIDVELPSSIHKASDKKAGHQLFYEPDELVPERXFEDVSFGYDPAMDYDSHMQSTVKVEDAKPEDVLPVTDGVQKVEKEKLKNARDGSDKRTKDSLLRRLPAPRTPLNDAQKRAQNLRAYKADLQKLKKEQEEEQIKRLERLKLDRQKWIAARGNGKGPGNDAPRANGMNGLSKSVPTFTGMKRVENGTTESLSGRLKRLSEPKSIVGAEHSLNPKSAGAGRSRRSMA

SEQ ID NO: 218010 - protein, 105 aa, Zea mays
  unsure (1)..(105): unsure at all Xaa locations
  Clone ID: MRT4577_130421C.1.pep
MKNARTAQPERLYDRGRVLVYKSCKNNHQQTTAVAQIERGKTHEDDTRDCRKWMGYVYXARPLATVAAXRCIWGKVYCFFXSSTVERAKFRLKLQRESMGCDARV

SEQ ID NO: 218011 - protein, 82 aa, Zea mays
  unsure (1)..(82): unsure at all Xaa locations
  Clone ID: MRT4577_130422C.1.pep
RQPFRSTKTPKSINHFFWKPLPTSSVYLLKEEANPKKILTLETKITLFLKPVNKXQFSDPXRIQGLLKNNSKFGFFPNSTWQ

SEQ ID NO: 218012 - protein, 87 aa, Zea mays
  Clone ID: MRT4577_130423C.1.pep
GGFLRFKSSVLDPQLSNPKHPLVNVKVVVHVTKPELRKNEVSNPFHFPFPVCSDPLKNGLKIPTVVPPPKKKARRILEGMEAKGLSN

SEQ ID NO: 218013 - protein, 106 aa, Zea mays
  Clone ID: MRT4577_130424C.1.pep
SRMSIINPRGYSHGRIFTLLDLNLTRCHPYSHKERIIGPCKLRTRRKNLVPLIAKTIKIYVTSILRAMLSKKTAVDSNILISSSTKKGVMKKNRFPNRKKRYVIAA

SEQ ID NO: 218014 - protein, 64 aa, Zea mays
  Clone ID: MRT4577_130425C.1.pep
FGGSGGGGVRVGRAGAGAGVGYLCRVPLRGDAGEQSRREEQRHDVVRRRGVPELGRFACASPVS

SEQ ID NO: 218015 - protein, 217 aa, Zea mays
  Clone ID: MRT4577_130426C.1.pep
MSSSNQMCSDGKFGRGPRELSGAVDLISRYKLLNHHSFFCKKPLPLAISDTNYLNNVVGDTEIRKGEGMELDQLFQNSCSSEKTAYIQPFDMETLGQAFQLRETAPVDLPSAEKGTPTISGKSKVKSKDKVKKHKKHKEKDRDKEKEQKKHKHRHKDRSKDKDKDKDKDKEKKKDKSGNHDLGGDHSKKHEKKRKQEVTGSSANVQNHKKTQKHKIQ

SEQ ID NO: 218016 - protein, 125 aa, Zea mays
  Clone ID: MRT4577_130427C.1.pep
QLRETAPVDLPFAEKGTPPIFGKSKVKSKDKVKNHKNPKEKDRAKEKEQKKPKHRHKVRGKDKDKDRAKAKEKKKAKSGNHDSGGDHSKNHEKKRKQEVPGSSANVQNSKKSTASYILFLSYFHN

SEQ ID NO: 218017 - protein, 283 aa, Zea mays
  unsure (1)..(283): unsure at all Xaa locations
  Clone ID: MRT4577_130428C.1.pep
MHAAKLQTLNGLQLRSSFSALSCSCSPSPSPGDGGKRSARSLFDELSVLSPVVPWEVDDIWRIYAGYFFILHIPLSFGGLXVIAKVMQRSSLDSMTTVISTLMLQLAELVLTLVLLQYSAKPGQAIQPFFCGKVFTERNWVKETVLGFVVLITLVLTTSILADKLVGSEDAYDPVLKEILSGSPASALVCFFLYCVIAPLSEETIYRGFLLTALSSSMKWRDAVVISSLAFTVAHLSGKSSIQLFVVGCITGLAYCRTGTLAASFTIHSLYNAVLLYTASTAT

SEQ ID NO: 218018 - protein, 112 aa, Zea mays
  unsure (1)..(112): unsure at all Xaa locations
  Clone ID: MRT4577_130429C.1.pep
ENRELQLYRIQQAIRVRNIPXHPRLNTRQHLTLVQSXAQTMRAQQLHQLVLPVINXQVVLAXNLYYYSKQQQFVPFNQLSTLNRAAYLHEQLLPLRQLATXYSQQQQLFPFN

SEQ ID NO: 218019 - protein, 450 aa, Zea mays
  Clone ID: MRT4577_13042C.1.pep
MAPKKASAAGAAALQPLDHNQETVSLREARSQKRKAVSPTLEEEELDQEIREMEMLHQQVQRKKEKMARLAELQRQIDEASEEVRHLNHDEQNRRPHQKDLHQEGFVNEDDWYDNFHQGNFVFDDASPLSAELQATPWPPSYKPPQLPMFDGHSDPKQFLMSYEATVSSYGGNAAVMAKSFVMAVRNVAQTWYSSLRPGTITSWQKLKDMLLTSFQGFQTKPVTAQALFQCIQDHEEYLQAYVRRFLRLRAQAPTVPNEIVVEAMIKGLRPGPAAQYFARKPPQTLEKLLQKMDEYIRADNDFRQRREEAFRFSEMTRGFGGRFGDQPRRLFCLFCGEGKGHTTRTCHVTIQKQKELAEAASQQAQSKQVLHTASFHPPYVPQYIDNHPAASVASASQPQASWQQPPPPPPLQQGQQPEGSQYAPQQRDFREQSEARTVNSTVPESKHIY

SEQ ID NO: 218020 - protein, 55 aa, Zea mays
  Clone ID: MRT4577_130430C.1.pep
LIALRSLHILSVLWLLMLVLRSGIHNEGMLRERRVLWLLPNWQTMLPVYIYYYRA

SEQ ID NO: 218021 - protein, 72 aa, Zea mays
  Clone ID: MRT4577_130431C.1.pep
VINSDFKDLVPVNNIQSDILMLLKCIMLHNRMIIMRSKCIVFSMLRECNIFKHAPWLICIVHAKSVHDSSPP

SEQ ID NO: 218022 - protein, 39 aa, Zea mays
  Clone ID: MRT4577_130432C.1.pep
RWSYYCMKAFQVWLSSTPCWTTTVCLHIRVDMVIISTVI

SEQ ID NO: 218023 - protein, 55 aa, Zea mays
  unsure (1)..(55): unsure at all Xaa locations
  Clone ID: MRT4577_130433C.1.pep
LSFSLPIRLFLFFQYTFFLFPTFVSISLDLSWFLCTTPFLLLNYRVKLXTSIILG

SEQ ID NO: 218024 - protein, 115 aa, Zea mays
  Clone ID: MRT4577_130434C.1.pep
PNSTVNLPANHIRTPHALVTKDCAYLLHRQALFTPVQPLLPNGTPRPLLPGFPLDQSPFFPQLVYSSRQTGRGPVPPGSPAQVRPQCPARNGPSPCYINPPWWAPALYPVPGPPR

SEQ ID NO: 218025 - protein, 101 aa, Zea mays
  unsure (1)..(101): unsure at all Xaa locations
  Clone ID: MRT4577_130435C.1.pep
RDDLTAMLSFDALAETXELAGKWLPFAKKHNIEPIAPEWNFCHKTEYLKDKIHPSXVNXRLAMKTEYQXFKVRVNGLDAKAQKAPEVRWIMPDDAPWPRNN

SEQ ID NO: 218026 - protein, 122 aa, Zea mays
  Clone ID: MRT4577_130436C.1.pep
GVGLPLAFFGVDKLKLFFPSWCRVSPLVRCSLFGLAPLLKVPLRGPFYNLFLVFLATSRPPWGGGFPSFFGVFWCSHCFFMRGPFPIFFNPGLVLVPCPVLALPPLYRWPPSPLVAVIRTSF

SEQ ID NO: 218027 - protein, 243 aa, Zea mays
  Clone ID: MRT4577_130437C.1.pep
MDWDAPALTSFVADLSFRHLCCYGAGIAGNAFAFVLFVSPLPTFKRIVRNGSTEQFSCTPYIYSLLNCLICMWYGLPFVSYGVVLVATVNSIGAVFQLAYTAVFIAFADAKQRLKVSALLAAVFLVFGLIVFVSLALLDHKARQVFVGYLSVASLVCMFASPMSIVNLVIRTKSVEYMPFYLSLSMFLMSASFVIYGVLLGDGFIYIPNGIGTILGIVQLLLYAYIRKGSSEEAKLPLLITHT

SEQ ID NO: 218028 - protein, 69 aa, Zea mays
  Clone ID: MRT4577_130438C.1.pep
GFYASLFLEELAKIMNGRRCDGERSGVRVNGGFRNCRLSGLVRGERRDGGRSRGAYGGLRANPRCKLSH

SEQ ID NO: 218029 - protein, 44 aa, Zea mays
  Clone ID: MRT4577_130439C.1.pep
RTQSSIDPSATLCSNSTKMRSRVGRESGLRSREPQRWWWCAASV

SEQ ID NO: 218030 - protein, 504 aa, Zea mays
  Clone ID: MRT4577_13043C.1.pep
MAPKKASAAGAAALQPLDHNQETVSLREARSQKRKAVSPTLEEEELDQEIREMEMLHQQVQRKKEKMARLAELQRQIDEASEEVRHLTHDEQNRRPHQKDLHQEGFVNEDDWYDNFHQGNFVFDDASPLSAELQATPWPPSYKPPQLPMFDGHSDPKQFLMSYEATVSSYGGNAAIMAKSFVMAVRNVAQTWYSSLRPGTITSWQKLKDMLLTSFQGFQTKPVTAQALFQCIQDHEEYLQAYVRRFLRLRAQAPTVPNEIVIEAMIKGLRPGPAAQYFARKPPQTLEKLLQKMDEYIRADNDFRQRREEAFRFSEMTRGFGGRYYPRHVRSIHNTQNDDKGSQQNRPQCSSQASGQQQTFFRPPAPRGRGARGFGGRFGDQPRRLFCLFCGEGKGHTTRTCHVTIQKQKELAEAASQQAQSKQVMHTASFHPPYVPQYIDNHPAASVASASQPQASWQQLPPPPPLQQGQQPEGSQYAPHQRDFREQSEARTVNSTVPESKHIY

SEQ ID NO: 218031 - protein, 83 aa, Zea mays
  Clone ID: MRT4577_130440C.1.pep
FSAWLCTWGKKEGPLHGVGNGVPGGMPRRQGPPLRLPQGLTARFTPRGSPTESETKTETMTLPITLRQVHDFGTNVRSKYRGM

SEQ ID NO: 218032 - protein, 645 aa, Zea mays
  unsure (1)..(645): unsure at all Xaa locations
  Clone ID: MRT4577_130441C.1.pep
DAWVKGGVLLIGYSSFRNLSLGKHVKDKNSANEITYALQCGPDILVCDEAHMIKNRRADITQALKQVRTQRRIALTGSPLQNNLMEYYCMVDFVREGFLGSTHEFRNRFQNPIENGQHTNSTSDDVKIMNQRSHILFEQLKGFVQRKSMNVVKNDLPPKKVFVITVKLSQLQRKLYKRFLDVHGFSSSGYSEKSHRSFFAKYQTLSQVWNHPGLLQMAKEQRGNLRREDAVENFMMDESSSDDNVENYLPNGEKQKDKADQQSKKSNIIMNEESNWWEELLDENTYMKADYSGKMTLLLDILSKSSELGDKVLVFSQSLTTLDLVEFYLAKLQINGKEGKHWKRGKDWYRLDGSTPSSDRQNLVEMFNDLENTRVKCTLISTRAGSLGINLHAANRVVLLDGSWNPTHDLQAIYRVWRYGQTKPVYAYPLMAHQTXNQFIYKRQVTKEGLAARVVDRQQVSRTISKEEMLHLFEFGEEELMEQNENGSTMIEKPSTSNTIKTSVPVPVDSLMLSLLSEQTRWISGYHEHEALLQENEEEKLTKEEQDLALSEWESLRKAASDPERKSSMSAVPTYPNPVRPLKPASRSRQLQQPKANSNNQKKCTNLTHLLTLRSHGTKAGCTTTCNECGQEISWETLNRDGRSR

SEQ ID NO: 218033 - protein, 147 aa, Zea mays
  Clone ID: MRT4577_130442C.1.pep
GGPQKKNNNPPTPRKKPTFALAPHKNPHRNKNYSGGRKKKSLQKNCPPKKKTPGATIYQLESPTKSIPFIKQWGQELTRGRGANPNLGEGDPKKNFLGLDPRNLFEPALGGHPPHLGAKKHRGAGPGKKRAHLGGLPEPHKTPFPQE

SEQ ID NO: 218034 - protein, 132 aa, Zea mays
  unsure (1)..(132): unsure at all Xaa locations
  Clone ID: MRT4577_130443C.1.pep
MSTHADSGRXSXSSEATRRPAIAEGATKAGGPDPTAVQAKXRTALMNITNVTDPGARDNAVGKGAPPITDAKLNPTTSGAPLKKPFLANAHTIQGXSRAKADAIKPATPVXRHDSXDXQKHNVPVTTTVPCA

SEQ ID NO: 218035 - protein, 65 aa, Zea mays
  unsure (1)..(65): unsure at all Xaa locations
  Clone ID: MRT4577_130444C.1.pep
RGPEFVCXPGTGGAARELGWFPEGWSXGSPTRRXXVXXYGSHGCRWDHVERAGRRDWGANASRVG

SEQ ID NO: 218036 - protein, 70 aa, Zea mays
  unsure (1)..(70): unsure at all Xaa locations
  Clone ID: MRT4577_130445C.1.pep
DVTGVIFVNINGTSITPEVITLKCANSLPCQGVHLVNVDMXYNGYGNKTMDVCMNDIGKSIGLANELACI

SEQ ID NO: 218037 - protein, 169 aa, Zea mays
  unsure (1)..(169): unsure at all Xaa locations
  Clone ID: MRT4577_130446C.1.pep
MSSEASKVAVPESVLRKRKREEQWATEKKEKALVEKKKSIESRKLIFTRAKQYAEEYDAQEKELVQLKREARLKGGFYVSPEAKXNKATINMLRRVEPYVAYGYPNLKSVRELIYKRGYGKLNKQRIPLSNNQVIEEGLGKHNIICIEDLVHEIMTVGPHFQEANNFLW

SEQ ID NO: 218038 - protein, 67 aa, Zea mays
  Clone ID: MRT4577_130447C.1.pep
DPKIIPRWKWKGPKTSIGEPVRKIQLRISGRDAIFLKTRQHRKLFQFLPSWTRTKDTSKRDSGAVTD

SEQ ID NO: 218039 - protein, 244 aa, Zea mays
  Clone ID: MRT4577_130448C.1.pep
MSSEASKVAVPESVLRKRKREEQWATEKKEKALVEKKKSIESRKLIFTRAKQYAEEYDAQEKELVQLKREARLKGGFYVSPEAKLLFVVRIRGINAMHPKTRKILQLLRLRQIFNGVFLKVNKATINMLRRVEPYVAYGYPNLKSVRELIYKRGYGKLNKQRIPLSNNQVIEEGLGKHNIICIEDLVHEIMTVGPHFKGANNFLWPFKLKAPLGGLKKKRNHYVEGGDAGNRENYINELIKRMN

SEQ ID NO: 218040 - protein, 252 aa, Zea mays
  unsure (1)..(252): unsure at all Xaa locations
  Clone ID: MRT4577_130449C.1.pep
MSSEASKVAVPESVLRKRKREEQWATEKKEKALVEKKKSIESRKLIFTRAKQYAEEYDAQEKELVQLKREARLKGGFYVSPEAKLLFVVRIRGINAMHPKTRKILQLLRLRQIFNGVFLKVNKATINMLRRVEPYVAYGYPNLKSVRELIYKRGYGKLNKQRIPLSNNQVIEEGLGKHNIICIEDLVHEIMTVGPHFKEANNFLWXFKLKAPLGGXLKKKRNTMXEGXGDAGNREXYXHELIKGMXLGHDQL

SEQ ID NO: 218041 - protein, 87 aa, Zea mays
  Clone ID: MRT4577_13044C.1.pep
APQTRNEILKTPGGLGLKIPKRSGQPTHKISWGLSPKLKHRTSKIFFGVFFKRDLLTLSIFTPVATVHFHSIKGLNLPVGTSLDLKT

SEQ ID NO: 218042 - protein, 244 aa, Zea mays
  Clone ID: MRT4577_130450C.1.pep
MSSEASKVAVPESVLRKRKREEQWATEKKEKALVEKKKSIESRKLIFTRAKQYAEEYDAQEKELVQLKREARLKGGFYVSPGAKLLFVVRIRGINAMHPKTRKILQLLRLRQIFNGVFLKVNKATINMLRRVEPYVAYGYPNLKSVRELIYKRGYGKLNKQRIPLSNNQVIEEGLGKHNIICIEDLVHEIMTVGPHFKEANNFLWPFKLKAPLGGLKKKRNHYVEGGDAGNRENYINELIKRMN

SEQ ID NO: 218043 - protein, 69 aa, Zea mays
  Clone ID: MRT4577_130451C.1.pep
MADAEPVDQKNYLEERCKPQCVKTLYDYEKCVKRVESDGSGQKHCTGQYFDYWSCVDKCVAPKLFDKLK

SEQ ID NO: 218044 - protein, 106 aa, Zea mays
  unsure (1)..(106): unsure at all Xaa locations
  Clone ID: MRT4577_130452C.1.pep
SKPGSLYNTGPSSXTTSRIASSQIKFFXFFFFLFLXQNXLXLNVXXKCVIRKCPRSCNLFPSXTKATRXLYNTGPSSTTTSPSLNHRINFFFFFFFFLTKPCIECQ

SEQ ID NO: 218045 - protein, 128 aa, Zea mays
  Clone ID: MRT4577_130453C.1.pep
MSEMRSEEIKEAFALFDPQNTGRIEPSAFQNFVNTLGDEELKRSIRIPTHAIDLREFTDLMNRYNNDTNKDPEEPYRRAFASINNDGSGHVSAEELRAAVGKFPWTNTLSEADIDEIIHEGDVSGDGR

SEQ ID NO: 218046 - protein, 95 aa, Zea mays
  unsure (1)..(95): unsure at all Xaa locations
  Clone ID: MRT4577_130454C.1.pep
MTLFEQLLRRPLSPPRLSPRRPPALIXGVSLVGDDERTDMIPLKFLRAHRNKVKEAMAMLRSVVLWRKRFGNHELXDVDIGLPELENVMFLHVVG

SEQ ID NO: 218047 - protein, 244 aa, Zea mays
  Clone ID: MRT4577_130455C.1.pep
MSSEASKVAVPESVLRKRKREEQWATEKKEKALVEKKKSIESRKLIFTRAKQYAEEYDAQEKELVQLKREARLKGGFYVSPEAKLLFVVRIRGINAMHPKTRKILQLLRLRQIFNGVFLKVNKATINMLRRVEPYVAYGYPNLKSVRELIYKRGYGKLNKQRIPLSNNQVIEEGLGKHNIICIEDLVHEIMTVGPHFKEANNFLWPFKLKAPLGGLKKKRNHYVEGGDAGNRENYINELIKRMN

SEQ ID NO: 218048 - protein, 244 aa, Zea mays
  Clone ID: MRT4577_130456C.1.pep
MSSEAVKVAVPESVLRKRKREEQWAAEKKEKSLAERKKSIESRKLIFTRAKQYAEEYDAQEKELVQLKREARLKGGFYVSPEAKLLFVVRIRGINAMHPKTRKILQLLRLRQIFNGVFLKVNKATINMLRRVEPYVAYGYPNLKSVRELIYKRGYGKLNKQRIPLSNNQVIEEGLGKHNIICIEDLVHEIMTVGPHFKEANNFLWPFKLKAPLGGLKKKRNHYVEGGDAGNRENYINELIKRMN

SEQ ID NO: 218049 - protein, 78 aa, Zea mays
  Clone ID: MRT4577_130457C.1.pep
RPPSAPGALAPSFPTSLNRFVLSFKLVAIAGWSSFFPEVSVVGTRCPFHLYFWVDGPCVGSVFLGLFIPRLFPKFCPH

SEQ ID NO: 218050 - protein, 90 aa, Zea mays
  Clone ID: MRT4577_130458C.1.pep
NESAVQKLNLQEGMEGNPMAGKMKYFSRGVAVLTVPFTMNFATAVFCYWTSSNIFTLLYGLVIRRPAVRKWFDLPALENTPSLTAKPVFN

SEQ ID NO: 218051 - protein, 246 aa, Zea mays
  Clone ID: MRT4577_130459C.1.pep
SSRPLKKKKKKKKNTPGVCTAAAGAGYLAGVRSCAAGSQDGGYSGGVSHALRTGLLVAGAALLLIAAAIAFFVARDIRKRRRVAARGHWKMTPFVGDLGFGEESILRGLTEANIVGRGGSGRVYRVTFTNRLNGAAGAVAVKQIRTAGKLDGKLEREFESEAGILGNVRHNNIVRLLCCLSGAEAKLLVYDYMDNGSLDKWLHGDALAAGGHPMATRARSARRTPLDWPTRLKVAVGAAQGLCYMH

SEQ ID NO: 218052 - protein, 298 aa, Zea mays
  Clone ID: MRT4577_13045C.1.pep
MARAAAPPLHRLPGLALLCLAVAVCFSGGENAAAAAWTRKIVGVHELRVGDFSVKVTNWGATLMSVILPDSKGNLGDVVLGYDTVAEYVNGTAYFGGLIGRVANRVAGARFTLDGKAYRLYRNDGNNSLHGGHRGFSKVVWTVKEHVGGGDSPYITLYYHSFDGEQGFPGDLDVYVTYRLSRPYVLSVRMNATARSRATPVNLAHHAYWNLGGHGSGPVLGETVQLFASRYTPVDAALVPTGALAPVAGTPYDFRAPAPVGARLADLGPETEPVGPIGQPGGHRLSILERKIKGNKWC

SEQ ID NO: 218053 - protein, 423 aa, Zea mays
  Clone ID: MRT4577_130460C.1.pep
MAFAARRSIATRLSHHLTRRLHPCVPHARTSDSLDEQASRPSPPLPLPLPPLHVQLKQRSREVQILGFLPFSLRLAGPTRRTFSSSAPAPNLEAAPAAEVDAAGVLADAAEAAASVPAPFPGEVAAAAADSFPPVAALQHIIDAIHTFTGLNWWVCIALTTFIIRSATVPLLVNQLKATTKLRAINPEMEVIKDQMNSMDPKSVQEGQAKMKALFKKHGVSPLTPMKGLLIQGPIFMSFFFAISNMVEKVPSFKGGGTLWFTDLTTPDSLYILPMLTGLTFLATVELNLQEGMEGNPMAGKMKYFSRGVAVLTVPFTMNFATAVFCYWTSSNIFTLLYGLVIRRPAVRKWFDLPALENTPSLTAKPVFNMFGGSKAIPAAQSPVAIAGAQQSGLGQPDASALGYKVKNLEKKVKSRGKSRKHR

SEQ ID NO: 218054 - protein, 885 aa, Zea mays
  Clone ID: MRT4577_130461C.1.pep
MPDSSTVVFLFIVGPRCRARGPWAASFAIPLHRSVFREVGFGLGPERRARRVGAWKRVFSCFSGGWFSSLFRPPEVDEEWPLLSRSSASRRMDPKNRNANWDRWGPKDAPQGSQSWGKNRSLSWRLKPGTGKPENKDDIQTSSSGDGGQSGIASKLYGVRSIAKKLTTQRGAFSPNKTSHSSQAKPKSKLHSVWIVAENVPEELQSYQAICELGSTIGVVEEVDILSLDSKDIVRFKVHVKSVAMIPPIIEVGVKPFMYDIYFKIDNITDEGWNDDSINLGKRALVDRQGFGDPSLEKSVKKAQSGGEKTVMDDKGKTPLEDPLVHGNEAGFQTEQSEGLKAGKNSEGDKGYLDNLGNEEDDYNEKKGKMSISATHSEDTGKEARVKKGGSMEGELAEGIRRSSRLESNDEMKIADKATARAMAKDTFINKGVELESSVNEAVENLDLIKSLELSMKNLVVQSVKCNFDPNKAVIHDSDMDNSVHNEGGDNALTDLENVMVLRKGRKICHRKKSMRKKKDNKSPKHRNIPIKRREVKKSIDIWKEKIKHLKKMLKGWNINVEDAERIEKLELEWNLKKKIWKKGAKKANYRSLLTAPFNINEVKKVVFEIKHNSVPGPDGFPAEFFQKIWELIHMDIWNFFKDFYEGNLDIERLNYGMVTLLPKVDNAVVMKNFRPICLLNVCYKIITKILNNRLASCIIKKKGFGSTWCDWVMRTMQGGKVAIKTNDMLGPYFTSHKGGGLGVLNLEFMNDSLLTKWLWNIENSNGLWQKIIANDRIVWGLGKKGFSVNSLYKKKVMDQVSVPYKFLWKSKLPQKIKIFIWLVVRNKILTKDNLKKRNWNDSQECCFCGGDESIDHLFFSLSHCEIHVESYPSGFELGGDSKTY

SEQ ID NO: 218055 - protein, 69 aa, Zea mays
  unsure (1)..(69): unsure at all Xaa locations
  Clone ID: MRT4577_130462C.1.pep
PRAPEVCSHEGCASSCCSCRQSHGLARTRSRFQTLVRSXIELRLPCRLLAVQLKRLFNGVTTARRAAAE

SEQ ID NO: 218056 - protein, 84 aa, Zea mays
  Clone ID: MRT4577_130463C.1.pep
TPTTPGRLRSTPMTSASPSRPRSISPSPSRRRVRYQSYPILSLGKSVGLCLFSSIPAKATFSLRWFYTAESMKPSYFAARIVET

SEQ ID NO: 218057 - protein, 298 aa, Zea mays
  unsure (1)..(298): unsure at all Xaa locations
  Clone ID: MRT4577_130464C.1.pep
MLMKSSGCKEKTVNSGFPNLSLKACHRRDSLSLYARWIAADPWASARAWTSPGRGSGDATRCAAAGRVAGSSSAGAGRSAGMEVAIAAAAVVAMGTGNRVLYKLALVPLREYPFFLAQFATFGYVVVYFSILYLRYQAGIVTDEMLSLPQKPFLAVGLLEAFAAAAGMAAGAVLSGASIPILSQTYLVWQLLLSAIFLKRRYRINEIAGCFLVTIGVIITVXGIFWPLLMIISFFFLIAVTILKIILSIDAXKKLKCGYVDRFVVNSYGSAYQALFMCILLPFLSKLWGVPFHVLPTY

SEQ ID NO: 218058 - protein, 93 aa, Zea mays
  Clone ID: MRT4577_130465C.1.pep
RHVLGEPVHRQHLLGPPSHVLLYKQHEGSEQYIIPHIIRIISFLNSFDQLSVHRLLVVLLELWQVLGCLLCIKSSPSVFVAFFSLTKYLSSNS

SEQ ID NO: 218059 - protein, 225 aa, Zea mays
  unsure (1)..(225): unsure at all Xaa locations
  Clone ID: MRT4577_130466C.1.pep
MEVAIAAAAVGAMGTGNRVLYKLALVPLREYPFFLAQFATFGYVVVYFSILYLRYQAGIVTDEMLSLPQKPFLVVGLLEAFAAAAGMAAXETYLVWQLLLSAIFLKRRYRINEIAGCFLVAIGVIITVASGSGTSASFKSTGILWPLLMIISVFFQAADTILKEIIFIDASKKLKCGSVDLFVVNSYGSAYQALFMCILLPFLSKXWGSPFHVLPTYIKDGAACF

SEQ ID NO: 218060 - protein, 97 aa, Zea mays
  unsure (1)..(97): unsure at all Xaa locations
  Clone ID: MRT4577_130467C.1.pep
AGTAQKRGPXRWCLRASSDEEDAGEPVAPLCPPCPIGPQTRSPPPTAERPAPRPTPTLTPPPPAASQSVIPITTSDDSPPTSSLHPPHAADLPAPPA

SEQ ID NO: 218061 - protein, 102 aa, Zea mays
  Clone ID: MRT4577_130468C.1.pep
RSQSSCDEEDLLASHEFDCPVLHLPKGKEAPSSESTSEAFKMKNLWGGLVKAKLLKQWNILKGPSTRHMDPAERRTHGRVVKMVEKELGLLDDKEEEPEAEH

SEQ ID NO: 218062 - protein, 57 aa, Zea mays
  Clone ID: MRT4577_130469C.1.pep
SGNIESTIVFSTFSAKKNRLHMLLGLYASAASATICRQCSQATIASIAYSFLLPTCA

SEQ ID NO: 218063 - protein, 67 aa, Zea mays
  Clone ID: MRT4577_13046C.1.pep
SRVPFSSPYCTVLSFVSHCPCSSSPPFCMHDGLIMASVFFWVDAPPLLFEAAPVPLVFPLASNKNLI

SEQ ID NO: 218064 - protein, 71 aa, Zea mays
  Clone ID: MRT4577_130470C.1.pep
YIFTIVSWYLGKEGKFHVRQRRSAPDQMLCHTLSITLAGLYGSTHSGAISHSLFPRLMPRVGSCASPSIRA

SEQ ID NO: 218065 - protein, 92 aa, Zea mays
  Clone ID: MRT4577_130471C.1.pep
MDSSDEYKTVIDNNTKITMAEPESPTPSRSRPRTRSESTNTRESSSNSPKPQRRRRVSRSKSRSASKSRSRSRSRQSRKRPRSRSTFCSRRS

SEQ ID NO: 218066 - protein, 51 aa, Zea mays
  Clone ID: MRT4577_130472C.1.pep
IRLENGNQSYIRPNSLGSNRSRMSENTRLINEDRPRNLLQPHRTRLERHAS

SEQ ID NO: 218067 - protein, 192 aa, Zea mays
  unsure (1)..(192): unsure at all Xaa locations
  Clone ID: MRT4577_130473C.1.pep
MLAEVVRPSNDKILXSXAHICSLNLSYLTPLAMRXDMYIEIPTAIYRHEXAASNADVNWGVCLYFIKMQCLHRLLYYLITTNLFTYIKNRFEEENYRISHKSYLWEDTIYLKDLMNHTXLELNLTTTCYIDIFIXSTYCFQRHLTTSPFEEVLGAVLXCHDNMXASTTDFHDMASDGLDAHHHFGIEIDIRE

SEQ ID NO: 218068 - protein, 50 aa, Zea mays
  Clone ID: MRT4577_130474C.1.pep
ENIDIFDWSIPEDLMAKFSEIKQVRLLRAEFAVHPQGGYNTLEDFWDGEI

SEQ ID NO: 218069 - protein, 68 aa, Zea mays
  Clone ID: MRT4577_130475C.1.pep
LCARRPFLFRLVRVRSGSVVHNRATGTIGLIFKLGLLRIDTVAPVGHDYDSCQYTNSSWSASSMIGPD

SEQ ID NO: 218070 - protein, 234 aa, Zea mays
  Clone ID: MRT4577_130476C.1.pep
MEASGSRVRRGSPVPKRRRGVGVATGFGSTAQSLNDDILRNRIIETAHLMRDMYYKRNPPARGSSSNISVKSYFEMLAMDEHASAFSRGPAEAFQWIGHPMRATLCRMKSGLILTGVGDKILRLWSAESCKFMNEYNVPNSKTLVDFDFDENKIVGLTSSQICIWRRSEPRSIFQSGGASFNHGLCMSFADPEVVIGCEDGRAFVYDMYSRSCSRIYRLHSSPVTCLMITDDQL

SEQ ID NO: 218071 - protein, 84 aa, Zea mays
  Clone ID: MRT4577_130477C.1.pep
QKKKGWPRVGILSPKGAPGPPLSRGGRFSLPRIIICPPRPKNKKMVGVWPTGGLGPLFPVFWGLPQRGKIPPIFKKKGFWGGFF

SEQ ID NO: 218072 - protein, 439 aa, Zea mays
  Clone ID: MRT4577_130478C.1.pep
MEASGSRVRRGSPVPKRRRGVGVATGFGSTAQSLNDDILRSVFSRLDDHFDLARCSAVCGSWNRIIETAHLMRDMYYKRNPPARGSSSNISVKSYFEMLAMDEHASAFSRGPAEAFQWIGHPMRATLCRMKSGLILTGVGDKILRLWSAESCKFMNEYNVPNSKTLVDFDFDENKIVGLTSSQICIWRRSEPRSIFQSGGASFNHGLCMSFADPEVVIGCEDGRAFVYDMYSRSCSRIYRLHSSPVTCLMITDDQLIVGGSTFGNVAIADQTSGQKLGVLKSDHGPLAIRSLSSCTNSHMIFAGSSAGYAHCWDLRTLRPLWEKRVSPNVIYSTRHLPGDTATLAVGGIDGVLRVICQRTGDIIRSLVVDADLPAEATSRSRQQIEKKRVRRIDPDAQLDGIPRRLRPQITSLSVGMKKIVTTHGENYIRVWKFRMKSS

SEQ ID NO: 218073 - protein, 33 aa, Zea mays
  Clone ID: MRT4577_130479C.1.pep
IAKPYSFSIMPQVQYMVQNKGAVWTLDPLANSN

SEQ ID NO: 218074 - protein, 229 aa, Zea mays
  Clone ID: MRT4577_13047C.1.pep
FLFPIESHASTLPGSLAAAGPSLSTSPFFACGSFNGLHRRATRVGPSLARSDAGGSQGERHGCPSDVAWRGSQATRRGRVSDMCCTTNPRCVQADPRRARRARILACGSTGLPWCTRRAGPRRARRRRISSSVACLFSGVAHSLALFSGGGLLHHPCSSVSLLLLPVSGVHRLQRLACAGGSSSCSSLTLALALLDYDELSCQRQGLRRAPSTALNMEDKEQETFDVCI

SEQ ID NO: 218075 - protein, 73 aa, Zea mays
  Clone ID: MRT4577_130480C.1.pep
TNGGFLGTPNLPMGYKQNPWGTLGPIKHLFRFYGGGIRTRGIHFSTPWPISSLRKGNMPSFFPHKAKLFFLHR

SEQ ID NO: 218076 - protein, 68 aa, Zea mays
  Clone ID: MRT4577_130481C.1.pep
KWYIYSSSVTYTTHRHTIKSNQPSCLYTAGSSSDRMTAPDDMCMHSCISTYSTYTTVYYIRTVYSSLV

SEQ ID NO: 218077 - protein, 104 aa, Zea mays
  Clone ID: MRT4577_130482C.1.pep
AYLHKLCELCSCPKGLAKRTGTTSWYCHSVKIWSLHKSVPSAHIIFNCDHGTKRKCSSLCTFIHVGSVMISSFVTNKMKFTHLVLQFIAFVVARIVDLSLNQDC

SEQ ID NO: 218078 - protein, 160 aa, Zea mays
  Clone ID: MRT4577_130483C.1.pep
MSEDPVATAPSSSFEPSTDVESKCQDAHEHGYLTFNPLFSQTASLPNIQEESSSSGQKHGFSCETIERKVLAPRRVASNDNDQSNIAGSRIVLPIVSLQSEYLKADPEKSEASKNVPIINRSKKVSKDLATSVISIPRVDLRRNSENGPSRDLEDPFHKS

SEQ ID NO: 218079 - protein, 48 aa, Zea mays
  Clone ID: MRT4577_130484C.1.pep
GLRVVQVTESLNQRPQEGATPVQKGPVGDGAHGGDASDRVVVHEPFSE

SEQ ID NO: 218080 - protein, 79 aa, Zea mays
  Clone ID: MRT4577_130485C.1.pep
NPFLFTQAITHMFKKRCPVQYIKLWTTYITSMLELPGYSYTHAIFNIFIIYVYDTHGLSSTTYLMKAIFKAMGVRTDFL

SEQ ID NO: 218081 - protein, 200 aa, Zea mays
  unsure (1)..(200): unsure at all Xaa locations
  Clone ID: MRT4577_130486C.1.pep
QLQRCLCSQYAGERQPPPPPPPPQPEPDSPQQLERLFSNLNQTTMKHEXERHQRRLPCGWHNGWSXGILAIPAVTQEAGFLASAVICILCWSYMVIXNVTDWVNYQTRRVXVVTGLLVAEVNVNTMCELGSGGVSLVSMAMRTLGTFGVRTACLSYLFIHYALLVAYVARSSDIITNSLGIPIWESATLFSLAFGGVCYF

SEQ ID NO: 218082 - protein, 84 aa, Zea mays
  Clone ID: MRT4577_130487C.1.pep
QPYMGCIGNRAWLKREPRGATVCGMKGARLLAGVPFNRRWVWSVAEEAYVKENAAGEAVRFSRWAAPGSLAVTRGSLVSFGSCA

SEQ ID NO: 218083 - protein, 104 aa, Zea mays
  Clone ID: MRT4577_130488C.1.pep
AATSWNRLEPARATQKGNRREEERGSSPGGGGEAACAEDTLLAHTVRTRPGNVHGLEVQDHPLHPKTSRTKDPGTSICQGGARGCGLWIAMTVICDGPHMRGPA

SEQ ID NO: 218084 - protein, 64 aa, Zea mays
  Clone ID: MRT4577_130489C.1.pep
RSYTGQMHPFYFGTQIYYLYFGEEHPLDQGGKQHGHSFIQPAAGAGAFRPFRRRFWGPPSSARA

SEQ ID NO: 218085 - protein, 153 aa, Zea mays
  Clone ID: MRT4577_13048C.1.pep
LSSARTRDRDEQEEDPPVPASRWSLCTPETGRRRRDTLKQGWWSRPPPEKRARECAAPENNQATLLEIRLHCARLGPTRRVHRGRPVLPHAEIYARRARRGSACTHLGFAVQHTSETRPRRAAWHTRAVPLGTRPHRCVPEKGPPSLHAGEGC

SEQ ID NO: 218086 - protein, 467 aa, Zea mays
  unsure (1)..(467): unsure at all Xaa locations
  Clone ID: MRT4577_130490C.1.pep
MATQLPCFTQLSPPSCSWIKDVGNCKATPDRVARSARALGHCHFRCCAGPRSANSFKKKDSFEKKDSFLELHPEVSLLRGEKSAEVVPMKGSSDGGLLEGLGVPPDRNDYSEAKIKVVGVGGGGSNAVNRMIESSMNGVEFWIVNTDVQAIRMSPVLPHNRLQIGQELTRGLGAGGNPDIGMNAAKESSESIQEALFGADMVFVTAGMGGGTGTGGAPVIAGIAKSMGILTVGIVTTPFSFEGRRRAVQAQEGIAALRNSVDTLIVIPNDKLLSAVSPNTPVTEAFNLADDILRQGIRGISDIITVPGLVNVDFADVRAIMQNAGSSLMGIGTATGKSRARDAALNAIQSPLLDIGIERATGXVWNITGGTDLTLFEVNAAAEIIYDLVDPNANLIFGAVIDPSLSGQVSITLIATGFKRQDEPEGRVSKGGQQGENGRRPSPAEGSSTVEIPEFLRRRGPSRFPRV

SEQ ID NO: 218087 - protein, 86 aa, Zea mays
  unsure (1)..(86): unsure at all Xaa locations
  Clone ID: MRT4577_130491C.1.pep
SRPQPAALFFFFFXXXXXXGGGVFLIFFXXXXPPPEIMVLLQPKAFILWQTKYTSHHFPNWLKLNPQPQSSNGAFEAAITKNCSHP

SEQ ID NO: 218088 - protein, 122 aa, Zea mays
  Clone ID: MRT4577_130492C.1.pep
TKTLNNFSFPAENIRLKTGSWWLLKHTTQRDPGHKPVVEANGFKQDDTGGSFRAKLKRREQPKHGNSKSFHEGPGDERQHHREGLPGQRQLGVHPAKVDVPFKQDGHPRGPPRGKKRQNCRD

SEQ ID NO: 218089 - protein, 60 aa, Zea mays
  Clone ID: MRT4577_130493C.1.pep
YKTCMLNEDHLLRPVISSTLYIDLIDRNAYHLTLANPTRYSQAQLQVPVDVIQQPTLDQH

SEQ ID NO: 218090 - protein, 87 aa, Zea mays
  Clone ID: MRT4577_130494C.1.pep
ISVHHTSRLRSGQQNFQVKISGNNCVPFWLLYSHTYYAPHKARGFPGGYPDGLPDYLRRLTGLCIHLRIKDPFIIALYHAQYHVQDC

SEQ ID NO: 218091 - protein, 70 aa, Zea mays
  unsure (1)..(70): unsure at all Xaa locations
  Clone ID: MRT4577_130495C.1.pep
RSISCIFFWGPRASVDLVFFPVRFFFPRGLEFLQLGGFRHFFCKRGRPPFLKGPPPSEGRGNPLTLLXXX

SEQ ID NO: 218092 - protein, 93 aa, Zea mays
  Clone ID: MRT4577_130496C.1.pep
PGSPKPSRSKAGLKLPWPCPNMPVPKTGVPPGCLLVCPRQVSPSIPICGLFRAGAPCCPVLFTQTKTLGIPVPTWACFFLSLVENLSFYPFAA

SEQ ID NO: 218093 - protein, 56 aa, Zea mays
  Clone ID: MRT4577_130497C.1.pep
GSIRLMWKYCGYLRPWWWKNTSLKCRKAFINCYKNSCDTGIHSSIVMTVCKCPATL

SEQ ID NO: 218094 - protein, 118 aa, Zea mays
  unsure (1)..(118): unsure at all Xaa locations
  Clone ID: MRT4577_130498C.1.pep
MXXGDRTPGRGSCCTKKHASLXQXPRRXXXKKGGNADGDTXDEXXGKXXEXRHKEPXXEERQXSANXDRXPGQEXXPXESPKARXTGSGXRXDTPTEKGEKNKPXRPPKPTXPEPEKQ

SEQ ID NO: 218095 - protein, 35 aa, Zea mays
  unsure (1)..(35): unsure at all Xaa locations
  Clone ID: MRT4577_130499C.1.pep
AHQPYRLXLAFAASNXPLSTKYPQSTAHIFGAVMG

SEQ ID NO: 218096 - protein, 49 aa, Zea mays
  Clone ID: MRT4577_13049C.1.pep
ELSNVHCRCKLYNFRWIQINSHIHRFLDPRTLHCNRSFNSRKMWMDAWA

SEQ ID NO: 218097 - protein, 39 aa, Zea mays
  unsure (1)..(39): unsure at all Xaa locations
  Clone ID: MRT4577_1304C.1.pep
RXLYVCPXVCXASWLLLCXQIPXXQERSQFRSXWNEQNA

SEQ ID NO: 218098 - protein, 91 aa, Zea mays
  unsure (1)..(91): unsure at all Xaa locations
  Clone ID: MRT4577_130500C.1.pep
SCFLFFFFIPLCLSYLSINFLLPLINQKALENLSPYPQQQQFLPLNQLVTLNLGAXFAQPTITILSRFATDYSEKXQHLPFYQLAGGPRFV

SEQ ID NO: 218099 - protein, 104 aa, Zea mays
  unsure (1)..(104): unsure at all Xaa locations
  Clone ID: MRT4577_130501C.1.pep
SNXPQXQHPKXXCTKXIXPXXCLXXCYXFEXFTQXFRXIXXDMGYLGQXXMXXNMGVPXXPATTSTFFXXAXXTNPVYXGLTXHGGPRXRVASXPGXFRXRXPA

SEQ ID NO: 218100 - protein, 166 aa, Zea mays
  unsure (1)..(166): unsure at all Xaa locations
  Clone ID: MRT4577_130502C.1.pep
IQSSTCGDAPLRTGRGIISQFLPSVSAMGMHFYIVRAYSLPLAQLLRVLQLSFAQFHRHSLAHRSWQTFAPYLDXQFVSPLTHXCAVTLVSFFAHXQCLHPWPHALAKSVAFQRXVQLQQFPSAISQLAMVVIITFLQQHQLLSCSPTLMWSMRSAYKQQQMIQQI

SEQ ID NO: 218101 - protein, 50 aa, Zea mays
  Clone ID: MRT4577_130503C.1.pep
SPNIAIGPDTLPSNNSILSPSNSLALRHWHNHYSVHRRLFIIYLQTRMLL

SEQ ID NO: 218102 - protein, 96 aa, Zea mays
  unsure (1)..(96): unsure at all Xaa locations
  Clone ID: MRT4577_130504C.1.pep
FRSQYFXEYTSVAGFGPVHTRARWFNDMVNVLFSSKAFVGGIVAYVLDNTLHRHDGAVRKDRGYHWWDKFRSYRTDTRSEEFYSLPFNLNKFFPSV

SEQ ID NO: 218103 - protein, 216 aa, Zea mays
  unsure (1)..(216): unsure at all Xaa locations
  Clone ID: MRT4577_130505C.1.pep
YLPRTPSASPLYFPALELVDVYNNNLSGXLPPLSAPHARSLRYLHLGGNYFNGSIPDSFEYLGLNGNALSGRVPPSXLSRLSRLREMYIGYYNQYSGGVPLPREFGALQSLVRLDMSSCALTGPIPPELARLSRLDTLFLAMNQLTGDIPPELGALTSLQSLDISINDLAGEIPATFAGLTNLTLLNLFRDHLRGEIPDFIGDFPFLEVLQVWDNN

SEQ ID NO: 218104 - protein, 187 aa, Zea mays
  Clone ID: MRT4577_130506C.1.pep
PPALASMPALRHLNLSNNNLSGPFPPPPPAAYFPALEIVDVYNNNLSGPLPPLGAPHARSLRYLHLGGNYFNGSIPDTFGDLAALEYLGLNGNALSGRVPPSLSRLSRLREMYVGYYNQYSGGVPREFGALQSLVRLDMSSCTLTGPIPPELARLSRLDTLFLALNQLTGEIPPELGALTSLRSLDL

SEQ ID NO: 218105 - protein, 98 aa, Zea mays
  Clone ID: MRT4577_130507C.1.pep
WSASNSRQKSKPNPPSLNTDIQEPHMVRARRRGPAVVNVLIGVLRLSDLPPPLIRLAHPGSPHIGRRTSLYSMNSAIYLSSNLPNGAKISHPSHNQDA

SEQ ID NO: 218106 - protein, 59 aa, Zea mays
  Clone ID: MRT4577_130508C.1.pep
WLTMPCLSNTNNIGVPRQCVKRCVTGSCMIYCGVAAPADHLVPAGSCSCLRRFYKTFYT

SEQ ID NO: 218107 - protein, 178 aa, Zea mays
  Clone ID: MRT4577_130509C.1.pep
MAWSAAAAVSRFAASPAAEIRLPFSAAAAASVSFAGRRRFGPVAASLATSATVQKEAVQTEKAPAALGPYSQAIKANNLVFVSGVLGLNPETGKFVSESVEEQTEQVMKNMGEILKASGASYSSVVKTTIMLADLQDFKNVNEIYAKYFPAPAPARSTYQVAALPLNARIEIECIAAL

SEQ ID NO: 218108 - protein, 61 aa, Zea mays
  Clone ID: MRT4577_13050C.1.pep
DTGVETAPYPRGASERDPSRPYPEPTARCTYCLHCGSIGALLLNDESRDLSLSLSISLSLS

SEQ ID NO: 218109 - protein, 56 aa, Zea mays
  Clone ID: MRT4577_130510C.1.pep
TPFLKGVIARQDRVPTVVVVLSMRLASRLSLLWVRVSPFATKCDGPVLEVCGLHCE

SEQ ID NO: 218110 - protein, 92 aa, Zea mays
  Clone ID: MRT4577_130511C.1.pep
KNLAHHKATKNFFIRTKKYPTREKKKITRENTKKPPQSGHLGPPRNSRPVPASGPNFPKRRKNKTWGNQGKKRSPGKKWKPPQTHKKNQPET

SEQ ID NO: 218111 - protein, 110 aa, Zea mays
  Clone ID: MRT4577_130512C.1.pep
PRIISSHGPVRQAWTKEPARQPQPPPVQHLSASQWATVARPGAGRTPKAPARVCSARPTPPASIVRSPGGAMLMRGERRKRSPPAHEYPPPYERSGGLEKQREGRAQARK

SEQ ID NO: 218112 - protein, 42 aa, Zea mays
  Clone ID: MRT4577_130513C.1.pep
TRPQSIAIQCLEALQFLHGLGLIHCVLKPRNILGKELQLQVK

SEQ ID NO: 218113 - protein, 69 aa, Zea mays
  Clone ID: MRT4577_130514C.1.pep
ILKKKKKKKKKKKKKKKKKKKKKKKKKKKKNKKYEKKKKKSIELCPGGGGPMEKEKKIKISLALAPGGL

SEQ ID NO: 218114 - protein, 79 aa, Zea mays
  Clone ID: MRT4577_130515C.1.pep
HVDRIRIKYFLNPKRIQHVICEGADLFDMLPEEYTFQEIIAKLGPIPRTFSAVHLPAYLLEQNDRYRYLLPGNCIRESG

SEQ ID NO: 218115 - protein, 60 aa, Zea mays
  Clone ID: MRT4577_130516C.1.pep
HFTFKRMLTYCKNNPSEKKQALHTKGLITLEPIYPLTGAMVTFNTPEISRKGRSCPQCLI

SEQ ID NO: 218116 - protein, 50 aa, Zea mays
  Clone ID: MRT4577_130517C.1.pep
SLYQTTTYCGKGPLNITGKLIFPKIPLFLLAIRFYFSPLLTAFPRFCPSL

SEQ ID NO: 218117 - protein, 111 aa, Zea mays
  Clone ID: MRT4577_130518C.1.pep
HLFLVGPLFGPPGFSLFCFRLVFCVEFFPFNFFPLDPSFPFFPPVFNCPPFRNSWCPPGSRSVFPGLTPAPFWVSRGFLFPFPLFPVFFLLPFPPFQGPRSPGLWAWFSPS

SEQ ID NO: 218118 - protein, 113 aa, Zea mays
  Clone ID: MRT4577_130519C.1.pep
HAQNNWNKVQPKRFSTVPGWNQPRRLSSRSIGGLIGTYWGLGGPLCWACSGSPAAAHCRTCPGGAYLCPGCDTGHARAVHERVWVCEVCECAPAAVTCRADAAALCAACDADI

SEQ ID NO: 218119 - protein, 80 aa, Zea mays
  Clone ID: MRT4577_13051C.1.pep
GPICRFFGNCSPPLKKTPLRLVQILKKSFPNNHPPICLQSVQFSLQKGGRFFFLPQSVFFFSLQKNRSPYPAFLGPKVPF

SEQ ID NO: 218120 - protein, 149 aa, Zea mays
  Clone ID: MRT4577_130520C.1.pep
MIRAVVSAAIAAAAFAGFANAAGAKCTKDSHCPKETPCCSLYGDCGVGAFCLGGCDPLMSNTFDSCVPGPVCKPGTYSLDSLNDVQRIENYLGDASKINWQSQGDPTPYTDPATGSKATLLTMAQGSSGTLLASTHYVWYGKICSKVSS

SEQ ID NO: 218121 - protein, 213 aa, Zea mays
  Clone ID: MRT4577_130521C.1.pep
RLQVSVRNSRVDPRVRLIGDSGVGKSNLLSRFTRNEFNLESKSTIGVEFATRSIQVDGKTIKAQIWDTAGQERYRAITSAYYRGAVGALLVYDIAKHLTYENVERWLKELRDHADSNIVIMLVGNKSDLRHLRAVPTDEARAFAEKNNLSFIETSALDSTNVEEAFKNILTEIYRIVSQKQIADRAAHDESPGNNVVDISVPPTTDGQRPNKL

SEQ ID NO: 218122 - protein, 76 aa, Zea mays
  Clone ID: MRT4577_130522C.1.pep
SGSMGPATHRNNNTGRGDGPRTTSGSGATATATPTAAPHEAENQEVITQSAQLADAFSASEALQQQAQADASRQAA

SEQ ID NO: 218123 - protein, 58 aa, Zea mays
  unsure (1)..(58): unsure at all Xaa locations
  Clone ID: MRT4577_130523C.1.pep
MVSLMEMVLVVIIAPVVSRXGGATRLREHLGGLRGNVATCINVPLNVKAIMTDEVFKE

SEQ ID NO: 218124 - protein, 331 aa, Zea mays
  Clone ID: MRT4577_130524C.1.pep
GFSDSRELGDGGFGTVYKGKLQDGRVVAVKRLYKNNYKRVEQFKNEVDILSRLLHQNLVILYGCTSRSSRDLMLVYEFIPNGTVADHLHGSRASERDLTWPLRVNIAIETAEALAYLHAVEIIHRDVKTNNILLDNSFHVKVADFGLSRLCPPEVTHVSTVPQGTPGYVDPVYHQCYKLTEKSDVYSFGVVLVELISSKPAVDMSRTHSDINLANMALNRIQNHEVDQLVDPELGYEADDGTKKSIDLVMELAFQCLQLERDSRPSMKEVVVALNCIKNGDSPENKMNRSSSSPKEDAHLLTNSIQYSPDSVIHRFHSQSTTHSAASNASG

SEQ ID NO: 218125 - protein, 62 aa, Zea mays
  Clone ID: MRT4577_130525C.1.pep
DPTVATTRVTEATSSPPADNTSSPFVAARRQQGIIMPPTRGVKKMAACSTRRTRRRRRRAYV

SEQ ID NO: 218126 - protein, 230 aa, Zea mays
  unsure (1)..(230): unsure at all Xaa locations
  Clone ID: MRT4577_130526C.1.pep
MSPPEMIASQPRRVRPLAAVSLVLFLLLLYSRSGCGPPRAARLLGSGLHPVHRRFLSDADPGGPTSSAANPSGAATLNGEQAEDPAAACADIARHEGFGTQCEFLRAHPQCSSSGLVDYLGFFYCRCERFRLLGYAVLGVCLAALFYMLGNTAADYFCCSLEKMSALLRLPPTVAGVTLLPFGNGAPDVFASIAAFMGSGAGDVGLNSVLGGAXFVPWWWGVGEFSLCVA

SEQ ID NO: 218127 - protein, 61 aa, Zea mays
  Clone ID: MRT4577_130527C.1.pep
MATSQRTKAAKARWGSAALMQATAAMAMRRSRTCAAAAAAGGRGSGSMSARWWCLLQSRVC

SEQ ID NO: 218128 - protein, 448 aa, Zea mays
  unsure (1)..(448): unsure at all Xaa locations
  Clone ID: MRT4577_130528C.1.pep
GRKPPEIXRTLVERAFAVTKEWQERFGINMDNLSSEDKEVEMAEADGSENSGATEKKEGKEDEEQEEVEEEDDEEEEEEDPEEEEEEEEEDDPEEVEEPEAPGKEGNEVKGEGAEGKVSEEGEGAGGKVSEEGEGAEGRVSEEGQGAEGKVSQEGQGAEKIGHEDEKKGAAVGTMKVKTGEEGNKGASEQSEAQIFVQMVAAFGLKDKFDEEFLRRLFVANGRKRELARIACVLGFEESLGDIVEELIKSGNAIEAIYVAHEADLLGKFPPVPLFKSYLQNSTDKAQAVLKSGRHSSSALEEANSLEGNAYRSVIRCVESCQLQSVFPLEVLRKKLGKLEKEKSDRKKAAGPSRFPNKRSRGAAGPYPFPAAKAARGSSFGPRFQNPVSRSLNYAPHAGYINPAAASPFSVPGSVSGRRGGVPYGGPGATYGGSPSFATGGGQQPFRR

SEQ ID NO: 218129 - protein, 144 aa, Zea mays
  Clone ID: MRT4577_130529C.1.pep
RGGGLGARRSLTMGGCTQHRDHRDSAHGFGLWTDMTEPLVWLAPAGPGAHKGEATTTAPCAANLHASILRAGAGAVLRTARTRWWGWRRAWATQHDGSTEASARPGLLLGAHGPGARRGGQPTPGVPGRTRLWSLAQHRPVTCM

SEQ ID NO: 218130 - protein, 63 aa, Zea mays
  Clone ID: MRT4577_13052C.1.pep
GLSLVILFGCPARVLLLVFRLASLVDGFWGAFPLPRLGVGVRVGGSRFGVLRFVGLWFEPVNF

SEQ ID NO: 218131 - protein, 132 aa, Zea mays
  unsure (1)..(132): unsure at all Xaa locations
  Clone ID: MRT4577_130530C.1.pep
RANFKGGVIRXGSKSPRKVGSIGTGTTPGGGYKGKKKPGGMGGPNPKFRKLKIVKIPTNPRGLIIKGAVPRKPGNPPRKTPPKMVGKKTPKKKTFFFSGGENLRVCVCSPAPNGRESFANFQFLKTRTFGLV

SEQ ID NO: 218132 - protein, 126 aa, Zea mays
  Clone ID: MRT4577_130531C.1.pep
SGITTQPDRYWIVVTSGGLNQQRTGIVDAVVAARILNATLVVPKLDQTSFWKDSSNFSEIFDMDWFISFLAKDVRIIKEPTEKGGKAMKPYKMRVPRKCTPRCYLNRVLPALLKKHVIRMTKYDYR

SEQ ID NO: 218133 - protein, 97 aa, Zea mays
  Clone ID: MRT4577_130532C.1.pep
VGFGSAFGVSQEKGGAAAGTKRIHHIQRLWAAKVSCEAEERGQSRSLDASLTVIRERAQLMAEVLRALGGVIAFTSLFGVPLGHNSCFLQGPAFGPA

SEQ ID NO: 218134 - protein, 39 aa, Zea mays
  Clone ID: MRT4577_130533C.1.pep
STQQKFMYRRIGSYSTKGNLIRSIIQLRMLCRRYKEAHQ

SEQ ID NO: 218135 - protein, 68 aa, Zea mays
  Clone ID: MRT4577_130534C.1.pep
HKNTLFLNRGTSSIENPATQPLKYPSQSPNTTKFSNPNLSKFKFKIIYPPQTVLLPISLRPTFYDLPT

SEQ ID NO: 218136 - protein, 104 aa, Zea mays
  unsure (1)..(104): unsure at all Xaa locations
  Clone ID: MRT4577_130535C.1.pep
MXXQLSAXVXRXHXLRGYAAXRXAVAALTXVRXXRKRXXXQXIRCXYLXSATNLIMPTTTTLMLLXXRHGLAPTANRKATAGLQLEARDSGLQTGGPGXFTLAH

SEQ ID NO: 218137 - protein, 99 aa, Zea mays
  unsure (1)..(99): unsure at all Xaa locations
  Clone ID: MRT4577_130536C.1.pep
PSDARASLRFPPLSSSSGPAAKGRQDVHREEVRSRRRRALSPPSSRPRLPFLTTPSPSPATIFPQLPXKILTSAHILHLHCLIYGWEASDNPIHSAVLS

SEQ ID NO: 218138 - protein, 52 aa, Zea mays
  Clone ID: MRT4577_130537C.1.pep
KFRYFTPIQLDKHESKGLGHRCNGTQNTFTLFKLLAPQPFIIGALTNRTDYK

SEQ ID NO: 218139 - protein, 187 aa, Zea mays
  Clone ID: MRT4577_130538C.1.pep
RPAPWCRSFFLPLRSPAFGSARLCPSSDLPPQPRPFFPGLPWPPPPCRRCPRFVGAQACILCTGYSRPKFTPALGPRRGYVALHSVHGARPPAREASLVAASSSFSIVAPAEVPPCVRKLCCERRSVPTKPRRCSISSNPLLGPFFRGAQLGQMRPRFGSLSLLRSPVGRLAIVNESRDHGSLLLNR

SEQ ID NO: 218140 - protein, 83 aa, Zea mays
  Clone ID: MRT4577_130539C.1.pep
ILLFTETPPHRGSILLSREALTGLSRATFAASGQKASIHYCKFSIPNSVMLTESSYEGLLNHRAPMLILVLLQWQYHRALKFT

SEQ ID NO: 218141 - protein, 165 aa, Zea mays
  unsure (1)..(165): unsure at all Xaa locations
  Clone ID: MRT4577_13053C.1.pep
NLTPLNKQSKNPGFPGPVAKPKNGRENFGFKTPLMVGLKPLLEVPHGNPGAGGDKASGSPAGGGPTGTXVREAGPMGAPPAEVKELPGGYAFLVDIPGLGPGDIKVQVEAPPLCGMWRGKIVVCSGGASGGGVWVPSVPGSVPPSPSNVSASVLYNPPRMLSVCS

SEQ ID NO: 218142 - protein, 290 aa, Zea mays
  Clone ID: MRT4577_130540C.1.pep
MALLPGFSLSLHLSLRRPASARISLPSRGPSSLVSHGHRSSVELLSAEGSGPCRARLELPPTLCPAPAPSPCVWCFYLLRFGDRVPWFFKFVAVPACLGTVGSDHHPHVDGALDSSVPRRASSAPAILAQIHPCTWSSSRIRRPPLGSWRSASSSRSFPGGRFLVVFYSRARPRFLPACASSVASADPYPQSLVGAQLARTLCSDLSSVALSSARCDLALALCPYCARQSDSWPSSTNLAITALCCSTGDSLLVLLQPPGTLINRAMRKTSQVDPKHGLIHRMKLMNEPA

SEQ ID NO: 218143 - protein, 37 aa, Zea mays
  Clone ID: MRT4577_130541C.1.pep
PPSKASDKVNEKETMVGTVASARTFVARRSIAPNKYS

SEQ ID NO: 218144 - protein, 220 aa, Zea mays
  Clone ID: MRT4577_130542C.1.pep
ALSEHSSFVFLCHFFSVPEVTAPWRCSARLRLVFAGNRAALYARVPSALLPGAGASSFPCARRRSDLRDSAPARISLPSRGPSSLVSHGHRSSVELLSAEGSGPCRARLELPPTLCPAPAPSPCVWCLYLLRFGDRVPWFLKFVAVPACLGTVGSDHHPHVDGALDSSVPRRASSAPAIPAQNSPLHLVLVEDTSPSTRFMALGLQLAKLPWWPLPRRFL

SEQ ID NO: 218145 - protein, 406 aa, Zea mays
  Clone ID: MRT4577_130543C.1.pep
MAIEAARLSPSIAAAAFLASRPPLALRPFSLRRRFPLLRVLANSSGGDGRVVALSSSELRKRRGRSSSSGAADSASDGDEKLRSLRRLFARPDVAIDAYIVPSQDAHQSEFIAECFTRRAYLTGFTGSAGTAVVTKNKAALWTDGRYFLQAEKELSHHWTLMRSGNHGVPTTSEWLNDVLPSGCRVGIDPFLFSFDAAEELKDSIANKNHELVLVQGMNLVDEIWGDARPNPPKEPTRVHDIKYAGIDVPSKLSFIRSQLAENGCDAVVISMLDEVAWLLNMRGSDVPHSPVFYSYLIVEVSTATLFVDNSKVSKDVLEHLEQAGVKLKPYEAIISEVERLAEKGAKLWLDSSSVNASIITAFKSSCDMKKKGKAGEEVGEKEASSNDRITGDPSVHNGVISAVYN

SEQ ID NO: 218146 - protein, 94 aa, Zea mays
  unsure (1)..(94): unsure at all Xaa locations
  Clone ID: MRT4577_130544C.1.pep
CDVYCLERGIRADGPMPGDKTIXAGDDAFNTFYHETEAQKHVPQADNVDLEPTVLNDLTTDNYRQIFHSDQIIRDTREAYRYFARAPDTTVKET

SEQ ID NO: 218147 - protein, 114 aa, Zea mays
  unsure (1)..(114): unsure at all Xaa locations
  Clone ID: MRT4577_130545C.1.pep
SRHSIPSGPWARARARARRRTGPSSGGPAPAATCGRRRCSTFPSVSSWDSSRASRPPPPGRPPAPTRRTVSQHPASPSTSTSTRAPXWXHPPTRXPPAPPLSPRGTWATTTPRA

SEQ ID NO: 218148 - protein, 89 aa, Zea mays
  Clone ID: MRT4577_130546C.1.pep
SEHADVRRRVKMARARQKSYVFVQTRLFRHDGGSDMIRQGKRGFAARAHETPKGWRWRVTTVLSAATANRRKQRYLRAPDDIVLYFITR

SEQ ID NO: 218149 - protein, 86 aa, Zea mays
  Clone ID: MRT4577_130547C.1.pep
KNSTGLPPRKKKGNKGLLTPFIPPGGDYLKNIPIKGASFVKAHPPWGPVLKIGHFRFLKCKPFLFKGGKRNCPKKILPYATEPWIK

SEQ ID NO: 218150 - protein, 73 aa, Zea mays
  Clone ID: MRT4577_130548C.1.pep
WWITMLVSLDVGARIACMPFRVSVNDVFVPRIVKSACPGLCAVVRSRVVHAVSGDSTMLAYLRLELGVLVRYA

SEQ ID NO: 218151 - protein, 109 aa, Zea mays
  Clone ID: MRT4577_130549C.1.pep
AVVTTQSTFFFFFFFFFFIFFFFFFFFFFFFFFFFFLKPKSPPIFFSQKPHNYKIIHNGVIYRRVKTTRFFFKSTWKQQMGTGKAMRNRPFNGGSRNRATKGLLGFGFA

SEQ ID NO: 218152 - protein, 115 aa, Zea mays
  Clone ID: MRT4577_13054C.1.pep
TTLTLCLLLLKWLYLHRRTYCCHHTNAFHFNGGHIAGCSLPITGQPVRVSDDPRRGRPFQREQMDISAKKGQETRGVGGRQTPTVKRAPPTGGLMGGLMHMASSRPFNPPRTWAT

SEQ ID NO: 218153 - protein, 122 aa, Zea mays
  unsure (1)..(122): unsure at all Xaa locations
  Clone ID: MRT4577_130550C.1.pep
PQLKGGGSPRGPPRGSPFSPPPPLGGGAWAGPHFPQGPPWARRPPRLGPGPGPLVTAPPGVGXPLAGAPPRAPXLSNGAPGLPPXPLFSPLPPVGYGGSPPPPGGRPPPCLDGPFEWEGIFF

SEQ ID NO: 218154 - protein, 66 aa, Zea mays
  Clone ID: MRT4577_130551C.1.pep
RQRSTSANGKVGVDFPSVQQGNDEDRIYGSPLAVHSQELCFAKVPGVVHHPLLCKSLLSMNRPAFS

SEQ ID NO: 218155 - protein, 199 aa, Zea mays
  Clone ID: MRT4577_130552C.1.pep
MAQTPPIPRVSLGTQGLEVSKLGFGCMGLTGSYNSPVEDDAGIAVITHAFRRGVTFFDTSDVYGPHANEILLGKALKQLPREQVQVATKFGIQRDAQGKSTICGRPEYVRACCEASLHRLGVDHIDLYYQHRIDTTIPIEDTIGELKKLVGEGKVKYIGLSEASPDTIRRAHAVHPISAVQMEWSLWARDIEPEIVPLC

SEQ ID NO: 218156 - protein, 50 aa, Zea mays
  Clone ID: MRT4577_130553C.1.pep
LEYFCRMGALFWRRSLGTGLVISRVSMRLMCHLTCDGSNADSKKKKKKSG

SEQ ID NO: 218157 - protein, 63 aa, Zea mays
  Clone ID: MRT4577_130554C.1.pep
CTCLANKFFIRPQKMSPYYWAPVYLCFQVPFSPCREIQITKKCFYMYPLKTPIEKKCRELIPS

SEQ ID NO: 218158 - protein, 49 aa, Zea mays
  Clone ID: MRT4577_130555C.1.pep
ACAIILGFRKAYVTLLHCLCVIRHKPLLASVSSLANATSWMIAVAWLSL

SEQ ID NO: 218159 - protein, 53 aa, Zea mays
  Clone ID: MRT4577_130556C.1.pep
VLYLPKKKVPFKTIFTTRKRLLRFCTQKIHNKCSFFFRTRRRAAHDYIKKQVE

SEQ ID NO: 218160 - protein, 401 aa, Zea mays
  unsure (1)..(401): unsure at all Xaa locations
  Clone ID: MRT4577_130557C.1.pep
ATAACGFGERCRYNHPRNRXAALEFGGGAKNGAAQYFPERQGQPVCEYYLKTGTCKFGSNCKYHHPKQDGSVQSVILNNNGFPLRPGEKECSYYMKTGQCKFGSTCKFHHPEFGGIPVTPGIYPALQSASVPSPLTYASNWQMGRSPAVPGSYIPGSYTPMMISSGMVPLQGWSPYPASVNHVASGGAQQTVQAGPLYGIGHHGSSTAIAYGGTYLPYSSSAGQSSNNHQEHGFPERPGQPECQYYMRTGDCKFGTTCKYNHPRDWSTPKTNYMFSHLCLPLRPGAQPCAYYAQNGYCRYGVACKYDHSMGTLGYSSSALPLSDMPIAPYPIGFSVATLAPSSSSPEYISTKDPSINHVVSPVAGPAPVGAILPKGVFHHDTIMQTQTPTSAGSSSPGGGR

SEQ ID NO: 218161 - protein, 93 aa, Zea mays
  Clone ID: MRT4577_130558C.1.pep
IVDGQSELHAGGQVDLVGIHGKKAGVHVTAVTRAYPPITVWTHQAEKLHHWEGISLSPDRILCSTQLHQQDGGTSQMHSDRARPNKSTGAQHH

SEQ ID NO: 218162 - protein, 81 aa, Zea mays
  Clone ID: MRT4577_130559C.1.pep
PTHDLSSTVGCLETNRTSTPPGLLMNTKNLMWHMILLIANANMSDAEHKHMVDYLYADQCQIDRILAVSLRRIDGPLSDNF

SEQ ID NO: 218163 - protein, 117 aa, Zea mays
  Clone ID: MRT4577_13055C.1.pep
GIYTISQAAAAGDVIKAAYNQVKTVAQGNLSSVDVQVAKNKLKAAYLMSVESSEGFLDEVGSQALVAGSYTPPATVLQQIDSVADADIVNAAKKFVSGRKSMAASGNLGHTPFVDEL

SEQ ID NO: 218164 - protein, 202 aa, Zea mays
  unsure (1)..(202): unsure at all Xaa locations
  Clone ID: MRT4577_130560C.1.pep
AGAGRRWGRGGRGAGGGAGXADARLPERPGEADCGYYLRTGACGFGERCRYNHPRDRGGTEFGGGTKNGAAQDFPERQGQPVCEYYLKTGTCKFGSNCKYHHPKQDGSVQSVILNNNGFPLRLGEKECSYYMKTGQCKFGSTCKFHHPEFGGIPVTPGIYPPLQSPSVPSPHTYAPNWQMGRSPAVPGSYIPGSYTPMMISS

SEQ ID NO: 218165 - protein, 99 aa, Zea mays
  unsure (1)..(99): unsure at all Xaa locations
  Clone ID: MRT4577_130561C.1.pep
AQDVIELPYALAQDILYGAXRDSMXGFELTAAKGFWYLCFEYFTLLYCTFYGMMAVGLTPNYHIAAIRSSAFYAIWNLFSGFIIPRPEVPIWGRWNCWI

SEQ ID NO: 218166 - protein, 149 aa, Zea mays
  unsure (1)..(149): unsure at all Xaa locations
  Clone ID: MRT4577_130562C.1.pep
MALACASHACRFLLAGQARSFHAQPYHAKVGVVEFLNGVXGKGVEAHAAKLEEAVGGDLQRLLEARTLRLKKLGIPCKHAKAGSTTRQDRPRALTGWRPVRPSSLTRDKTKAPPKSTGPLALTPPREAHGAVRPIELPAWACAIRAVSV

SEQ ID NO: 218167 - protein, 104 aa, Zea mays
  Clone ID: MRT4577_130563C.1.pep
MALACASHACRFLLAGQARSFHAQPYHAKVGVVEFLNGVGKGVEAHAAKLEEAVGGDLQRLLEARTLRLKKLGIPCKHRKLILSFAHKYRLGLWKPQAEPRKVE

SEQ ID NO: 218168 - protein, 100 aa, Zea mays
  Clone ID: MRT4577_130564C.1.pep
MGPQQGRRSNGGAAARSKEEEEVGGAKKVVRYRECQRNHAASLGGHAVDGCREFMAAGADGTAAALACAACGCHRSFHRREVEQQPAADCCDCSSTTSGA

SEQ ID NO: 218169 - protein, 61 aa, Zea mays
  unsure (1)..(61): unsure at all Xaa locations
  Clone ID: MRT4577_130565C.1.pep
SCFRCEESCVRFVSLVWCLQYISLALRGRVFLYVGAVTVSLCCNKPRKSLPPPCXFLLCKW

SEQ ID NO: 218170 - protein, 147 aa, Zea mays
  Clone ID: MRT4577_130566C.1.pep
MAGGGFVAGDGRAQEYGGRMTFSVVVTSLMAASCGLIFGYDSGVTGGVTQMESFLSKFFPEVQSRMKIPKHDAYCKYDNQWLTAFTSSLFIAGTLSSLVASQVTRRVGRQAIMLIGGVMFLVGSIINAAAVNIAMLIIGRILLGFGL

SEQ ID NO: 218171 - protein, 147 aa, Zea mays
  Clone ID: MRT4577_130567C.1.pep
PGPRPRETKKKKNITPLAARSESSLCLFLSPGISAQTLTRHAIPMRRGLGSEASLRRRRGPARLWVAVAALVVGTVCLFSSSSVGLLGASYRVQVRSPRPRLLSGLYLSVSRLLYALPGVGVKAGKALMWLSRSCLLVSNLGALYTG

SEQ ID NO: 218172 - protein, 351 aa, Zea mays
  Clone ID: MRT4577_130568C.1.pep
MYSWEMLSFNIHDGFLEAIVRGNRSGLLTQADYNNLCQCETLDDIKMHLSATEYGPYLQNEPSPLHTTTIVEKCTLKLVDEYKHMLCQANEPLSTFLQYITYGHMIDNVVLIVTGTLHERDVNELLEKCHPLGMFDSIASLAVAQNMRELYRLVLVDTPLAPYFSECITSEDLDDMNIEIMRNTLYKAYLEDFYKFCAKLGGATAEIMCNLLSFEADRRAVNITINSIGTELTRDDRRKLYSNFGLLYPYGHEELAVCEDVDQVRGAMEKYPPYQSIFSRISYGESQMLDKAFYEEEVKRLCLSFEQQFHYAVFFAYIRLREQEIRNLMWISECVAQNQKSRVHDSVVFIF

SEQ ID NO: 218173 - protein, 122 aa, Zea mays
  Clone ID: MRT4577_130569C.1.pep
VKTVDKRERGWYDVVVLPIHERKWNFKEGDVAILSFPHPGSAAQSGRSSRRTMSSNEDSEPECGRLVGTVRRHMPIDTRDPVGAVIHFYLGDSFDSNCESNVLRKLQSQSTWYLTGLGSLAT

SEQ ID NO: 218174 - protein, 68 aa, Zea mays
  Clone ID: MRT4577_13056C.1.pep
ITLKRWLIPRGNYCHPFHHGSGESTAAYQTPLRSCLKCMEDLSACAYDANLTGGLLIIDYANGAPLPS

SEQ ID NO: 218175 - protein, 213 aa, Zea mays
  Clone ID: MRT4577_130570C.1.pep
RSTHPLFDEYQNIDQDHHRALLVRVAVVFVLLRRLQGPATHLHPHKRHPVDGSHSLLVVLSLSLRARINLPKYLDMASQQQEIRLRSSAVDRSPVTESATVTRARTTTFASSSSSSPGISRSHSASSTSTVDTSDAMLPPPLPRSDSFTRGRSRASPSVSRHKNRLSLTLPVALQLGEGPRLADSPAIMTASALASSVPQTPLETPASVATSP

SEQ ID NO: 218176 - protein, 113 aa, Zea mays
  Clone ID: MRT4577_130571C.1.pep
MAASSPMVLSLLLLASLTALLVLAPRLSPPQPPTGEQAPAAPGGGGGEEEEEADDLRLFRRAALESSAAGGPPKVAFLFLTNSDLTFAPLWERFFAGNEARLRVYVHADPFGR

SEQ ID NO: 218177 - protein, 64 aa, Zea mays
  Clone ID: MRT4577_130572C.1.pep
RLQAPILIHRFFDTNMSDRHSSKAPVSVTDFSFNTWSPSSDGHRGTSAPPNVWMAIIVSPNSES

SEQ ID NO: 218178 - protein, 439 aa, Zea mays
  Clone ID: MRT4577_130573C.1.pep
MLLSSRPESEKAEADVPRSDLTTSHKLLLHIRQSTHPDRARPHLPDLICDDLLPPDPAPSPPTATAAAAASPTEVLSSAIQPEPAAATMYGWEMLSFNIHDGFLEAIVRGNRSGLLTAADYNNLCQCETLDDIKMHLTATEYGPYLQNEPSPLHTTTIVEKCTLKLVDEYKHMLCQATEPLSTFLQYITYGHMIDNVVLIVTGTLHERDVNELLEKCHPLGMFDSIASLAVAQNMRELYRLVLVDTPLAPYFSECITSEDLDDMNIEIMRNTLYKAYLEDFYKFCQKLGGATAEIMCDLLSFEADRRAVNITINSIGTELTRDDRRKLYSNFGLLYPYGHEELAVCEDVDQVRGAMEKYPPYQSIFSRISYGESQMLDKAFYEEEVKRLCLSFEQQFHYAVFFAYIRLREQEIRNLMWISECVAQNQKSRVHDSVVFIF

SEQ ID NO: 218179 - protein, 161 aa, Zea mays
  Clone ID: MRT4577_130574C.1.pep
YREILFWPISFALWSCRAVACGAAELEHEQSARCSPVWSTGAGCLDCCLPVCWTAGARARLSERRERQPQWSSRAPWTAPIRSSLQRSSHQAAGEYPSDRAGAAAARCAPAGQDPRSRNRHCETRGPLDGRTEQARRCSAYSRGRHPSDSWSRGGGCCLSQ

SEQ ID NO: 218180 - protein, 188 aa, Zea mays
  Clone ID: MRT4577_130575C.1.pep
VAKTVASLPPSLTGSKPAPAASQNPSAVPHRRPPPPPPPPPVTAVARVREEGELSSGADDDETLQTQLGAASILGKFVEAGSQVPSASLLGKGSNTLIVSNALNHKASAPSYKKIMRVNQGQFKPGTNRNLSWQKPVSSDNLLITFSDDDSGADSGKTRRDKVRKASSQGTQRTGNSMQTRIMREEVS

SEQ ID NO: 218181 - protein, 105 aa, Zea mays
  unsure (1)..(105): unsure at all Xaa locations
  Clone ID: MRT4577_130576C.1.pep
IASVHKKDGCNVPVLVVNCFNTDDDTQKSAGQCSNSDMEMHTVSRSQHAWIGTGGLLPLPSEGKSAKDGWXPPGHGGVFPCMTNRGKLDRLLAQGTELVCVANLH

SEQ ID NO: 218182 - protein, 118 aa, Zea mays
  unsure (1)..(118): unsure at all Xaa locations
  Clone ID: MRT4577_130577C.1.pep
QNGDNRGGVIEPAPRRPPXAXNKNECQRSDNCKKLPNSLVLDFVTNAQSRGITLLNSKCFHMNIFGSKXRVSDKVTSKAPGNSPNTDGSHSGDSSNVTNSGTTIRXGDDCVCSGPGSK

SEQ ID NO: 218183 - protein, 248 aa, Zea mays
  unsure (1)..(248): unsure at all Xaa locations
  Clone ID: MRT4577_130578C.1.pep
LLSKQPSSNHTSRARAAECSRRRPCGAAAAAISAACCCCCRRGGYSSAASSPSSRRXGGSGHVVTRMPGFDGPLPFHLETGYVEVDEQLGVQLFYYFVRSEKDDPGEDPLLLWLSGGPGCSGLSGLAYEIGPFHFDARGYRGGFPTLLYRPETWTKVSNIIFMDSPVGTGFSYATSDEGLKSSDTQAVRQLAIFLRKWLEEHPEFLPNPLYIAGDSYGGMIVPALALQIHTSTELGENPSFNLKATLL

SEQ ID NO: 218184 - protein, 58 aa, Zea mays
  Clone ID: MRT4577_130579C.1.pep
PQYLGNHGFGKTLIPNRPLATFRGFHQTLFSFLTAHRPGGVFSQLTAHNSFFHSHTPT

SEQ ID NO: 218185 - protein, 102 aa, Zea mays
  Clone ID: MRT4577_13057C.1.pep
TQNLTHFKKQNQKDAFTKCSPKSQFHREKKPQKKNYFYWLTTFWVQNKKKKFSSTFFLRNKIFFTVKKIVHQVDNLEPTHGLLTNKFSYGKHKSCFLTRKQK

SEQ ID NO: 218186 - protein, 67 aa, Zea mays
  Clone ID: MRT4577_130580C.1.pep
QAVIGLPDELKVLGHDFQHEKHDSEGSISQGLNTNRMLWEINFRGALEPSQLTNQREPTANLEHMHP

SEQ ID NO: 218187 - protein, 118 aa, Zea mays
  Clone ID: MRT4577_130581C.1.pep
CHLIRSAIEKRAESCPLAEPIGDFEQGLSQSVLTCSVVLSGCSLRRCRLARSRMRPRARDRGRGSLSPFFSGGAHLDGLVESRGSHRGGVGYPSARINGRGEQRKQAREEERQEDPGR

SEQ ID NO: 218188 - protein, 201 aa, Zea mays
  unsure (1)..(201): unsure at all Xaa locations
  Clone ID: MRT4577_130582C.1.pep
MSTSLTFYDATIPVMCGMSKSAISFLTTAKEELSKENSNLPSESDVLNAQLGDMLPFRMQPIILCKFQLAGIQNFKLAESATAPTLDPSAFSSLDDVISFFKQLLAVLEAVDAKAYNESADKGLDIEIGPKTLHMSSLSSFTNDFVVPNSFFHLNAMYMLLRSKGFSLGKTSYIGGFMSEQSLKDWAPXEGLSLARKNKIK

SEQ ID NO: 218189 - protein, 51 aa, Zea mays
  Clone ID: MRT4577_130583C.1.pep
SIMALKIGGVWYCKKMHDISESRSHRNSVEMQVQHCNVKKLKLKPYCSDDV

SEQ ID NO: 218190 - protein, 43 aa, Zea mays
  Clone ID: MRT4577_130584C.1.pep
NTQFTSSQTNANSFFLRIRRGTPTAHFIRKRKVKVRIWYFYSQ

SEQ ID NO: 218191 - protein, 101 aa, Zea mays
  Clone ID: MRT4577_130585C.1.pep
SSVSAEEALASAAAAVFYLGLLGAAAASFNLQRLPTSISQLGSLGALFRSFLCFPVDPFSLRFDSSRFFASLSIRFNISGELDRFSRVPPSRTPIFLVSIF

SEQ ID NO: 218192 - protein, 23 aa, Zea mays
  Clone ID: MRT4577_130586C.1.pep
MAEGPWKVLALEGEHGGLLVQSN

SEQ ID NO: 218193 - protein, 49 aa, Zea mays
  unsure (1)..(49): unsure at all Xaa locations
  Clone ID: MRT4577_130587C.1.pep
KKKKKKKKKNXKKKKKKKKRREKKKKKNKKKKKKNKKKKKKLKKKRRPL

SEQ ID NO: 218194 - protein, 216 aa, Zea mays
  unsure (1)..(216): unsure at all Xaa locations
  Clone ID: MRT4577_130588C.1.pep
NSARGRPRLTRNLRCRAHARDIHHPDLAPHPPKFRPRDPSAHRWKAPLTTCQTRYRPHDAIPCPRPHPPHRSTKRPPPRPRSCPSSASTSPRHGLHSSVPLAAAVLGHLRASGVAVLPGLTELELAGAEAEMGFAFPLDLRAVLATGLPLGPKFPDTRSRVGLRSAFDLPIVAAALQITRXTLWLRCWGARPADLDCVLRLARXXICRAGEASIPR

SEQ ID NO: 218195 - protein, 47 aa, Zea mays
  Clone ID: MRT4577_130589C.1.pep
STISSASGWEGFSSGSADYSVIGDSGGMPRFFDEAVTGAPVRDTGLL

SEQ ID NO: 218196 - protein, 194 aa, Zea mays
  unsure (1)..(194): unsure at all Xaa locations
  Clone ID: MRT4577_13058C.1.pep
KPTPPIHKTRNPVCFLVSLPYKPLTGRRKTPTPARTAPRKQSLARRARIPRVRGSGEEEEEHGREGRREVAGRREDSGWHGQGQEVAGQPLRARRPPCRRPPLFLRSLVLVLLVAPLRPTLVATRARFVLGRDVRARAAFCAFFIIRXVGCWRGLPCPLGVESVFVVLFSRDLASSSSLGXAXSFVSLRSSQAS

SEQ ID NO: 218197 - protein, 321 aa, Zea mays
  unsure (1)..(321): unsure at all Xaa locations
  Clone ID: MRT4577_130590C.1.pep
SRPAGVRSSPSQSQPFFCRSVPRACRFSPVHLADSSDLSYSPEVGSVAESGHGEEGRGRGGRGPRAAPAVDAVPRRYRHLLWLPRHTAPPPRPEVREVFDDIAPMVGLSVGSAVGQSSIADEVSSLVPKPKQEFYPTIDEEYVQMEPQTKIDILVATPERLMDHINMTNGFSLEHLQYLVIDETDRMLREAYQSWLPTVIQLTHSITKXGVERVFKGKCYPRLGKMVLSATLTQDPSKLSQLELHHPLLLNSGKKRYXIPTKLESYKLIYKLNLKPLSLLVLLQELQGNKCLXFTSSVESSHRLSTLAEMFSPSLFSVAGV

SEQ ID NO: 218198 - protein, 86 aa, Zea mays
  Clone ID: MRT4577_130591C.1.pep
SAIHLGHGANLSATPDVQVPLCGSSSPVELVLIVGTKPLVLGQLHGIHPFGDCQLPGLYEEDSQSSDEHLLLHACYSNCRHRAAYR

SEQ ID NO: 218199 - protein, 104 aa, Zea mays
  unsure (1)..(104): unsure at all Xaa locations
  Clone ID: MRT4577_130592C.1.pep
PLDAGRXGRPXXALPQPSPLARCRTTSFARQSPKNKPKKTQASGAYIMGRKXPAAEPTTXQCLRCPAMAHPHRFPRHKLRGDVSKAYTVESESVTCDAICQPVS

SEQ ID NO: 218200 - protein, 63 aa, Zea mays
  Clone ID: MRT4577_130593C.1.pep
STEQRLLSIYRGGAGRLALAHERQTADPHRLSLTLCGLFLPSLFVLPPYLLSPLGCALAFPPS

SEQ ID NO: 218201 - protein, 146 aa, Zea mays
  unsure (1)..(146): unsure at all Xaa locations
  Clone ID: MRT4577_130594C.1.pep
MGAVVTAVIAIAAVVLGWITIEMACKPCLETGRRAMDRALDPNHDPDSPTNAAGASANEPLLXPTSPPPPRHPQRPSESHHLPERARGGPPFSPRLVILLLSMSFCAYEFAININGVLVMKRPLLAIYKLLIQKKKKKKRPKNLMG

SEQ ID NO: 218202 - protein, 85 aa, Zea mays
  Clone ID: MRT4577_130595C.1.pep
GTEITPQSTQPPPTAPGQITNFKGKKQAPFISQIGLSQIPLETSVLGPLVLALSQCGFIKMGPTPMRPSQGPPPPVCANRAVPGL

SEQ ID NO: 218203 - protein, 77 aa, Zea mays
  Clone ID: MRT4577_130596C.1.pep
TTGRPECRFSYNWKARVFAFGDLKGGLPFPRGNLVPATPGWIGLNRIAPILAGIIAFGSIRSVFLVFWVIFVCQRTT

SEQ ID NO: 218204 - protein, 62 aa, Zea mays
  Clone ID: MRT4577_130597C.1.pep
AATFECEGHLFTNRRLIQQQRMFPNSTTQKLENYSWQCAKRRSHAIMIHASVSLSPKSVQSK

SEQ ID NO: 218205 - protein, 83 aa, Zea mays
  unsure (1)..(83): unsure at all Xaa locations
  Clone ID: MRT4577_130598C.1.pep
NSYDNCPXRFDLCDAYYLRYQGMPEFDHAMQHFDPKYECTTFDHHYISRYHADDYVIATHRGRLAFXTNFHCTIMYIDYRIAS

SEQ ID NO: 218206 - protein, 157 aa, Zea mays
  unsure (1)..(157): unsure at all Xaa locations
  Clone ID: MRT4577_130599C.1.pep
TIPKCHHHHILLLQILNTLLIPTHNLLPIPKSLPHLLHTIPQIPIDHLTTSPTPKLTTHLTLQQHLPNNTQLALTTTXTXIXYXXPXPQKKKRXQLLTPRPQQKVPVTIPYSTLHXQYSSSXPKXXHPPXRLTXLAPNKKNXXXXXKKTLPQTKNPP

SEQ ID NO: 218207 - protein, 45 aa, Zea mays
  Clone ID: MRT4577_13059C.1.pep
IINKILRGVIESGGPTVLAKKHMHKAKVHTSLHHSKRIISTTMEF

SEQ ID NO: 218208 - protein, 72 aa, Zea mays
  Clone ID: MRT4577_1305C.1.pep
RENFFRGADPSGENNHGGRRGTPGHAETVHPMDLKRNAGEPHQCPRLARIQRNETGDDPAIHRGALIQETAT

SEQ ID NO: 218209 - protein, 62 aa, Zea mays
  Clone ID: MRT4577_130600C.1.pep
RLNDIGLTGLFGVYANMCLLGVAVLFVTVPETKGMPLEVITEFFSVGAKHAKEEEDEDAKES

SEQ ID NO: 218210 - protein, 50 aa, Zea mays
  Clone ID: MRT4577_130601C.1.pep
ACAQHTSCIVTPKCNKLAEGLQLIDWKNHYTTQLNQIAEHTNFNSRRFYT

SEQ ID NO: 218211 - protein, 71 aa, Zea mays
  Clone ID: MRT4577_130602C.1.pep
KGKHPRHTQAPKPKLPKGKEGYIRKTLKGECQNKLKAKNQGAISALNKRPNLPKLHTGMIQGRHQGGRPHH

SEQ ID NO: 218212 - protein, 119 aa, Zea mays
  Clone ID: MRT4577_130603C.1.pep
EAERLASAVSKSWGNFFIREYDVRMLIGLGIGATPLISIVKDVLNHIQLGGSVAGTEPEGSGKAKKRPFMTKRAYFYWVTREEGSFEWFRGVMNEVAEKDKDGVIELHNHCSSVHQEGD

SEQ ID NO: 218213 - protein, 86 aa, Zea mays
  unsure (1)..(86): unsure at all Xaa locations
  Clone ID: MRT4577_130604C.1.pep
TPIQFIVYDKFHRTTAGDTIRRKTIXNYSSLFIPQKISQXKGYSDRLYFYAVHNTYLEEPSSCNAFVVKDNVISTAAIQGTISPGI

SEQ ID NO: 218214 - protein, 67 aa, Zea mays
  Clone ID: MRT4577_130605C.1.pep
IRQKVYLFKFGFGVALVVFVFKEAMKLVAIYGRMCCCWPFPLKVIKSWIWTKCYRICKKIEVGLNGG

SEQ ID NO: 218215 - protein, 64 aa, Zea mays
  Clone ID: MRT4577_130606C.1.pep
SLHQFKSEREKKKKKKKLKKKKKKKGQRLKRNRHYDPNHATSYTTAFTSLKSVSLAAFYTARTR

SEQ ID NO: 218216 - protein, 70 aa, Zea mays
  unsure (1)..(70): unsure at all Xaa locations
  Clone ID: MRT4577_130607C.1.pep
MCKVLTLDTVAKHNSXDDXWLIIGCTASDVTTVLVYHPRGYYVVIPSTGKDSTDDSFAHEEEKHYPLDDV

SEQ ID NO: 218217 - protein, 40 aa, Zea mays
  Clone ID: MRT4577_130608C.1.pep
HLHIFLLSFQKHWSLYIYTSHSFIHTFFNITLRFIHIYSI

SEQ ID NO: 218218 - protein, 235 aa, Zea mays
  Clone ID: MRT4577_130609C.1.pep
MPPYTSDPSSFPDPVSLAHLLSRSTKAREASTVKQFYKYFQIPGIAQLAGGLPDDHYFPYDTLEAKVARPDRWQPTPNKPLDPPPEDPPSPQQNRFWAFSRKKAKQLPASRLVVPKDSNVQDPLRMIDLKSALQYGQAQGYPPLYYFIRQFTRENLHPFVPYKDGPEILLTCGSTDGFSKTLTALSNEWSAEHDPVEERPGLLCETYCYMNAIQTAKPRGFNIAPVAIDHEGMMV

SEQ ID NO: 218219 - protein, 55 aa, Zea mays
  unsure (1)..(55): unsure at all Xaa locations
  Clone ID: MRT4577_13060C.1.pep
GGGRPYKPQLFXIYFTNXLNKMGSQMLLHTYMLIVVHTXNHLKLYTYLFRLIQHV

SEQ ID NO: 218220 - protein, 70 aa, Zea mays
  unsure (1)..(70): unsure at all Xaa locations
  Clone ID: MRT4577_130610C.1.pep
CGPPFAVSXACGPWXPLACPPLAXPGPSCPPXGLXGFPAAVLLAGXLAAPRCRLRLRPGAVLXVPPPGGP

SEQ ID NO: 218221 - protein, 95 aa, Zea mays
  Clone ID: MRT4577_130611C.1.pep
WPSHKHNPGLFWQPPSLTEPACQCPFRMAACGIRPRIPLFDHIFPGRLGYPGGLPLTGYEGPCRRLQPFWSGHWAGRNLVVAGVKEFWFQNGKRS

SEQ ID NO: 218222 - protein, 84 aa, Zea mays
  Clone ID: MRT4577_130612C.1.pep
SSPSTLHCFLLKFGKVRVIPLIKLVLAIRIAKSKRTDGKSSHWVSTGPRDKLDCRLLVHALAVAWCRILKLSIKWQWRWVMLAR

SEQ ID NO: 218223 - protein, 135 aa, Zea mays
  unsure (1)..(135): unsure at all Xaa locations
  Clone ID: MRT4577_130613C.1.pep
HPLVLASHPACFLPQQFVSFIQLAAFNYVCCLHQPQLPFRXVSSAYPQPFFSFNQLAAINFPGYFQQPQLLPFNQLSGVNPDTFLIQPQLVPFYQPDGPKAGPILQLPPLLPFNPPALTNPAAFYPPPIIGGALF

SEQ ID NO: 218224 - protein, 270 aa, Zea mays
  Clone ID: MRT4577_130614C.1.pep
MTVIDILTRVDAICQKYDRYDVDKLNGANVAGDDPFARLYASVDADINQCVDKAETAKQEKNRAAVVALNAEIRRTKAKLLEEDLPKLQRLAVKKVKGLTREEIATRSDLVAALPDRIQSIPDGSSTATKKNGSWGASGSRTGGAIKFDSTADGNFDDEYFKGTEESNQFRREYEMRRMKQDEGLDVIGEGLETLKNMASDMNEELDRQVPLMDEMDDKVDRANADLKNTNVRLKETVLQLRSSRNFCIDIILLCVILGIAAYLYNVLKK

SEQ ID NO: 218225 - protein, 67 aa, Zea mays
  Clone ID: MRT4577_130615C.1.pep
LTVDGILLAPAAIVFPFSWTATATAPKSFHPVTKVSLLTSRIHLCRHQGQVQGHQGSRARRSRGAAV

SEQ ID NO: 218226 - protein, 137 aa, Zea mays
  unsure (1)..(137): unsure at all Xaa locations
  Clone ID: MRT4577_130616C.1.pep
MTVIDILTRVDAICQKYDRYDVDKLNGASVAGDDPFARLYASVDADINQCVDVRSRPLALRQRPGALDLNLXRSVWRLEQKAETAKQEKNRAAVVALNAEIRRTEAKLLEEDLPKLQRLAVKKVAALVPALPPLSYG

SEQ ID NO: 218227 - protein, 127 aa, Zea mays
  Clone ID: MRT4577_130617C.1.pep
MCSPAADMPPQGGFPEVRYRRYLPKRGPSGLVILSGIAAISAYGFYKVAEGNLERRELKRENLWARIHLIPLLTAEADRDAYRRSEAAKAREAEIMKNVEGWKAGESVYNNTKYYTPPNFVIVPEEN

SEQ ID NO: 218228 - protein, 88 aa, Zea mays
  unsure (1)..(88): unsure at all Xaa locations
  Clone ID: MRT4577_130618C.1.pep
KRGRPHPSATPFRGDLISLSVPLRTFPLPWGLPNNMGRMLKGPNLVPIQKXWPCLNVLGLTALPVAPAVSAIRLIMRDSSTYHFFVVL

SEQ ID NO: 218229 - protein, 43 aa, Zea mays
  Clone ID: MRT4577_130619C.1.pep
LFQIQEEAVLTSIDRHKVIFNLIHHFTCLYFVFPLTFASVMIV

SEQ ID NO: 218230 - protein, 193 aa, Zea mays
  unsure (1)..(193): unsure at all Xaa locations
  Clone ID: MRT4577_13061C.1.pep
LXMAQSKTWFTRWGYCLAXGCFSVSRSTYTAALEALAALPVDCLRSRHVRRVVTIYRRLSSKPLVTVREFLLCLLDWKHREPPLSPPPVKASSRLMFLLPKSCMMKRPRQPCQRFEDVVDLLECRWSKKRLLSAANVVVAKLREHADGTKITRQAVRDAARGGIGDTGLLDFVIKSLNNTVVGNHIVRRVPGP

SEQ ID NO: 218231 - protein, 77 aa, Zea mays
  unsure (1)..(77): unsure at all Xaa locations
  Clone ID: MRT4577_130620C.1.pep
HVDEKVIDGRDPNDRWEMFIGIILAGKYFLVGKGXRRRIYLSIANGKXNSWEHRPGDLLXSREPGSKEGXTARTRKD

SEQ ID NO: 218232 - protein, 166 aa, Zea mays
  Clone ID: MRT4577_130621C.1.pep
MASQLSAAVPRFHGLRGYAAPRSAVAALPSVRVGRKRSSSQGIRCDYIGSATNLVGIYICIHVKSDEYVRKRPTIISLTTAYARTQIMVTTTTLMLFAGRFGLAPSANRKATAGLKLEARDSGLQTGDPAGFTLADTLACGAVGHILGVGIVLGLKNTGALDQIIG

SEQ ID NO: 218233 - protein, 112 aa, Zea mays
  Clone ID: MRT4577_130622C.1.pep
PRSVVGRCRPVRVGRKRSQGIRCDYIGSATNLIMVTTTTLMLFAGRFGLAPSANRKATAGLKLEARDSGLQTGDPAGFTLADTLACGAVGHILGVGIVLGLKNTGALDQIIG

SEQ ID NO: 218234 - protein, 211 aa, Zea mays
  Clone ID: MRT4577_130623C.1.pep
RVGGRVGGRVGGRVGGRVGDVLSEMLNAIDPGNREGLRQEVIVDLVDQCRSYKQRVVQLVNSTSDEDLLSQGLTLNDDLQRVLAKHDAIAAGIAIRLQKPKSAPARADSSPTKPEPTKETEQRSAKVASSVTPFEQLALPAPPSSSASKSHGESAVSPNIDLLSGDEFFKPEPVHSQALVPLVTQASASSSPSTLDLLDMFSDSNAINNTS

SEQ ID NO: 218235 - protein, 158 aa, Zea mays
  unsure (1)..(158): unsure at all Xaa locations
  Clone ID: MRT4577_130624C.1.pep
LRTAQRHRGATYDDDDARATHGIPALRRRAPVPRGSGSYGRAQVPRCADACRAAEGVAGKRSSSHGIRXDYIGSATNLIMATTTTLMLFAGRFXGLAPSANRKATAGLKLEARDSGLQTGDPAGFTLADTLACGAVGHILGVRIVLGLKNTGALDQII

SEQ ID NO: 218236 - protein, 144 aa, Zea mays
  Clone ID: MRT4577_130625C.1.pep
LRTLLLDPCLPSPLFVPVCPFWLFGEICRYLRRLQFVVHFLKFKKACFVPIFLPVPLDLRLVVVLPPALPAPYSGAPVPGVALPVPCPFLFPRLPRPRLPPSPASPTDCCMLLPPSLPFPCKPRSAMDFPPKVVCPFMTHVHVQ

SEQ ID NO: 218237 - protein, 134 aa, Zea mays
  Clone ID: MRT4577_130626C.1.pep
MASQLSAAVPRFHGLRGYAAPRSAVAALPSVRVGRKRSSSQGIRCDYIGSATNLIMVTTTTLMLFAGRFGLAPSANRKATAGLKLEARDSGLQTGDPAGFTLADTLACGAVGHILGVGIVLGLKNTGALDQIIG

SEQ ID NO: 218238 - protein, 164 aa, Zea mays
  unsure (1)..(164): unsure at all Xaa locations
  Clone ID: MRT4577_130627C.1.pep
MASQLSAAVPRFHGLRGYAAPRSAVAALPSVRVGRKRSSSQGIRCDYIGSATNLVGICIHVKSDEYVREEKTDDDHXTAYARTQIMVTTTTLMLFAGRFGLAPSANRKATAGLKLEARDSGLQTGDPAGFTLADTLACGAVGHILGVGIVLGLKNTGALDQIIG

SEQ ID NO: 218239 - protein, 134 aa, Zea mays; identical to SEQ ID NO: 218237
  Clone ID: MRT4577_130628C.1.pep

SEQ ID NO: 218240 - protein, 104 aa, Zea mays
  unsure (1)..(104): unsure at all Xaa locations
  Clone ID: MRT4577_130629C.1.pep
NLLDYPRVRPRVRPRVRPRVLSKFTPSNMVPRVKILVLKMQFIIRXEVKMLPTFLRXFPNVETLHVLSHETDEQNGKFNLKFWEEVVSINCLETRITKGVFDQI

SEQ ID NO: 218241 - protein, 91 aa, Zea mays
  unsure (1)..(91): unsure at all Xaa locations
  Clone ID: MRT4577_13062C.1.pep
RIAGGPLGEVVDPLYPGGSFDPLGLAEDPEAFAELKVKEIKNGRLAMXAMFGFFVQAIVTGKGPLENLADHIADPVNNNAWAXATNFVPGK

SEQ ID NO: 218242 - protein, 135 aa, Zea mays
  unsure (1)..(135): unsure at all Xaa locations
  Clone ID: MRT4577_130630C.1.pep
MASQLSAAVPRFHGLRGYAAPRSAVAALPSVRVGRKRSSSQGIRCDYIGSATNLXIMVTTTTLMLFAGRFGLAPSANRKATAGLKLEARDSGLQTGDPAGFTLADTLACGAVGHILGVGIVLGLKNTGALDQIIG

SEQ ID NO: 218243 - protein, 287 aa, Zea mays
  unsure (1)..(287): unsure at all Xaa locations
  Clone ID: MRT4577_130631C.1.pep
MAPSSYEMAASTLLCGEDSSSILDLEAGGQEEEEEVLLARSRTRGEPSVVFPVPSEDCVAGFVEAEAAHMPREDYAERLRGGGTDLRVRTDAIDWIWKVHAYYGFGPLTACLAVNYLDRFLSLYQLPEGKSWTTQLLSVACLSLAAKMEETYVPPSLDLQVGDARYVFXGEDGAEDGAAGPQHAQMEDASGHPLLVHRLLPPPAQRRRCAEQTRRPPIRGAHPARRERNVLLGFQALGGRRGCRRRRGRRGARRGYRQGLHPPRARGEGVAMPRSDPGHRACTAAES

SEQ ID NO: 218244 - protein, 135 aa, Zea mays
  unsure (1)..(135): unsure at all Xaa locations
  Clone ID: MRT4577_130632C.1.pep
MASQLSAAVPRFHGLRGYAAPRSAVAALPSVRVGRKRSSSQGIRCDYIGSATNLIMVTTTTLMLFAGXRFGLAPSANRKATAGLKLEARDSGLQTGDPAGFTLADTLACGAVGHILGVGIVLGLKNTGALDQIIG

SEQ ID NO: 218245 - protein, 98 aa, Zea mays
  Clone ID: MRT4577_130633C.1.pep
QLVIWGTSLGTAPLGPPVRPLHGRSLLADSPEMVMPSSSCWQQPVRSPSAHLPPCDYLGAATGGRHVRRYCCRYCVGPFALTIGGFFSPDLPIAVVVA

SEQ ID NO: 218246 - protein, 182 aa, Zea mays
  Clone ID: MRT4577_130634C.1.pep
MNGGTQAISLMVHLAVPWLCLASWAALLPALLASANVGAAAPTLRAEYMNLNFSTASATPDKYKSFIASVRAGLVSKAGGNSSGIPVLVDEDDPLALESFLNITLVNKAGRSVSLKMDVSRAYFVAYVAGQRSCLLKRSGRTFSSAICYYGGPWGTSSAPVVTRPRSTRRGSDRAAAAAGDG

SEQ ID NO: 218247 - protein, 177 aa, Zea mays
  Clone ID: MRT4577_130635C.1.pep
MKGGTQAISLMVHLAVPWLCLASWAALLPALLASGNVGAAAPTLRAEYMNLNFSTASATPDKYKSFIASVRAGLVSKAGGNSSGIPVLVDEDDPLALESFLNITLVNKAGRSVSLKMDVSRAYFVAYVAGQRSCLLKRSGRTFSSAICYYGGPVGNKFGSCHATCCCCRRRRRSWGR

SEQ ID NO: 218248 - protein, 89 aa, Zea mays
  Clone ID: MRT4577_130636C.1.pep
SYLQLDRLTSTPTVPAAYLQITRRCLAGLRYIPIQRPRAHSLQYLLIERSAKSGRSLGLIGVSSTSKTMTRKALIKIPRGKQIWLNIAP

SEQ ID NO: 218249 - protein, 47 aa, Zea mays
  Clone ID: MRT4577_130637C.1.pep
HLIKKTLFIFHSLSTCRVVNCYIIMHSAHLPNIHEYSLVHTIRLKAS

SEQ ID NO: 218250 - protein, 112 aa, Zea mays
  Clone ID: MRT4577_130638C.1.pep
GGGPQRGGICFFWGVQAHNARGFRQVRSLGTRFFPCPPPPKKWGSFLFRAKKAAPIVFVPPGIPEFFFGSGFFSPPGGANKNPPFFFKVWGPHRIVWVSPIPNLGWGPFGVP

SEQ ID NO: 218251 - protein, 120 aa, Zea mays
  Clone ID: MRT4577_130639C.1.pep
MAGASHASVYSPTPPLFCFSVSIKLRDCGFIYNTITKSHISTLTVTPNTTVTLSENSRSAEESSYTRSIAMTQPLIQTHDRNVSIKQSYTATFISKLHPTRENYDALVTQHQGIRIYYYT

SEQ ID NO: 218252 - protein, 110 aa, Zea mays
  Clone ID: MRT4577_13063C.1.pep
QGPGGCVPPQTGVPVPPHEAGQVQKNNSLFREPPNGNSGGATTAPGGLPRGLGHPGGGPKGSVRPPVGTSLVPMIKVFPPAEKFVGPPFGPPPAPVFPGGLKKWSNFSLF

SEQ ID NO: 218253 - protein, 86 aa, Zea mays
  Clone ID: MRT4577_130640C.1.pep
KRRVRGTVVVDPKREEHLVFGAQDKPERAIIIPRAGRGSPGHLKLGVKLNARNRKYGHGIQAVGQGGQQAQSVHVVYPSERYHSRG

SEQ ID NO: 218254 - protein, 52 aa, Zea mays
  Clone ID: MRT4577_130641C.1.pep
QDLQQMDCDPNQASNGGCMHAAEPSRKQDIGILRIVPSDADADADYWLPSGV

SEQ ID NO: 218255 - protein, 84 aa, Zea mays
  unsure (1)..(84): unsure at all Xaa locations
  Clone ID: MRT4577_130642C.1.pep
RCXRSNSRTASTSLSSSPFFSRTKHTTQIHGGFCHLQTSEFHLTHPQHRATKTLPHDSPSKTPCQPYPQNPTRGALNSSLAALH

SEQ ID NO: 218256 - protein, 86 aa, Zea mays
  Clone ID: MRT4577_130643C.1.pep
FYIKNCFFWLNCKAPVVANLCSTMCCTFGIPPKTSIRSKQGNSQVRHFLSASARSPRQPPRSVWCGVQCPLHYSRASKVRGVCGDY

SEQ ID NO: 218257 - protein, 31 aa, Zea mays
  Clone ID: MRT4577_130644C.1.pep
MAAEKRTIGMGMDYSAVQQGRRGGGAVDNPD

SEQ ID NO: 218258 - protein, 79 aa, Zea mays
  Clone ID: MRT4577_130645C.1.pep
MARKCSSCGNNGHNSRTCGGHSRTAAAFENNGGGVRLFGVQLHVGSSSPVAVAMKRCFSMECLSPPPPLPPPPAAPAYY

SEQ ID NO: 218259 - protein, 71 aa, Zea mays
  Clone ID: MRT4577_130646C.1.pep
PARQYLSVYSWFRYIMFACLLIFISMASCIAWLISILYYLFLLHLSLCIHSAVVLNALICLARLLFIGMNY

SEQ ID NO: 218260 - protein, 406 aa, Zea mays
  unsure (1)..(406): unsure at all Xaa locations
  Clone ID: MRT4577_130647C.1.pep
MASAAVMVSSAGSLLAMLQEPAPELKLHALASLNSLVHAFWHEISTSVSSIESLYEDEEFVQRQLAALVASKVFFYLGELNDALSYALGAGPLFDVSDDSDYAQTLLAKALDEYTAIQSRGTGEEKTIDPRLEAIVERMLDKCILDGKYQQAMGMSVECRRLDKLEAAISRCDNLHGVLSYCINLSHQYVSHREYRLEILQCLVKIYQTLPNPDYLSICQCLMFLGEPESVANMLDKLISGSKDDALLAYQTAFDLAENENQAFLLNVRNHLDALSSHTSAHVDLDSGPTVPSNQTNAATELSGDVQMRDDIXCQTAVXTVDSNAATHADRLTKIKGILSGETSIQLTLQFLYSHNRSDLQILIPIKRWRHVTAQQYAVCNQPLQGLDNSCYLLRPPLFARVVPPI

SEQ ID NO: 218261 - protein, 60 aa, Zea mays
  Clone ID: MRT4577_130648C.1.pep
IMCLGVFYQKTFILNPEVSPPPIFLRKKWNPSYFLTPKFNLNLEKSFFHQKILKGRPFLP

SEQ ID NO: 218262 - protein, 132 aa, Zea mays
  unsure (1)..(132): unsure at all Xaa locations
  Clone ID: MRT4577_130649C.1.pep
TRKKRACGGKGEGAGPQGQGGGEGKNGGDGDXTGKGGGEGGGGKKXAPPTQTKGQPAAKKGKSQRGNPKKKGGNPARKTKRGENRGTPKKKGGPPEGPGGGEKKNRAKRGPHPTKSRKRGTKKNQKPTGGSG

SEQ ID NO: 218263 - protein, 348 aa, Zea mays
  Clone ID: MRT4577_13064C.1.pep
MAASSSAGPSAVDAASLAAVAEAAPPEEMTLVVKWRGQEQTVRMVGDDTLGELKLRICEVTGVLPKRQTLLYPKLILKDMDDSTLLSSIPFKPNGKISMIGTIEEEIFVGQEDDPELLDDFDFEQNEATPIKDKDVYKQKLKRRASRYKIKLLNPCRKGKKLLVLDIDYTLFDHKSTAENPMELMRPYLHQFLTAAYAKYDIMIWSATSMKWVELKMEQLGVLSNPDFKITALMDHLAMITVQSENQSRKKTFDCKPLGVIWAQFPEYYNEKNTIMFDDLRRNFVMNPQNGLVIKPFRKAHSNRHDDHELVKLTHYLLSIGDLEDLSKLDHGKWESFVDESVKRRKRS

SEQ ID NO: 218264 - protein, 346 aa, Zea mays
  unsure (1)..(346): unsure at all Xaa locations
  Clone ID: MRT4577_130650C.1.pep
VDPDASSRLNNPDSSKMDTNFLKEAYPLHTPNPSSVIETVYEPMALVTISPPFICSDGLSFAPEIRSKPGEMSDCEAEMVTCSNNFFGNAEQSAKLASSDDRPEAFTMTESTTNCGDEQLTDVKEPVASTAKEQLSKDIETMPDKKKGEGALFYEPPRFPGLDVPFISCDLVTSADLQEFSPLGIRQWMRSTMNVPTPLRLWGSPTHDESPDALKTAAESFPCTSSIMKKNXRSLLSPTPDERIEKKSGIAKGVTDISYMITATCSMNATNDEDIVTESAVCAKQPSLKHLDKKLEFSDINKENSDGASEQAKDAQNAQLVDEQHSSPNVVNPNTDLQDNIVSTFK

SEQ ID NO: 218265 - protein, 247 aa, Zea mays
  unsure (1)..(247): unsure at all Xaa locations
  Clone ID: MRT4577_130651C.1.pep
MQKKKKKKKKKKKKKKKKKKKKKKKKETKTNEKKKKEGPPGPGPXKKGAPGGGGARKPXGSPGRGPFRVGPLPTPPNRGGPRAPFPPXGPTSRGERPRRYPRGXGEPPPXPPPVGVWPNTPFSMGVSNERAPSQATSTKWGPPAGQGXTHPPYFRPSLPKICSIPARXLPSPXERDPPSNINSPPXGNAPSLTPSAPHGRPKSTPPPPTPPPPSPPSPPPPPPPPPTPPPSPLPPHPSXPPPPPFPP

SEQ ID NO: 218266 - protein, 68 aa, Zea mays
  Clone ID: MRT4577_130652C.1.pep
LKLAAPAPLMAAHDVSHDITHHASYRALGNHSKVPDWLITAGGGLLRSCPPGRISKSGSGRSAYIESR

SEQ ID NO: 218267 - protein, 74 aa, Zea mays
  unsure (1)..(74): unsure at all Xaa locations
  Clone ID: MRT4577_130653C.1.pep
RALPLTCXLKTYRTYRTXLPTYLXXNTTDXLTRXHTQXXVXDXXRERXXGHXRCXTEGXRTYQGTYIPTYGDRD

SEQ ID NO: 218268 - protein, 57 aa, Zea mays
  Clone ID: MRT4577_130654C.1.pep
FWGYGIKKSGEMSISLLYVPTCQVNGVVESKVAPLYGLKPPVVVVGVRQNVHVAHAS

SEQ ID NO: 218269 - protein, 46 aa, Zea mays
  Clone ID: MRT4577_130655C.1.pep
IIIKCEDYLFTIIICLRSSIHRQMPRGDKLKLLWFHVKRHIRAHLK

SEQ ID NO: 218270 - protein, 38 aa, Zea mays
  unsure (1)..(38): unsure at all Xaa locations
  Clone ID: MRT4577_130656C.1.pep
LGPCSVNIVCKIMPLYFPLMNPRLCFINAAPXLLAFLG

SEQ ID NO: 218271 - protein, 135 aa, Zea mays
  Clone ID: MRT4577_130657C.1.pep
KKINPPQKILNGGGKILKCRQPQKGASLPFTPPHWPWHLCGGPSRDHWGVYPRNGCSPPHFWGKSFFFFCPNPRWFSHPQKKFFFLTKKNLGALYLKKKKPCLPKENLVNQKRGGYPRNYPKGRGVFNQITGGPP

SEQ ID NO: 218272 - protein, 111 aa, Zea mays
  unsure (1)..(111): unsure at all Xaa locations
  Clone ID: MRT4577_130658C.1.pep
PNVHEMSGSXVCFDVITQTWSPMFDLVKDLEVFLPKLLLYPNPSDPLNGEAAALMMRDKTAYEQRVKEYCEKYAKAEDIGAATEEKSSDEEMSDEEEYASSDEAVPGHPDL

SEQ ID NO: 218273 - protein, 63 aa, Zea mays
  Clone ID: MRT4577_130659C.1.pep
WAWASVILFKRRLRLKFFLVPFMGVTFQKKSPLYPHYSSNGSRKILCLSAPTHTVLCLKIPVF

SEQ ID NO: 218274 - protein, 79 aa, Zea mays
  Clone ID: MRT4577_13065C.1.pep
KPKTYRGESYKCTAETHIQRTRLSPAFRTPSPSKHPSEGMPCYLPRYRYKTIAGCGFKQTDNAGVSSLISRHHLINEPT

SEQ ID NO: 218275 - protein, 92 aa, Zea mays
  unsure (1)..(92): unsure at all Xaa locations
  Clone ID: MRT4577_130660C.1.pep
FVSDLFLVGLFXQQYNQIATNTLARVALLTHAVCNVXKRVLVIRFSIIXFGNRLNIHCGIGTSIVITDVATSSXYINAKIDDDTRNKSALLL

SEQ ID NO: 218276 - protein, 59 aa, Zea mays
  Clone ID: MRT4577_130661C.1.pep
DRMASCIVIKELYTANVFWWMDIPWINNVYWGMGSIKSFQNLLDNIFLSLYEVTVDPAL

SEQ ID NO: 218277 - protein, 35 aa, Zea mays
  unsure (1)..(35): unsure at all Xaa locations
  Clone ID: MRT4577_130662C.1.pep
VLHDNLTSFXKITHYNIIHMISWLNPVIVLQSSMT

SEQ ID NO: 218278 - protein, 45 aa, Zea mays
  Clone ID: MRT4577_130663C.1.pep
RDLPTMDGVHNLSCLNYLILVTILMKIVSQCSDLSEANRWRYDNL

SEQ ID NO: 218279 - protein, 40 aa, Zea mays
  Clone ID: MRT4577_130664C.1.pep
ICYKNDYSRARGNCTALDVLVLWPILSYPTTSLKFIFISI

SEQ ID NO: 218280 - protein, 56 aa, Zea mays
  Clone ID: MRT4577_130665C.1.pep
SKSKLATGASANRTNRTTVRVFAHQGPVPLAHPARLTSSDGPPRSSLPNGRRDETF

SEQ ID NO: 218281 - protein, 41 aa, Zea mays
  Clone ID: MRT4577_130666C.1.pep
PHVYLMRRWSVPLVIFVWGCALFHSEGGYRQPMFGYAYLSS

SEQ ID NO: 218282 - protein, 103 aa, Zea mays
  Clone ID: MRT4577_130667C.1.pep
ISRRAQREPPRARRRGRGRCARTGGRRGPGGEGAPARPPPPWTAPAAASRRPRGRRRCPSTPATRAPAASASASPASPAAWATAGTPPPPRRRGRRRARRLRP

SEQ ID NO: 218283 - protein, 159 aa, Zea mays
  unsure (1)..(159): unsure at all Xaa locations
  Clone ID: MRT4577_130668C.1.pep
QWLAYCAGSQHKIQPVRRATLLTWCCYDSIRYWFHPHASDCRYPIYRIPTGPTLKDLXXACFLTFHCLATPRADCDPPTPACPGFGGINRCTAASGKLSLPTFGLAPYKFRASIWIPDGTQEQDRVTSLMQEADSWLRRIRVDHPDFRFFVSRSSTMWR

SEQ ID NO: 218284 - protein, 179 aa, Zea mays
  Clone ID: MRT4577_130669C.1.pep
MSSPRRRIETDVMKMLMSDYEVTLVNDNMQEFYVRFKGPAETPFEGGTWKVHVELPDTYPYKSPSIGFVNRIFHPNIDELSGSGCLDVINQTWSPMFDMINIFEVFLPQLLRYPNPTDPPNGEAAALLIREPKSYDAKVKEYVQKYASKEAADEAGAESEDDDELSSVASFGDDDDEQQ

SEQ ID NO: 218285 - protein, 86 aa, Zea mays
  unsure (1)..(86): unsure at all Xaa locations
  Clone ID: MRT4577_13066C.1.pep
GGCKDEFVAWKKCVXEAEXRRSQXDVVELCQDATAALRKCMDAHAAYYEPILRAERAMAADLESFQTEEAASHSAASALASEEGQR

SEQ ID NO: 218286 - protein, 62 aa, Zea mays
  Clone ID: MRT4577_130670C.1.pep
FFFCKDHPSKRHRTHTKATFLITQAATPHGAAANAKQDSASLIRLTATTHSPPTHNKATPNL

SEQ ID NO: 218287 - protein, 70 aa, Zea mays
  Clone ID: MRT4577_130671C.1.pep
THSSSSVRRRDVVIIGSSVNAILYRAMIGSFAVISINPSKDLQSDIRSIVTRPHMMRSEPIICKVLPNAW

SEQ ID NO: 218288 - protein, 62 aa, Zea mays
  Clone ID: MRT4577_130672C.1.pep
HYTGSPLSTLTTLSLVSSLEAEEIIRPTSLLLRYYSTTQKKTPFFHKIAKEKVKAGKGHQIL

SEQ ID NO: 218289 - protein, 66 aa, Zea mays
  Clone ID: MRT4577_130673C.1.pep
MAGTVTVPGSSTSSTPLLKDELDIVIPTIRNLEFLEMWRPFFQPYHVIIVHDGDPTKTIKVPEGFD

SEQ ID NO: 218290 - protein, 86 aa, Zea mays
  Clone ID: MRT4577_130674C.1.pep
SGSSLLLALRARVPPLPGSRLQCIIVSPLRLCPLVPVSPRAGNVPLSSSGPFYVALRRGTKILNMCPFLLCGPVPTMRARGSKGNS

SEQ ID NO: 218291 - protein, 520 aa, Zea mays
  Clone ID: MRT4577_130675C.1.pep
MEMVECSLVATLAPRPLPGQVRKALPRPAAFGARARLRVRSVGREEPLHPQQTAVRASGSDHGSRALGQAAVGFAAAAVVSLTGFSGDVSPLPTPPARAESLTVAFPVSKAREVNRVQRTLVETWGLIRETFVDPTFNHQDWDQKLQQTMVEIFPLKSADAAYSKISGMLSTLGDPFTRIISPKEYQSFRIGSDGNVQGVGVFINKEPSSGRLLVMDCIQGGPADRAGIHEGDELVEIDGKSVSGLDGEAAAQRLRGRVGTTVKLKLLDGTDDERGGGLRQKEVQLSREIINLSPLSTAIISHRTDDGHECKTGYVRLASFYQTAAAEMENAVKRMEDIGVQSYILDLRNNPGGLVKAGLDVAQIWLDGDETLVNTIDREGNVLPINMIQGHSLTHDPLVVLVNEGSASASEILAGALHDNGRAILVGHRTFGKGKIQSVTELDDGSALFITVAKYLSPALHEIDQVGIQPDIQCSPDILSLPRAPSLRENSNATNLEMDSCIMVAEQALEIQQSKGSAS

SEQ ID NO: 218292 - protein, 43 aa, Zea mays
  Clone ID: MRT4577_130676C.1.pep
SEDAPSDMIPLRAPQGPPLLSPCPTPTASHQYARINPRVHGRS

SEQ ID NO: 218293 - protein, 69 aa, Zea mays
  Clone ID: MRT4577_130677C.1.pep
FLTPTQAQIAPGSLNERTATHHTDQTCKTDHNKGQVSLQHPLSVPSKPPHIQHHHINHLHGAPLTFNGT

SEQ ID NO: 218294 - protein, 64 aa, Zea mays
  Clone ID: MRT4577_130678C.1.pep
TSSCTPSSPPPPNPISKNILPLFIPITTSTSPSPTSITNNQQNHMLYSTNTQILHIYIYTLCVN

SEQ ID NO: 218295 - protein, 98 aa, Zea mays
  Clone ID: MRT4577_130679C.1.pep
FPSRTLGMSKTKRRKKPFGGRNPTFYYKTKSAHAYMEKLLENPMGTSPCALWPETAHGVGKKRQLGISPGPFRVLKSGRTLIRSCTDLKPAPSAVPNI

SEQ ID NO: 218296 - protein, 43 aa, Zea mays
  Clone ID: MRT4577_13067C.1.pep
DSFQHFFSSALKQHTNIKQPKITRFPPLTNWYYCITLVKNFRL

SEQ ID NO: 218297 - protein, 63 aa, Zea mays
  unsure (1)..(63): unsure at all Xaa locations
  Clone ID: MRT4577_130680C.1.pep
LPFFSFYQHRTXLWDPVELLIFFLEHTREWRIITLKGREKRLQNTKNNHNTHTYKHNPNHTQR

SEQ ID NO: 218298 - protein, 103 aa, Zea mays
  Clone ID: MRT4577_130681C.1.pep
AGTPAGAGPELYCRVDELFSQRASLSWSLCSCREAKPLQAYSSYRIHLISRESVSHDEHNALIVRAPNHWMQQDSRDTVHCLLYRREPPQPYRLDTYKQPNPG

SEQ ID NO: 218299 - protein, 62 aa, Zea mays
  unsure (1)..(62): unsure at all Xaa locations
  Clone ID: MRT4577_130682C.1.pep
LPMCCWPGPSPCNTSPPVFLRLATLKRATFCSTFYFVSPAIYTSFLGIAQKIMPSTILXPRN

SEQ ID NO: 218300 - protein, 136 aa, Zea mays
  Clone ID: MRT4577_130683C.1.pep
KMCGFDEDAKSCKDSSAIELAETLNNWPQMNYYITLCKFVLMPLKYSTGYVLFVINHANKSMSVFNFTPTPEWCKDILLKRFWEAILLISKKYKAAYGVKRIRWSHDIYMWRHSIRPDAPIDIKGLNTGHFALHIM

SEQ ID NO: 218301 - protein, 84 aa, Zea mays
  unsure (1)..(84): unsure at all Xaa locations
  Clone ID: MRT4577_130684C.1.pep
FFFFFFFFXSTKKIDIIQPSYWFNTPPRSKKIFLTHYKRLFKIRFILITYSDNLTHTVEIAGPTHPQAIFALEKSPRTXPCYHC

SEQ ID NO: 218302 - protein, 98 aa, Zea mays
  unsure (1)..(98): unsure at all Xaa locations
  Clone ID: MRT4577_130685C.1.pep
FSMACKASELYAIHSGCLVFAGSCYSQSLLSEVFFAFKTCHHSGCLVGSPVCTSPGQRSIFYSAILFSFVVRSFSGFCGRDLVYVFEYXVWGVTPKSF

SEQ ID NO: 218303 - protein, 253 aa, Zea mays
  unsure (1)..(253): unsure at all Xaa locations
  Clone ID: MRT4577_130686C.1.pep
MAAAAAVRSKRRLLPHLYRLLHSTAAPSLDRFLRHASPVPRAADHSPFLRLPAARVSTLPTGLRVVTQSYPAATRMASVGVWVDAGSRFELPGTNGTAHFLEHMAFKGTERRPTANALEVEIEDMGARLNAYTSREQTTFFADVQGRDVPAALDVLSDILQHPRFPQQGIQRERGVILREMEEVQGMMEEVIFDHLHTAAFRDHPLGDTILGPTENIKSISKKDLQQYISTHYTCPXRMVVSASGAXDHDEGV

SEQ ID NO: 218304 - protein, 64 aa, Zea mays
  Clone ID: MRT4577_130687C.1.pep
IVGCPRDFSSDRVYACVGIFLSFWICVYGRGVIIRQKYKKNPLQFFGFVEKEKKKGERSIEDKS

SEQ ID NO: 218305 - protein, 115 aa, Zea mays
  unsure (1)..(115): unsure at all Xaa locations
  Clone ID: MRT4577_130688C.1.pep
SPPPRRLVSSRVGLFSGRSRLSPPALCGVSSVRRGWLLPPWLRGRLPLPSGSGSAPAPSTVSGSAPPSSSWSAAPPVGAQDEGGVLAAVPGLLWXRSWCVXVGVWSLLWGNXWLP

SEQ ID NO: 218306 - protein, 80 aa, Zea mays
  Clone ID: MRT4577_130689C.1.pep
RTSRGGRRVPSSRNRNTWSLIFLTTSGGVACAGVGADGQRLLCTATAAAEKTGPPVPIRRLRQLCRAGRHDYIYSTFAPL

SEQ ID NO: 218307 - protein, 117 aa, Zea mays
  unsure (1)..(117): unsure at all Xaa locations
  Clone ID: MRT4577_13068C.1.pep
MAMAAPVEVGTQGTVGSLVLREVEHFRRMEVAGGHGKKSSKXCSRRRQPPEQRRQEAQAEEGRRRXVGNASSFLPRMCSSAEVVEDPAGSGRRERPSRVRYRPLGDDGDGDALPQQD

SEQ ID NO: 218308 - protein, 42 aa, Zea mays
  Clone ID: MRT4577_130690C.1.pep
FSPVFPPPPLKKKKKKKKKKKKKKKKKKKKKKKKKKPRERRR

SEQ ID NO: 218309 - protein, 70 aa, Zea mays
  Clone ID: MRT4577_130691C.1.pep
NFPPPSPKKTGRTCFYWTGGTGGATPRGINQKGRGQGNSSRKIYPSHFLKFKEPRKRGGEKKKGAPRARG

SEQ ID NO: 218310 - protein, 95 aa, Zea mays
  Clone ID: MRT4577_130692C.1.pep
FFFFFFFFFFFFFFFFFFFFFFFFFLTEGGGKPGKIYPVFGPKIKYPPPFPQKNGGDLHLLYMGDGGGNPQGDQPKGAGARKQFPGNLPLPFFKI

SEQ ID NO: 218311 - protein, 70 aa, Zea mays
  unsure (1)..(70): unsure at all Xaa locations
  Clone ID: MRT4577_130693C.1.pep
KKNITKNTNNHSLHNTFNTYNXLLHSNIILDRKTHSFPKFNFITFYTHEAIPNTIXNINCKELYNLNITF

SEQ ID NO: 218312 - protein, 121 aa, Zea mays
  Clone ID: MRT4577_130694C.1.pep
EDEEPARPVLREHQPELLGGGRLGPTAMVGLWLEVGGHQLSPAGGGLLVGCVFSPFLGRERHPAVVGQNLVKLQKGPEVFQARLGTCTFLAGDFLRLAGLRPFTLMPLPLGPAVPAFLPSL

SEQ ID NO: 218313 - protein, 352 aa, Zea mays
  Clone ID: MRT4577_130695C.1.pep
MNMGGVSPSTVRCKHCSTQLTVCPGERAIQCTQCCGVTRIRRRRVQRPAAAPPTTGFPRARGKKRALLIGITYAGTRRGCGQLRGALNDVKCMRQLLCQRFAFPSDCIIMLTDDQKDPFRLPTKDNIRLGMQWLVEGSSEGDSLVFHFSGLGAQVADDDGDELDGYDEAICPMDSFQKGPILDDEINETMVRPLVHGVKLHAVVDACHSATVLDLPFCCNMSRSGSWQWKDESPPSGAYRGTSGGKAMLISGYSDGKAKSSVASAQKPEACATMGAMTHSFITAVEREPQGVTYGRLLTSMKAIMTNSGGCAVQGPIGAGAAARKDVNFSGVQKPNLSCSEMFDVYRKPFAL

SEQ ID NO: 218314 - protein, 99 aa, Zea mays
  Clone ID: MRT4577_130696C.1.pep
QEKSHDVASTPTKLFISRELHIISVNKLMIVHYPIGTIPISSYLPSINLRSYIPSSHSSTSYPPILLIAIMTTLIAILTTILIDTTFTSTDSNHITPLL

SEQ ID NO: 218315 - protein, 71 aa, Zea mays
  Clone ID: MRT4577_130697C.1.pep
LAIIMCTLESQSKFILSPSHVSCLDDNWLASYMSWQSEKGSTDRKGDEVDSPRRSFMVFSRDTETNEKSNY

SEQ ID NO: 218316 - protein, 59 aa, Zea mays
  Clone ID: MRT4577_130698C.1.pep
ASLIRCLTPCIYNGFLVSPQQGYYKVNDLNKRYKRVVYLLCRCRSFLVVYNHALLYVFY

SEQ ID NO: 218317 - protein, 79 aa, Zea mays
  Clone ID: MRT4577_130699C.1.pep
RFLLIIPLFVLIQISWTKKHTKATSKSNGYFVLLLLIRRALQLAVRVRLGGPGRTGVGGCPPGRAAVSAERRAGISVAV

SEQ ID NO: 218318 - protein, 86 aa, Zea mays
  Clone ID: MRT4577_13069C.1.pep
KKFRDALSVRQLCVVKARFGSVTRRTTMMIYYKNVVLLATVVHSVVFVTGARVDILLAVCNPIFPGNLIHMVEGLTGLHNLECSLA

SEQ ID NO: 218319 - protein, 50 aa, Zea mays
  Clone ID: MRT4577_1306C.1.pep
ELLEGNVLTIGKAARSERRIGHHLFVSTLLIVHIKTRLKRNGRVGGRLGV

SEQ ID NO: 218320 - protein, 128 aa, Zea mays
  Clone ID: MRT4577_130700C.1.pep
YYVKLGELPFNRRGQISLPVPGTTGSLLKSRFAGLPLSTLQGERGPHFAFWGIYTAHWANWASLPRASNVNAGPEHLVKTWEAPSCSHWCAGHKLSELLGPSARPEPMLMVDFSSSYLTLKGCRCSSL

SEQ ID NO: 218321 - protein, 137 aa, Zea mays
  Clone ID: MRT4577_130701C.1.pep
MASSYMNKNADRQLTRRQAYLYRSKQNALGACMGIVRGLRALYLFVLLTGEEVPLVAGTNTTCELLGPGHDGPLVSGLVVTVGSKLWRWVAGSLRIGDLRRLGALCSEPHGCLEEDGTRAVDFGDDRLGLDQGTGRV

SEQ ID NO: 218322 - protein, 82 aa, Zea mays
  Clone ID: MRT4577_130702C.1.pep
STSTFWIQEEHVWHDLCQRKSHEHLEELEVQHTLLPLTIQDEGTYNLAIRLRGGMQIFVKTLTGKTITLEVESSDTIDNVKV

SEQ ID NO: 218323 - protein, 124 aa, Zea mays
  Clone ID: MRT4577_130703C.1.pep
MARGGHLSALCLPPRLGATPPCCGRPAAVRASSCCARPLPPGGARRRGRLLVVRAGGPPSTNALILAFVLPLSLFVGTLVTAARVADDLDDRFLRQMEINRAILEENEASSDDEGAGEEHDDIN

SEQ ID NO: 218324 - protein, 69 aa, Zea mays
  Clone ID: MRT4577_130704C.1.pep
LHALEQAPMFLIYWLAPQPMSSPGEPRFSFLSNCSVTSNAMSAIYPPSLPLSCLLHERWPLWMICDDGN

SEQ ID NO: 218325 - protein, 153 aa, Zea mays
  unsure (1)..(153): unsure at all Xaa locations
  Clone ID: MRT4577_130705C.1.pep
TIYHVKSHLQIRRLXSEDKKAQLGKGSIDSSKNKNLQVAEALRMQIEVQKQLHEQLEVQRQLQLRIEEHARYLQKILEEQQKAGNXTKSSNQSXATKSSPESTSDERTESEVDTISPRPPKNRNPGVDAECKSPGRIKRTKVQADLENEGLCS

SEQ ID NO: 218326 - protein, 85 aa, Zea mays
  Clone ID: MRT4577_130706C.1.pep
LSPSSRFKQNLSLHGASTAGGTTRSAAAGGSTWTWRWSLSYAGQARTILCKRPHLSPTSYASTSNVDSSAGAVNDRWVELLKKKE

SEQ ID NO: 218327 - protein, 58 aa, Zea mays
  Clone ID: MRT4577_130707C.1.pep
SFSKGIVVRLDIGVGAHQGNDVEVIFEGRLVSMLTLPLLGQLRDIREIRVRKRVIQDR

SEQ ID NO: 218328 - protein, 107 aa, Zea mays
  unsure (1)..(107): unsure at all Xaa locations
  Clone ID: MRT4577_130708C.1.pep
REDKXXXRSXXGSRKPGAXXXXGAGPPPRXDQXXASHPGGRXXXXXRXXAGXHXAXKXXHQEPTEEKPTXRXRKXPGXXPXDAXGHRTXXDGGTKAXXQGGQTGEEX

SEQ ID NO: 218329 - protein, 203 aa, Zea mays
  Clone ID: MRT4577_130709C.1.pep
LEAGREICSPSAVKASGTGRKRRRTPAATEPSSVALRRRAGVIQLVDAWRRDPQCEGNLHDVVGPNLWYGDRTRLTPKQEEAALGLSRACGSGIPAYICTMKKSNVVKRQMVFSRQFSKRHIFGRLGTYGCETRIFAGRDLFGSKLNFSMIHGELRLLGGWPLFVKSHRIEAGHVCAFMFQEEEEGELSLRVHVLGTMPVPTI

SEQ ID NO: 218330 - protein, 66 aa, Zea mays
  unsure (1)..(66): unsure at all Xaa locations
  Clone ID: MRT4577_13070C.1.pep
PLRSNGXTNPLAWWTHSREEKTTGGSPMDGVGQKQQXCPDDAIGKRAXQQTLALITLPECREVTRP

SEQ ID NO: 218331 - protein, 88 aa, Zea mays
  Clone ID: MRT4577_130710C.1.pep
GFPIPERRVIVLASQCGSHVAPVSLSPSAPGQDAAPVTRRISAPSSASIWKCAALRECPCSGATAALTAGPLCRAVNERRHQAWRLGR

SEQ ID NO: 218332 - protein, 59 aa, Zea mays
  Clone ID: MRT4577_130711C.1.pep
KSKGEQFSRRLLNINRFQSLVSVASANSAYVKQVIVQSIFRTSVRLQRLSRFSPLRDHK

SEQ ID NO: 218333 - protein, 81 aa, Zea mays
  Clone ID: MRT4577_130712C.1.pep
PAGRHIFGRLGTYGCETRVFAGRDLFGSKLNFSMIHGGLRLLGGWPLFVKSHRIEAEHVCAFMFQEEEEGELSLRADLVIW

SEQ ID NO: 218334 - protein, 58 aa, Zea mays
  Clone ID: MRT4577_130713C.1.pep
LYDQRGSNAYFLGYWFSNIGFRMYILHDHNDFELQMRLYSAETVLYNASIRAFLPKSA

SEQ ID NO: 218335 - protein, 178 aa, Zea mays
  Clone ID: MRT4577_130714C.1.pep
MEAFAPDKICGSGRSAVTTQERVMEAQSSTCFSKVVGPNLWYGDRTRLTPKQEEAALGLSRACGSGIPAYICTMKKSNVVKRQMVFSRQFSKRHIFGRLGTYGCETRVFAGRDLVGSKLNFSMIHGELRLLGGWPLFVKSHRIEAGHVCAFMFQEEEEEEGELSLRVHVLGTMPVPTI

SEQ ID NO: 218336 - protein, 237 aa, Zea mays
  Clone ID: MRT4577_130715C.1.pep
IGYLEAGREIPCFTSFLIMSSYSRSLLRACLVSSLSLLQPVSAFVGSATVSSTVLVIARDATSALNSASLGLQGYGIPYETLVVPQAGIANLPLLNASATNGNYGGIVVVGEVSYNYDNSYRSALTTDQWNQLYAYQTNFGVRMVRLDVFPTTEFGVVSTGGSLDDQPVTFTNTSGFPSANLKTGVPISIASIYHTPATITNSSIAWEFASFSNAGTAAVINQIVHASRWHGFFRLR

SEQ ID NO: 218337 - protein, 136 aa, Zea mays
  Clone ID: MRT4577_130716C.1.pep
IGYLEAGRGASPPRSHSTTDCQAAKSGGVGVRSPHDTRSVWDTTTHTYPYSSPQHTTRDDTILAGVSLHAPISAGRAEGRLLLYSPLVTQVMNVRSPFPSLSFPLLSYPLGPRTRIENPTHPCNSTATGARNPQSW

SEQ ID NO: 218338 - protein, 130 aa, Zea mays
  unsure (1)..(130): unsure at all Xaa locations
  Clone ID: MRT4577_130717C.1.pep
MSPRTLFFPVIEQFSWEDSSFASFFPFPRFHEKMEENPXTNGGFLILHTSNLSFQVEVSSRGYLVFQDQLTEASSFCCNSVGLLLVTTGCIVYFWNMLLCSSFFLGVSSTIPTLXPCPSSLLALPTSGPL

SEQ ID NO: 218339 - protein, 55 aa, Zea mays
  Clone ID: MRT4577_130718C.1.pep
PKKTSTKLVNKLIFSILQHIIMVTIISSGPTNLTHLTIHILTSSYTPTSQSINPP

SEQ ID NO: 218340 - protein, 176 aa, Zea mays
  unsure (1)..(176): unsure at all Xaa locations
  Clone ID: MRT4577_130719C.1.pep
MAEYHGFYRCFVCGLDYHSVHHSFHNYFKTYGDNLXSIACIHRYTHLSCGFFFTTFSTQDAMQNAIEGMIGRQLISRNITHTQAHPRGGRGGGDGGGHGGGRYGGGYRRDGRRDYGGGYGYGGGYGGYGGGYGGYGGGYRGGNYGNCYGNCNNYCENSALATYPASYPVGYPIAYR

SEQ ID NO: 218341 - protein, 84 aa, Zea mays
  Clone ID: MRT4577_13071C.1.pep
MKTCTYTKKKKKKKKKKKKKKKKKKKKKKKKKKKKKKKKKKKKKKKKKKKKKKKKKKKKKGGWFLKIKCYASKNRNCNFFFLGP

SEQ ID NO: 218342 - protein, 86 aa, Zea mays
  unsure (1)..(86): unsure at all Xaa locations
  Clone ID: MRT4577_130720C.1.pep
RPRTLGRHAWGGGEAINSVEGMTEDCLGWAGLAYEHVLGEQKYTXVENDKNPDCCSIGIKGPNDHTVAHIKAARPDGVTSVKNTAD

SEQ ID NO: 218343 - protein, 170 aa, Zea mays
  Clone ID: MRT4577_130721C.1.pep
MAAVTTATAAYTEGLLNAKLTQDGCIVCPSTDSTFDLRTGEIKEWYPKNPVLRALTPALRKLFTYRVKTDEENIYISFSGADGAGSAEIIFSGKAQPGVTASDVNVEEVRMVVDEDVGGFGFTSDNELINGKAAIIGFLLLIDFELLTGKGLLKGTGFLDFIYAVSGAFN

SEQ ID NO: 218344 - protein, 184 aa, Zea mays
  Clone ID: MRT4577_130722C.1.pep
MCSGPRKPSTPPPVAAAPKDSAAMASLLLELAAADNVVEFRRVVEEEKASLDAAGSWYGPSAVGLGRLAAESRTPAMVAALYGSKAVLAHALSVAPGEACRASDTDGATALHLAAAGGAANAVAATHLLLAAGASTEALSVSGLRAGDLLPRAAGVSEKPLRLLLKSPAVSPSSSPKKSASPPA

SEQ ID NO: 218345 - protein, 222 aa, Zea mays
  unsure (1)..(222): unsure at all Xaa locations
  Clone ID: MRT4577_130723C.1.pep
MCSVARLAFVLALAIAASSIEVAESRDFNIFAQGSLPDATKGSSGLAATSGKLCQLCEQYSSEALLYLTQNETQTEILSILHHECASLAPLKQQVSMVTPEKFCESMHLCKKGMKISLPTREGTXCGLCHHVVVEILIMLKDPNMQLEVIDLLTKTCSKAQNYEQQCKRLVLKYIPXXILVKGQKFLETTDVCSVIHACKAGTQASMEGMPLSAMFVKVMRI

SEQ ID NO: 218346 - protein, 109 aa, Zea mays
  Clone ID: MRT4577_130724C.1.pep
LARAFSRERGSCCASLEFRELSTESHMCVCCSFLGIKNAIEVYLTTLRSLGFVSVRFSQLCLYLNITMLVCEVRKGHEKVTFAVLLIHLSVAAACLPQSFHRILMKLEK

SEQ ID NO: 218347 - protein, 76 aa, Zea mays
  unsure (1)..(76): unsure at all Xaa locations
  Clone ID: MRT4577_130725C.1.pep
NNSVSSIPIAVGNAPTYLXKQLLQQIVPPLTQIAVANPGAYLQQMLTFNQVTLSNSVAYLLQGQQLLNPLDVGHPL

SEQ ID NO: 218348 - protein, 276 aa, Zea mays
  Clone ID: MRT4577_130726C.1.pep
MAAVTTATAAASSSSFLHRRSPACLRATLRAAPRHCRNSSSRLACRAAEVSGAESSSAAAEGAGGGGGASWVPVVPLAALPRGERRVIVQDGEEILLLWYKNQVFAIENRSPAEGAYTEGLLNAKLTQDGCIVCPSTDSTFDLRTGEIKEWYPKNPVLRALTPALRKLFTYRVKTDEENIYISFSGADGAGSAEIIFSGKAQPGVTASDVNVEEVRMVVDEDVGGFGFTSDNELINGKAAIIGFLLLIDFELLTGKGLLKGTGFLDFIYAVSGAFN

SEQ ID NO: 218349 - protein, 84 aa, Zea mays
  unsure (1)..(84): unsure at all Xaa locations
  Clone ID: MRT4577_130727C.1.pep
RPLEAAGGPLPLQEHRPQGTAVFSAPTAGRRGTAADPAPPPAPAPASPSPARRWIPPRGRICTRTSSPSTPAASGSPTXTPSTT

SEQ ID NO: 218350 - protein, 73 aa, Zea mays
  Clone ID: MRT4577_130729C.1.pep
TVLLPYFLKLCNCYAPRNSDLISVGFRRGLISNQMIPIYIFTFLPPDFLKLCIWNSLSNADVHFLWLLDRRNS

SEQ ID NO: 218351 - protein, 89 aa, Zea mays
  Clone ID: MRT4577_13072C.1.pep
KRAAKGIRRRPRRVHVRRARDQFLRAVWRLPSSKGPQHSYLSNKSLYRRRSKPNNHLYCVEGAGVDSGQPPLLLYDAPLSSPSCVLRTR

SEQ ID NO: 218352 - protein, 62 aa, Zea mays
  Clone ID: MRT4577_130730C.1.pep
SRLSSSARFHIVEPDHGHTKLRLSEQGSRSNSKDGNSYCWCWVIGPYRSGKIFSPQPASLLI

SEQ ID NO: 218353 - protein, 62 aa, Zea mays
  unsure (1)..(62): unsure at all Xaa locations
  Clone ID: MRT4577_130731C.1.pep
NPERAVEYLYSGIPEQAEAPPVTREPASAQPAXPPAAAPQAAQPASVPSSGPNANPLDLLPQ

SEQ ID NO: 218354 - protein, 164 aa, Zea mays
  unsure (1)..(164): unsure at all Xaa locations
  Clone ID: MRT4577_130732C.1.pep
MMAAAGAGPSRTTXTYTDTKRRDDXQGXNIDAARAVADAERTXSLRPRGMDKKIXWATSRXDVMITNDGANILSRMVLLQAAARMLTKLYRLQDAGDDDGTTTVAVLAENLLRRAQXILSVEAHPTDAIDDAHRLMTRADXILHRMIIHIELSDRECLAEEHIH

SEQ ID NO: 218355 - protein, 41 aa, Zea mays
  Clone ID: MRT4577_130733C.1.pep
SLFPAAVSFVPMWRRLSVFVPVSFGFHRVSDHTWRMWNITI

SEQ ID NO: 218356 - protein, 202 aa, Zea mays
  unsure (1)..(202): unsure at all Xaa locations
  Clone ID: MRT4577_130734C.1.pep
SRXRPGHNIINRKIVGSRSFLYPAPAFYSIPLGAPPTDRPGPPRPVDSADMPLHLPPGVVPGHRCRARGRTAARRLSAGATACPRGRATRIAWTLRRTSRRWRVMLRPWGERCRPSRAHCRKKEALRCVYHNTEVADQDHGPQDVLQSLRPRGGTVYRQQHPRDHVTQAQQMTQCPEMLEGSSKTLEPRINAATPARRSQAA

SEQ ID NO: 218357 - protein, 100 aa, Zea mays
  Clone ID: MRT4577_130735C.1.pep
NFPAKGGGFYPLKTLWGRNPGPLLLKAGGFSRPTTNFFPLSRTNSAYVGVIPPLGGFPPQRVRFLPNDNHWLETSFTGRKPNGQKRASTTFGALKTKGGG

SEQ ID NO: 218358 - protein, 627 aa, Zea mays
  Clone ID: MRT4577_130736C.1.pep
MRDARLRLNPEKCVFGVRQGKILDYLVSHCGIEANPTKIQAIINMTPPQSTRDVQRLKGRLAALNRFISKSAERSLPFLKTLCASPYAVSAALVQEQDREGTTRQCLVYYVSEVLTTSKCNMTELEKIAYAVVMASRKLRHYFEAFKVRVTLDRGLGELFRNMEASVRIAKWAAELSRCTNNIAEYKAVILGLRKLRALGVTACIVKIDSKVVAGQVEKEYSAKDPALMQYLTAVRSLERQFKGFTLQHVDRTRNEESDALAKEAARGYYHLSDVNEAKRLKHRSRDFILVGGQLYKKGISQPMLKCVTETEGIQILREVHSGTCGSHSGPRALVAKFTKLIAHTWPLQRWGLDIVGPLPTAQGNLKFTFVVVEYFTKWIEARAVSTIMLKTAQKFFWQNIVCQFRVPSELTVNNGKQFDSQDFRDFCLSIGTKPAFTSVYHPQSNGVVERANGKIFTTIKKRLLDNKKGKWADQLPEVVWALNTTECRATGFTPFRLLYGSEAMTPQEIKHMSPRTSTSAVPDVDEPTSKDLIDGDRVLALQALNKYQAQTKARRDNAVVPREFNKGDLVLVWTTRTESRGQLEPKWEGPFIVKMKASPSAYRLSTPSSEDLEHSWNIDNLRKFFV

SEQ ID NO: 218359 - protein, 351 aa, Zea mays
  Clone ID: MRT4577_130737C.1.pep
MRDARLRLNPEKCVFGVRQGKILDYLVSHCGIEANPTKIQAIINMTPPQSTRDVQRLKGRLAALNRFISKSAERSLPFLKTLCVVMASRKLRHYFEAFKVRVTLDRGLGELFRNMEASVRIAKWAAELSRVPSELTVNNGKQFDSQDFRDFCLSIGTKPAFTSVYHPQSNGVVERANGKIFTTIKKRLLDNKKGKWADQLPEVVWALNTTECRATGFTPFRLLYGSEAMTPQEIKHMSPRTSTSAVPDVDEPTSKDLIDGDRVLALQALNKYQAQTKARRDNAVVPREFNKGDLVLVWTTRTESRGQLEPKWEGPFIVKMKASPSAYRLSTPSSEDLEHSWNIDNLRKFFV

SEQ ID NO: 218360 - protein, 159 aa, Zea mays
  Clone ID: MRT4577_130738C.1.pep
PVDPAFAPLPARCPACLPRMRAAALPGCSLCWVSISRARLPAPPSVPAPVVPRSSNCSALIPVVLRSSLCPCCAVGSWLPGSCRVCLGAAPIGRLGVKSPLRPGFWHVSPRRHPKRRNRLTLYDVHQELDKRFEQVVLPSSSLNEAGRHSYAGHASPSR

SEQ ID NO: 218361 - protein, 384 aa, Zea mays
  Clone ID: MRT4577_130739C.1.pep
MRDTRLRLNPEKCVFGVRQGKILGYLVSHRGIEANPTKIQAIINMTPPQSTRDVQRLTGRLAALNRFISKSAEWILPFLKTLHGAKDFAWGPEQVAAFASLKQHLSDLAILTSPEPTLPLLLYIAGSPYAVSAALVQEQDREGTTRQCPVYYVSEVLTTSKCNMTELEKISYAVVMASRKLRHYFEAFKVRVTSDRGLGELFRNPEASVRIAKPNPPVPSELTVDNDKQFDSQDFRDFCLSIDTKLAFASVYHPQSNGVVERANDKIFTAIKKRLLDDKKGKWADQLPEVVWALNMTECRATGFTPFRLLYGSEAMTPQEIKHGSPQTSTSAVPNVDEPTSKDLIDGDRVLTLQALNKLKGKCALRPFLSILVIECQHKWIYAK

SEQ ID NO: 218362 - protein, 133 aa, Zea mays
  Clone ID: MRT4577_13073C.1.pep
FPWRRVPRRPSSLPSSLVQAPPSPPLFCSKQRPAEPRPLAQPYLPHGALAGARPPCWTPLLTLVAELSHGRQPSSSGCPSQGVCSCPTMDAPLPFAARRGQAWRPNPQVAPPMTVMVSSVIGGKIPRNPKVMK

SEQ ID NO: 218363 - protein, 123 aa, Zea mays
  Clone ID: MRT4577_130740C.1.pep
VPGPVFWGALGFPILPKKMAPPNDVILGGGFPNGPALSFVLCLARAPPIFAPDFFFHAPGKSNLVGAFKVYFLSRFLSRLKNPFPAGKGMVPVGGLEGFPPARFLVGKPVFLRAGGFFWGSRS

SEQ ID NO: 218364 - protein, 79 aa, Zea mays
  Clone ID: MRT4577_130741C.1.pep
LDRKKKKKKKKKKKKKKKKKKKKKKKKKKKKKKKKKKKKKKKKKKNGGGLFKDPNFSARVWKIIFFFLGPLNIKSWPVL

SEQ ID NO: 218365 - protein, 110 aa, Zea mays
  Clone ID: MRT4577_130742C.1.pep
SPFGSAPPAGPPMPCGGSPPGGPARANLGSPPRCAALFPFRGRLPPGCFFWGGGPLAGFYLIFKVGSRVRHWVDPPGCGVVLGPRVPRGGPFALGSPGRKGGLCSGKLTC

SEQ ID NO: 218366 - protein, 38 aa, Zea mays
  Clone ID: MRT4577_130743C.1.pep
SRRDLWPRLWELRRVRVMRGGPDTGGHERLPSGLAVGG

SEQ ID NO: 218367 - protein, 130 aa, Zea mays
  Clone ID: MRT4577_130744C.1.pep
LVAFSDPAMRKRSRIQIPNIKQKCTLDGDRIRPNPLDRKPGGLQILVCKGMVSSGKQRDCYNCNITRVPCWIAGRLAARGTRASKAKEKKKKKTSCSPDARPAPAESVGRESAAHRRRPRGGRRRRWPCL

SEQ ID NO: 218368 - protein, 67 aa, Zea mays
  Clone ID: MRT4577_130745C.1.pep
FEVIKKPPLFLSFLYFLWEHIYDVINWQNLYGIYFFQLLKIPGLSTFGAPFVFNVAKWFSFGPFRIF

SEQ ID NO: 218369 - protein, 285 aa, Zea mays
  unsure (1)..(285): unsure at all Xaa locations
  Clone ID: MRT4577_130746C.1.pep
SRIRGRDPPPPXPPGERYRRRSPPPPSPRHQRRPRDPPPPQRKRRSSELPPPRRYEEDPLLNGFAPAAERRSRGDILLEAGRLAAHYLVAKGLLSEHLLLAREDPNHNPIYRPEPPAPAPAPPPTLAPSSYGRKRDEDDGPRWRRSGSGAEDQGRGSRWDDDREAKRSGWDRRSHSFDGRRKCNDDGGGDADRSGRRTRDYDESKRPPMSRSYSHNDRWASADARVDRRRRSRSRTRSYYSGSRRDPDLLAGTRDLDRTKVPDSGIVPAAGGDGGVHDADADGTR

SEQ ID NO: 218370 - protein, 124 aa, Zea mays
  unsure (1)..(124): unsure at all Xaa locations
  Clone ID: MRT4577_130747C.1.pep
FXYFFFFFFLFFVFFFFITFSFFFRGQKQGNYRYNKTGNGGPRNTIPPAGDRNPNDFQAPAGPSKKGGLFPLGKRKPNLPPPGSLIQWAPRGKNRAWGYCVTKKTEPPHPGKKKPQNSMDNKFA

SEQ ID NO: 218371 - protein, 363 aa, Zea mays
  Clone ID: MRT4577_130748C.1.pep
MEPDAAQNPSPSPVPPPISAYYQTRAEHHAVVTSDWLAHAAAAAAAFPGADTADAAPPPSPGGGGVIEEFNFWRRKPEAAEAVAAIMALAAVIRSSRATTMMELEIELKKASDKLKSWDATSISLSAACDLFMRFVTRTSHLEHEKFDAAKSRLIERGEKFGEISLKARKTIAMLSQDFIYDGCTILVHGYSRVVLEVLKLAASNRKLFRVLCTEGRPDRTGLRMSNELAALGIPVKVLIDSAVAYSIDEVDMVFVGADGVVESGGIINMMGTYQIALVAHTMDKPVYVAAESYKFARLYPLDQKDMTPAHRPIDFGVPIPIGVEVETSARDYTPPQYLTLLLTDLGVLTPSVVSDELIQLYL

SEQ ID NO: 218372 - protein, 473 aa, Zea mays
  Clone ID: MRT4577_130749C.1.pep
CLNAQHGSVYKLAFGPKSFVVVSDPIVARHILRENAFCYDKGVLAEILKPIMGKGLIPADLDTWKQRRKVITPGFHALFIEAMVRTFTKCSERTISKLEELTESEGREQNSTIVDLEAEFSNLALDIIGLGVFNFDFDSVTKESPVIKAVYGTLFEAEHRSTFYIPYWNLPLTKWIVPRQRKFHSDLKVINNCLDNLIKNAKETRQEADVEKLQQRDYSSLKDASLLRFLVDMRGADVDDRQLRDDLMTMLIAGHETTAAVLTWSVFLLAQSPTRMRKAQAEVDSVLSNGAITVESLKKLEYIKLIILEALRLYPQPPLLIRRSLRPDKLPGGCNGAKEGYEIPAGTDIFVSVYNLHRSPYFWDRPNEFEPERFSVPKKDESIEGWSGFDPDRSPGAMYPNEIIADFAFLPFGGGPRKCVGDQFALLESTVALALLLRKFDVELRGSPDEVEMVTGATIHTKNGLWCRLRRRT

SEQ ID NO: 218373 - protein, 171 aa, Zea mays
  Clone ID: MRT4577_13074C.1.pep
MAMKRPARSDPHLPPEEAARVEAEVRSYFDSVAPRRPAKPPRSDPSVDTFAEPAAVDAGDHDLPELRKLRDLEAKPQKLVLDGGGGDVDGGEDYVETRYYDGLIGIDKQHHTTGTGFIKVERSNGSTFSVMTNGYPPASSVRCTSNPATNDWIPSSESIIPASNKPSRSDS

SEQ ID NO: 218374 - protein, 247 aa, Zea mays
  Clone ID: MRT4577_130750C.1.pep
MGKSSKKSAAPTVVAPAAVLTKGKAGKKREADDEIKKAVSAKKQKAAPAKAVPGPKEAAKKAKKQPPPKKVESSSSEEQSSESEEEEVPKKTAKPVKHESSDDSSDDSSSDEEPAKKPSAKPVTPAASNGSKKGKPESSSSSSEDESDDDEKPAALVKKTPVIESDSSESDSDDSSDEDVPAKTPAAAAKKVDSSDSSESESESEDEEKSKKAAQATKIAPAAAKRKEEPSDSSDSDESDEEPPQKS

SEQ ID NO: 218375 - protein, 62 aa, Zea mays
  unsure (1)..(62): unsure at all Xaa locations
  Clone ID: MRT4577_130751C.1.pep
GIFHNERWLSTRDGWMDGWMDGWMDAQEVLAAISIRGXGHGXDGGGGAWPVVGDVVELAVSP

SEQ ID NO: 218376 - protein, 88 aa, Zea mays
  Clone ID: MRT4577_130752C.1.pep
RELVQQRRRPHRPSLPTGGIKNDQWDTRYTLAPRDSVGAYTRNESVTLARGVTNLPLVLFALLARHRGTLSTRSCKSTCCIHVCYYSA

SEQ ID NO: 218377 - protein, 85 aa, Zea mays
  Clone ID: MRT4577_130753C.1.pep
CRPKTHLLASFGDQLKKHDTKGVDMLFSLTLGVYVHVNPQDNNLEQYNHMKAIVDIPGRTSLHNVCASMDTRGYENITRHFFTLS

SEQ ID NO: 218378 - protein, 82 aa, Zea mays
  Clone ID: MRT4577_130754C.1.pep
VVWPRRQRTSDAHPRHALQPKMLRGGGQPGPDVRHGLLRRAGLARGCGGLRDSQAARTPREGCCAERSGRCARRCYRWSRHV

SEQ ID NO: 218379 - protein, 84 aa, Zea mays
  Clone ID: MRT4577_130755C.1.pep
SLYPSQEEGRTGPCMANASCRICIWMHIFMSLQKVCYPINRNVHSVSRATGHALQRNGEMVVSSDSQWSFSPQIFYDSSFLSGP

SEQ ID NO: 218380 - protein, 55 aa, Zea mays
  Clone ID: MRT4577_130756C.1.pep
EVFFSFFELGNHKFCLPKGCCVTPRYGLEIMMNFGSYPANLCIKPPFHSLKFVFK

SEQ ID NO: 218381 - protein, 42 aa, Zea mays
  Clone ID: MRT4577_130757C.1.pep
RALFLMFFQKITPSKNIFDIKISCLRQTDHAVVSTAGGNHPK

SEQ ID NO: 218382 - protein, 56 aa, Zea mays
  unsure (1)..(56): unsure at all Xaa locations
  Clone ID: MRT4577_130758C.1.pep
GTPPPPGGAGHTRQSTXLXAPSVWCXXVNRAHXKPLLXPIILXLTLSKKKKXKTQS

SEQ ID NO: 218383 - protein, 704 aa, Zea mays
  Clone ID: MRT4577_130759C.1.pep
MAEYGERYQGNGDQATAEGGYAQTEYAAGAGGSPPSDSNPSVFSDHADGRSSQPQHETQSHDSGSSKSQERDRERDKGKDRERGRDRVREKERGRDRDKDRERGDRDRDRDRHHRDRRERSEIREHRDRSDDRDRRRSHDSERRRDRDRDGHRRHRSRSPSKGRDRDRRSSSHSRSRSKSKRVSGFDQAPTQQAVPIVAAGVIPGQLPGVTAPIPGVGVLPNLYNLAAGQFNPHVIQPQAMTQQATRHARPVYVGGLPPTANEQTVAIFFNGVMAAIGGNTAGPGDAVPSQPPLWPRGFIQQHPLDCNMMRNINFSNASYGPTTMWAPIQTGNISSESTMLPATQSAVYWNHYMNFVRNPLGSVQGNPFPDSFSGTNTSTPLQGSNTIPSIPVNLESAAEHSVQDINSPIKTSAPVTKPKKTKEQNYTAAEDLLLCTTWLQISSDPIVHTGQRKKGLWARIEKRYNEQRGEYPCRMNRALSSRWDKIRADVGKFSGCYARVLREKQSGLTDDDKTSKAATLFAHEENKPFHFMHCWHKLKGEPKWESICQGPFRGLHGKAIGSSGGPFIGVEESDSGSAGLTGKRPLCRDSSKSERKKAASSTTTEYLSRLQELTEKLIQRIIEKGEKKYKYNEQDMELEKKRLDLEAKKLSIRKRELRLKELSMAEQQLEMLERTREDEVDPEVWSMMKERKKHLQQFIFSFC

SEQ ID NO: 218384 - protein, 200 aa, Zea mays
  Clone ID: MRT4577_13075C.1.pep
TCSYTDASCTHSYHDQDGAHAAHLVIKVCWKRKTGHQSTKPSHRHIHSGSVVHYQHSNSSMQVQQQVTCADAPVPPAFSPLCRLLWGPPPTRPALRQYASLLFLECRGTIFGAYGTTTQKQGILLSLQVSNSRHFKARQGWSGVAPAGLVRSRDDRFKKWYPIICRRIARAADKAGRWVALSHHTEGAAIGSLHFDKACP

SEQ ID NO: 218385 - protein, 159 aa, Zea mays
  Clone ID: MRT4577_130760C.1.pep
IRCVGSICSVAALWLPYVSEFVLCRLAYKHETQSHGSGSSKSRERDRERDKGKDRERGRDRVREKERDRDRDKDRERGDRDRDRDRHHMDRRERSEIREHRDRSDDRDRHRDDRDRRRSHDSERRRDRDRDGHRRHRSRSPSKSRDRDRRSRSRSRSRS

SEQ ID NO: 218386 - protein, 85 aa, Zea mays
  unsure (1)..(85): unsure at all Xaa locations
  Clone ID: MRT4577_130761C.1.pep
MLESAPNCWVILNPKTFPLGFNSLKFFNLVEXPPPPFGLSKFKKISLWIICKPLQIYNGPNVLSGSFGYFSGTPPSFLYTSLSCP

SEQ ID NO: 218387 - protein, 604 aa, Zea mays
  unsure (1)..(604): unsure at all Xaa locations
  Clone ID: MRT4577_130762C.1.pep
MAEYGERYQGNGEPATPEGGYAQTEYAAAGGSPPADSKPSVFSDHADGRSSQPQHETQSHGSGSSKSRERDRERDKGKDRERGRDRVREKERDRDRDKDRERGDRDRDRDRHHMDRRERSEIREHRDRSDDRDRHRDDRDRRRSHDSERRRDRDRDGHRRHRSRSPSKSRDRDRRSRSRSRSRSKSKRVSGFDQAPTQQALPIVAAGVIPGGXLAHIVIGFHWIELTAVAXCQLPGVTAPIPGVGVLPNLYNLAAGQPQAMTQQATRHARRVRGGGLPPTANEQTVAIFFNGVMAAIGGNTAGPGDAVLNVYINHDKKFAFVEMRSVEEASNAMVLDGIMFEGAPVKIRRPTDYNPSLAAALGPSQPNPNLNLSAVGLTPGSAGGLEGPDRIFVGGLPHYFTEAQVRELLESFGPLRGFDLVKDRETGNSKGYAFCVYQDLNVTDIACAALNGINMGDKTLTVRRANQGASQPRPEQESILLQAQQQVQMQKFVYQVGGALPTKVVCLTQVVTEDELRDDEEYDDIVEDMREEGHKYGNLVKVAIPRPDPSGAPVAGVGKVFLEYADVEGSTKAKTGMHGRKFGGNQVVAVFYPEDKFAAEQYD

SEQ ID NO: 218388 - protein, 29 aa, Zea mays
  Clone ID: MRT4577_130763C.1.pep
LKHTNLHEKSSSGQVSVQASFNMMQKLHY

SEQ ID NO: 218389 - protein, 117 aa, Zea mays
  Clone ID: MRT4577_130764C.1.pep
QLFTLNPAVFFEQRQLLPFSQLGFAYFQQQQFFPFNQLAAMNPFGYFQQQKVFPFGQLDTTSPVSFLSKQQLLPFYQQFVANPATLFQLQQLLPFVQLALTNPEAFYQKNIIGGALF

SEQ ID NO: 218390 - protein, 108 aa, Zea mays
  Clone ID: MRT4577_130765C.1.pep
IPYNIACLLRKVIMEIERRISTQAEHIRNQNSLIRAREEKYKSRIRVLEALASGTGGQMQINSSAANGKINIAEDHVLQMMINKSKIGERRLVDKDMSSLMAQKERCS

SEQ ID NO: 218391 - protein, 56 aa, Zea mays
  Clone ID: MRT4577_130766C.1.pep
NGSRGNMTSNNREACLRGNNSHTLLVEIKSLMRGDHTEVKYQQGRTFLYPVAKNKP

SEQ ID NO: 218392 - protein, 170 aa, Zea mays
  Clone ID: MRT4577_130767C.1.pep
SPCRVAHFPQLISSSRAALPAFCSRSVPARQLLRVFSLIGRNAQPELHCIVPKFSPSAQLAERPPGRSFLLCSSCVARPVFLSPARSLPSLPCPLPWRSTTLLLLALGRALLLQLLPLALPRSSLLAGHESLSMARRGALPSRGQSSAQQLSGVPARLTFHGRALVSPLL

SEQ ID NO: 218393 - protein, 87 aa, Zea mays
  unsure (1)..(87): unsure at all Xaa locations
  Clone ID: MRT4577_130768C.1.pep
LAMKHLKRVSSEVEVVKGGPXXEQELMLQGVRFAFRGHQFAGGFDVDPMGAFQEVKEKGSMCRVQRQKQHRYLGQHRVVARALKEET

SEQ ID NO: 218394 - protein, 122 aa, Zea mays
  unsure (1)..(122): unsure at all Xaa locations
  Clone ID: MRT4577_130769C.1.pep
FGPRERGFXSLEEFSPLPDDSPPFKTVGKVFFFEPKSVFFNXPGQKVNDSERGKGSKQTSKDFLXKQQGEMETKIRGVFQQGPGLGGQILSMTGQKEVFFSPLKFLDKLESSSFISQAGVLP

SEQ ID NO: 218395 - protein, 159 aa, Zea mays
  Clone ID: MRT4577_13076C.1.pep
LSLSQSSHRESAMAVAQRLTALELHHCCCPTPRHTSRLYLSSLRAGSPAEFAVEHRRGSLFLLCVVARPRSISELRGIDSQASATKRSNSSSSTRLKILSICLVKVVHIATIAQKKTKSWKETSRNSKTTTNSRCGLAATPSQLPVKALSLLRFASTLI

SEQ ID NO: 218396 - protein, 70 aa, Zea mays
  Clone ID: MRT4577_130770C.1.pep
GHTTRILGNHKSQCLFHQSYYIIYTHRHSYQVMTLTEKLQAKESSAAAADPGEQTVAAQATAYAVLEGDK

SEQ ID NO: 218397 - protein, 41 aa, Zea mays
  Clone ID: MRT4577_130771C.1.pep
QTLHSTLNISGNTPCVLNSILVHTTRFRVSIIYNRARAQYP

SEQ ID NO: 218398 - protein, 267 aa, Zea mays
  Clone ID: MRT4577_130772C.1.pep
WIVGATAFFFVVIVFVAFLPELGVFERPRLTLSSRRAGEGRVGGGIEGRSGLVMWEAGVASQFQPTRLREKWASERREEAKSLAELGTPVTRLGARKPRLAMVFGDLYPSAMQLQMVSVASVLEAMGYEMKVFSLEDGPCGNIWRAIGVPVSILPEDTNLPISVDWLDYDGILVNSIEARPVFSSLLHEPFKSIPVIWTVHEHSLAHRAKEYNASGMIQLINAWKDVFSRANVIVFPNYILPVMYAAFDSGNYFVIPGPPRQQRRQQ

SEQ ID NO: 218399 - protein, 59 aa, Zea mays
  Clone ID: MRT4577_130773C.1.pep
VFTQPKYCKLLVHRMDLWGAMHEASRCTLASVRADEMRPPSHSSSFDFLFCILVGYCIS

SEQ ID NO: 218400 - protein, 55 aa, Zea mays
  Clone ID: MRT4577_130774C.1.pep
QATDMSRRLCCQARRRRAWLTDRCCLLGSGNLISRSKSAQVIHKGYSSTMGRHKN

SEQ ID NO: 218401 - protein, 167 aa, Zea mays
  Clone ID: MRT4577_130775C.1.pep
SFWPPNYTKSTDYNTRHPGSYPFFRCAWLLGETISRAAPALLLLLPCECECEGGGASASLSPALKPTSVAGLRRAQGFLFPAQDRQEVPPDGRAADGGRRPGRRAAGPPPRRGPGPAAGRRPRPGPAPGPGRRRAAAGATPRRGWRGRRRGRRGGSARARSWARAGA

SEQ ID NO: 218402 - protein, 71 aa, Zea mays
  Clone ID: MRT4577_130776C.1.pep
MSSLCGSHSLHFCKAILAHVGLTSGPGNFLFHGLWTLSKGSDPFEFCTALDTIPFDKRVFASDYRSTVERL

SEQ ID NO: 218403 - protein, 214 aa, Zea mays
  Clone ID: MRT4577_130777C.1.pep
HKLKLEPEPIFIIDIIEENGEDIVQSRYWDPGRPYDLRREMDPIPLDVTLQSILESVDKNRWARYLSEIVKYAAELCPSSVQDARLEVIRRLEQITPADLGGKAQQPQDSETKLDQWLIYAMFACSCPPDIREEFSIKSAREVFHMIFPSLRHGSEAYALAATSALGHSHLEVCEIMFGDLALFVEEVSSETEGKPKWKIKKKKKNKKKKKKAA

SEQ ID NO: 218404 - protein, 69 aa, Zea mays
  Clone ID: MRT4577_130778C.1.pep
GTKTWVILFWVGFIGGANKGDNGGPNPLSKGGTGPYPGTEANGNPFLLMGKITRPKPGWAHTLVPSAAV

SEQ ID NO: 218405 - protein, 93 aa, Zea mays
  Clone ID: MRT4577_130779C.1.pep
LALKCFFFPRGKKWGFLVFGGQGAHFGVGGLGPKSGGNEIKTPDGPVPFVKFPVNLARGKNGKLPAFPPGEQKVGFPLGGGKTESPPPSSEFS

SEQ ID NO: 218406 - protein, 99 aa, Zea mays
  Clone ID: MRT4577_13077C.1.pep
SAGPKMTGRARLTSPRSRSFPQIQIAGVKGDCYQIMIRFRASRNRRSSFGDQVTWFFEFCKVEDPEHLFGEGCPHCNHCSGEDEVVEGDFQEFQDYDEF

SEQ ID NO: 218407 - protein, 62 aa, Zea mays
  Clone ID: MRT4577_130780C.1.pep
FGTRGKLHTVHGHTSLALRSRIDGFLFQALLRLCWGLRLSCQWPLRRLDFRPNRSRETRGRA

SEQ ID NO: 218408 - protein, 68 aa, Zea mays
  unsure (1)..(68): unsure at all Xaa locations
  Clone ID: MRT4577_130781C.1.pep
MAREENVYMAKLAEQAERYEEMVEYIENVAKTVYVEELTCEERNXLLSGAYKYFIGASFVLCCIVISI

SEQ ID NO: 218409 - protein, 716 aa, Zea mays
  unsure (1)..(716): unsure at all Xaa locations
  Clone ID: MRT4577_130782C.1.pep
MECDNGRVAATNGDSLCMALPRAADPLNWGKAAEEMMGSHLDEVKRMVAEYRQPLVKIEGASLRIAQVAAVAAGAGEARVELDESARGRVKASSDWVRDSMMNGTDSYGVTTGFGATSHRRTKEGGALQRELIRFLNAGAFGIGTDAGHVLPAEATRAAMLVRINTLLQGYSGIRFEILEAIVKLLNANVTPCLPLRGTVTASGDLVPLSYIAGLVTGRENAVAVAPDGTKVNAAEAFRIAGIQSGFFELQPKEGLAMVNGTAVGSGLASTVLFEANVLAVLAEVLSAVFCEVMNGKPEYTDHLTYKLKHHPGQIEAAAIMEHILEGSSYMKLAKKLGELDPLMKPKQDRYALRTSPQWLGPQIEVIRASTKSIEREINSVNDNPLIDVARSKALHGGNFQGTPIGVSMDNTRLAVAAIGKLMFAQFSELVNDYYNNGLPSNLSGGRNPSLDYGFKGAEIAMASYCSELQFLGNPVTNHVQSAEQHNQDVNSLGLISSRKTAEAIEILKLMSSTFLIALCQAVDLRHIEENVKSAVKSCVMTVAKKTLSTNSTGGLHVARFCEKDLLQEIEREAVFAYADDPCSANYPLMKKLRNVLVERALANGXRVRRRDIRVRXGRPVRGGXLRTALPSAVEAARAAVENGTAAIPNRITECRSYPLYRFVREELGAVYLTGEKTRSPGEELNKVLVAINQGKHIDPLLECLKEWNGEPLPIC

SEQ ID NO: 218410 - protein, 115 aa, Zea mays
  Clone ID: MRT4577_130783C.1.pep
QQTRELVYITTAGKLGGRQNSAAYDSCACAVRAQQIASAELLHACDERAVATTWAPKKLMLIHRSSPSCVLSFLLMLSEKIMNATVAIIIWIISYNDCLKDSSSGPSEPPPPPCP

SEQ ID NO: 218411 - protein, 704 aa, Zea mays
  unsure (1)..(704): unsure at all Xaa locations
  Clone ID: MRT4577_130784C.1.pep
MACDFPCMATPRADPLNWGKAAEELMGSHLDEVKRMVAEYRQPSVKIEGASLSIAQVAAVATGAGEARVELDESARSRVKASSDWVMSSMMNGTDSYGVTTGFGATSHRRTKEGGALQRELIRFLNAGAFGTGTDGHVLPAEATRAAMLVRINTLLQGYSGIRFEILEAIVKLLNANVTPCLPLRGTVTASGDLVPLSYIAGLVTGRENSVAVAPDGSKVNAAEAFKIAGIQGGFFELQPKEGLAMVNGTAVGSGLASTVLFEANILAILAEVLSAVFCEVMNGKPEYTDHLTHKLKHHPGQIEAAAIMEHILEGSSYMKLAKKLGELDPLMKPKQDRYALRTSPQWLGPQIEVIRAATKSIEREINSVNDNPLIDVARSKALHGGNFQGTPIGVSMDNTRLAIAAIGKLMFAQFSELVNDYYNNGLPSNLSGGRNPSLDYGFKGAEIAMASYCSELQFLGNPVTNHVQSAEQHNQDVNSLGLISSRKTAEAIEILKLMSSTFLIALCQAVDLRHIEENVKSAVKSCVMTVAKKTLSTDSTGGLHVARFCEKDLLQEIEREAVFAYADDPCSANYPLMKKLRNVLVERALANGAXVQRGDLRVRQGRPVRGGXLRAALPKAVEAARAAVENGTAAIPNRITDCRSYPLYRFVREELGAVYLTGEKTRSPGEELNKVLIAINQGKHIDPLLECLKEWNGEPLPIC

SEQ ID NO: 218412 - protein, 714 aa, Zea mays
  unsure (1)..(714): unsure at all Xaa locations
  Clone ID: MRT4577_130785C.1.pep
MECENGRGVAATNSDSLCMATPRADPLNWGKAAEELMGSHLDEVKRMVAEYRQPLVKIEGASLSIAQVAAVATGAGEARVELDESARSRVKASSDWVMSSMMNGTDSYGVTTGFGATSHRRTKEGGALQRELIRFLNAGAFGTGADGHVLPAEATRAAMLVRINTLLQGYSGIRFEILEAIVKLLNANVTPCLPLRGTVTASGDLVPLSYIAGLVTGRENSVALAPNGSKVNAAEAFKIAGIQGGFFELQPKEGLAMVNGTAVGSGLASTVLFEANILAILAEVLSAVFCEVMNGKPEYTDHLTHKLKHHPGQIEAAAIMEHILEGSSYMKLAKKLGELDPLMKPKQDRYALRTSPQWLGPQIEVIRAATKSIEREINSVNDNPLIDVARSKALHGGNFQGTPIGVSMDNTRLAIAAIGKLMFAQFSELVNDYYNNGLPSNLSGGRNPSLDYGFKGAEIAMASYCSELQFLGNPVTNHVQSAEQHNQDVNSLGLISSRKTAEAIEILKLMSSTFLIALCQAVDLRHIEENVKSAVKSCVMTVAKKTLSTNSTGGLHVARFCEKDLLQEIEREAVFAYADDPCSANYPLMKKLRNVLVERALANGXRVQRGDIRVRQGRPVRGXLRAALPKAVEAARAAVENGTAGIPNRIADCRSYPLYRFVREELGAVYLTGEKTRSPGEELNKVLVAINQGKHIDPLLECLKEWNGEPLPIC

SEQ ID NO: 218413 - protein, 87 aa, Zea mays
  Clone ID: MRT4577_130786C.1.pep
FSLLEVADLARHCTAREPHQRPDMCHCVNRLSSLVDQWKPTNVIDDDEEGGTSEMGLHQQLERWRCGDFTISDSESFSTYNTSRKYH

SEQ ID NO: 218414 - protein, 67 aa, Zea mays
  Clone ID: MRT4577_130787C.1.pep
MTEGTGHRRIAPAHRGRVARPAMAEQLCARRQLLSGGAGAPKVGQVPHHVRAPGVGFRRDSRRVRNG

SEQ ID NO: 218415 - protein, 340 aa, Zea mays
  Clone ID: MRT4577_130788C.1.pep
VLFPAGRRYLLKLLTLRGPCKSSVTLTVKGTLVASPNRADWTDNDRRHWIVFRSIDKLTVNGGGAIDGNGEKWWPHSCKINKALPCKEAPTALSFHCCVDLKVENLKIMNSQQIHMSVEDSANVLLARLSITAPGTSPNTDGIHITRSKDVRVTDCKIKTGDDCMSIENGTHNLHVSKVTCGPGHGISIGSLGDDNSRAEVSGITIDSVQLHGTTNGARIKTYQGGSGYAKDITFQNMVMYDVKNPIIIDQNYCDKAKPCGEQESAVQVSGVVFKNIRGTTSTKDAIKMNCSENVPCQGITLQNIDLKMQDGKGNTRSTCQNAKWTEFGTVRPQPCTAIK

SEQ ID NO: 218416 - protein, 117 aa, Zea mays
  Clone ID: MRT4577_130789C.1.pep
NSARGALVSSFLRGKLSFLAAKLANPTQPVLLCTSPPSLRLRLRLRHPPIRAGASAPYPIATSSWRAPIRSARSEPAPEHPTRWLPAWGGPLLLEFPHPEGAALEWNPRTRCTTRTT

SEQ ID NO: 218417 - protein, 68 aa, Zea mays
  Clone ID: MRT4577_13078C.1.pep
RDKLGWSHFLFGWRSPITARGTGAAILVFGTATGAGGDTIRSIFRITPLPKIALVFISLPRDLHPNTI

SEQ ID NO: 218418 - protein, 46 aa, Zea mays
  Clone ID: MRT4577_130790C.1.pep
TTHDLLTTTETEHKVEGALLLDVASLRKVRAILQLITGRSGSVREV

SEQ ID NO: 218419 - protein, 230 aa, Zea mays
  Clone ID: MRT4577_130791C.1.pep
MEPPAAKEAPSPPLQPAAEEDAMLSATAAMAKEAAVAFQGCRYADCAAVLTRLLDKKEGDLKVHHNMAITEFFLDDCPDSNRLLKILGDFKRRSEELACASREQADSANGVGNSAHSGSRGSGVVLPFSSTHNASTYGDEFDTTIITFNMAVILYHLHDYESALSVLDPLYRNIEPMDEPTALHVCFLLLDYTLALQDATKAADIIQYMGRAFGVANITSPDENPSIAQQ

SEQ ID NO: 218420 - protein, 54 aa, Zea mays
  Clone ID: MRT4577_130792C.1.pep
LIFVTQQHEESTTSVGPPAVRCLLHSLITHSPRVEQYGHVRKLKILALGHPQQG

SEQ ID NO: 218421 - protein, 52 aa, Zea mays
  Clone ID: MRT4577_130793C.1.pep
LIMGIALPYQSLPGMEGESIQLYIPYSWIRLGWFKRETHPKAEPKPFNGIKV

SEQ ID NO: 218422 - protein, 141 aa, Zea mays
  Clone ID: MRT4577_130794C.1.pep
GGGGVGGTCLPPGAQRTPSPDRIPVDPPNSHRSHLPHRNQHYSVTSAAIRSVTISRVVGSFTPPSHLSRTHGADDCLVPRTSPSVPPLNSVPGCAYKTRRSPTGPRACRHCFYSMNCAEVRGSLGLYHDQLFYLYEVSESN

SEQ ID NO: 218423 - protein, 83 aa, Zea mays
  Clone ID: MRT4577_130795C.1.pep
HFSLCPRNYKSQVYLAGVAPPPSAQARTWTPARARRFYFARPLLAPELTSPLAMTRPKTRSAKPARSYATCAGSPISPNHSCG

SEQ ID NO: 218424 - protein, 212 aa, Zea mays
  Clone ID: MRT4577_130796C.1.pep
LSNLEKAHTGSVAKKADLQGKRHLRYLSLECTPRAAGGNQIKDNNTQQEKRQIEDVFDELCAPVCLENLSLIGFFGHKLPKWMSSGEMDLKYLRSIKLEDCTYCEQLPALGHLLSLDFLLIKHAPSIMRIGHEFFCSSNATQIDPRMLFPRLEKLGFDRLDGWEEWIWDKELEQAMPNIFSLKVTKCKLKYFPTGLVHQTRTLRELIISEAC

SEQ ID NO: 218425 - protein, 121 aa, Zea mays
  unsure (1)..(121): unsure at all Xaa locations
  Clone ID: MRT4577_130797C.1.pep
NKSHRRPPKRGKAMETRHRARALHAPAGSKDRPHEGNPKPASKRARAPQTEGREATRRXPRHGGQTKNPGDEEGAADKKNXHGSGKASETPQHVERQSAAKRPSRKNAPESDERDKDHARK

SEQ ID NO: 218426 - protein, 79 aa, Zea mays
  Clone ID: MRT4577_130798C.1.pep
HIETLKDGGSKTRMDPMSTGTRHINFDHIQAHEMGCDPWPLRTTHDREAQYYLYTSPLGMEHVADQDNDAAAVPPLVAA

SEQ ID NO: 218427 - protein, 50 aa, Zea mays
  Clone ID: MRT4577_130799C.1.pep
LIAVECILIFVRRSSPFVSPRKQQKAIFKHKSPTEHMIGFYDTAAGTGCP

SEQ ID NO: 218428 - protein, 141 aa, Zea mays
  Clone ID: MRT4577_13079C.1.pep
KKKKTARRGARGSPASPLDYSGASTSGGEDGAFCSRPEPALPPAAACQQLAAPTPPSKVGGLAGRRTTPPVPVPVPLPPPRPAGQRARKKMRLPEIQQMVRSLSVENDALRKEMRALRRDCTALSQENGKLETRLHQSVTL

SEQ ID NO: 218429 - protein, 61 aa, Zea mays
  Clone ID: MRT4577_1307C.1.pep
HARRSPISGVILFIFDLLHLHSSSLSLCEENCLTLLPLQLLLAPRSPFPDFFSGRDGRLSP

SEQ ID NO: 218430 - protein, 62 aa, Zea mays
  Clone ID: MRT4577_130800C.1.pep
NSYSRSNVFPHFCSLYPVSFFWTWYAWHVKRVLLNHGPLPVIPNVNTQQSSVSEVHSRLGPS

SEQ ID NO: 218431 - protein, 112 aa, Zea mays
  Clone ID: MRT4577_130801C.1.pep
RAPRAVSKSMRSLGKTSSPGHGHAAWGRRHLQRLGHGRLAQPRRLCAQSLLMILSCRLTAPWARPPKAVLIMHASGPLGGRGPPGSLTRASARLTTGASLRLLYVPESIALV

SEQ ID NO: 218432 - protein, 99 aa, Zea mays
  Clone ID: MRT4577_130802C.1.pep
MYMYVLLLDTYVYIYVLGFSHPEKLDRKETAPRKKLETNWLQSVTGQPRTQEPSCRLSLNEKFSNWDSPTFRSKSTTGLTDKSSCTMLHKDKSSFDAAP

SEQ ID NO: 218433 - protein, 68 aa, Zea mays
  Clone ID: MRT4577_130803C.1.pep
PFFMGCIWLVFSWAKTALSLLGMVYVDANTNKVVDDNNQFPLTIYPGGCRQQHLQYVGHLFSLFDGFS

SEQ ID NO: 218434 - protein, 64 aa, Zea mays
  Clone ID: MRT4577_130804C.1.pep
TLSIAYSSRYTEWSSNTTINHIYTSLEDSCTCPSTVIPDTHPKTSKSTTTKLLLTSPSTSNIMA

SEQ ID NO: 218435 - protein, 5 aa, Zea mays
  Clone ID: MRT4577_130805C.1.pep
MTMPR

SEQ ID NO: 218436 - protein, 54 aa, Zea mays
  unsure (1)..(54): unsure at all Xaa locations
  Clone ID: MRT4577_130806C.1.pep
TPXRPXXPXAIKQALPGCWHLNLXPEARVDXPPTTLLGVCQPPTTSTTTYRLKG

SEQ ID NO: 218437 - protein, 60 aa, Zea mays
  Clone ID: MRT4577_130807C.1.pep
IRHEADTVVLALAYPRHSKVSPIPSFITFMSNGVGPAGQQQHGGVDERPHLTGCDADRGQ

SEQ ID NO: 218438 - protein, 113 aa, Zea mays
  Clone ID: MRT4577_130808C.1.pep
TQLLPKLLPLHRLPTPRHVLHQTLLSWPWPPTEAIDTFISITGADKSVAVRRPEQDGRDRKPSIYSHFNDGHSILNGITQNAMHATRDDMTELYGPPDHSFQRSLVPESFRAP

SEQ ID NO: 218439 - protein, 114 aa, Zea mays
  unsure (1)..(114): unsure at all Xaa locations
  Clone ID: MRT4577_130809C.1.pep
KLFIELESTTIDLVDWHPSELTALPXTLNGASIVRIYKATTAGDLIGELSXGTEVADLITKLHEIKKCSGRGIIATGPAPAGSRYDFFTRFYCPKSAIDEDPRCGNAHWSLSPY

SEQ ID NO: 218440 - protein, 68 aa, Zea mays
  Clone ID: MRT4577_13080C.1.pep
PSSSSSTRLKILSICLVKVVHIATTAQEKTKPWKETSRSSKTTASSRCGLAATPSQLPVKALSLLRFA

SEQ ID NO: 218441 - protein, 71 aa, Zea mays
  Clone ID: MRT4577_130810C.1.pep
VVILVPRPPIFSIFLVFLSFRNPLLLSLVSFIFVFTDPQYGKSTTPLLLLYCILQTITLTMDSYTCNGNNY

SEQ ID NO: 218442 - protein, 39 aa, Zea mays
  Clone ID: MRT4577_130811C.1.pep
SGNTAEFSVIILWQTMLCIRRQHYEMPVMLSDFVSNRSR

SEQ ID NO: 218443 - protein, 76 aa, Zea mays
  Clone ID: MRT4577_130812C.1.pep
CTVLLAETRCYLDLQFDMRCLALKLGRYVLNGSSRSRWHSACVDRPRAMKVTHARHGLFNAPFLFRSHVNSRMNRK

SEQ ID NO: 218444 - protein, 143 aa, Zea mays
  Clone ID: MRT4577_130813C.1.pep
GKNWGRGSNKGEAMKWSKGESLSQGKNIRGMPQFVKLRGKGGQRKRGQKGGRIKKHAHPLECPQPCNFFSPLFFPRPPGPPAGLLNVVGKKGGDGGPKGGAHGGPNGGGTLGGGPNPNLPGEPHGGPPGGNKDRASNLFNFHP

SEQ ID NO: 218445 - protein, 54 aa, Zea mays
  Clone ID: MRT4577_130814C.1.pep
ANHIKVYNHETDGMTVDTPLQLPKIRLHLHNIIKKPQIRKSIRPRLFCWNSIPF

SEQ ID NO: 218446 - protein, 99 aa, Zea mays
  Clone ID: MRT4577_130816C.1.pep
PFLCRKCGKAFAVKGDWRTHEKNCGRLWYCLCGSEFKHKRSLKDHARAFGHGHGAFGCNNLDGDGDGDGGAGGGANGLDDDDDDGAVSEIEHDYCAAAR

SEQ ID NO: 218447 - protein, 104 aa, Zea mays
  unsure (1)..(104): unsure at all Xaa locations
  Clone ID: MRT4577_130818C.1.pep
VFDGERSLTKDCQLLDKFNLNSIAPAPKGTPQIEVTFDVDANNFLNVKASDKIPRNSHKITITNXKGLLTHDEIDRMVPEATDFTKDDKSVMERIDTRNQIETY

SEQ ID NO: 218448 - protein, 81 aa, Zea mays
  Clone ID: MRT4577_130819C.1.pep
RLSSQFSCGMGSGWGKISLFRALSPTFIILEPGMYKYIPFFVNICYPNFSLCILCHTIHAISMNNCLSKKKKKKKGGPAAV

SEQ ID NO: 218449 - protein, 118 aa, Zea mays
  unsure (1)..(118): unsure at all Xaa locations
  Clone ID: MRT4577_13081C.1.pep
PGSAPRLRPSAFLVCGAGRGGSGGAMFPVLLGLPAAASGCWAGALXAXSLCLMCVLGIWGRLIGVACACVGGLVLAXASPGMPGLLXPVVPAVLVWRPWPWFRLAGVFLFFGDSAGVI

SEQ ID NO: 218450 - protein, 217 aa, Zea mays
  unsure (1)..(217): unsure at all Xaa locations
  Clone ID: MRT4577_130820C.1.pep
RHRKIIANSILFFIAGFETTSTFSSXASYALVTNPDXQDRLYEEVKRVKEESGDFDYETLFSMKYLDAFINETLRMYPPIVRFIRRCTEDHTFANGFKIEKGTLVLAPVYYIHHSEEYYPEPEKFDPERFMPENKNSIDKCAFLAFVQGPRNCIGMRFALLEAKLTLANLIFKYKFEKSPRTPDKLEFDGRSFVLAGKRCPSDSVRDLNKYPGILIR

SEQ ID NO: 218451 - protein, 166 aa, Zea mays
  unsure (1)..(166): unsure at all Xaa locations
  Clone ID: MRT4577_130821C.1.pep
WNIYKWGEHTSXFSPLHSLDAEFSKPMWIFGVSSYGFLGIDDTRHKIVCSYRQNGKSXVGVLDQDSESFLKIDIPFSSVTNIVVSGDRSFYIEGASATLPVSIAKVTLDEKRTMATDFSNDWSSSEDVAQYESYFSLPEFVELPNVINGQHAYAYSYAPYNNFFQG

SEQ ID NO: 218452 - protein, 288 aa, Zea mays
  Clone ID: MRT4577_130822C.1.pep
MEAAIAHAPSAPVLRRSRSLNPTPAVRPHPKPWQGVLSARHPSNAVRCEPSQRPEARPRLRATQPAGADAAAGRKRLAVFVSGGGSNFRAIHEAALGGAVHGDVVALVTDKPGCGGAEYARSNDIPVLVFPKSKSAPEGISVAQLLDTLRGNNVDFVLLAGYLKLIPTELIQEYPKSILNIHPSLLPAFGGKGFYGSKVHKAVIASGARYSGPTVHFVDEHYDTGKTLAQRVVPVFADDTPELLAARVLHEEHMVYVEAVAALCEDRVVWREDGVPLIKSRTNPAVYI

SEQ ID NO: 218453 - protein, 115 aa, Zea mays
  Clone ID: MRT4577_130823C.1.pep
VAVSSVPFPMTSFSAVFSSWTSSTIFSRLYSLVIRGRNVSKWFDLHTSENSLSLTENPVFSMFDGSKAIPSSESPVEIPGSRQYGLDPPDACAIGYKVKNLEEKVVSRGKSRKHW

SEQ ID NO: 218454 - protein, 84 aa, Zea mays
  Clone ID: MRT4577_130824C.1.pep
ESHRHLQRCECMQRTNMLAMPSDRSFIATCWWRREQGCLLMCTRQKACLIGKGRLILSSKSKYLHLNHYMCLEEGAIERYLLDS

SEQ ID NO: 218455 - protein, 52 aa, Zea mays
  Clone ID: MRT4577_130825C.1.pep
FFIFAIGHPGCILQGGAEFTGCYKCVPNPGVLSYIRSCIVHLQHDLRFVDPA

SEQ ID NO: 218456 - protein, 155 aa, Zea mays
  unsure (1)..(155): unsure at all Xaa locations
  Clone ID: MRT4577_130826C.1.pep
NDLVQRQNTTRIDSDLSTSCLWSREDLHPHLEVAAIVIQAPLHKTKSKELKAGSSPGTIKAVTAGGAHGLPRDDEASPSPLLDRLKSGGACDCGGWDMSCPIVVLDNAYDGYWADSVMNESKAPMXQLFAQGNXEVLPALSMKADGNGHFSVDFH

SEQ ID NO: 218457 - protein, 259 aa, Zea mays
  Clone ID: MRT4577_130827C.1.pep
MDPAAAPPPPPLAVHLVTGDASSPALSHLLQSLAAARIVAFDAEWEPRRRVPSAPSDDASPAPPNPTQLPTVTVLQMACRGEDGGNEVFVVDLLAVPLADLWAPLRELFERPDVLKLGFRFKQDLVYLSATFTAALGCDSGFNRVEPFLDVTNVYHYLKGHDMQKKLPKETKSLASICEELLNVSLSKELQCSDWSCRPLSEGQIQYAASDAYYLLYIFDLFHQKVSIEEKCSPTAEASDEHCSQRASDCSSSGNDILL

SEQ ID NO: 218458 - protein, 100 aa, Zea mays
  Clone ID: MRT4577_130828C.1.pep
GHKIPKVGVPYFPGPVLPGFFPLFCFRILTRGFKKLPMDWGVFPPNVYGNVFFSKLCHFAIFPLRPAPQILLPFNVCGLPPFCPWVVLSKPIFLKFGFCC

SEQ ID NO: 218459 - protein, 268 aa, Zea mays
  unsure (1)..(268): unsure at all Xaa locations
  Clone ID: MRT4577_130829C.1.pep
RPGRRRRRVPAGHLPRRGRRHVVRLRRRQADRRARRRALDRQRLRVHGLPELQKPHRLGPRAIQERRGPPGQRRRRPPRXVVYVNYGSITVMTNSQLLEFAWGLANSGYPFVWNIRPDLVKGDSAVLPPEFASAVEGRALLTTWCPQEAAIQHEAVGVFLTHSGWNSTLESLCAGVPMLSWPFFAEQQTNCRYKRTEWGVGMEIGGEVRRDKVTVVLKEAMDGEKGREMRRRAEEWKEKAVKVTLPGGPAETNLERVIHEVLLSQKKG

SEQ ID NO: 218460 - protein, 144 aa, Zea mays
  Clone ID: MRT4577_13082C.1.pep
LPGSRVNLPYLLEPATTLQPPLRPCLTARIKNPGISQSSATSADLDAHHCAAHTLTIAVASCLASPHSCAWSPLSREPALSSLCPDSTSPPSPPRPEQPWPTASCHCLVRRCHDCDPFPSFEESTVKLQRPRDRTLRVLQSGRP

SEQ ID NO: 218461 - protein, 159 aa, Zea mays
  unsure (1)..(159): unsure at all Xaa locations
  Clone ID: MRT4577_130830C.1.pep
MSELLLRTTGYISAEITTHVRPPAPWTAGGNEALFLVLNAGAWRKLVTLRLRARITFRIYLRAATCCVSPPELAAHERVLRXVGYRTRAGTTCASWCIIXCFPQRADSRGTDDRPTFIKDYRGKIETELTKICDGILXCLRPHLVPSSTATDXRAFYLK

SEQ ID NO: 218462 - protein, 57 aa, Zea mays
  Clone ID: MRT4577_130831C.1.pep
LIIKGNFYEKRKYFEWENFECPSHKTCIGDVYKVNVFSRESVSFTLLHVESKNVSNL

SEQ ID NO: 218463 - protein, 51 aa, Zea mays
  unsure (1)..(51): unsure at all Xaa locations
  Clone ID: MRT4577_130832C.1.pep
VFLNMRKSSXLGNRPISVNNTAEXHFXININDNETLIAADAXLNPLALFFG

SEQ ID NO: 218464 - protein, 458 aa, Zea mays
  Clone ID: MRT4577_130833C.1.pep
MPANMISKILEKSSVLPLVDDVIAPIHVKTAGGAPRTSVLRNPNMEKLQKGYLFPEISIKREAHLKKYPDAKVISLGIGDTTEPIPSVVTSAMAEYVLALSTPEGYQGYGPEQGQMNLRKVIAEEVYPDMGIQESEVFISDGAQCDIARLQTLFGPNVTIAVQDPTFPGYVDNGVIVGQTGSADEAGKYAGIAYMRCAPENHFFPDLSRVPRTDVIFFCSPNNPTGHAASAAQLRELVDFARRNGSIIVFDTAYAWYVSSSSEAAGDGDKMKPRSIYEVPGAREVAIEISSFSKFAGFTGVRLGWAVVPDELRYADGSPVARDFDRIVCTCFNGASSVAQAGGLACLSTEEGRDAVRRVVGVYKENARVLVDTFASLGKEVYGGTDSPYVWVRFPGRRSWDVFAEILDKTHVITVPGSGFGPGGEGFIRVSAFNSRDRVLEAAARLKKFLPGLSAVPL

SEQ ID NO: 218465 - protein, 60 aa, Zea mays
  Clone ID: MRT4577_130834C.1.pep
IKDKEWVGFAFDHRIFSLVARGTVVEQTYVSKSQVKETATRSSSTSQSVRFPCVLPMALA

SEQ ID NO: 218466 - protein, 49 aa, Zea mays
  Clone ID: MRT4577_130835C.1.pep
GGGGAQSLGRLLYRRKLTACCPPFVSRSTCCSQCDHHAELYPSVISMGA

SEQ ID NO: 218467 - protein, 62 aa, Zea mays
  Clone ID: MRT4577_130836C.1.pep
KYFGLSSGSEGIFIKTCMSPVRRGHEGSRSEGIRIGNCCCIRRNKAMRRMCFRAMGVVGALI

SEQ ID NO: 218468 - protein, 72 aa, Zea mays
  Clone ID: MRT4577_130837C.1.pep
EPGTPQLSMLSIVMRCPVNVVGCGSGAQLAVPHSMLTMCVCNLTGLAACLKRIHPASSAPRIKMFLRCPRAE

SEQ ID NO: 218469 - protein, 142 aa, Zea mays
  Clone ID: MRT4577_130838C.1.pep
ASNKCRHMELHDLLPCQMLRSLSLCFPAGEVLSPLISADLDSRPVLEEISIKAEADCRTCARPAPLFALNDLARLPSAGLDEVGSECPRRLCSYCTSSPHGSLSVRPIPFAGYTIHYRLCHALHYCPPHPQGIPPSYPTTAP

SEQ ID NO: 218470 - protein, 111 aa, Zea mays
  Clone ID: MRT4577_130839C.1.pep
HACVHASVHAFADAWADAWICRVNCRVVQFQELSGLDLVGISFVNIFSKKTQKIGMRAINIFGIKGRMLYKFEYKFSTIVQTESISCSCYRFGKNMWKANLGSCFLQVSTL

SEQ ID NO: 218471 - protein, 102 aa, Zea mays
  Clone ID: MRT4577_13083C.1.pep
TPPPFSTGGGGGQKGVLRPFLLQRPPQVSRQQVCPFWGLPPPQVPPFFPAFQSPVMFLPFGLTPWDRFRFVLCPWGGGRFFDPPVGLMWAWPHFIFHKSPGS

SEQ ID NO: 218472 - protein, 43 aa, Zea mays
  Clone ID: MRT4577_130840C.1.pep
KAVLVQKTYLHFRHIQREYSHFVKKLNYDWSKPCIPLSFTFFL

SEQ ID NO: 218473 - protein, 40 aa, Zea mays
  Clone ID: MRT4577_130841C.1.pep
HWKRRLIEAVVIATGVHTFFVKAAYLVDSTNQVGHFQKAS

SEQ ID NO: 218474 - protein, 80 aa, Zea mays
  Clone ID: MRT4577_130842C.1.pep
LHVKSGAIDPLMLHLGDLTEIHLPHKASLDKARDIRVLIFSADSFRLVVLEVFQQSKLDLGSNLLQTDQHSKKSSEVIFD

SEQ ID NO: 218475 - protein, 229 aa, Zea mays
  unsure (1)..(229): unsure at all Xaa locations
  Clone ID: MRT4577_130843C.1.pep
WPGRTLDKKNSNAIYWSPKGRFVVVAALQSQQSFELEFWDMSFDRPKEESEKGDKEVNANLQLMDTAEHYGVTDIEWDPTGRYVATVASAFRHRMENGYHLYDFKGTLLREEAIEGFKQLLWRPRPPTLLSKEEQAEIRKNLRNYSKVFDEQDVAKKSSANKAVVEARREMLDEWRRWREEVTERLRDEXRPRAGNPQXETPGQADDGHQEEIEEIVEEIIDETEEVVN

SEQ ID NO: 218476 - protein, 150 aa, Zea mays
  unsure (1)..(150): unsure at all Xaa locations
  Clone ID: MRT4577_130844C.1.pep
MEAISNTRLTLEILVADSVVLVGEMVTSKLFQIWHSADVQRPPPFGISLITRWDKHHGFXLYLSDPAGNYGGWKVVPIGANSQCAQGGTEPCGFWCPLRKGEARCSPCTSRWMTSRGHIRPLFKFLQINFMQSLWNLRSTCRYSLVGKMR

SEQ ID NO: 218477 - protein, 142 aa, Zea mays
  unsure (1)..(142): unsure at all Xaa locations
  Clone ID: MRT4577_130845C.1.pep
IRHTVWFLCVTLALLFLFLLKMVAMLKXLTSGAMLSPXESSDEFSGAIIRCFRVLVLQLQPCLDHFCSFKPGTVLPMIPTSTGLDVRSVVSSNHSTQPPVFLAKCVCGTSIRFLFGFSFVVTVRNNNWSTCCTVVVCAYRQS

SEQ ID NO: 218478 - protein, 33 aa, Zea mays
  Clone ID: MRT4577_130846C.1.pep
TIVVATTPAGDSPEVVRASTTAIFDRRCRATSL

SEQ ID NO: 218479 - protein, 60 aa, Zea mays
  unsure (1)..(60): unsure at all Xaa locations
  Clone ID: MRT4577_130848C.1.pep
DPSWSRWLVAGTRSPSTKAAVGRTASXVLPRRXSTSAGAXRGPRTLVAGLAEASAGAGPW

SEQ ID NO: 218480 - protein, 52 aa, Zea mays
  Clone ID: MRT4577_130849C.1.pep
LPLIAIPTSWRYKDLHAHHLLAFDVHSDLALKMNPFLPKTSICTSYFFTSSP

SEQ ID NO: 218481 - protein, 198 aa, Zea mays
  Clone ID: MRT4577_13084C.1.pep
FFAGAWYGLVEHQYNRGSVKLLQRFREIRDLHITIFYPIKIVYFHYCTEGLTSLLAKKLHLILLTCGHAIGSCVFHLLKISTRIRSLFLDIRESIKERAACSPDCACHQQHDWESEELVLNSLQELNVCGLRANRDFMFVKRLLGWMGALKSVTIIFDPKATVHEELCEELLGLSGPETCVKIYLYRDGAKVMYTPVG

SEQ ID NO: 218482 - protein, 85 aa, Zea mays
  unsure (1)..(85): unsure at all Xaa locations
  Clone ID: MRT4577_130850C.1.pep
KKKGGAWVPNTFRANLAVSGFCDGRGDDLQGAPVAAVRSVLRPNWLFLPHCLNATHLIFLXXGEGVFGVTFPGCASTFHSGRSVG

SEQ ID NO: 218483 - protein, 120 aa, Zea mays
  Clone ID: MRT4577_130851C.1.pep
GRCLDFWALKKRNALCIASVYLIWSAAVVAFLCGMVYDDDDGEAEVVAIGVDATLGTPEHIALAGDTAVVLVLVYPPGVRRSQQSSPTGYGPALVSWRSESAPRSSFMFACGLRACPIGI

SEQ ID NO: 218484 - protein, 59 aa, Zea mays
  Clone ID: MRT4577_130852C.1.pep
GHWGAPYKNSNTGDKWLFKIQNGGGKKEKIQSFQEDLFLKNCFYWGKNDTLHFKGNSGG

SEQ ID NO: 218485 - protein, 115 aa, Zea mays
  unsure (1)..(115): unsure at all Xaa locations
  Clone ID: MRT4577_130853C.1.pep
RKQPLXTIXXDPFKNNCTHDPPHSTLQLHRISLPKSIAAAVGRHSISNLDGPSGYVGFHHPVRTSVLHSIQVIICFTPFSSTTTLAVPCISPTKLHIASAGAISSTILVDYRDSD

SEQ ID NO: 218486 - protein, 81 aa, Zea mays
  unsure (1)..(81): unsure at all Xaa locations
  Clone ID: MRT4577_130854C.1.pep
GEAKGKVTRDASGSILCFIRCDXIHLEVFLVQHVLYNMYMWPIKELANNVLVKMQLRSFMKGHLKHRKPRDPLRVEKSFNR

SEQ ID NO: 218487 - protein, 39 aa, Zea mays
  Clone ID: MRT4577_130855C.1.pep
NTNNPPTINTVCRSVMQLVYIGTHSSSCFSITDINKYST

SEQ ID NO: 218488 - protein, 85 aa, Zea mays
  Clone ID: MRT4577_130856C.1.pep
MSSRRGRITDEEINELISKIQAVLPESSRRRSASRSSASKLLKETCGYIKSLHQEVDDLSDRLSELMSTLDETSPQAEIIRSLLR

SEQ ID NO: 218489 - protein, 52 aa, Zea mays
  unsure (1)..(52): unsure at all Xaa locations
  Clone ID: MRT4577_130857C.1.pep
TSCRSRAAXXGGLGFIEYMNXKNLXNADNDTGSLQAHTSSAWSYYRHEHDVA

SEQ ID NO: 218490 - protein, 75 aa, Zea mays
  Clone ID: MRT4577_130858C.1.pep
KKMEKDSKKLEQNIAMLPKKLITNHLAAKKTKFKFKVVHHQTEDNPMEKKCVPFCVLVFSCLIQILLYLRKNLCS

SEQ ID NO: 218491 - protein, 60 aa, Zea mays
  Clone ID: MRT4577_130859C.1.pep
EEAWMDFTHECFRQPQPVVFLERGVNLVGTMDFLYKNVDGYTDSRSIKGILDSLYVDIID

SEQ ID NO: 218492 - protein, 102 aa, Zea mays
  Clone ID: MRT4577_13085C.1.pep
MVKKHQANVWVDQLKHVVSLKTVNINRFGSVITIPYITHIDTDHTIQRADKFPLLQNRFKMDTTSLSTSHTKLRTVRFPIYASCASKKQHHRRIKKVREKLS

SEQ ID NO: 218493 - protein, 190 aa, Zea mays
  Clone ID: MRT4577_130860C.1.pep
RGGPGSGKGTQCANIVEHFGFTHLSAGDLLRAEIKSGSENGTMIENMIKEGKIVPSEVTIKLLQEAMIKNENDKFLIDGFPRNEENRAAFENVTKISPAFVLFFDCSEKEMEKRLLGRNQGRVDDNIETIKKRFKTFVESSLPVIEHYNSRDKVKKIDAAKPIPEVFEDVKTIFAPYAPKVIRFHFFEQM

SEQ ID NO: 218494 - protein, 71 aa, Zea mays
  Clone ID: MRT4577_130861C.1.pep
PDDTAKYAFRNTRSLKRPILQWHHLSVSWLSLSLFRERRKQLILMMSTNSITSVFDYHQLAPSFINTTSGQ

SEQ ID NO: 218495 - protein, 212 aa, Zea mays
  Clone ID: MRT4577_130862C.1.pep
MGTVVDAPAVVAEEVTENMLGGKKVTVVFVLGGPGSGKGTQCANIVEHFGFTHLSAGDLLRAEIKSGSENGTMIENMIKEGKIVPSEVTIKLLQEAMIKNENDKFLIDGFPRNEENRAAFENVTKISPAFVLFFDCSEKEMEKRLLGRNQGRVDDNIETIKKRFKTFVESSLPVIEHYNSRDKVKKIDAAKPIPEVFEDVKTIFAPYAPKAE

SEQ ID NO: 218496 - protein, 116 aa, Zea mays
  Clone ID: MRT4577_130863C.1.pep
KQFAADQISCWEVGKQGSCKRICSSSCDLYNVPISEEGLRQLVHQTLLANEEPAFEELARKKAASLQVKQKPPPTDGSVYSCCCRCISGCGPCNCDGCGNGGSISPSKKTVIHVFF

SEQ ID NO: 218497 - protein, 215 aa, Zea mays
  unsure (1)..(215): unsure at all Xaa locations
  Clone ID: MRT4577_130864C.1.pep
MGTVVDAAPAVVAEEVTENMLGGKKVTVVFVLGGPGSGKGTQCANIVEHFGFTHLSAGDLLRAEIKSGSENGTMIENMIKEGKIVPSEVTIKLLQEAMIKNENDKFLIDGFPRNEENRAAFENVTKISPAFVLFFDCSEKEMEKRLLGRNQGRVDDNIETIKKRFKTFXXEQVLPVIEHYNSRXKVKKIDAAKPFXXVXFEDVKPIFAPYAPKLE

SEQ ID NO: 218498 - protein, 114 aa, Zea mays
  Clone ID: MRT4577_130865C.1.pep
ARNSARAQISPPVLYITSIPTNRGGFIYIMMAFSHGILQLIHDQRQDVHHNPTLPAVVHPAHTRSPHHTRTQAKDSRQDKHLNPFGVPPEPPHTFKQAHTPTKLSRPPEATAPQ

SEQ ID NO: 218499 - protein, 130 aa, Zea mays
  Clone ID: MRT4577_130866C.1.pep
MGTVVDAAPAVVAEVTENMLGGKKVTVVFVLGGPGSGKGTQCANIVEHFGFTHLSAGDLLRAEIKSGSENGTMIENMIKEGKIVPSEVTIKLLQEAMIKSENDKFLIDGFPRNEGNRINCNFFSWNRSRQ

SEQ ID NO: 218500 - protein, 226 aa, Zea mays
  unsure (1)..(226): unsure at all Xaa locations
  Clone ID: MRT4577_130867C.1.pep
SRIYTGGPGSGKGTQCANIVEHFGFTHLSAGDLLRAEIKSGSENGTMIENMIKEGKIVPSEVTIKLLQEAMIKNENDKFLIDGFPRNEENRAAFENVVRPSFLYTKFVDSHASLRNYCSFLLVTQMNSXLLILSHSXTKISPAFVLFFDCSEKEMEKRLLGRNQGRVDDNIETIKKRFKTFVESSLPVIEHYNSRDKVKKIDAAKPIPEVFEDVKTIFAPYAPKAE

SEQ ID NO: 218501 - protein, 212 aa, Zea mays
  Clone ID: MRT4577_130868C.1.pep
MGTVVDAPAVVAEEVTENMLGGKKVTAVFVLGGPGSGKGTQCANIVEHFGFTHLSAGDLLRAEIKSGSENGTMIENMIKEGKIVPSEVTIKLLQEAMIKNENDKFLIDGFPRNEENRAAFENVTKISPAFVLFFDCSEKEMEKRLLGRNQGRVDDNIETIKKRFKTFVESSLPVIEHYNSRDKVKKIDAAKPIPEVFEDVKTIFAPYAPKAE

SEQ ID NO: 218502 - protein, 256 aa, Zea mays
  Clone ID: MRT4577_130869C.1.pep
MCLGSGTKRAFPHSPSPPSARLHSLVSQRAPNMAAPTAAVDTAAPPPPPSAEAAAAPVLDQKVSPAAAPQPDAPAPAPAPKKRKLEEAGFHTSEYYKIRAVVADLRVRFVQVPEATDFRNTDAAREIMREINVVMDLSKKMRLKLGATSEPVKPLEKPSVGLVKDELVKPSEKPSSGPVTGEPVKPPEKPSAGPVKDEPMKPSEKPSAEPVKNEPSEPALAGENNRAPRVSQTTSSPNNAGIDAPVVKHDNSEARK

SEQ ID NO: 218503 - protein, 29 aa, Zea mays
  Clone ID: MRT4577_13086C.1.pep
KSKEIVQQLKGNHTKACIEITNHDQSRID

SEQ ID NO: 218504 - protein, 248 aa, Zea mays
  unsure (1)..(248): unsure at all Xaa locations
  Clone ID: MRT4577_130870C.1.pep
IGILEAGPGRRDARGRRRASPTRTTLPDRLCHCHATSTRFCRHAHAAPRTPPPPPLIPLRPSPPAXPNQSHPLPGSVHPSLLLPRAMAGVAYAGLATGSAEYEEVLGCLASLITQKVRADTGNRGNQWELMAKYVQILELEESIAQLKVVHVAGTKGKGSTCTFAESILRSCGFHTGLFTSPHLMDVRERFRLDGLDISEEKFIRYFWWCWKTLKDKTGDGVPMPAYFRFLALLAFKIFSDEQVFLTI

SEQ ID NO: 218505 - protein, 37 aa, Zea mays
  Clone ID: MRT4577_130871C.1.pep
NTQYKFSPSMTFAFSHPSFLLFNTLLGHNVIEGLPPI

SEQ ID NO: 218506 - protein, 57 aa, Zea mays
  Clone ID: MRT4577_130872C.1.pep
DSATFLDRADLSLERLIVNEGVMDDTEQDVLKIHIFLTLTESVTVDDQPEIPLYACY

SEQ ID NO: 218507 - protein, 94 aa, Zea mays
  unsure (1)..(94): unsure at all Xaa locations
  Clone ID: MRT4577_130873C.1.pep
ARGPIDYKSRGLRDFNRLLFRLAPPPPKNCLPVKNPCPRRSRFFRARPRQGAPACPFVSLHRGWAAPPRGXRGAPPRLGLPGPAPPLGCGLPAP

SEQ ID NO: 218508 - protein, 73 aa, Zea mays
  Clone ID: MRT4577_130874C.1.pep
FFLFPLRNLSLVKQQVIFGIDSYFKGINIAFISGKQLYKYAEGLENNHPHFKGNSESLSVKDQLKLYTFDVGN

SEQ ID NO: 218509 - protein, 69 aa, Zea mays
  Clone ID: MRT4577_130875C.1.pep
FLFLFFFFGVLDKMQLSSYFSSFSSSKPNKAFRKSDKDFNIQPKELPLAFLRHGTARAEHGMEYLKDSI

SEQ ID NO: 218510 - protein, 84 aa, Zea mays
  Clone ID: MRT4577_130876C.1.pep
SLVEIDLVLENESTTLRSEVERKSLFERVYILIFVHVLGVSKASFEMTTSSGLKATWNGGILTMSFGIGVSYGPCLTAPGSSLE

SEQ ID NO: 218511 - protein, 92 aa, Zea mays
  Clone ID: MRT4577_130877C.1.pep
MELPSNVSDGELMPMEEHKERALRHLLHRSKRPLEEFAAAVADVAEQLVSAYLDLGVEWHGADWRERFLASRTIARARWPGVGTQLSSSPSF

SEQ ID NO: 218512 - protein, 93 aa, Zea mays
  Clone ID: MRT4577_130878C.1.pep
QAYTLRTLKFCLLVSPKMMASSISVISASRSSKMTINNFTGRLQVSFATYYMTDKLLFALTLYNHSHEMTLSQATNVTANSNQAIYIVYKVYL

SEQ ID NO: 218513 - protein, 93 aa, Zea mays
  Clone ID: MRT4577_130879C.1.pep
MNVYSSILFIALFVSIAATSILEMQWGGVGIDDWWRNEQFWVIGGVSSHLFALCQGLLKVLGGVSTKFRVTLKGGGTDEFSELYEFKWTWLLV

SEQ ID NO: 218514 - protein, 121 aa, Zea mays
  unsure (1)..(121): unsure at all Xaa locations
  Clone ID: MRT4577_13087C.1.pep
GNPPFSLPGKGIGGFFPKETPLPPGEAFKGPQRVGFLPRPFLFFKETINLGSNGPGSFAWFLLGPFXRFPGFPPRFGLVFVAPHKNCPRSMKEFPQWFEPFPPPKKPPKKIFSPPLKSGAP

SEQ ID NO: 218515 - protein, 34 aa, Zea mays
  Clone ID: MRT4577_130880C.1.pep
SPSHSHTIYVAILSHNQFAKLNKYSQHKPKQNRA

SEQ ID NO: 218516 - protein, 354 aa, Zea mays
  Clone ID: MRT4577_130881C.1.pep
MERGDGGSGRPPAERKAAWRDGAVTYFHLLFYIAISGGQIFFNKWVLSSKEINFPYPVALTLLHMVFSSVVCFAITKVFKIIKIEEGMTTDIYITSVIPIGGMFAMTLWLGNSAYLYISVAFAQMLKAIMPVAVFLLGAAFGLEEMSYKMLSIMSVISVGVIVASVGEITISWVGVVYQMGGVVAEALRLIFIEIFLKKKGVKLNLISMMYYVSPCSAVCLFIPWLFLEKPKMDDSISWNFPPFTLFLNCLCTFVLNMSVFLVISRTSALTARVTGVVRDWSVVLLSAAIFADTQLTFINIIGYAIAIAGVVAYNNHKLKVKPQANPQQGDENKVISGSTQDVVLSVSSAKETS

SEQ ID NO: 218517 - protein, 108 aa, Zea mays
  unsure (1)..(108): unsure at all Xaa locations
  Clone ID: MRT4577_130882C.1.pep
PAQATAXTPPAQRRAXAPAREEAHAPQRRTGTAGTRPDPPTKGGGGXRTTRAGHPGXTSRKEAKRIKRDGEATXRSYVNRTNWFTLAVCTGLLVREPQEQKGCRTSTT

SEQ ID NO: 218518 - protein, 56 aa, Zea mays
  Clone ID: MRT4577_130883C.1.pep
QTHLTSTNNTSLVVPWFRLLISCNSIIKFFRIWNCNFLYLFHHIHHPKITRYISKF

SEQ ID NO: 218519 - protein, 68 aa, Zea mays
  Clone ID: MRT4577_130884C.1.pep
KITNLHTQYGRRHKIVHSFTSLHFTSPSLYIVFTIKTLLSPNLISLPDIPLSPPNLITNRPLPISLPN

SEQ ID NO: 218520 - protein, 133 aa, Zea mays
  unsure (1)..(133): unsure at all Xaa locations
  Clone ID: MRT4577_130885C.1.pep
GRTTGVRVEGFEIPTGIXTRFGDFELHDLGLLANWQLGVILRGEAEPFKVLKGGPDRPEVGLVNLRGLKGKFDGPSSLKDRLINIIFAKDVLGVVEGPSKGMQGPLEHIHRGWLFIYDRHNLEHAGFICPKAH

SEQ ID NO: 218521 - protein, 184 aa, Zea mays
  unsure (1)..(184): unsure at all Xaa locations
  Clone ID: MRT4577_130886C.1.pep
QQWSSNTLFLLLLLVLLAGGTNASIISPCXLPASIIILQFPIPXVSIMAFEHPTVQAXRYQQAXLAISARKQPISXIQQQSLTHITIQTIGTHHQQTLTHLTGANPNHYLKQHLPASIPLAXLTNAAIYQQQHQEPHCLXGLTTLTMQNPIXAYLQRQHIFIPSNSLWRMAPTYLIQQRIYYQH

SEQ ID NO: 218522 - protein, 178 aa, Zea mays
  unsure (1)..(178): unsure at all Xaa locations
  Clone ID: MRT4577_130887C.1.pep
FRANNAPVPRRLASIYSEVQTSRIAHTLPLPSVLRSHFTLADEPASTAARSPDEIAKLFSSLHGRXSTAVLPSAEPVATKPLKIGIVLPGGQVPGGXNRLLCVTDYLQEGAKGSTMYGLXGRPAGVMKGNYVELTADFVYPYGNQSSEIQNSCCIMGALSEMVNALDALNFFSPGEGA

SEQ ID NO: 218523 - protein, 63 aa, Zea mays
  Clone ID: MRT4577_130888C.1.pep
AHVFTKRREKKSRGPALYASWEGPSVFLFTKGFAPQLKRDWPDWGKRALLHLLGLGFGQGGGI

SEQ ID NO: 218524 - protein, 97 aa, Zea mays
  unsure (1)..(97): unsure at all Xaa locations
  Clone ID: MRT4577_130889C.1.pep
FRANNAPVPRRLASIYSEVQTSRIAHTLPLPSVLRSHFTLADEPASTAARSPDEIAKPFSSLHGRXSTAVLPSAEPVATKPLKIGIVLPGGQVPGGQ

SEQ ID NO: 218525 - protein, 48 aa, Zea mays
  Clone ID: MRT4577_13088C.1.pep
NKQFCFFLRETSNTISFKSRDNPRSLLFIYLFNKKFCPHLIIHFFLIC

SEQ ID NO: 218526 - protein, 81 aa, Zea mays
  Clone ID: MRT4577_130890C.1.pep
RTFGNKRRLQNPPIVFFFFFFFFLKKDEVQIIPKPRQTAHSSNYKVSFLSFLFQELWPGWGQGHTATAPRRLDREGGGLPA

SEQ ID NO: 218527 - protein, 43 aa, Zea mays
  Clone ID: MRT4577_130891C.1.pep
GWWFLSARAVGSIAFNITNLGVREDHTGNAIHNDASGDYRTGK

SEQ ID NO: 218528 - protein, 62 aa, Zea mays
  Clone ID: MRT4577_130892C.1.pep
TCSPKGGALWAESRSTNDPPVPPVNGGEDCFPYPFDRTNLKNVLSFPAKGIHVPASVLWCKL

SEQ ID NO: 218529 - protein, 74 aa, Zea mays
  Clone ID: MRT4577_130893C.1.pep
WLPPVRRFIRFYCPSPRQFCFLLLFYSLMFSYTSHVGVIFNAPSLNVDSAPVVSKKKKLSDRLGLILGVRSSGS

SEQ ID NO: 218530 - protein, 52 aa, Zea mays
  Clone ID: MRT4577_130894C.1.pep
TMMRSITIVGSYHATALDVCGRVRERRVGRAVRGMGNWRSVGREREYAPAFV

SEQ ID NO: 218531 - protein, 119 aa, Zea mays
  Clone ID: MRT4577_130895C.1.pep
LETTLSSQEKHKEKKHKKDKKDKDRKEGKEKKDKDRSRDKHKDKKDRKEKHKDEKYKAEDEEVKKKVDAKNALENYAYNMRNTIKDDKIASKLPAEDKKKIEDGRDGAISWLDSNQLAE

SEQ ID NO: 218532 - protein, 93 aa, Zea mays
  unsure (1)..(93): unsure at all Xaa locations
  Clone ID: MRT4577_130896C.1.pep
LMKWHDCHHVGHYSSHEIEYKNAVNDALKTALXIPSDSVTNYMTQIWMVTRSXIAHLLCTLHNAADNSNESLRRVADSSSDHCLLPSAKDHDQ

SEQ ID NO: 218533 - protein, 96 aa, Zea mays
  unsure (1)..(96): unsure at all Xaa locations
  Clone ID: MRT4577_130897C.1.pep
KTKIMYGDFFKAALQFFVNPGKFGFNTAFQGFFGAKRQGNYNFNLKKKFCKQGAKVFSNPFLXVNWDGIHITETGYKKVAKGWFNGPYFQPPIFKL

SEQ ID NO: 218534 - protein, 67 aa, Zea mays
  Clone ID: MRT4577_130898C.1.pep
CHLLHSLALARHERASYCVLMRLPLDWLLLTRKKAVIMSNPLHTKRPEPFQERMEAAIIYLGSCLNV

SEQ ID NO: 218535 - protein, 80 aa, Zea mays
  Clone ID: MRT4577_130899C.1.pep
QPGQNISPAHFIIDPKGRGRWGNPKRGAPPVPPFFYRIQTLFGGGKDLNGPLGYLKGTFKYSWKGRGAPQGQETEKAHTF

SEQ ID NO: 218536 - protein, 63 aa, Zea mays
  Clone ID: MRT4577_13089C.1.pep
DPWRSGPGWEGPSIYWIGWQLLQGASWINYPCLSASTDSVRAFSTSPCVRKSTHCGHILFVWP

SEQ ID NO: 218537 - protein, 66 aa, Zea mays
  Clone ID: MRT4577_1308C.1.pep
RYTYVEAVCNTSAPQHDTLTRRHAPTPELGRRLPHTDAGDAGRSSLVDDAHLEWPLWHYSLASALG

SEQ ID NO: 218538 - protein, 250 aa, Zea mays
  Clone ID: MRT4577_130900C.1.pep
WAAILGNHDQESTMTREELMTFMSLMDYSVSQVNPPGFLVHGFGNYHVGIHGPFGSELVNTSLLNLYFLDSGDREMVNGVKTYGWIRESQLAWLRSTSLELQKKIHAPALAFFHIPIPEVRGLWYSGFKGQYQEGVACSSVHSGVLGTLVSMGDVKSVFLGHDHLNDFCGNLNGIWFCYGGGFGYHAYGRPHWPRRARIIYSELKKGQRSWLEVDSISTWKLLDDEKLSKIDEQVIWRHSTDDSDHRVYL

SEQ ID NO: 218539 - protein, 48 aa, Zea mays
  Clone ID: MRT4577_130901C.1.pep
AVRTVFLVLSLQVSFRPCSEAVYFRMSSLHGRSTPVRSGLLSCILYLP

SEQ ID NO: 218540 - protein, 153 aa, Zea mays
  unsure (1)..(153): unsure at all Xaa locations
  Clone ID: MRT4577_130902C.1.pep
MVGGFLRRRRGRRSRTADDEEQAAQQDEAEQAAQQQAAPQDDDDQQQDASGSGGSSSRSIYLRGPASLPPRPILRDRRSLIRPEGERSWTVLDYAXGHRRPPNNILDLLCREHFSGLVEYAGVTGPAFHFDHYAVAPVAVDRDGREFHNKRSG

SEQ ID NO: 218541 - protein, 363 aa, Zea mays
  Clone ID: MRT4577_130903C.1.pep
TRSEKARRRKNAKAFPLLTTCWLLLQCYCHYATTRACAATRRRWTKRDAMDSRQGQQPNYKIYIRMMKTVLLDVKSTDTIDQIKSKIGALEGIDNSQQELFFAGSHLEKDNRLADYNIMTNSCVDLYVTDGMQISVSIPSVWKTIKLNVMKSQSVADVKAMIEQMGGIPLDEQILMHGCQKLEDNKLLSQCGLSNGHTLHVLVRPTDRLHISVDVDGEETLNLDVKSWYTVADVKLMIDTLEGLPARTQILMHTQPGGANTVLKDIETLQNQGIKNNDIVALYHKVNFFVKTYEGRNLVLSMRTCDTAEEIMKVIEEKLKVNTGVYYLHYRGRVLALGDTLRKHKIENNCTVDVRLRNSHVTK

SEQ ID NO: 218542 - protein, 98 aa, Zea mays
  Clone ID: MRT4577_130904C.1.pep
SSKNLISGPVVHQILIIDSSKLGNRSQSWGELERRWLGGALGARVRQHATNDGVRGGDSSARRSSVLSACRTGWLRALAARASRAGGAPAGLEEPNRP

SEQ ID NO: 218543 - protein, 135 aa, Zea mays
  Clone ID: MRT4577_130905C.1.pep
MVFVWLTAFFLVVALIVLVIYQLMCLADLEFDYINPFDSSSRINKVVMPEFVLQALLSVLFLLSGHWAMLLLSLPMVYYNYTLYQRRQHLVDVTEIFNQLGREKKRRLFKIVSLIVLLFLSLFWMIWSVLSEEDE

SEQ ID NO: 218544 - protein, 74 aa, Zea mays
  Clone ID: MRT4577_130906C.1.pep
VSHISGQEHRENHTLKDRVTPHRWTRTRITSLLTSCFRVLKATCPKSAMVLVITAERKLEELILPKAMIKGLSI

SEQ ID NO: 218545 - protein, 64 aa, Zea mays
  Clone ID: MRT4577_130907C.1.pep
SLLHQNRLLNKIFLHILPPPSKISFLHSLISFPTIYIAYFVHQPHTQLFPKTLFFFFFNSPTKI

SEQ ID NO: 218546 - protein, 51 aa, Zea mays
  Clone ID: MRT4577_130908C.1.pep
ECFSSIGSKLKHTMDNDSVRKLFLYRGRTQFYEEAIVTTILSRLDLSPLFS

SEQ ID NO: 218547 - protein, 58 aa, Zea mays
  Clone ID: MRT4577_130909C.1.pep
RKQATVATPRRDPDARRLRHPISLLPTCLAWLPWSVGRRGFLQSHCFGSSLYLSAPAP

SEQ ID NO: 218548 - protein, 36 aa, Zea mays
  Clone ID: MRT4577_13090C.1.pep
LSLALGCHAWQRRFNATACHCLVRVLLVPAGLVGYP

SEQ ID NO: 218549 - protein, 49 aa, Zea mays
  Clone ID: MRT4577_130910C.1.pep
DLRMTYGSISTTIFTTSNNTIRHVSSPTTVPTISEPSIHEEPCLLLTKT

SEQ ID NO: 218550 - protein, 95 aa, Zea mays
  Clone ID: MRT4577_130911C.1.pep
RLNQEVLGPSYLKNKHRIIRAYPMPYDRIISSGIPVLHSKLITWPPCHCTIRISRRTSTSSTSPTLWPNSFTRLPRTVSSTTNLATNTSRTPNCT

SEQ ID NO: 218551 - protein, 55 aa, Zea mays
  Clone ID: MRT4577_130912C.1.pep
RGLRRTTRRATLISMRERMATSGTTTREGRHNALLRQRADLILVFANMWSYYRVM

SEQ ID NO: 218552 - protein, 57 aa, Zea mays
  unsure (1)..(57): unsure at all Xaa locations
  Clone ID: MRT4577_130913C.1.pep
LGYMCGILVEFQTHVVHQSMTTGYSDSSSLLVQDSNKHLVSNTSGXGGPRTYLHIKH

SEQ ID NO: 218553 - protein, 202 aa, Zea mays
  unsure (1)..(202): unsure at all Xaa locations
  Clone ID: MRT4577_130914C.1.pep
MNQEAKDSRPSRSPSEPNLFLQWGSRKRLRCVKTRDDGSPSPSPSEGLRRAIPRATRPLLGADIAAFRRPSTFNRRKSDSLVNEYRHSMALSLEKDKYYTTRGSPFDGNGFDFGSITEDKGTTSLPRFFVALSNKEKEEDFMAMKGCKLPQRPKKRPKLMQKCLLMVSPGAWLSDLSHERYEVREKKSSKKRXRLEGFEHGE

SEQ ID NO: 218554 - protein, 70 aa, Zea mays
  Clone ID: MRT4577_130915C.1.pep
IPVLVAAIIVPRIWSQKKELGDKWRLTRFLNFYPEKNFGAQSASSLVLVPPFFLLVGKVPSPLAIGLFFM

SEQ ID NO: 218555 - protein, 202 aa, Zea mays
  unsure (1)..(202): unsure at all Xaa locations
  Clone ID: MRT4577_130916C.1.pep
MNQEAKDSRPSRSPSEPNLFLQWGSRKRLRCVKARDDGSPSPSPSEGLRRAIPRATRPLLGADIAAFRRPSTFNRRKSDSLVNEYRHSMALSLEKDKYYTTRGSPFDGNGFDFGSIAEEKGTTALPRFFVALSNKEKEEDFMAMKGCKLPQRPKKRPKLMQKCLLMVSPGAWLSDLSHERYEVREKKSSKKRXRLEGFDHGE

SEQ ID NO: 218556 - protein, 79 aa, Zea mays
  Clone ID: MRT4577_130917C.1.pep
PVEKDSIRSRTVDLLAEEHRMKRTHEIERDSHVLNNAISRRGVPIVKSKGMTQHLEIQRAIHPVRLRELQPTEPVGPAP

SEQ ID NO: 218557 - protein, 49 aa, Zea mays
  Clone ID: MRT4577_130918C.1.pep
LSSSSPPSPSTSDGRRIAVKRLDKASGQGLKELRNELPLVAKLRHNNLG

SEQ ID NO: 218558 - protein, 62 aa, Zea mays
  Clone ID: MRT4577_130919C.1.pep
RPAPPGCPPPGSRKRARSITRLAWGKVLPVYRVAPWVPFFIGIPPDSVKCKYPLWVPKEVFT

SEQ ID NO: 218559 - protein, 95 aa, Zea mays
  unsure (1)..(95): unsure at all Xaa locations
  Clone ID: MRT4577_13091C.1.pep
DRALYAVHLIMQSRNTKLSKKLKEHIQDNVGRAVTKHCHLNREVDMRLFKRGNXSSGGPPTXHWEITLITKRHGXVLRADEDTKTTYASIDLNAI

SEQ ID NO: 218560 - protein, 64 aa, Zea mays
  unsure (1)..(64): unsure at all Xaa locations
  Clone ID: MRT4577_130920C.1.pep
LLTRTLTATRLLXYCHYQYSSDRILNLHTKPISHYYYHYNIHINLSLILLYNKKNYTTLYPYLY

SEQ ID NO: 218561 - protein, 191 aa, Zea mays
  unsure (1)..(191): unsure at all Xaa locations
  Clone ID: MRT4577_130921C.1.pep
MKGRNDSGHSKRPVVLCCVMIVCLCLLFLYFSGSNGQAGSAAFEYGTKFSRSLXGWGSDDXGEDGPEESIFGTGDADDVKPKSFPXNLIYQMRLKLDLNLMEHYERHCPPPERRFNCLIPPPHGYKVPIKWPKSRDVVWKANIPHTHLAKEKSDQNWMXEAGGKIXFPGGGNHFHHGADNIYQYCNMLNFR

SEQ ID NO: 218562 - protein, 78 aa, Zea mays
  unsure (1)..(78): unsure at all Xaa locations
  Clone ID: MRT4577_130922C.1.pep
VRGHKQAVVIIGVXWRPRPNRRPRGQGATDYLSCSLTFANLAFAPVGNRYRLISSAAGGGRLRVERLAAARGMTAVSK

SEQ ID NO: 218563 - protein, 609 aa, Zea mays
  Clone ID: MRT4577_130923C.1.pep
MRGRNDSGNSKPVVLCCVMIVCLCLLFLYFSGSNGQAGSTAFEYGTKFSRSLGWGSDDGSEESIFGTGDADDVKPKSFLVCDDRHSELIPCLDRNLIYQMRLKLDLNLMEHYERHCPPPERRFNCLIPPPHGYKVPIKWPKSRDVVWKANIPHTHLAKEKSDQNWMVEAGEKIKFPGGGTHFHHGADKYISNIANMLNFKDNNINNEGMLRTVLDVGCGVASFGGYLLSSNVIAMSLAPNDVHQNQIQFALERGIPAYLGVLGTKRLPYPSRSFELAHCSRCRIDWLQRDGILLLELDRLLRPGGYFAYSSPEAYAQDEEDLRIWKEMSALVERMCWKIAEKRNQTVIWVKPLNNDCYKRRAHGTTPPLCKSGDDPDSVWGVPMEACITPYPEQMHRDGGSGLAPWPARLTTPPPRLADLYVTADTFEKDTEMWQQRVEKYWSLLGPKVKPDTIRNIMDMKANFGSFAAALKEKDVWVMNVVPHDGPSTLKIIYDRGLIGSNHDWCEAFSTYPRTYDLLHAWAVFSDLDKRGCSAEDLLLEMDRILRPTGFAIVRDKGTVIEFIKKYLHALHWEAVAAADAEPSSESEENEMILVIRKKLWLPEAGSHT

SEQ ID NO: 218564 - protein, 437 aa, Zea mays
  Clone ID: MRT4577_130924C.1.pep
ENITKVRTFVCSREGYNRDKKSLEAKKPRLDTRIGCPARLIIKVTPECKYRVTDFKADHNHQLAPPSTMHMLRSQRILTELQPGEAELSDDSVVTPTTKATGDLVVRQVSFLRSLSLLPADYKNYLRSKRMKAMQPGDGGAILKYLQTMQMDNPSFFYTMQIDEDDKLTNFFWADQKSRDDFNYFGDVLCLDTTYKINGYGRPLALFLGVNHHKQTIIFGAAMLYDESFDSYKWLFDSFKIAMHGKQPAVALIDQSIPLSSAMAAAWPSTTQRICAWHVYQNSLKHLNHVFQGSKTFAKDFGKCVFGYEDEDEFVFSWRSMLEKYDLRHNEWLSKVFAEKEQWALAYDRHIFCADIISALQAESFSSILKKFLSPQLELLSFFKHYERAVDEHRYAELQADFQASQSYPRIPPAKMSWQTAHTYTPVVFEIFRKEFE

SEQ ID NO: 218565 - protein, 200 aa, Zea mays
  unsure (1)..(200): unsure at all Xaa locations
  Clone ID: MRT4577_130925C.1.pep
MRGRNDSGNSKPVVLCCVMIVCLCLLFLYFSGSNGQAGSTAFEYGTKFSRSLGWGSDDGSEESIFGTGDADDVKPKSFLVCDDRHSELIPCLDRNLIYQMRLKLDLNLMEHYERHCPPPERRFNCLIPPPHGYKVPIKWPKSRDVVWKANIPHTHLAKEKSDQNWMVEAGEKIRFPGGGTHFHHGADXYISNIANMLNFK

SEQ ID NO: 218566 - protein, 61 aa, Zea mays
  unsure (1)..(61): unsure at all Xaa locations
  Clone ID: MRT4577_130926C.1.pep
GVLLRWDCATCVVLHVRDASTHPRHAYVSGAIINLYSLKRHFRCAFXXLXHSYGPCXPHDT

SEQ ID NO: 218567 - protein, 161 aa, Zea mays
  unsure (1)..(161): unsure at all Xaa locations
  Clone ID: MRT4577_130927C.1.pep
MKGRNDSGHSKRPVVLCCVMIVCLCLLFLYFSGSNGQAGSAAFEYGTKFSRSLGWGSDDGEDGSEESIFGTGDADDVKPKSFPVCDDRHSELIPCLDRNLIYQMRLKLDLNLMEHYERHCPSPERRFNCLIPPPHGYKVPIKWPKXRDVVWKANXPHTHLA

SEQ ID NO: 218568 - protein, 153 aa, Zea mays
  Clone ID: MRT4577_130928C.1.pep
ATCHTRSEKKKMRKGFHRYFFFKPPYRRLVLAPACRRCKRVSRLNTLRHFLIACPPQLFVSHFHILGPYGRFFCALATLSEIELARPKSTAWTSPFSKLGENHHVRRFGFFFFFFFFFFFFFFFFTITTTFYTFCDINITSQTTVFLSYLTCW

SEQ ID NO: 218569 - protein, 68 aa, Zea mays
  Clone ID: MRT4577_130929C.1.pep
LDHTWQVLVLFHGAWGHSGCFVQVVFMSNDSQWAESARPLHSSSSGVGDPYIPKLADRSAYKACNLMK

SEQ ID NO: 218570 - protein, 45 aa, Zea mays
  Clone ID: MRT4577_13092C.1.pep
FFFFFFWSEIFLVQFGEPQYFMIPPETKLFFEFLISNTNRASLAD

SEQ ID NO: 218571 - protein, 94 aa, Zea mays
  Clone ID: MRT4577_130930C.1.pep
ADGRVKQAGRFFIDRHHPRCLARSNRVSSFVRRSSATASLLADVFFFPKDLQMWKILQRVCSQDLFKDHLYLAGLILKPIPTLPEKKKKKKTRA

SEQ ID NO: 218572 - protein, 201 aa, Zea mays
  unsure (1)..(201): unsure at all Xaa locations
  Clone ID: MRT4577_130931C.1.pep
PKVKPDTIRNIMDMKANFGSFAAALKEKDVWVMNVVPHDGPNTLKIIYDRGLIGSNHDXFRLQLTRERMNFYDERLLNLLAVLTYXYNLGANSFNTLCEAFSTYPRTYDLLHAWAVFSDLDKRGCSAEDLLLEMDRILRPTGFAIVRDKGTVIEFIKKYLHALHWEAVAAADAEPSSESEENEMILVIRKKLWLPEAGSHT

SEQ ID NO: 218573 - protein, 73 aa, Zea mays
  Clone ID: MRT4577_130932C.1.pep
ILQSNATRHVQYAIKRGISCQVSQPSVPKAYRGSQRHRGARSSPVSGQGRGGEATSRGASERARASGRPRLAG

SEQ ID NO: 218574 - protein, 75 aa, Zea mays
  Clone ID: MRT4577_130933C.1.pep
THRFKPNQDTPLSGKKPQFPPNVPCYIQPPFVLNLKGVAQFETYPFLHNTYPTHGFREGRFNFNLCWKMPAQDCP

SEQ ID NO: 218575 - protein, 98 aa, Zea mays
  Clone ID: MRT4577_130934C.1.pep
VPHICSLIPSSLGGVLPALPPSKNWALQAPPLGFSQERAFSFVPFQKLPPLFGCVGYVMLSFRFPPLGCKCPPSFPRRTLWMPAFFGPRVYTRFKTLF

SEQ ID NO: 218576 - protein, 54 aa, Zea mays
  Clone ID: MRT4577_130935C.1.pep
MSAMAAAGEAEYGECVQKGSLQQHQAPQPSPGALFYTHDGVAVYRNPVMPAFYQ

SEQ ID NO: 218577 - protein, 123 aa, Zea mays
  Clone ID: MRT4577_130936C.1.pep
MNLFKSVFSEDPDPPRPGSNHASPDKAPDPHSPPRSNATESAAGGGGGDGWNFGGLIKTLTSKSESIIETYRRDLQEFGTGLKKEIEVAQGSLGTVGHVIDEFGNTVVKGTAQIISQGKDAIL

SEQ ID NO: 218578 - protein, 78 aa, Zea mays
  Clone ID: MRT4577_130937C.1.pep
AQKKAQKKGGLFPQEGGQGGGSLKPGAQKCGGSIPGFPWEYHFHSPSPGGLPKVPPYLPKKSQVFFVVQKNPLGLLGR

SEQ ID NO: 218579 - protein, 59 aa, Zea mays
  Clone ID: MRT4577_130938C.1.pep
MAVKIFALLALLALSASVATVTIIPHCSQQYLSPVTAVRFEYPTIHSYRLSVAFTASIL

SEQ ID NO: 218580 - protein, 92 aa, Zea mays
  Clone ID: MRT4577_130939C.1.pep
AIATLGRHTGAKEQAAASLIRRRVGGVADGRCNVEQGTTWSSIVIKLEKSPFNAWSSRPGSAGGTLSPSHFHVLLPVRTMPCFSSVCVAVRG

SEQ ID NO: 218581 - protein, 66 aa, Zea mays
  unsure (1)..(66): unsure at all Xaa locations
  Clone ID: MRT4577_13093C.1.pep
RKFTYRCLPTLNFXFGAPNXNXLAXVLKPWEWKNXGVTQLKRFGKNPPFXSLANNEKAPXDRXSQK

SEQ ID NO: 218582 - protein, 66 aa, Zea mays
  unsure (1)..(66): unsure at all Xaa locations
  Clone ID: MRT4577_130940C.1.pep
AHGHXLTSAHAGEEEIGXERGPPPPQSKYILLEKKKDCNCWLQPLLTWQFCWLPTTLSLNSLNPEV

SEQ ID NO: 218583 - protein, 83 aa, Zea mays
  unsure (1)..(83): unsure at all Xaa locations
  Clone ID: MRT4577_130941C.1.pep
PWLSMAKYTVRSCVIRQNEKILRYATVKLEKTKHLLGQLLNVTYYELTTTNFTRTVCFXLXIRYQIEPAIKHDTSCRIYTMKF

SEQ ID NO: 218584 - protein, 154 aa, Zea mays
  unsure (1)..(154): unsure at all Xaa locations
  Clone ID: MRT4577_130942C.1.pep
VPFFFFFLTNPXTSLQSTYFKSPTTQQTSLLFYYTPHNYYLHTSKTHPFLNNTLLIHINYLPTPPYQQIITTPSSXTSTQTTXPLSPSHQHLPSHSXPPLLNFHKLTHIISIXSTPNLPPNQIPPPNPNFNYLNSFPPLTNTTSPNHHTSTSPT

SEQ ID NO: 218585 - protein, 62 aa, Zea mays
  Clone ID: MRT4577_130943C.1.pep
MGSSWFSCTLPNHPKLPIDNAVAAVQLYRWLEVNLDQYNCIHVLQTPVMDSLKNVALEKCRL

SEQ ID NO: 218586 - protein, 78 aa, Zea mays
  Clone ID: MRT4577_130944C.1.pep
LIICSSNLMSTLRRNQNTLTCTLTDANAKTGCNEDRSHTATNPTKAFNKHTVQPAIFGHARQGRIPYLSRRPPVCWTP

SEQ ID NO: 218587 - protein, 63 aa, Zea mays
  Clone ID: MRT4577_130945C.1.pep
SLGSHYYQHAIIHSHPLSSLPFTYSPPISPPTPSPSSFHYSLTSSPNNPNSRSTCHFQQLAHT

SEQ ID NO: 218588 - protein, 182 aa, Zea mays
  Clone ID: MRT4577_130946C.1.pep
MQSPASEASVERRAVQEENHLATNSEILAAADKLAECQETITMLSKQLQALKTPATPGPLDASSACIPRTSSAKSDYKPQSLASILAEASTSPSPTPTTPTPQVLSKEDEGEVRATATPTTRSAARQEENDAGGNNSVQIVVVHAEPRPDDGGSADPTKRRKKRGTSLLGRIVFRKRAEGGS

SEQ ID NO: 218589 - protein, 35 aa, Zea mays
  Clone ID: MRT4577_130947C.1.pep
SYSPASEASVERRAVQEENHLATVSYGVCESVYSY

SEQ ID NO: 218590 - protein, 751 aa, Zea mays
  Clone ID: MRT4577_130948C.1.pep
FGHQLQTSEKRRVGGKLLLYDSCAHSSTVLGNLGGEEEESSGSQRTTHYSWLHGFLTSLCGGDPAMRIVVWFRRDLRVEDNPALAAAARAGGEVVPAYVWSPEEEGPYYPGRVSRWWISQSLNHLDASLRRLGAGKLVTRRSADAAVALLQLVRDTGATHVYFNHLYDPISLVRDRRLKEMLAAEGIVVQSFNSDLLYEPWEVVDDEGQPFTMFDPFWNRCLSMPYDPPAPLLPPKRINSGDLSMCPSEDLIFEDESERGSNALLARAWTPGWQNADKALTAFLNGPLADYSVNRKKADSASTSLLSPHLHFGELSVRKVFHLVRMKQLVWSNEGNHAAEESCTLFLRSIGLREYSRYLSFNHPSSHERPLLAHLRFFPWVVDESYFKIWRQGRTGYPLVDAGMRELWATGWLHDRIRVVVASFFVKVLQLPWRWGMKYFWDTLLDADLESDALGWQYITGSLPDGRELDRIDNPQFEGYKFDPHGEYVRRWIPELARLPTEWIHHPWDAPVSVLQAAGIELGSNYPLPIVELDAAKGRLQAALSEMWQLEAASRATMNNGTEEGLGDSSEVLFPQELQMEVDRQPAPAEAAANVHVPVPMPARRRGDQMVPTMTTSSLNRAGTEVSADLVVANSEEEDTRAQVPFHAHLHPRAEAPPAARRTNNGARQHDVFQQPRNHRRDALLAPSASEASSSWTGREGAVVPVWSPPAASGHSDAFAADEADVSSRSYLGRHPQSHRLMNWSQLSQSS

SEQ ID NO: 218591 - protein, 91 aa, Zea mays
  Clone ID: MRT4577_130949C.1.pep
LLYCLGPKIIDILVFKKKKKKGEIKKKKKKKKKRANDIKRSNAYVRLPCKDKAYLIVKLKFNLIGRGVPFKGPGLTPALFNLILFFWVPQI

SEQ ID NO: 218592 - protein, 101 aa, Zea mays
  Clone ID: MRT4577_13094C.1.pep
CAATHATKISEAQALEGTHNLAMEALQPNIQAGIHTRNLPVKQLGGMIFGCKPWEMVMWSIYADSCMISSSLCLYYLSNLMSSSPLQLIAWTLSQLCLYSD

SEQ ID NO: 218593 - protein, 700 aa, Zea mays
  Clone ID: MRT4577_130950C.1.pep
MSVSPSSLCGGDPAMRIVVWFRRDLRVEDNPALAAAARAGGEVVPAYVWSPEEEGPYYPGRVSRWWISQSLNHLDASLRRLGAGKLVTRRSADAAVALLQLVRDTGATHVYFNHLYDPISLVRDRRLKEMLAAEGIVVQSFNSDLLYEPWEVVDDEGQPFTMFDPFWNRCLSMPYDPPAPLLPPKRINSGDLSMCPSEDLIFEDESERGSNALLARAWTPGWQNADKALTAFLNGPLADYSVNRKKADSASTSLLSPHLHFGELSVRKVFHLVRMKQLVWSNEGNHAAEESCTLFLRSIGLREYSRYLSFNHPSSHERPLLAHLRFFPWVVDESYFKIWRQGRTGYPLVDAGMRELWATGWLHDRIRVVVASFFVKVLQLPWRWGMKYFWDTLLDADLESDALGWQYITGSLPDGRELDRIDNPQFEGYKFDPHGEYVRRWIPELARLPTEWIHHPWDAPVSVLQAAGIELGSNYPLPIVELDAAKGRLQAALSEMWQLEAASRATMNNGTEEGLGDSSEVLFPQELQMEVDRQPAPAEAAANVHVPVPMPARRRGDQMVPTMTTSSLNRAGTEVSADLVVANSEEEDTRAQVPFHAHLHPRAEAPPAARRTNNGARQHDVFQQPRNHRREALLAPSASEASSSWTGREGAVVPVWSPPAASGHSDAFAADEADVSSRSYLGRHPQSHRLMNWSQLSQSS

SEQ ID NO: 218594 - protein, 44 aa, Zea mays
  Clone ID: MRT4577_130951C.1.pep
LLRATVMGSDQQPQSRPRRRVSCMNRLEGVLGRRPLDNVTALLP

SEQ ID NO: 218595 - protein, 177 aa, Zea mays
  Clone ID: MRT4577_130952C.1.pep
MTMKALIMKLCGIRSGVVGGLGYDFSFLMLFFTYGLCFYVGAQFVRQGKTTFLDVFKGFFALVLAAIGVPQASALASDATKARDSAISIFGVLDRESKIDSSSGDGMTLENVSGNIDFSNVSFKYPLRPDVQIFSNFTLCIPGKDSGSHQVTPPPHVDFADRCLNSSGGATNNNPMS

SEQ ID NO: 218596 - protein, 64 aa, Zea mays
  Clone ID: MRT4577_130953C.1.pep
LGSRLRIAFTCGDITSRALTIAYSSIGMIFPWWLGMRLSNDEVQQLVRKMANWLKVGCHIFFTE

SEQ ID NO: 218597 - protein, 59 aa, Zea mays
  Clone ID: MRT4577_130954C.1.pep
GRPMTRATETYHSCSREETEFTKQHNPNRERHRVCCAGWTYHPCHQSALENEASAVVKP

SEQ ID NO: 218598 - protein, 51 aa, Zea mays
  Clone ID: MRT4577_130955C.1.pep
LPHHKRQGVLNPDVAELPLSVPGVVHSHVVMVPRSNSSVVNVDQLMVLFVQ

SEQ ID NO: 218599 - protein, 317 aa, Zea mays
  Clone ID: MRT4577_130956C.1.pep
MAAAAPASSVKEVLPSPLTSASEPPPLFDGTTRLYVAYLCPFAQRAWIARNYKVVPSPSPPFSDLLKRFSLICGVFRERETETFFCSSPSVQGLQDKIKIVAIDLADRPAWYKEKVYPENKVPSLEHDNQVKGESLDLVKYIDSNFEGPSLLPEDHAKQQFAEELLGYTDAFNKAFYSCLVDREDVSEEAVAALDKIEDALGKFNDGPFFLGQFSLVDVAYVPFIERFQILYSNIKNYDVTKGRPNLQKFIEEVNKIDAYTQTKLDPQFLLEQTKKRLGLISKHLTNLRFEHPDCLKPVTKDETFARSTSVVDRSSF

SEQ ID NO: 218600 - protein, 71 aa, Zea mays
  Clone ID: MRT4577_130957C.1.pep
VVHHQRRNHTVHRIVVGRQVNKRDPHRPFVWWVHPSQGSKFITHVDSEVAAIVQMTHAVGRAEASLVPTSP

SEQ ID NO: 218601 - protein, 262 aa, Zea mays
  Clone ID: MRT4577_130958C.1.pep
MAAAAPASSVKEVLPSPLTSASEPPPLFDGTTRLYVAYLCPFAQRAWIARNYKGLQDKIKIVAIDLADRPAWYKEKVYPENKVPSLEHDNQVKGESLDLVKYIDSNFEGPSLLPEDPAKQQFAEELLGYTDAFNKAFYSCLVDREDVSEEAGNRTSSHVWFVWKKKCLFNKMLIASFHVFTSVAALDKIEDASSGKFNDGPFFLGQFSLILFAYVPFIVRFHILYHTIKIYDIKKGKFMPTHTLRRTLKFLLAYTKNRLGIA

SEQ ID NO: 218602 - protein, 242 aa, Zea mays
  Clone ID: MRT4577_130959C.1.pep
MAAAASASSVKEVLPSPLTSASEPPPLFDGTTRLYVAYLCPFAQRAWIARNYKGLQDKIKIVAIDLADRPAWYKEKVYPENKVPSLEHDNQVKGESLDLVKYIDSNFEGPSLLPEDPAKQQFAEELLGYTDAFNKAFYSCLVDREDVSEEAVAALDKIEDALGKFNDGPFFLGQFSLVDIAYVPFIERFQILYSNIKNYDITKGRPNLQKFIEEVNKIDAYTQTKLDPQFLLEQTKKRLGIA

SEQ ID NO: 218603 - protein, 65 aa, Zea mays
  Clone ID: MRT4577_13095C.1.pep
GQDPIVEVFAILEGVVVALSIERDIGLWSSNGKVIWVYECLSPTCFSFPFSAVVGCLKLWRLKRC

SEQ ID NO: 218604 - protein, 48 aa, Zea mays
  Clone ID: MRT4577_130960C.1.pep
FSSITTTKGVLYYPPKRSTPSPTKILHELGLTSSNPFRQEGRFEAPKM

SEQ ID NO: 218605 - protein, 289 aa, Zea mays
  unsure (1)..(289): unsure at all Xaa locations
  Clone ID: MRT4577_130961C.1.pep
MARSSLVSPGSPFPSPRIKIRCPRQEDAAHYHLRLRDRSSSQTVIVAMAAAAPASSVKEVLPSPLTSASEPPPLFDGTTRLYVAYHCPYAQRAWIARNYKGLQDKIKIVAIDLADRPAWYKEKVYPENKVPSLEHNNQVKGESLDLVKYIDSNFEGPSLLPEDPXKKQFAEELLAYTDAFNKALYFCIVSKEDVSEEAVAALDKIEDALGKFNEGPFSLGQFSLVDIAYVPFIERFQIFYSNIKNYDITKGRPNLQKFIEEVDKIDAYTQTKQDPQFLLEQTKKRLGIA

SEQ ID NO: 218606 - protein, 86 aa, Zea mays
  Clone ID: MRT4577_130962C.1.pep
RPAPLARLCRVRGLLRHRVRLRARREEEKGLPRGHRRRRGGVEEELSCLSRDTRLDQNSGLSRDLSEKRSQYGYGENSEFRKKRRV

SEQ ID NO: 218607 - protein, 242 aa, Zea mays
  unsure (1)..(242): unsure at all Xaa locations
  Clone ID: MRT4577_130963C.1.pep
MAAAAPASSVKEVLPSPLTSASEPPPLFDGTTRLYVAYHCPYAQRAWIARNYKGLQDKIKIVAIDLADRPTWYKEKVYPENKVPSLEHNNQVKGESLDLVKYIDSNFEGPSLLPEDPSKKQFAEELLAYTDAFNKALYFSIVSKEDVSXEAVAALDKIEDALGKFNEGPFSLGQFSLVDIAYVPFIERVQIFYSNIKNYDITKGRPNLQKFIEEVNKIDAYTQTKLDPDFLLEQTKKRLGIA

SEQ ID NO: 218608 - protein, 81 aa, Zea mays
  Clone ID: MRT4577_130964C.1.pep
PPAAAAPSPSPSQSVKVGRGRRRSAHERLYKARRAEAEEMRRRTSLPYRQGQLLFGCIGLGGRSYGIARGINAAAAVSSRS

SEQ ID NO: 218609 - protein, 36 aa, Zea mays
  Clone ID: MRT4577_130965C.1.pep
ITAFMIQVNAHLESNLWVLPPYSFLDSVGRSPRTSG

SEQ ID NO: 218610 - protein, 235 aa, Zea mays
  Clone ID: MRT4577_130966C.1.pep
PRVRADELFHNGQIRLAAALLLQPDGDADTDPAAGAQHENQQRAEAADERGRVRSRSVRRKARSMSPFRTHWRSASQVPVPKPESAGESQQQQPAAASRSSSSSSTASSSASSSRGSRRWSGFLKDLLHRSKSDGGKSSQQQPHSHHHRAGAPPAAAAPSPSPSPSPSVKVGRGRRRSAHERLYEARRAEAEEMRRRTSLPYRQGQLLFGCIGLGGRSYGIARGINAPPAVSSRS

SEQ ID NO: 218611 - protein, 79 aa, Zea mays
  Clone ID: MRT4577_130967C.1.pep
GSIAEAYIADECLTFCSKYMDDVETKFNREPRNKGFSNEEAYTVDVFGHGVNFTSAPELVYDDSAMDQMVWYVLNNCSQ

SEQ ID NO: 218612 - protein, 75 aa, Zea mays
  Clone ID: MRT4577_130968C.1.pep
LSLSLLPSYFNNKDLFYINVFLQTYLLSLNINYYLHFTSQFHSTINTLSLKLQFLPLSSTLFNKQYNLYTTTTIS

SEQ ID NO: 218613 - protein, 233 aa, Zea mays
  Clone ID: MRT4577_130969C.1.pep
REPPPPLSLPSLFSLRSPLSSLPSPRSSLSRPSSSSRPRLQRPRLSSAPRRTDAGHPARPAEPQPRAPSKSSLSEFDDLAGHPGFDKQGTRFKRLIKDQNNHKDLEEGINRLVLCSGKVYYELDEERRKTERTDVAICRVEQLCPFPYDLIQRELKRYPRTLKGGRADWLIEKCIELGASSVTPVLIEQCHTIAENRVDRLQRLVLDAVKQCMEFGYHLRSWPVKQCTEFGVK

SEQ ID NO: 218614 - protein, 60 aa, Zea mays
  Clone ID: MRT4577_13096C.1.pep
GVLTIKNTEIAKHLSLPPVKLHCSMLAEDAIKAAVKDYEAKKAKMGQKGVDSPSEKAAEA

SEQ ID NO: 218615 - protein, 129 aa, Zea mays
  Clone ID: MRT4577_130970C.1.pep
HTLRPGGDSGGGVDPPGDAVATAAEPDAAEEELALAVRQRRPAPHLLGSRRAAPRTAARARTSYLPLPTYTDGDGDGDGDGAAAAGGAPAQWWWWECGCCCCCCCWWLLLPPSDLLRWSRSLRNPLQRR

SEQ ID NO: 218616 - protein, 110 aa, Zea mays
  unsure (1)..(110): unsure at all Xaa locations
  Clone ID: MRT4577_130971C.1.pep
RCIHLQEMTTRLGPDMNLPAFRPPQVTLSEHFNSIATLSLLSKLAXAQGWGQWSGQAPASQPQWTGVGWTQAPPGTWTPPPQGSQPVPGWVPPVSQPPAGSHPFQAWMAP

SEQ ID NO: 218617 - protein, 189 aa, Zea mays
  unsure (1)..(189): unsure at all Xaa locations
  Clone ID: MRT4577_130972C.1.pep
IGSICCNKVQIAAWTLRRGLRLRANKLSERHAIGKARQATDDKDYKDTPPAPLFKPGELQSXWAFYRAGMAEXYAATFLFLYISILTVMGXSKSTSKCATXVGIQGIAXSFGVMIFALVYCTVGISGGDINPGVTFGLFLARKLSLTRAVFYIIMQCLGAICVAGVIKVFQXGLHMGNVGAANVYRIGY

SEQ ID NO: 218618 - protein, 128 aa, Zea mays
  Clone ID: MRT4577_130973C.1.pep
AGRAGVRRLRSLPCCPDELPPLTQAQHHSAEHPVIAELNAFLYSDSLSASPPHLHHHHLPPATTKLNPIDLRVLQIPRGTDRPSYKRCTECPPSLAVLSSDSPIALPDSRELDLKELQALVQNVSYPD

SEQ ID NO: 218619 - protein, 31 aa, Zea mays
  Clone ID: MRT4577_130974C.1.pep
TRDLGPSYSWLDIRAECGFLQACELRSIASS

SEQ ID NO: 218620 - protein, 61 aa, Zea mays
  unsure (1)..(61): unsure at all Xaa locations
  Clone ID: MRT4577_130975C.1.pep
VSCFMAELSEEVGNIGFIRFDDXSIRRRPPRFNNPGVEYGPFVALNDSHFHRKFGSRVDFT

SEQ ID NO: 218621 - protein, 48 aa, Zea mays
  Clone ID: MRT4577_130976C.1.pep
LHPHLIPQAVEQHHLDHLRHPALSAHPCPLYRFPNPRLGPEGLRASSS

SEQ ID NO: 218622 - protein, 59 aa, Zea mays
  Clone ID: MRT4577_130977C.1.pep
AFGVGFTIAIVLTWGISRSPFLPFQCAIAKDNVPYPICRTPLPNQPCHLKEDHPHLPIV

SEQ ID NO: 218623 - protein, 125 aa, Zea mays
  Clone ID: MRT4577_130978C.1.pep
GPDLEVEAAEALLDQLKLPGGHGRGHGHGAGGGTPRGGPRLLFGAGAGAFWPAGLGPRVGRRVNVKGGQVFWEHKHPLKPAGLGGARALKQHWGLRRGRGSQVGTGGNKGWPFDCCLRVGGPRAK

SEQ ID NO: 218624 - protein, 124 aa, Zea mays
  Clone ID: MRT4577_130979C.1.pep
SFLVVLAPHSAGVEKTRGDKDMILRTRFKDYTRMPALTLVNMTMALNIYALVTHITHDDIKVFTPEPEDPVALLTNTNHLYKTFCCIRMLKITGLNFDAYHGYKNTLLRALLLRMRPMMVMTWL

SEQ ID NO: 218625 - protein, 100 aa, Zea mays
  unsure (1)..(100): unsure at all Xaa locations
  Clone ID: MRT4577_13097C.1.pep
ATEGDVELELETETSGPERPPEKPRTHDSGAADLERVTDYAEEKEIQSSNLETAMSVIGDRRSREQKAKQEREKEXAKVTIKKEDLELIMTEMEISRAAA

SEQ ID NO: 218626 - protein, 48 aa, Zea mays
  Clone ID: MRT4577_130980C.1.pep
FRNILFKGGRHGAVKFNREKFALFFVIIATPFFFPRALCSGSPPPEIS

SEQ ID NO: 218627 - protein, 45 aa, Zea mays
  Clone ID: MRT4577_130981C.1.pep
IRHILTIPMPIQKNPKMALMYLTPGSLHLRESRGKSFYRDIRDDP

SEQ ID NO: 218628 - protein, 69 aa, Zea mays
  Clone ID: MRT4577_130982C.1.pep
SCSFSRNMSLLGTRLYEAYQSERGFSYLQYKANHMRNAMPETPASRFTDGTIAARLPPGSTEPKHPRAE

SEQ ID NO: 218629 - protein, 39 aa, Zea mays
  Clone ID: MRT4577_130983C.1.pep
FGFTLQYVRPRMLDARVFELVSLYYRLSFFFFFFFFFFF

SEQ ID NO: 218630 - protein, 68 aa, Zea mays
  Clone ID: MRT4577_130984C.1.pep
CGRDALLDPPDSRSLDLVLAASRHIIQPFMICPFIAFRAAPPASSVVYSTQTSSRSRSRTPRVRPRVR

SEQ ID NO: 218631 - protein, 102 aa, Zea mays
  unsure (1)..(102): unsure at all Xaa locations
  Clone ID: MRT4577_130985C.1.pep
VRTSSLVQFGAVVKPDWVLMCRMEGLGPXFLVTHDRPVXESRRVMCDLLMVCSRSCPPVNXGPSMRTVYNDLCSRAAVVVFPLPQCTWSRAISLTVGTQFFH

SEQ ID NO: 218632 - protein, 44 aa, Zea mays
  unsure (1)..(44): unsure at all Xaa locations
  Clone ID: MRT4577_130986C.1.pep
KRXCXFGNKXYTXLMVIYXNPXPSTXKXYXXXPXHKXXQLXQNI

SEQ ID NO: 218633 - protein, 124 aa, Zea mays
  Clone ID: MRT4577_130987C.1.pep
GSLTGAAARLHSCTGSAREGPDKVYGAVLCPAVTGGADWARRFPNALGDITDGDSGWPCALHRDVDRYSELYQLRFYDRDFLRDFINALKWVDDTNPGPDAVAVAVRVDERFTELLSALVDALA

SEQ ID NO: 218634 - protein, 54 aa, Zea mays
  Clone ID: MRT4577_130988C.1.pep
GLDRLLPSKAGSFTPIDPKLFCSYVMSMEHLCHYLFLIICDIPMTLHHSHTCKT

SEQ ID NO: 218635 - protein, 105 aa, Zea mays
  unsure (1)..(105): unsure at all Xaa locations
  Clone ID: MRT4577_130989C.1.pep
MVVLSLSQGASGVGLGNFLEMGPLDVDLKPRNSTWLHKADLIFVDNPVGTGYSYVEDDSLFVTSDWQQAADMTTVVRALAKEVPTLASSPLFLVAESYGGKYAXT

SEQ ID NO: 218636 - protein, 75 aa, Zea mays
  Clone ID: MRT4577_13098C.1.pep
RTRGGRVGLSKRGLDFSCFMSVGLTQKWLSRTNGVIDLSRTFKKKQCLHMCGGCPQAQKNMCSPIADPTCTGLIN

SEQ ID NO: 218637 - protein, 458 aa, Zea mays
  Clone ID: MRT4577_130990C.1.pep
MDRPRCYSPLALHLLLCLVSLRACSAASITAGTPDESELWGYVEVRPKAHLFWWYYKSPQRTSTPSKPWPTVLWLQGGPGASGVGLGNFLEMGPLDVDLKPRNSTWLYKADLIFVDNPVGTGYSYVEDDSLFVTSDWQQAADMTTVVRALAKEVPTLASSPLFLVAESYGGKYAATLGASIARAVRAGELNVTLGGVAVGDSWISPEDFTLSYTPLLLSVSRLDDNAGDEANKKAETVKEQIVAGQWAASQKSWGSLLDFIDTKSGNVDVYNFMLDSGMDPVALPVGSSSLMSSLQAMKYSTYGQDSQPGSNTIDGIMNGVIKQKLKIIPKNFTWGQQSDSVYNALVNDFMKPRIDEIDELLSYGINVTVYNGQLDVICSTNGAEAWVQKLKWDGLRTFLSLPRQPLYCGASKGTKAFVRSHKNLHFYWILGAGHYVPADQPCIALSMISSITQSPAS

SEQ ID NO: 218638 - protein, 76 aa, Zea mays
  Clone ID: MRT4577_130991C.1.pep
SVSTTLLWPQAACSYICIKAGRIQLTEGNRINLLMESYQYTWLEYILSIYRRLISVIEEYMQTYRETSRILPLTPP

SEQ ID NO: 218639 - protein, 139 aa, Zea mays
  Clone ID: MRT4577_130992C.1.pep
IPLTLGLVNPNPYYQVKSKKNGTMGKLARGNYFLPFWGANKKTNKSPLPFKVHLFPAKGPLFFNKNLGPFYVFGAGFHFLNWTQGQASKIFGNHCFAPKIFKNGFYHPFKSLHNWGQGDPLKGPFLKLKPFSNLWPQGG

SEQ ID NO: 218640 - protein, 64 aa, Zea mays
  Clone ID: MRT4577_130993C.1.pep
NKCYLKKPSSLKSLGGFLNLIKRPTPPAFNPFFSSPKLGPEKQRGINPWVWNSSPGFPRLRKKL

SEQ ID NO: 218641 - protein, 49 aa, Zea mays
  Clone ID: MRT4577_130994C.1.pep
KAKCSKPIKVIGRILLFNNGPSSKSALFNNVRICCAHKKGNIAQAGNNY

SEQ ID NO: 218642 - protein, 203 aa, Zea mays
  unsure (1)..(203): unsure at all Xaa locations
  Clone ID: MRT4577_130995C.1.pep
MAAEVGANESVDPNTLYTKQECIGGGSFGKVYKGLDRRTGHTVAIKVIDVENAEDEVDDIMGEIMILSGMNSPYVTKYYGSYLAGTDLWIVMEFCSGGSCADLMKPGIIAEAEIAVILKELLMGLSYLHDDNKLHRDIKAANILVGSNGQVKLADFGVSGQLSATMTKKNTFVGTPFWMXPXVIKQSGYDGKADIWSLGITAL

SEQ ID NO: 218643 - protein, 64 aa, Zea mays
  Clone ID: MRT4577_130996C.1.pep
NNGVGDADAVADAADALAVLRLLVHGEQPIRAVHGVPQVTERGVLRVLVGEATAARYEQHHAVD

SEQ ID NO: 218644 - protein, 185 aa, Zea mays
  unsure (1)..(185): unsure at all Xaa locations
  Clone ID: MRT4577_130997C.1.pep
IIQCSSIVQCHDTRWFVTVLAFLTAASDSFHCNISGLILREIKEFWRVALLLSILFYRETETAAGTLNEHDELXRRDLLCSFIRLVSFSGFYWFSLPDLDGVWKLKPILDGKSIMGVMQVKSGGPLIGKWXLLTLLCPPLPVLLLQQQRVLKWQLAHPDGTVDECVEWMKQSQSKRQKVESSTSE

SEQ ID NO: 218645 - protein, 77 aa, Zea mays
  Clone ID: MRT4577_130998C.1.pep
GTSAHLHRKGVCFLSLLSCPYYPVHGHSTTRWSIEALVFNQTHLSTILHCRGSVKQCRPWSVQAVCPSDRITLTLNQ

SEQ ID NO: 218646 - protein, 86 aa, Zea mays
  Clone ID: MRT4577_130999C.1.pep
VMAPNLQEELSPREEIKLRSTRIAQPVAAPFESPAEVGLFCAPPYPRLADTCRRILLHLTLAQRNNDVRHPPPSLKNAQEIAQKPI

SEQ ID NO: 218647 - protein, 285 aa, Zea mays
  unsure (1)..(285): unsure at all Xaa locations
  Clone ID: MRT4577_13099C.1.pep
ALVHHHQSKHSRTLARRSSDDSHPTHSPTPWRPSSPPAPXPASVRLSAAAQAAAIQPSSPRFFFSSLAGTNPASPHRRIAIAVDLSDESAFAVKWAVQNYLRPGDAVVLLHVRPTSVLYGADWGSIPVSVADEADAAEDAAAAAEGGPSEEELQKKREEEYDAFTSTKAQDLAQPLVDAQIPFKIHVVKDHDMKERLCLEAERLGLSAMIMGSRGFGASRKGSKGRLGSVSDYCVHHCVCPVVVVRYPDDAADASGDASGATDELHTVPEDEPVYHDAPEVQKEN

SEQ ID NO: 218648 - protein, 77 aa, Zea mays
  Clone ID: MRT4577_1309C.1.pep
TIERKLKACLRLMKRVHSSCAPTQALHRYPPPSHPILTIPTVNTQTKKKKKKKNPHGRGPVSQLEGRHRHAPPPPPP

SEQ ID NO: 218649 - protein, 43 aa, Zea mays
  Clone ID: MRT4577_130C.1.pep
RPGSLITNRRPSAATCAYTAMVVLAPSGSMSTKLILSGSSRYA

SEQ ID NO: 218650 - protein, 76 aa, Zea mays
  Clone ID: MRT4577_131000C.1.pep
STVITKRQCWPFLYQLAANSTTLYQPQLRLPLVQRDLAWPPATYPLHVISRARSQNNDKLELPHVPFRIMYPTNQY

SEQ ID NO: 218651 - protein, 57 aa, Zea mays
  unsure (1)..(57): unsure at all Xaa locations
  Clone ID: MRT4577_131001C.1.pep
ARISSSRRAHVVTNNYLPSSLRFRSSISRAPSANEMAVLWKGSASSPCDWPXAAFST

SEQ ID NO: 218652 - protein, 298 aa, Zea mays
  Clone ID: MRT4577_131002C.1.pep
MDPFYFGPDQLDAAAAVDEDYLTSLGLVVLSPEPVAPLPGGAFEAYQRRAPALLEHSLQTMSRRYSGEQNMHRRMFSYLRRVAHDAGAAVVAAPAFPAPARESVPGFGVGTSQAPRSSRFRNIMRERLRRERLSQGFADLHALLPHGASSKGGKNDIVGAAAGYVRELVARKEQLSARNQELLEKAASRWKQQGGTRSGVGRGMVVKVQAESQDHSMALGAFVRVLQRLKAMEAGLQVTAIRTRFSAGGVWMNIGVEGQVSACDVDKSITNALIELEGNDPRSSKPRFSCQVETVQMD

SEQ ID NO: 218653 - protein, 107 aa, Zea mays
  unsure (1)..(107): unsure at all Xaa locations
  Clone ID: MRT4577_131003C.1.pep
RSLVLPYLAXTDGSICENPXFTPISLQXAISXGNIPLXPXRIQQWSTLFFEQSLVQIMKTHKLQKLVLPVIXQIALANLSAYSQQQQFLTFYQLYTLKPAAYLQQQL

SEQ ID NO: 218654 - protein, 241 aa, Zea mays
  unsure (1)..(241): unsure at all Xaa locations
  Clone ID: MRT4577_131004C.1.pep
PAEAPAWRPSLLVLPSQADLVHAALSLLPLPWRSPGSPRAQASAHPCACFFPMASSPILCSFPWPSCAAASSSLLLCPAIHGARLKLLPARRAPASLRAHRRCLPLLLFLARPLSSAQRARLARCVSNLLAGAPIAAPTPWLPCPARLALFLHGAQPPFPLLLPHRSPRSSSPCSSPCVCRDARLQLAGQILYVAPSSDFAARTSXVVLQLAKSRPCSSLRARLLFXRDPAXSARSGIVFS

SEQ ID NO: 218655 - protein, 47 aa, Zea mays
  Clone ID: MRT4577_131005C.1.pep
CLGQNVPLPSDAHPLAHYTLIPPRARVCGQGTHGMLRSRRVYHAARD

SEQ ID NO: 218656 - protein, 97 aa, Zea mays
  Clone ID: MRT4577_131006C.1.pep
VVRRNLRLGGGVGDRPYFNWGWGAPVTINSANLARPRGGLLYNFRFSEKMVQAWFFYFFGGSKSPGGGQGHILKSPPGGGNSPEKKRPPGAISGFRF

SEQ ID NO: 218657 - protein, 267 aa, Zea mays
  Clone ID: MRT4577_131007C.1.pep
MREVTSIHVGQAGIQIGNACWELYCLEHGIQPDGQMPSDKTIGGGDDAFNTFFSETGAGKHVPRAVFLDLEPTVVDEVRTGTYRQLFHPEQLISGKEDAANNFARGHYTIGKEIVDLCLDRIRKLADNCTGLQGFLVFNAVGGGTGSGLGSLLLERLSVDYGKKSKLGFTVYPFPQVSTAVVEPYNSVLSTHSLLEHTDVAVMLDNEAIYDICRRQLDIERPTYTNLNRLVAQVISSLTASLRFDGALNVDITEFQTNLVPYPRIHF

SEQ ID NO: 218658 - protein, 49 aa, Zea mays
  Clone ID: MRT4577_131008C.1.pep
SPSQSPSRSLPPDKTPAPPPPRQPTRPYHTIPPPLALLSLPRARFRGRA

SEQ ID NO: 218659 - protein, 140 aa, Zea mays
  unsure (1)..(140): unsure at all Xaa locations
  Clone ID: MRT4577_131009C.1.pep
PGDLVQIFPGGARKRFQRGFKRKPLALFKKLGKAKKDVSSCWKPKPVKTHFRKKNNVPXKIGNNFGVFNGKTFNQVXIKPXMIGPHPAEFSISXKPAKQGRAGIGSPPSSRFFSFKKTVTRFCSFPKGRWQRPISFFTCF

SEQ ID NO: 218660 - protein, 84 aa, Zea mays
  unsure (1)..(84): unsure at all Xaa locations
  Clone ID: MRT4577_13100C.1.pep
TKLAVRRVWGIALHVVLQLSERYTMQRPRFSDTVDAIKIVCTDVXSELFEKXLAMLNTTDRDTFDVLDNRAXWLTRVSLASSYR

SEQ ID NO: 218661 - protein, 66 aa, Zea mays
  Clone ID: MRT4577_131010C.1.pep
TKKKGEFRTKLENKQEDTNVPRMKKNSPNKNQDSHIRTETSEKGTNMAVNIKGRKKSRGERVEPHI

SEQ ID NO: 218662 - protein, 69 aa, Zea mays
  Clone ID: MRT4577_131011C.1.pep
LNHSQGLRVLPSPVVLVTPTVSTFGASNIIHILPLLKVGPFIARTRINHLCQLASPSGSKTRDTISLVG

SEQ ID NO: 218663 - protein, 66 aa, Zea mays
  Clone ID: MRT4577_131012C.1.pep
RFLVRRRNPPPFFPLSSYIPFRPVRFFPVLPCNPPTPYADLFASSISIWSLLSALLLCAHSSVRSS

SEQ ID NO: 218664 - protein, 75 aa, Zea mays
  Clone ID: MRT4577_131013C.1.pep
SSRDGRSVDGYCDHCSPRVPYGAEGGPAFSAYGGVRAWVLGDFGGPVEGQIPPLFSSGGSPPPKSVEPPIGGSKV

SEQ ID NO: 218665 - protein, 106 aa, Zea mays
  unsure (1)..(106): unsure at all Xaa locations
  Clone ID: MRT4577_131014C.1.pep
TMFTSLFQVLGSNNQRRSIKGMYEAXNNTNAWRVKLELIYHQKPIYRVLGYHFSGNDNXTTEGYPMKSQTQSEASMHQEIFNPKASSNRGSFMVHQSIRXXREFEX

SEQ ID NO: 218666 - protein, 37 aa, Zea mays
  Clone ID: MRT4577_131015C.1.pep
FIWICSFEPKYQIDDGYANTQDGLEKIFPLYLLENRL

SEQ ID NO: 218667 - protein, 155 aa, Zea mays
  unsure (1)..(155): unsure at all Xaa locations
  Clone ID: MRT4577_131016C.1.pep
MQASARPGAQRRTRPRQLFVAAPAAEQLITFSGFVVAQEQQPPPPPPPPCCSRDHPFEMVGTALIAHGASAEARCGXGDAAEAARSGRTSRRRSXWTSSAGSEDDHDEEEDGCSLSLSLATRSSRSSGDEGGRLSPTAATSWGSQISLDLSLSTL

SEQ ID NO: 218668 - protein, 109 aa, Zea mays
  Clone ID: MRT4577_131017C.1.pep
QDGNGQGTNQPGKQNSKDLRLSGWHQESHFVPKIGCPIQEIRQMNPLINLICGPGEHMLNPTKKWKWGAANQQTHLIKIANQCGNILVIETSRGSNSHMPSASLKDLEQ

SEQ ID NO: 218669 - protein, 126 aa, Zea mays
  Clone ID: MRT4577_131018C.1.pep
SPTITGDPFDPGPIRHRLMGDFFNLVSSTHAGRRRGAALMGRPSCTMGKRAVRGKTEGGAGVHGAGKGYHAGAAGKGLTMDGRWSRRAPWLPGKAECRPKCRGCSGVFEENAEWELEQGLLGRERA

SEQ ID NO: 218670 - protein, 84 aa, Zea mays
  Clone ID: MRT4577_131019C.1.pep
LPDRLPFPDSGAQGQANTFDAAKEVQANQPTVLHTLRGQVHLSSSFSEGGRSRNICSSFSPYERTSATPHYMTPSLWGPSMSVS

SEQ ID NO: 218671 - protein, 70 aa, Zea mays
  Clone ID: MRT4577_13101C.1.pep
AKIKTLVTYAENPGVKKLPSYKCPPKRVPKRTGPPSGAPYNSIHSMKDSGAGAGAGGPNGRPPGSGSWSG

SEQ ID NO: 218672 - protein, 65 aa, Zea mays
  Clone ID: MRT4577_131020C.1.pep
LTYEYSLYVYLHSLSIIRMWTENYILGRREYYLALSDTIYLFCFLHNLLMLISYNYSDYSTGVQS

SEQ ID NO: 218673 - protein, 73 aa, Zea mays
  Clone ID: MRT4577_131021C.1.pep
HEIYVASPEQLPLLARMWQHRLNQKLAIATVEMTLYIGSLNRCELLVASFLFCPNWNHFLLSYPHLEVVDSER

SEQ ID NO: 218674 - protein, 139 aa, Zea mays
  unsure (1)..(139): unsure at all Xaa locations
  Clone ID: MRT4577_131022C.1.pep
RGGLQRIFXKVXWRFFSERLFPLPGVSGFXKYVTPLEGGETPRFFEFFFALKSRSLASRVPLSFFLSGEKKKKKSPGRGPLAGFLFCFPPIPIFSGVLGFCVFGFPKLWSLPVFFPCLRVFGQPWPGSSFGGNWRPLFF

SEQ ID NO: 218675 - protein, 152 aa, Zea mays
  Clone ID: MRT4577_131023C.1.pep
LAPLRRPKTQPNPSHLPSHRITGPLPFRGWRSSVAVSATVSDLLSPAPSLKSRLAAGDTLYGLFLLSFSPTLAELAALAGYDYVVVDMEHGPGGIPEALACLRALDAARTPAVLRLPEASAVWAKKALDLGPAGLMLPAIESPEAAAEAVSH

SEQ ID NO: 218676 - protein, 96 aa, Zea mays
  Clone ID: MRT4577_131024C.1.pep
FCWAAVLSVVLFLYKVASKFMATIPSHFHTQKLLHVLGVLKPNKLVCKATVPEYQLNLGHFKQQRWNKGGVFFSWKKQQAWSTKTRLQPSFINFGN

SEQ ID NO: 218677 - protein, 238 aa, Zea mays
  unsure (1)..(238): unsure at all Xaa locations
  Clone ID: MRT4577_131025C.1.pep
FGTRAAASRPTLPRPPINAAPHPRPSFNGASARDRIHPASFHQYRITDRLPCRGRRSSIAVSAAASDLLSPVPSLKSRLAAGDTLYVLFLLSFSRTLAELAALAGYDYVVVDMEHGPXRTPAVLRLPEASAVWAKKALDLGPVGLMLPAIESPEAAXRAVSHCXQCHYPPRXVRGAAHPIIRALETKAVCRAVALRGQAAWERVGGRTRRGARAWRGEPKQACATEPDVGCAPCARRA

SEQ ID NO: 218678 - protein, 75 aa, Zea mays
  Clone ID: MRT4577_131026C.1.pep
APEQEVSGVQERHRRRLLVVGVARRQGRRVHGLRARRPCRRLAGCHLPSPPKHAREDIKQNTSISRGTKKPSCRI

SEQ ID NO: 218679 - protein, 121 aa, Zea mays
  Clone ID: MRT4577_131027C.1.pep
MASVTARAPVAALRPSASLKSSSSSAAAFLGHSSRLGRTATEMPTRCSLKVEAKDKGIPLLACPEYFELCLHGDMGLEPGIPGGGPGNPQKGLTAPAMKVCQSDATRRPYAKPARAPQAGA

SEQ ID NO: 218680 - protein, 94 aa, Zea mays
  Clone ID: MRT4577_131028C.1.pep
TWPKEKLTCGASTLHRGVNRVFYLRETGNGGGGGQFTFRLITPRDGEKKNDDDFEILKQQGGGERTLDPCLLHFPTRVCWFFPPCRVAIRVAPP

SEQ ID NO: 218681 - protein, 47 aa, Zea mays
  Clone ID: MRT4577_131029C.1.pep
DPRVRTPYLSFSLDVPSKLTPTFRGVAFLYFLLNLIHLPPLYKFVTN

SEQ ID NO: 218682 - protein, 174 aa, Zea mays
  Clone ID: MRT4577_13102C.1.pep
MAVGRSAALKLDWTKLATQLGLKGQTAASLQAFKKRNDDARRKIAVLSEQSQTVDFAYYRSILKNQAVVDDIEKQFKAFKPQTYDVGRQIKAIEAFEAQAVQSAEQTKSVVDKELSDLQKTLKNIEEARPFSDLTVDEVAAAQPEIDKRTEQLVSKGRWAVPGYKEKFGDLSVL

SEQ ID NO: 218683 - protein, 71 aa, Zea mays
  Clone ID: MRT4577_131030C.1.pep
LATAATMTAAPVLPLEKLFGHHHVFAQLDQPDLTRWAARRDHGQSPSALHSLPRSCTSARVECRTCPTGLG

SEQ ID NO: 218684 - protein, 117 aa, Zea mays
  Clone ID: MRT4577_131031C.1.pep
VVFYFLDFVSNGAYDSQDATTNPCVILTAYKLPTSGQLIGSSINVEKGKSALLEEQADNTMHALLFMFRKDNPQEGFRFTTHRSLCTDSPSTLMHPRLKIHSTSVCTTMLIFHQTDF

SEQ ID NO: 218685 - protein, 49 aa, Zea mays
  unsure (1)..(49): unsure at all Xaa locations
  Clone ID: MRT4577_131032C.1.pep
ARVIRKDMLGKSKARVPPPGWFFRCCGGWPVXSLKSTNRQXWVQEKYKG

SEQ ID NO: 218686 - protein, 179 aa, Zea mays
  unsure (1)..(179): unsure at all Xaa locations
  Clone ID: MRT4577_131033C.1.pep
MFLLQNNLHELWAFLNFLLPEVFSSAETFDEWFQISGENDQQEVVQQLHKVXLIFYQGYSLSSYANHLPHLCXLRPFLLRRLKSDVEKGLPPKKETILKVGMSQMQKQYYKALLQKDLEVVNGGGERKRLLNIAMQLRKCCNHPYLFQGAEPGPPYTTGDHKVTNAGKIYITSRSFRKV

SEQ ID NO: 218687 - protein, 38 aa, Zea mays
  Clone ID: MRT4577_131034C.1.pep
TIILFAKFIQRQKVLVGYQCFKNASLGSGFFWKRRKIV

SEQ ID NO: 218688 - protein, 79 aa, Zea mays
  Clone ID: MRT4577_131035C.1.pep
SILTGIGLSEDPYAQSVIFVPDNTRSISVVPGVKDLFVYTTATGLSWKPTFPSTRVSQNTSRIVKFLSQASACCFWTLH

SEQ ID NO: 218689 - protein, 213 aa, Zea mays
  Clone ID: MRT4577_131036C.1.pep
MEVKLWNDKRERELLESYADLYAIIKVTEKLERAYVRDLVSAADYEAECFKLISQFNSLSSSLAGTVAVPRFVQAYRLDCPAALNRLLQSGVPATVELRAASASSAPAATAASAAAIAHCVQTFITAMDAVKLNMLANDQVRPLLQDVATSMARLGSLLPPDFEGKVKVNEWLGKLHKMGATDELTEQQARQLNFDLDSAYSAFLAALPAAGL

SEQ ID NO: 218690 - protein, 164 aa, Zea mays
  unsure (1)..(164): unsure at all Xaa locations
  Clone ID: MRT4577_131037C.1.pep
MANDGSQSARGGGGGRRCCCGALTRVDLLVFLLAAALCSASYCLGVWHNSRGAADSRVLAPSAGANTYCGDDAREPLDFETRHAAEDAGLSAPTTTAXRRGRRAPGGRCAAPRTAASASGSRAPSPSERRSAPCARGLGARRSGRRSWSPPTPRRVPGSGAPSQ

SEQ ID NO: 218691 - protein, 213 aa, Zea mays
  Clone ID: MRT4577_131038C.1.pep
MEVKLWNDKRERELLESYADLYAIIKVTEKLERAYVRDLVSAADYEAECLKLISQFNSLSSSLAGTVAVPRFVQAYRLDCPAALNRLLQSGVPATVELRAASASSAPAATSASAAAIAHCVQTFITAMDAVKLNMLANDQVRPLLQDVATSMARLGSLLPPDFEGKVKVNEWLGKLHKMGAADELTEQQARQLNFDLDSAYSAFLAALPAAGL

SEQ ID NO: 218692 - protein, 171 aa, Zea mays
  unsure (1)..(171): unsure at all Xaa locations
  Clone ID: MRT4577_131039C.1.pep
VSVVKRHAKLFTLDAVYKHNSXQDSCLIMRGKVSDVTNFLVHHPXSDDVTAVSSGIPSCICLPLNHSPSXRLRKATLAARMMACSSXVGENYTPTIPSSTKYVPPKQPHYYQHKTPEFVMKXILQSLVPLAILGLAGAVLMYTKTRLCLACAAHLPLPFCSIVRLELDRIT

SEQ ID NO: 218693 - protein, 90 aa, Zea mays
  unsure (1)..(90): unsure at all Xaa locations
  Clone ID: MRT4577_13103C.1.pep
EWDNTSADLGVRYPFSQPMKLYSSLRNADXDWATRRGREKTDWSNAPFVVSYRGGHVDSCEASQEARFCSTQSAPWWHQPXLTDLHPAQH

SEQ ID NO: 218694 - protein, 213 aa, Zea mays
  Clone ID: MRT4577_131040C.1.pep
MEVKLWNDKRERELLESYADLYAIIKAVEKLERAYVRDLVSAADYEAECLKLISQFNSLSSSLAGAVTVPRFVQAYRLDCPAALNRLLQSGVPATVELRAASASSAPAATAASASAIAHCVQTFITAMDAVKLNMLANDQVRPLLQDVATSMARLGSLLPPDFEGKVKVNEWLAKLHKMGAADELTEQQARQLNFDLDSAYSAFLAALPAAGL

SEQ ID NO: 218695 - protein, 160 aa, Zea mays
  Clone ID: MRT4577_131041C.1.pep
MQFAMSPDNLLFFCSVTASVAASFALVSLCRHLAHRRPQQPTADGLATSSSGGSAEPEELLPLSAVAAAVPTFMYNRLVRHCGKGASWTECAVCLGTIQVGAMVKLLPACSHVYHRDCIDLWLSSRSTCPLCRCRVGPPSETGAGQETARELAQPSPPIR

SEQ ID NO: 218696 - protein, 127 aa, Zea mays
  Clone ID: MRT4577_131042C.1.pep
QWKPGPGVPPYEEAAFGGVFRRPEGPKDLFLLPRFSCRRESPSLKGQGEGEGFFFFLCLRPSPEGFIIALPSFGKKGCGMASVFLVKNLGDKTVPPLLQNWCCFPLIYPHKGWGGSLPFPHPFHLWG

SEQ ID NO: 218697 - protein, 102 aa, Zea mays
  Clone ID: MRT4577_131043C.1.pep
KVLIKRPVVKCKSRPPGDLPQRMFGVLKPVKKTGLVQPFCPSKQTTWCPVSGEKFGKNQFLKASAKPRRMEKMGILPPKNNPKKKKNQTKKKKKKKKKKKTT

SEQ ID NO: 218698 - protein, 98 aa, Zea mays
  Clone ID: MRT4577_131044C.1.pep
TQCYRPGGQGANCGGFILHMGAINHEQRQARKEQGHTREVGGELTNQAYTLSILADDWIERLIDANQLRSGRPGEELVQKYSAKQRGTNTGRWVNNIY

SEQ ID NO: 218699 - protein, 168 aa, Zea mays
  unsure (1)..(168): unsure at all Xaa locations
  Clone ID: MRT4577_131045C.1.pep
MHIFVKTLTGKTITLXVEPXDNIDNAXVNILYNIRHPPQSMXVFFGGKQLDDWCTIADYNISXESMLHLVLGLIGEMDIFVKTLTGNIISLXERSPLTTVXNAKGNIQDKEGIPTHQHRIIFGVNSLEDGRTLADYNMQNDSTLHLMLRLMEGMQIFMKSLTVKTITL

SEQ ID NO: 218700 - protein, 62 aa, Zea mays
  unsure (1)..(62): unsure at all Xaa locations
  Clone ID: MRT4577_131046C.1.pep
VNHQPRSKGILGLVFQSILQNHXQKGQVSGLLPAQKAHQLTVMLGLQQPTPGPYAAAGGVPP

SEQ ID NO: 218701 - protein, 75 aa, Zea mays
  Clone ID: MRT4577_131047C.1.pep
LFSKKYQGRGAHIGGSPGINKNTPRLKRWPRAPKSKRWTKRFVSVSGVSYRGWVAQSLLNLLWSSRGIPVKTFCW

SEQ ID NO: 218702 - protein, 62 aa, Zea mays
  Clone ID: MRT4577_131048C.1.pep
SKKKKKKKKKNKRSTDNKKRQRYVLVLETSQLSYAVTVNSFHWPGFNKMYFIKIMLIPILMG

SEQ ID NO: 218703 - protein, 36 aa, Zea mays
  Clone ID: MRT4577_131049C.1.pep
SNHPSKAARSDDPSVFHIRRTVLHHLMRHAVHWLQY

SEQ ID NO: 218704 - protein, 53 aa, Zea mays
  Clone ID: MRT4577_13104C.1.pep
SELTSTLHHSYQFLLATIFRCTHQLSLTWDDEIPQSKSNCYNLGIDPRMLHFL

SEQ ID NO: 218705 - protein, 75 aa, Zea mays
  Clone ID: MRT4577_131050C.1.pep
NPVNYGLRHKPFKFFERQAPPWGMGGTLNYPNSGGGLTAGGLITPRKTGPPGGGGLLLGIGGRKGGTILQLFGRE

SEQ ID NO: 218706 - protein, 229 aa, Zea mays
  Clone ID: MRT4577_131051C.1.pep
MAPADRDHLCLPGCVPVRAKRAASTAAATVTTTARASRHNFVKAAASGLLAGAHFTNHESLPPLPDAYAEFVAAFPQYAHGALARADAIRGEEYQHLDRHVCLDYTGINLFSHAQMNSSLPSTSSAPPPSSAWQPPFFDIAYKSTSLRTQVQCGDAAAGGIGAAVTRRIMASLKIPEEEYAMVCTANRTTAFRLLAESYSFQPGKQLLPVYDYKSEAVGAMADSARRRA

SEQ ID NO: 218707 - protein, 89 aa, Zea mays
  Clone ID: MRT4577_131052C.1.pep
LLSGPSSPACSLLASSCSFRAVPCVGWLFAFPRSLLFLFLCFLPPVLFSLVLRLAARLFLSGGGSCPSGACCCSLLLSPPSLAPAAWVS

SEQ ID NO: 218708 - protein, 98 aa, Zea mays
  Clone ID: MRT4577_131053C.1.pep
LVDTFGLTTETYSVPFSLLNMDSSLNLSTTMSVTSLTKDQITKQTLRDYTLNLKHNITYQNYVLYSDDNGGVFRKEEIFWALAYPTWLEKKPKISDVP

SEQ ID NO: 218709 - protein, 85 aa, Zea mays
  Clone ID: MRT4577_131054C.1.pep
IGELQNFPQLNVIKPPKRKIKPPQKKAKWAPKIKASTEISLKEIPKKGPKCCFVLSSNFFFFFFFFFFFFFFFFFFFFFFFFFFY

SEQ ID NO: 218710 - protein, 42 aa, Zea mays
  unsure (1)..(42): unsure at all Xaa locations
  Clone ID: MRT4577_131055C.1.pep
VVHQQRQXPSDLGHGETLHSRLPVLIDRHALWQVXCLDIRQS

SEQ ID NO: 218711 - protein, 106 aa, Zea mays
  Clone ID: MRT4577_131056C.1.pep
VLGKTFGLKINPLGGFPQKKNHPRGAPGWGGVPNQKKWEPFCFLACGGAPGAWKVFATKKLFCFPPAPPLVEAHHKTWLNASPRGGAFKKGKDPVSLLLWEALLFM

SEQ ID NO: 218712 - protein, 68 aa, Zea mays
  unsure (1)..(68): unsure at all Xaa locations
  Clone ID: MRT4577_131057C.1.pep
RAVLAALDLSGAGGKAXKGAAGXRKARGPTKNSVSRSSMARAHLPVSRLGRYLKKGRYAQRVSTGAPV

SEQ ID NO: 218713 - protein, 48 aa, Zea mays
  Clone ID: MRT4577_131058C.1.pep
HLYQRESEVAHNTSGPVMAITVKAIDQTAAVILVILHDRKQKCFMPLI

SEQ ID NO: 218714 - protein, 93 aa, Zea mays
  Clone ID: MRT4577_131059C.1.pep
LEAGRGTISTSGARSWSPPPRPSRYESQKRRDWQTFTRYLGAHRPPLELCRCSGAHVLEFLRYLDRFGKTRVHAPSCAAAAAVLPHRCALRVL

SEQ ID NO: 218715 - protein, 114 aa, Zea mays
  unsure (1)..(114): unsure at all Xaa locations
  Clone ID: MRT4577_13105C.1.pep
MGPRPPLPPPDQTTPPFFSPCHSQPPPGKPPHSHCFXPPTVPPPKRGKNPPVRVVLNKKPLPFRPPPPEPSIPPPLFPPPRAPPGHGLTCWPSRPPKGPDRPFGAPQRPVWPPR

SEQ ID NO: 218716 - protein, 782 aa, Zea mays
  unsure (1)..(782): unsure at all Xaa locations
  Clone ID: MRT4577_131060C.1.pep
MMEIDHRLKALYVDTNKLEGIDSPVEQIIQWLTGNGKHDQELNIMAIVGFGGLGKTTLAMQVYNKFKDKFDCTAFVSVSRGPNIKKVLMDLLKDVGAAIDTTDDEMRLINKLKGHLTKKRYFVVIDDLWDVSAWSFITCAFHQNNRGSRIIITTRKIDVAKACCLSSGDHIYEMQPLSVAASERLFFKRIFGSEERCPSHLKEASIKILRKCGGLPLAIITVSSLLASKDLTLDQWNRVANSIGSTLENNPDIEVMRKILSISYFDLPHYLKTCLLYISIFPEDYIINRKSLIVRWINEGFVQEEYGKNAHDIGESYFNELINRRLVQPWFIDHDSGSVVTCRVHDMILDLIITKSVEENFVTLLDSRELTSSPQNKIRRLSIQCGDGEPPALVLEESTSLSHVRSVTIFGHGKQLPSLSNMKALRVLDLEGCKGLENHHLENIERLIHLKYLNLRETEITELPKQVVKLQYLDTLDIRNTGVSELPPAIIQLRQLARLFIDLDTRLPYEIGKMQNLEELTHVNTCMYHMNFLKKLAQLSKLRELEISWDHYGTRVDKVSYAGILIHSLHILATHNLRSLTVHIMDEQSFPLHTWHPAPSALRRLHFDMNNNEQFPXVPTWVGSLVNLQELSFRITKMTQDDLDVLGDIPALRSLAFHMEICTKTTPWEDPRPEDWLRIRKGFQSLNSFRFECGPWEWMCLIFEAGSMPKLEILDLXFHLLXYLIQKLGFDLGINNLSCISTVTLRFSNRGCSQENEVAIRKSVSIHRNRPALEIIRKKARS

SEQ ID NO: 218717 - protein, 259 aa, Zea mays
  Clone ID: MRT4577_131061C.1.pep
MSTSGARSWSPPPRPSRYESQKRRDWQTFTRYLGAHRPPLELCRCSGAHVLEFLRYLDRFGKTRVHAPSCAAYGGGGGGRPVEPAVACQCPLRQAWGSLDALVGRLRAAFEERHGARGIWTSSQQPDGGVGVGVGVGGGDGANPFAARAVRLYLRDVRDAQSRARGISYSRKKKKRSKQLVDGAAAAGCARPPVTSVTLMPAAALPHAPPPPCPPPPLPPPYCLTGVPFEFCDYGSVLGGVTANGAPGFYLPSLFNTFG

SEQ ID NO: 218718 - protein, 105 aa, Zea mays
  Clone ID: MRT4577_131062C.1.pep
WSTASAARSTTQARLQGQRQGTPAPLSMPWAGSCWAPLKQRCHCMRQRDTVKAARLRTIRGGSANAPWVFGEARVREGGRRYGLGFKGKQTEGNGEDDGGSAPGR

SEQ ID NO: 218719 - protein, 128 aa, Zea mays
  unsure (1)..(128): unsure at all Xaa locations
  Clone ID: MRT4577_131063C.1.pep
KADGSDEAHIVLCRVLIGRPEVVPAGSSQFCPSSRXYDSAVDKLEMQQMRESSEADSNTKKPAPVAGHLFPTLLAEIQQIVPDKCDLLQESYKNFKMGQIKKDQFIQFLRNYVGDEVLKTVAKKLRRC

SEQ ID NO: 218720 - protein, 197 aa, Zea mays
  Clone ID: MRT4577_131064C.1.pep
WVPRGRPGYITSESYSGSASFAIHNGNKAAINLNASNARLKKSPLHMEDNARRGVGSISGPEGFTKSTMKSLKRPRDTQFQIDAELEGTMRSPLRGLKSGALAQFESSSLPKSGYTTKDSTCTGGALNLFMLPPEKLLVVPPQYVDPDQDLLLEIPLNARHPEAELLCQPSQLMSSISRSSTSMGGVAEGEGCLKQP

SEQ ID NO: 218721 - protein, 106 aa, Zea mays
  Clone ID: MRT4577_131065C.1.pep
STSGLQLAKFKATCHSLPGPWAFLQSLKPDIEYVGMMSPKEAAMTGTQDMLRAQQLCSQISITQGSHNLGRHSGNKGWHCPKHDNLPSNSFHRHRSIKHPGASVKI

SEQ ID NO: 218722 - protein, 90 aa, Zea mays
  Clone ID: MRT4577_131066C.1.pep
MARTKQTARKSTGGKAPRKQLATKAARKSAPATGGVKKPHRFRPGTVALREIRKYQKSTELLIRKLPFQRLVREIAQDFKTDLRFQSSAV

SEQ ID NO: 218723 - protein, 151 aa, Zea mays
  Clone ID: MRT4577_131067C.1.pep
MGRMHSRGKGISSSALPYKRTPPTWLKTAASDVEEMITKAAKKGQMPSQIGVLLRDQHGIPLVKSVTGSKILRILKAHGLAPEIPEDLYFLIKKAVAIRKHLERNRKDKDSKFRLILVESRIHRLARYYKRTKKLPPTWKYESTTASTLVA

SEQ ID NO: 218724 - protein, 265 aa, Zea mays
  Clone ID: MRT4577_131068C.1.pep
QAAGGQDRCPSTTCRVPRQARREEAVSLPSAAAMAGAEVGEDKYRSFIHGEGERDTVWRYGAPPNYDVVNKLFEEERTQVWPEGSLEEKVQRLLKSWEMELVHKVRPEDQKTVNSEKYSASTNGMSALTRAEVMAIGGYNNFLRTKLPPEHRIYDPDSETVESAMATFTTAFPRGFAIEVLDVYSGPPRIAFKFRHWGYMEGPFKGHPPHGQRVELFGVCIFHVDEDMKVEKSEYFYERGNFLAGFLSAPAPDDGSGGCPVMRRN

SEQ ID NO: 218725 - protein, 239 aa, Zea mays
  unsure (1)..(239): unsure at all Xaa locations
  Clone ID: MRT4577_131069C.1.pep
MKNFNPAAVEEERAAMVPPPPAAREEIVDDPPAEHQPSPSSATKPCWKTTTSSGAGVVIGTLMFLALLVGTNWIHHDAGQQYYSFHPVTDGGSFSRHGRATGRTRSSTAPLVHIPFSCGNDTSSPSLCRRRASPPAPSPSPSSSSSSQKQYSPGVPPPWCPDYFRHIHADMEPWRPTGITRDXVERARPSAEFRLVVVSGRAYVEKYRPSFQRRDILTQWGILQLLARYPXRVPDVDIM

SEQ ID NO: 218726 - protein, 61 aa, Zea mays
  Clone ID: MRT4577_13106C.1.pep
ARASSWNALRGNYHHVESMTRAGPGLQFIVYEEWVYSWYYKLSHMFAGTPRVILSRLREWP

SEQ ID NO: 218727 - protein, 234 aa, Zea mays
  Clone ID: MRT4577_131070C.1.pep
RPGPECTRPRALHGGAASSPRPGAASAPVRPPPREPFPMLLPVFILFVLLLCFLSIFLLRDLLHFLSLWLRRRRRLRADADAASDATPDTHASHKPAGLDPAVLATFPTVRWFEETHRPASGQAECAVCLSEFAAGDAVRLLTVCRHAFHTACIDSWLGAHTTCPVCRSELDAPAATPRYGGGGRIAILVDDQGDGSAAVADTDHAESSPAKRWRAIAPLTDDIHIVPKSPSAR

SEQ ID NO: 218728 - protein, 65 aa, Zea mays
  Clone ID: MRT4577_131071C.1.pep
TSSMNQMRKCDIPLQVAIVSRHNACLSSTYTIKGDYLHDCITQIITKVISFSYIPSMTFYISSTR

SEQ ID NO: 218729 - protein, 92 aa, Zea mays
  Clone ID: MRT4577_131072C.1.pep
IRHEGLLKVVPSLKPPEELPPLFSLLSCLRALVASAGAVWHDHAQRLPLLSAGAAACRASAPSAEGWETGCGEQRQAYHGAWAGKYGMSHRR

SEQ ID NO: 218730 - protein, 105 aa, Zea mays
  Clone ID: MRT4577_131073C.1.pep
AIPGFWIPPPCRGFFFEGLEQASEHQVRDYSNKLPPPKRRPLGGFGRGETPPPPPKKSPLAFLLGGGDMTQSFLLDCFPPQWGFFLQKGGFFPFALKRVFSRPVM

SEQ ID NO: 218731 - protein, 127 aa, Zea mays
  Clone ID: MRT4577_131074C.1.pep
THVPFYIRFSVLIFLNNDAGSRLPNVTILLPTEKKQVDIDEKEKTLKLAGRIGQAVGSLLRRLGISYQGEESHGRMRINGLTIRRWFNPKLNSKSSAAGPADLLPLPSRLAKGIAGQQRDIRNLSLE

SEQ ID NO: 218732 - protein, 76 aa, Zea mays
  Clone ID: MRT4577_131075C.1.pep
IYHTHPHKTPTTALHETTHVLHYSDNTKLTRATLHINHTYLQPTLGSLTEPSPSYHATHQARKLITIPCHLPALAA

SEQ ID NO: 218733 - protein, 164 aa, Zea mays
  unsure (1)..(164): unsure at all Xaa locations
  Clone ID: MRT4577_131076C.1.pep
VAPTILGLPAAVLIILFPPLLIPTSKYLINNRLITTQQXLIKLTSKQMITIHNTKGRTXSLILVSLIIFIATTNLLGLLPHSFTPTTQLSINLAMAIPLXAGAVIIGFRSKIKNALAHFLPQGTPTPLIPILVIIETISLLIQPIALAVRLTANITAGHLXMHL

SEQ ID NO: 218734 - protein, 81 aa, Zea mays
  Clone ID: MRT4577_131077C.1.pep
SGIPGSTHASAFSSDVSVLSRTLQSTSLFARSWWQTPAHSVSQGCQPHLVPALCGSAHSKPFLCVEREDPYVAFPSGLLNL

SEQ ID NO: 218735 - protein, 58 aa, Zea mays
  Clone ID: MRT4577_131078C.1.pep
CRVRETIWEMAPGSEKEGQGGSRKMKASHVSWKIDSSKGQGGFNLMESREFRLCAMVW

SEQ ID NO: 218736 - protein, 65 aa, Zea mays
  Clone ID: MRT4577_131079C.1.pep
RPSVREMRSTGGDSLEFQDFYKQELKPSLGDIVWAWQGGDSPSPTLTPAVPTPNTNAWRDAPTRW

SEQ ID NO: 218737 - protein, 85 aa, Zea mays
  Clone ID: MRT4577_13107C.1.pep
GKLVVFGKVVVGKAFFNILRAFGRDPGNPSSPGEFVTFGEVSHPNFQVFLKGDEEIILRPSGGVSVFGRKAELKKASGVYKPKCE

SEQ ID NO: 218738 - protein, 144 aa, Zea mays
  Clone ID: MRT4577_131080C.1.pep
ALGTGERRHEMRVDKSEHPITDHGEIIFIPARVVKDSRCRSSIRRPSSSWTMEYIRRHQQRGVPKTFLYTTDSRLCFSPLPLEVTSFPYVIHWLNHFLAPLCMVGEVRPCTHFLPVRVVLMPFGGGVFTAFRVSRDTRVRRNSV

SEQ ID NO: 218739 - protein, 121 aa, Zea mays
  unsure (1)..(121): unsure at all Xaa locations
  Clone ID: MRT4577_131081C.1.pep
SRCHTHVEWCIHHRVAIWANMLVVIDFPDTWLPLSRAMXPIFADMAKRSPMMIXLRFDVYEMTTIAGHFSVQAMPTFLFMRDGYNRDRVIGAXLEEELARQLELHMGSSISDSLNVDIRSK

SEQ ID NO: 218740 - protein, 85 aa, Zea mays
  Clone ID: MRT4577_131082C.1.pep
MSRVSQNMQDGRVEVETRTNYCLIGDDLGTKGLPKIIGANRHLHSWMLYLSYSLRMLRTHPWTAVHRASVECPKSPPDACLFPNP

SEQ ID NO: 218741 - protein, 95 aa, Zea mays
  unsure (1)..(95): unsure at all Xaa locations
  Clone ID: MRT4577_131083C.1.pep
XRVGGRVRGGVDRHVAPRLVQCTKRWPCRLHGLLQAPRLCARKAQPTVVRACAPAAPRAVRDARPKAFHDNNSDTILNGLQNNNRIKDNIRGYKL

SEQ ID NO: 218742 - protein, 57 aa, Zea mays
  Clone ID: MRT4577_131084C.1.pep
GWIIWIHMFVETCDRQEFGGRNFSLADYVEHNFDSFLGLFCLCQIGGLERLLTRLFL

SEQ ID NO: 218743 - protein, 80 aa, Zea mays
  Clone ID: MRT4577_131085C.1.pep
VNFLFALGGGLNKKKKGRAGAQKKKFFGVCKKKKNKVFQFAIFSHVGGQSLGSWRQGCLPPCGLTQKNFLYPKINWSPII

SEQ ID NO: 218744 - protein, 119 aa, Zea mays
  Clone ID: MRT4577_131086C.1.pep
HRGSRRRALVDVGHEAIVNKRCGYSWSHVRCRSSVRQEEEWRVEYRRCAIIYVSSMSVINRAWWSSLRKPWSVSISSARSVISLSTSCYTTPSLFWTRHRYSSSPISAVGGRPPPVVSS

SEQ ID NO: 218745 - protein, 48 aa, Zea mays
  Clone ID: MRT4577_131087C.1.pep
VPSHHELTHLRNVAQLCLLHHPRSPSAYLDLCLIFSALHLHAYIMRFF

SEQ ID NO: 218746 - protein, 128 aa, Zea mays
  unsure (1)..(128): unsure at all Xaa locations
  Clone ID: MRT4577_131088C.1.pep
LFGFCRGGPCFPRFPGCPRVWPLFCXGWLCLVRXLCXACVLVRXRVGFPPPGGRPVPPLFPPPVXGPPVXGLXGVLXACXXGCVSSPXVLPXXXFSFLXVXXLXLVXWFRXGWLXLGCLLFCRVFVFS

SEQ ID NO: 218747 - protein, 148 aa, Zea mays
  unsure (1)..(148): unsure at all Xaa locations
  Clone ID: MRT4577_131089C.1.pep
FARVAPFEGARRGALPKAVGAARAAVENGPAGIPNKIPDCRSHPLYRFVREELGPVSPPXGETTSPGENVARGPDPIPPGFPPSGGQKGGPPRPHLGPPLFFAPFSPPGGGPKKPGGPFPPWGGSLFPQKGGGFLVPPFSHSPAFFAP

SEQ ID NO: 218748 - protein, 77 aa, Zea mays
  unsure (1)..(77): unsure at all Xaa locations
  Clone ID: MRT4577_13108C.1.pep
NFAKKKKNLGGVKLKFHGGKKIIEREKWGLKKLNRGCYFKXKREGKIVFNGGKEKLLGNQGRFXKRVXGKVFFNGVV

SEQ ID NO: 218749 - protein, 46 aa, Zea mays
  Clone ID: MRT4577_131090C.1.pep
TRYQSVTVHSETMKIQRQGLSPLLLRRPADNVLNFTQWRETERINM

SEQ ID NO: 218750 - protein, 187 aa, Zea mays
  unsure (1)..(187): unsure at all Xaa locations
  Clone ID: MRT4577_131091C.1.pep
IPKPTRGACRPSVRGTGPAGLRRLLPTPVPSRAACLLLFSAKEGKALRGQKRRRNSAGPQGPLCHPGPACHAPVPSTLRPRPSRRAGRGGAGPGLCRGRGGKRNSQLPSVPPARRDPASAAAPGPGPPPHPCVHHKRLLAPVEFGTQSPTCGPGVLLPTDREAGSGRKRGTPRCCLLVRSHXTLFRF

SEQ ID NO: 218751 - protein, 80 aa, Zea mays
  unsure (1)..(80): unsure at all Xaa locations
  Clone ID: MRT4577_131092C.1.pep
VGELIGGTQREKLFFSLXARLGEQILTKESFWWYLALRQYGSVPPPGFGFGFNRLVQFALGIANIKDAFPFPRVFGSPEF

SEQ ID NO: 218752 - protein, 58 aa, Zea mays
  Clone ID: MRT4577_131093C.1.pep
FSASSPEIVECTTQFMHHKEVFPEENNTKKVGFLPRGQRIFVLNEAVKPSLSASSCCW

SEQ ID NO: 218753 - protein, 74 aa, Zea mays
  Clone ID: MRT4577_131094C.1.pep
NSNTTGLCFFFLIAFARNLHNLESLPLTLEVHKKARGRGEKQPPQIPSKMPPPMAKNRAQKTISKFSLKRSSNH

SEQ ID NO: 218754 - protein, 90 aa, Zea mays
  Clone ID: MRT4577_131095C.1.pep
TNFPLRGVAPEGPFFFFFFFGVFFFFFFFFFFFFFFFEKEGVFIHISRGRNMNTTHLCAHWSQPWEISTGPWVAPQISGAYIFPFYRIWI

SEQ ID NO: 218755 - protein, 129 aa, Zea mays
  Clone ID: MRT4577_131096C.1.pep
WWEDLHYTQASAARGEDLPLHPLAGVFWEGENCNKTVRPVAGACTTQALGPRRHGNRRGTSRIQLANLSVVRPWRVLCCVSSFQEVLSRQCGCCFGCFVLVLTCVAGEFDERDVDAVRVGVALEALSGF

SEQ ID NO: 218756 - protein, 221 aa, Zea mays
  Clone ID: MRT4577_131097C.1.pep
MSKVFEGYERQYCEASASLTRKCTAAAALQGEKLKQKAAEIQSGIDGAEALIRKMDLEARNLQPSIRADLLVKIREYKSDLNNLKGALKRVTSINAQQGAREELLESGMADTLGVSADQRSRLLRATERQNQTTDRLRDSHRTMLETEELGVSILHDLSQQRQSLLHAHDVLDEVDNNVGKSRRTIGGMMRRMDRNKWIIGLIIAVLVLAILVILYFKFVH

SEQ ID NO: 218757 - protein, 114 aa, Zea mays
  unsure (1)..(114): unsure at all Xaa locations
  Clone ID: MRT4577_131098C.1.pep
MLNSVPIMASKILRRPMLQGLSAXLPTASIFPKCPLAHIASIISPYLSQTVSSVXVNPILQPYMIQHSIATSILRLSPSMIQXSLALLQQLPLENILPQNITTLQPPHLVLTNL

SEQ ID NO: 218758 - protein, 62 aa, Zea mays
  Clone ID: MRT4577_131099C.1.pep
LEQHASTVPSIKVLVLRMHSVIRPCTALYMVSLFAIPVHSNGCSTVAGSPLGGVIRINLAAR

SEQ ID NO: 218759 - protein, 121 aa, Zea mays
  Clone ID: MRT4577_13109C.1.pep
MKRKNKEQRRADGITDRGSDSLETMRPNKKQRLGGGSGSDEETSPYLVVGHGSVSPAFSVFKVEPYTDGGGDTPVSIPRRLARLKCKHYMSFVPLRLKDRRWIVGVGVCSTENYYGPGIFI

SEQ ID NO: 218760 - protein, 154 aa, Zea mays
  Clone ID: MRT4577_1310C.1.pep
MGRGRVELKRIENKINRQVTFAKRRNGLLKKAYELSVLCDAEVALIIFSNRGKLYEFSSTQSMPKTLEKYQKKEQMFCEANKCLRRRLEESNQVIWQHAWEQSERHSEVQPQQLNGNNFFHPLDGAGEPTLQIGYPSEALTSSCMTTFLPPWLP

SEQ ID NO: 218761 - protein, 255 aa, Zea mays
  unsure (1)..(255): unsure at all Xaa locations
  Clone ID: MRT4577_131100C.1.pep
MSKVFEGYERQYCEASASLTRKCTAAAALQGXSSTPPKSLRFLEATSISVGSPSESSLGKIFGRAEKLKQKAAEIQSGIDGAEALIRKMDLEARNLQPSIRADLLVKIREYKSDLNNLKGALKRVTSINAQQGAREELLESGMADTLGVSADQRSRLLRATERQNQTTDRLRDSHRTMLETEELGVSILHDLSQQRQSLLHAHDVLDEVDNNVGKSRRTIGGMMRRMDRNKWIIGLIIAVLVLAILVILYFKFVH

SEQ ID NO: 218762 - protein, 155 aa, Zea mays
  Clone ID: MRT4577_131101C.1.pep
DTRTFTTLDTFISTLNELYCSTLAAHCSTHTPPANTLDDTSSFTTFIMTHSTSHSKRRTRTAHSRKPWSWLGLTTAALFMTSLPLLAAAAPSSRLVKRAPVEYIADSEPTIELTFEANDSYYLQALTLNQCQNQLVLPENGTHVRSYYAIDTPEI

SEQ ID NO: 218763 - protein, 71 aa, Zea mays
  Clone ID: MRT4577_131102C.1.pep
EKNFFSMVQRGGVFYFGPIFQWFFFLNPCKKKLKGVFFKRAKVFGRFETLCKGLPFCFGRVFLYKKGVFVF

SEQ ID NO: 218764 - protein, 259 aa, Zea mays
  unsure (1)..(259): unsure at all Xaa locations
  Clone ID: MRT4577_131103C.1.pep
MAKEFPVPPVVFTPSTPTHRRYPPQGVGASPPPAFAPPRPSTSSAANPLPFMSFDVSAAAASSSSAPPLFAGPIGVAGSGSSFEDEPPLLEELGINTRQIWRKTISILHPFRSTDPSLHADADLSGPFLFLLSFGLFQLLAGKFHFGIVLGWVTVASLFLYFVFSMLSGGRRGDLDLYRCVSLVGYCXMLPMVIFSAVSLFLPRGGGFIFGVGMAFVIWSTRVCTRLLGELASSGDEHRGLIAYACWLVYMLFSLLVIF

SEQ ID NO: 218765 - protein, 67 aa, Zea mays
  unsure (1)..(67): unsure at all Xaa locations
  Clone ID: MRT4577_131104C.1.pep
PSLLGSCARRLARVVLCFPAFSVVCCVCAAAGVLCLAFLSRSFRGVRVVGGVSPRASVLVDXSLRAR

SEQ ID NO: 218766 - protein, 210 aa, Zea mays
  unsure (1)..(210): unsure at all Xaa locations
  Clone ID: MRT4577_131105C.1.pep
MAAFAKIAMECVHDPLIWLLIASVALVILRRRRLNPPLPPGPKPLPIIGNMMMADQLTHRGLAALAKQYGGLLHLRLGSLRVFAVSTPEYAREVLQAQDGDFWHRPASIAVRYLTYGCSDMAFARDGPYWRQMRKLCVTRLFSRRRAETWLXAVRDGYGELARAVGRSGGEAVNLGELIFKHTVSVIFRXGFGVRDVQGLDEFIPMFKEI

SEQ ID NO: 218767 - protein, 229 aa, Zea mays
  unsure (1)..(229): unsure at all Xaa locations
  Clone ID: MRT4577_131106C.1.pep
QIEFPEPFKKPYSGLSPXLICQEGKPEATVDRTLDTKVFKGWVETDNPWTSDDETDNAEMTYVNLQLNPERYTGYTGDSARRIWDAIYKENCPKYPSEDMCQEKKALYKLISGLHSSISVHIAYDYLLDESANLWGHNLSLLHDRVLKYPERVENLYFTYLFVLRAVTKAADYLEQAEYNTGNPEEDLKTQSLVRQLLYNHKLRSACPLPFDEXKLWQGENGPELKQEI

SEQ ID NO: 218768 - protein, 71 aa, Zea mays
  Clone ID: MRT4577_131107C.1.pep
MGSRRRTLLKVIILSDRGVGKTSLMNQYVNKKLSNHYKATIGADFLTKDVQLKDRLFTLEIWDTAGQERFQ

SEQ ID NO: 218769 - protein, 32 aa, Zea mays
  Clone ID: MRT4577_131108C.1.pep
LYPSMCLVRQSKQFIITLVYYSHCTINQFITD

SEQ ID NO: 218770 - protein, 138 aa, Zea mays
  Clone ID: MRT4577_131109C.1.pep
MFYSQFILAKKGPLGTIWIAAHLERKLRKNQVADTDIGVSVDSIIFPDVPIALRLSSHLMLGVVRIYSRKVNYLFHDCSEALLKIKQAFRSTAVDLPPEESTAPYHSITLPETFDLDDFELPEAAFQGDTDHHVSTKE

SEQ ID NO: 218771 - protein, 298 aa, Zea mays
  unsure (1)..(298): unsure at all Xaa locations
  Clone ID: MRT4577_13110C.1.pep
VPSRPQPIRAPSSPPQSTGHASSRPQPHARSLLPSHTRAVRRPVPSHARLMVQQQVSARFGKCLLELSGNNATIVMDDADIQLDVRSVLFAAVGTAGQRCTTCHRLILHENIYQTFLDQLVEVYKQVRIGDPLEKGTLLGPLHTPASKENFLKGIQTIKSXEGXKVVLHYRFLQGLEPGLPRSAPVVTMRLFGPVLYVMKFQTLKEAIEINNSVPQGLSSSIFTKRPDIIFKWLGPHGSDCGIVNVNIPTNGAEIGGAFGGEKAAGGGREAGSDSWKQYMRRATWREVLEVVSHLFTP

SEQ ID NO: 218772 - protein, 135 aa, Zea mays
  Clone ID: MRT4577_131111C.1.pep
TVRGTVHLFIGIGHSLCEISFMTFMFTIDLRTIYRRLDSLFLLKSVPFSATEPKHPCALLRRWFNLHSDPALHIVYSFIPSPNVPVHILSLGNIVNHVFEDLRKTKAPNRNNNLFPNEVSLCHSLCYTLNSLSLM

SEQ ID NO: 218773 - protein, 86 aa, Zea mays
  Clone ID: MRT4577_131112C.1.pep
NKGGKRHQGRSHRKVFETILLNIVAIRGMGLTKRGDAIRPSSGKGFASKGPQSSHPLIKRRFFRREKWFPYLPQPKFVQGGKAHPY

SEQ ID NO: 218774 - protein, 157 aa, Zea mays
  Clone ID: MRT4577_131113C.1.pep
KAPPRFFLNPLRESRIYPPPATIWGGYSTRGPPPTVCFHLRLSAPRIGFFFFRAWGGGCTKNKKGPGGGHKKKFVGGVFKKKKKEFFLLISPPPVWGPPFGSLKGAVVPPIGVLPVPFLGPHFLLGPQKNFFPFFFKKKKKKKKKKMITQKKKTPTP

SEQ ID NO: 218775 - protein, 164 aa, Zea mays
  Clone ID: MRT4577_131114C.1.pep
GETPNVAPKLGHKAERGGTRAVAKEMGKKGGTPAPSPNKAPLKGGPLHPSSWGKPQKGPPFAPHYKPPILKKKDPQQGEIAPENKRFNPPQGYKKGEKRSFLHNTPQEGTQRRGPTYKVKISDTPHPRGKGKTPHQNKPPKEIGPTPGRGNTAKIFPIFYFIFS

SEQ ID NO: 218776 - protein, 53 aa, Zea mays
  Clone ID: MRT4577_131115C.1.pep
SRKANRRPERRGTVKAPPPKSSGNSPKMFFKDGSTAENTPVQYAEPASEEKIS

SEQ ID NO: 218777 - protein, 187 aa, Zea mays
  Clone ID: MRT4577_131116C.1.pep
KKKKKKKKNKKKKKKKKKKKKKKKKKKKKNKFCAYGRFSLLRAYFFGFPFGGGWPLFFCLFAGPLFWGFGVFLFQLAWSDFFWRLVLKNPLGLPPFFAWVNFPFSPVAFLRAGPFPFAFPKCSFPGLGTLPPLLRPLLGGGFFRLPGTFTLPFCPVLRARSFASFPFFSGPFFLAFPLWFFPLGFFL

SEQ ID NO: 218778 - protein, 131 aa, Zea mays
  unsure (1)..(131): unsure at all Xaa locations
  Clone ID: MRT4577_131117C.1.pep
MPNIASHELTTHTITHHSITTLTRRPKRRTIRHHTLMIRTLTKPLPRTTLSNTRRPRILHHLKRLINRRLSSSTTGHRTTSIRSRRRPKILIILKTHRSQIRGWVGSRESVRYVCYDYSVQAHKSAQRXQA

SEQ ID NO: 218779 - protein, 184 aa, Zea mays
  Clone ID: MRT4577_131118C.1.pep
MPATAGRVRMPANNRAHSSAALQTHGIWQSAIGYDPYAPENDKQQPGRPSSSVSANAAAAAANDANAASRKEKKSSSHHHRNSSSKRKSKHTRSRSDDSEEDEGRRGRDRKKMSGRSKKHERSDEASSDDTDSDRQRHRKSRKDRKSRKDRKRSGHRKSDHPLDEEQVSGGEGPGPQRGAKEEH

SEQ ID NO: 218780 - protein, 66 aa, Zea mays
  Clone ID: MRT4577_131119C.1.pep
GGCSGSALWLPCGRPRTRWARFVNRRPHCPCWWTTGNVLDLVAVDYVGRGWGLLYTIRHLWTLHRN

SEQ ID NO: 218781 - protein, 93 aa, Zea mays
  Clone ID: MRT4577_13111C.1.pep
MAPHAPDGDFAPPQELAQSLDLAKEFFLDAGAVFFQHPFCGAFKKGPAGPNAHRVLVSLALKLFKERVFFPSKEFFPLENQPQFFWEEMKARG

SEQ ID NO: 218782 - protein, 375 aa, Zea mays
  unsure (1)..(375): unsure at all Xaa locations
  Clone ID: MRT4577_131120C.1.pep
MPATAGRVRMPANNRVHSSAALQTHGIWQSAIGYDPYAPENDKQXRGGLRPPSPPTPPPQLPTTPTQPPAPPQXGSGSGDGNAYTSFQGLLALARITGSNSDETRGACKKCGRLRHRTLHHSDAPAGDDRGRDXRRPGPLEXAAAQAKFDEIKKKAAAGGDADDASDDVEEDEDSDSSDSDIDPELEKIIAQREXPGMEQGGPGRKRSXSHHHRNSSSKRKSKHTRSRSDDSEEDEGRRGRDRKKMSGRSKKHERSDEASSDDTDSDRQRHRKSRKDRKSRKDRKRRSHRRSDDTLDEKDVSGGEERRHQRHQRSHHWRDASDCDNGDSDSAHDKKQSSRRRRHCQSENSGLDEDERHDHRGAKRSRKNRDHKRS

SEQ ID NO: 218783 - protein, 73 aa, Zea mays
  Clone ID: MRT4577_131121C.1.pep
RYIKSYLSVVDNIMDHLMPKPSRVDTPYSAYTDIRSLPLRAGHTDIILDVLAQDHILNANELLQWDNGLSFID

SEQ ID NO: 218784 - protein, 42 aa, Zea mays
  Clone ID: MRT4577_131122C.1.pep
VLQSYFIYLKPYSSSDPEKQCFINPQFLLYRFQALAIISLTK

SEQ ID NO: 218785 - protein, 58 aa, Zea mays
  Clone ID: MRT4577_131123C.1.pep
RRSRVWSGLLGIEDDLRADGGGAPGDLGTWFGVQYLLLARPHLDFLQPSRNNNRRGVL

SEQ ID NO: 218786 - protein, 100 aa, Zea mays
  Clone ID: MRT4577_131124C.1.pep
SSLQLQLHTSPGLPALPTILVTGEQASKKKTKNAMLRRQNSCRISESVHRDQSCHLRSMTTHLMAMYTLALCSLRDLPNPPAPAAARLPAALVFILRLPY

SEQ ID NO: 218787 - protein, 268 aa, Zea mays
  unsure (1)..(268): unsure at all Xaa locations
  Clone ID: MRT4577_131125C.1.pep
MEAESGGVVRRSLQKTESAEMRWVVPGGANEDVEIESSDDGSVDTSATASGSRGGGCSDEDEGYENDEMLRQLLVRTGPRADSFDVEALDVPGVYRHQEFTLGSSIVLTLQTLGVVFGDVGTSPLYTFDVMFNKYSITAKEDVLGALSLVIYTLILIPFLKYTLIVLWGNDGGEGGTFALYSLICRNAKASLLPNQLPSDTRIANFNLKVPSVELERSLKIKERLETSSMLKKLLLMLALFGTSMVIADGVVTSAMSXMSAVNGLKVG

SEQ ID NO: 218788 - protein, 111 aa, Zea mays
  unsure (1)..(111): unsure at all Xaa locations
  Clone ID: MRT4577_131126C.1.pep
SEGTGILCQSNELLQELFRGVRLXLDRFINKLKDCDXQKAEVDLGHSYKTGKAKFIVDHVXTWRVMLIKILDTLDKDINNFFLLVNVXIAWHFSILVKIVDGENIDFKLDE

SEQ ID NO: 218789 - protein, 66 aa, Zea mays
  Clone ID: MRT4577_131127C.1.pep
GGFFFLYFLFSFFFFFFCTKAKTPNLISWPFFFKKVSPFSFHQNKKVFIINDLTQASGLNIWPLSF

SEQ ID NO: 218790 - protein, 70 aa, Zea mays
  Clone ID: MRT4577_131128C.1.pep
LSWLHKNSMALRSIYDFRKNSLSFFRDPHSLSKKALFLHYAQLKACDLFPNILFINAREKLPKIRIAYRS

SEQ ID NO: 218791 - protein, 86 aa, Zea mays
  Clone ID: MRT4577_131129C.1.pep
IAQQVNLLGDIKSAVGYSSYASSSIKQKSALDSKRKHRILCFTCSKGHEPKKKQLMCMNQEKQHNLKPCFGELNQKKYQLINPRAE

SEQ ID NO: 218792 - protein, 41 aa, Zea mays
  unsure (1)..(41): unsure at all Xaa locations
  Clone ID: MRT4577_13112C.1.pep
FLTXVFFLVFFFFSFHGCRAPLRGQILRGGFTTYWVTGDNW

SEQ ID NO: 218793 - protein, 180 aa, Zea mays
  Clone ID: MRT4577_131130C.1.pep
MARLLTQTLTLARPASSPSTTAASASLRGLATKVEIIEIDLAEEDAGSSSHGSPSSSPSVEAVGIRRLEEAIHGVMVRRAAPDWLPFVPGGSFWVPPLRRPHGVAELVGRIAAAGGTEGGAGAVGGAVEVLELDAPMTEEQAFCFSTTRGWPSASFFVEGKSTHLRKSRKGATQTDDEES

SEQ ID NO: 218794 - protein, 100 aa, Zea mays
  Clone ID: MRT4577_131131C.1.pep
GNRGKVQLKLMMKKADSFVLCCKGTKMSWRPTKFCSTVPPCHSLTDHTCNALTADMYGGYCCLHHRLLQENTVQSWMTAKINVDMDARGLLLVNHGTCYG

SEQ ID NO: 218795 - protein, 119 aa, Zea mays
  unsure (1)..(119): unsure at all Xaa locations
  Clone ID: MRT4577_131132C.1.pep
MARLFTQTLTLARPAASPSTTAASASLRGXRHQGRDHRXDLAEEDAGSSSHGSPSSSPSVEAVGIRRLEEAIHGVMVRRAAPDWLPFVPGGSFWVPPLRRQHGVAELVGRIAAAVGTER

SEQ ID NO: 218796 - protein, 93 aa, Zea mays
  Clone ID: MRT4577_131133C.1.pep
TKKSLIEAISFTANFFLLWCRNKSGCDDAASELCVGFTDGNWMLISNAKTVVFCVFVARVDLISQGGNHFSLFLINFLAMSPNCLWQLNNAIE

SEQ ID NO: 218797 - protein, 99 aa, Zea mays
  Clone ID: MRT4577_131134C.1.pep
LSVRRVLSLLVGVMCPACTGPGLALLCLPGPARVLTHLPYVVAGVSPGASRCLGCRCLRRCLCRPYVRLRQAPCPASLPGSSALVAISSPARGCVVVGW

SEQ ID NO: 218798 - protein, 95 aa, Zea mays
  unsure (1)..(95): unsure at all Xaa locations
  Clone ID: MRT4577_131135C.1.pep
MKMVIVLMLRLALATASTSTMQMPCPCAALXGLHGADSXLTTMMGANSLYPYAEYLKQPXASRFTLDHYYSCSSHPSSMFQSLRQQCCQQPMRMI

SEQ ID NO: 218799 - protein, 321 aa, Zea mays
  Clone ID: MRT4577_131136C.1.pep
MAPATLLLARLAVACALALGAMAQLSPTFYDASCPSLQAIVRAGMAAAVQQEPRMGASILRLFFHDCFVQGCDASVLLDDSPTLTGEKNAGPNANSLRGFEVIDSIKSQVEAACPGTVSCADILALAARDGVNLLSGPTWAVQLGRRDTRTASQSAANSNLPSPSSSAAALVSAFASKGLDSRDLVALSGAHTIGAARCATFRARVYNDTNISAGFAAKRRQICQAQAGASDGNLAPLDAMSSVRFDNGYFRNLVAQFGLLHSDQELFGAGGGAVDFITAQYARNGAAFSRDFVTAVLKMGSIGPLTGSSGEIRANCRKPN

SEQ ID NO: 218800 - protein, 35 aa, Zea mays
  Clone ID: MRT4577_131137C.1.pep
SLWQLHVLATSTGIHPLQLAAALSAPRATRIWQHL

SEQ ID NO: 218801 - protein, 146 aa, Zea mays
  unsure (1)..(146): unsure at all Xaa locations
  Clone ID: MRT4577_131138C.1.pep
GGPGSWGPLPPXLGIEFVAIAFPEHQRPMEKDPDKKKYPGGAFDPLGFSKDPPKFEESQLQEIKNGPLPPLAFVGFWGPQSGDPGPGPLENLPSPLADPGANNNGGIFLPRSISPLGPPSRWLLFPVDEKAPPGPRAAPVTSPPGI

SEQ ID NO: 218802 - protein, 103 aa, Zea mays
  unsure (1)..(103): unsure at all Xaa locations
  Clone ID: MRT4577_131139C.1.pep
SSKPRSGPFGSGPPGARPGGPPRFGEANPRFGDREGSKGGPRGAMGVFGGEKGRAPGDFPPXFRGSSPGFARGGGSAFGARGFSRGGSIPLRGKIVSGWAHVC

SEQ ID NO: 218803 - protein, 171 aa, Zea mays
  Clone ID: MRT4577_13113C.1.pep
MDHVDSHLAHQASQENVSFFTPLNLVLICAVLYTTYALMRSSPPPSLPRDTPSTVFRTYNPHTLLPFNGEEGRPVYLAVRGRVFDVSPGRNFYGPGGPYSNFAGRDASRGLACGSFDEDMLTKDLNAPLDKLEGLDEEQMDALRGWEERFLEKYNVVGKLVSMQDYEAQKA

SEQ ID NO: 218804 - protein, 101 aa, Zea mays
  unsure (1)..(101): unsure at all Xaa locations
  Clone ID: MRT4577_131140C.1.pep
RGPKKPNPPPPGLTQGGPHFPGKPKQKGGAKKTPXKKKPGGGGGGGVKKKNRAPPPXGGPPPQXKPPPGNXFFVAKKKKKPPPPPPXKKKGGGGGPPLGGG

SEQ ID NO: 218805 - protein, 68 aa, Zea mays
  Clone ID: MRT4577_131141C.1.pep
VPDLNSYSEMAEIKSHVAPQNMRIVYSNSNSNSNSNSNLIGPLDSDGTYALVYATRALRVVRDVRDRV

SEQ ID NO: 218806 - protein, 144 aa, Zea mays
  Clone ID: MRT4577_131142C.1.pep
STHPDFFTTFENICSDAATVNLQERTDVVEDARYVVNNLRFDLGEDESPYIRRKSDAGQGRRPSAARKGSMSFKDSNTRRESIVRRAAMRLGGLRVVTSGGVSSGIDAALYLVSAMIDDFTALEVARILQWTWNKGVVVDGLDV

SEQ ID NO: 218807 - protein, 64 aa, Zea mays
  Clone ID: MRT4577_131143C.1.pep
MYSPPPAQKMKIGPPFFPPKRAPVQPPPPKKKKKKKKKKKKKKKKKKKKKKKKKKKKKKKKKPK

SEQ ID NO: 218808 - protein, 61 aa, Zea mays
  Clone ID: MRT4577_131144C.1.pep
LFSGRHVVSNSGVTPSTAPCACVRLESTWSVPYKKRPCWCLCTSARTATVRVRQKKDAQPQ

SEQ ID NO: 218809 - protein, 77 aa, Zea mays
  Clone ID: MRT4577_131145C.1.pep
IAHSSIIRRSQIVEVPREAMCLVCSSLDYIGMLYISRVCSSQECTHSLDITSHYPRSTKRHILQQSTHHSGAHILQA

SEQ ID NO: 218810 - protein, 453 aa, Zea mays
  Clone ID: MRT4577_131146C.1.pep
MVVEMKENGGAALAAGEKAPQLGVKRGEPTLVPPAEATPTGGQYYLSNLDQNIAVIVQTVYCYKPSSPPGGGEGKDVDVAAALRDALARVLVHYHPLAGRLGVSPEMKLTVELTGEGAVFVEADAACDLAAVGDLTKPDPAALGQLVYSVPGAKHILEMPPMTAQVTRFKCGGFALGLAMNHCMFDGIGAMEFVNSWAETARGVAELTVPPFLDRSVLKARDPPVPTFPHHEFAEIPDVSDTAALYGAQELLYRSFCFDPDRLERVRGLALADGALGRCTTFEALSGLVWRARTKALGLAPEQRTKLLFAVDGRRRFAPPLPRGYFGNGIVLTNALATAGELLSAPVSRAAGLVQDAVRMVTDDYMRSAVDYFEATRARPSLASTLLITTWSRLEFHGADFGWGEPVMSGPVTLPEKEVILFLAHGKERKSINVLLGLPATAMDAFQELMDEI

SEQ ID NO: 218811 - protein, 57 aa, Zea mays
  Clone ID: MRT4577_131147C.1.pep
FEKESGFPLLSQYQWNTPLPYIASFPLLQLGYNDLETMYLVPTCMKCLVHSASAKYC

SEQ ID NO: 218812 - protein, 69 aa, Zea mays
  unsure (1)..(69): unsure at all Xaa locations
  Clone ID: MRT4577_131148C.1.pep
APGPEHHSHXQPRARPARPPXRARRAGTAHGPRRAATENGRPPARXTRHTAETXTSXXXRAPGRVXRPG

SEQ ID NO: 218813 - protein, 127 aa, Zea mays
  Clone ID: MRT4577_131149C.1.pep
PLFFFFFLFFFFFFFFFFYFFFFMIIYLSFFTLWKTRQSIGAQKKRKAGKTESGLAPGNPENAKKKGRVEKRRGTQPIGLPRNKNPTWKQKKTGTPSPKGPLRSTLCTIGQLFLPKAPRGSPLLSTF

SEQ ID NO: 218814 - protein, 84 aa, Zea mays
  Clone ID: MRT4577_13114C.1.pep
SLKDRMLPNVPSGTSKQALKQFAYRVTLKKQLSFSNKWTEGEVQAFAQINMEHYIPAHIRKMEWVPFPHVHVHSCHRTANKLQV

SEQ ID NO: 218815 - protein, 71 aa, Zea mays
  Clone ID: MRT4577_131150C.1.pep
GTNHWGGHAFDSFTGTKDARDNCFVLAQNPHGACKGQLVHAFFQGLHFRLQMPWKMVLNLVPPSLFTNRLG

SEQ ID NO: 218816 - protein, 57 aa, Zea mays
  unsure (1)..(57): unsure at all Xaa locations
  Clone ID: MRT4577_131151C.1.pep
TPTFPRSSSVFNTTRLLCFRLAQAYRXRSNTRRPTASRLRTQSYASINASSSTILGP

SEQ ID NO: 218817 - protein, 113 aa, Zea mays
  unsure (1)..(113): unsure at all Xaa locations
  Clone ID: MRT4577_131152C.1.pep
CAIVAQGYNNFYKAARDLIGRLQKIDGDNYPKVXTACPVRSSSELVRPSNCNKCSLLLHARPVHKLCRMFIINAGQGFRLLWNTVKSFLDPKTTAKIHVTKPISPPPQITVRV

SEQ ID NO: 218818 - protein, 97 aa, Zea mays
  unsure (1)..(97): unsure at all Xaa locations
  Clone ID: MRT4577_131153C.1.pep
GKKGAAGRKVGRPKKKSVSRYEKACLQFPEGRIGRYLKKGRYAQRVCTGALVYLAGVLXYLSAXVLELAHNASRDNKKTRIISRHVLLAIRNDEELG

SEQ ID NO: 218819 - protein, 47 aa, Zea mays
  Clone ID: MRT4577_131154C.1.pep
GATSFSSVGSLFFQSLRCQSPCSKLYLDTPVQYLVVSFHAYVTSEFG

SEQ ID NO: 218820 - protein, 97 aa, Zea mays
  unsure (1)..(97): unsure at all Xaa locations
  Clone ID: MRT4577_131155C.1.pep
FRRNMYMCKGTRTKRXDVTEPWDSRETDGIHMGDWCGATITNXLHGLFNTXIWNHPGTCIVNIKEETGRPGQGMSIGRLRRNKDEKDVTDKDGKDWA

SEQ ID NO: 218821 - protein, 64 aa, Zea mays
  Clone ID: MRT4577_131156C.1.pep
GIMGYVEQVLVSTDFLGTSRSSILDAKAGIALNDHLVKLVSWYDNEWGFSTRVVDLIRHMFKAQ

SEQ ID NO: 218822 - protein, 106 aa, Zea mays
  unsure (1)..(106): unsure at all Xaa locations
  Clone ID: MRT4577_131157C.1.pep
LPAFPHXQQSLPFXQLAALXSAXYLQHRPLPFSRLPAAFPRXFLLFSRLAALVSPAYFQQQQLLPFSRLAGVSPASFLVRLPLLPFYQHAWPDAGTLLPLPQLLPF

SEQ ID NO: 218823 - protein, 28 aa, Zea mays
  Clone ID: MRT4577_131158C.1.pep
IVWLSTLAKIQLNLSSSRLTPTLQHDGS

SEQ ID NO: 218824 - protein, 60 aa, Zea mays
  Clone ID: MRT4577_131159C.1.pep
GCLLLMVLQLRRHVDLAICVSFLVSVARASPGLCHLTSQAYYNTWCRYESMAVLVCFCAC

SEQ ID NO: 218825 - protein, 94 aa, Zea mays
  Clone ID: MRT4577_13115C.1.pep
TLTTHHIMPKERDYILGTTTKTRVILSQKLSSQGTLKTYLSTHACLCPMSWALIIIHNPFSFLTILTFTLLTLFIVHFIPQGSINFYKKLFFLI

SEQ ID NO: 218826 - protein, 84 aa, Zea mays
  Clone ID: MRT4577_131160C.1.pep
YDILVCFTELAFLDTKQVKNSKLVSSVGIGKKKKKKKKKKSTLRCYHCLDFSYFIKLWDPGFKIFLFSRLEREKSKSGSRRKPK

SEQ ID NO: 218827 - protein, 111 aa, Zea mays
  unsure (1)..(111): unsure at all Xaa locations
  Clone ID: MRT4577_131161C.1.pep
YYMDDSEEDQWHSNNDKDXIELXDKLYELGILSXHLNADDQKHDXTRQNLRERSATENRIVVNKADQNIVYTXAKIKKFFEEHLHTEEEIRYCLEGRGYFDVRDQDDQWIR

SEQ ID NO: 218828 - protein, 109 aa, Zea mays
  unsure (1)..(109): unsure at all Xaa locations
  Clone ID: MRT4577_131162C.1.pep
STRAHTCRGRATSNIPRKDTTSEELEXPAHTVHQRLQNPNHTHPDYYITASHASERRTLSWAAATERAPSTTDITTRATPGAXEINRTXQLIRSNYVNVTAEHHLKQQH

SEQ ID NO: 218829 - protein, 78 aa, Zea mays
  Clone ID: MRT4577_131163C.1.pep
SLSPPPQSVPSPTPPQQSRARSPMTQSPRRCHFQCQRHSSLASQSRPRIGSRAGQQHHQCSAADARTQCTRSHPPTWP

SEQ ID NO: 218830 - protein, 115 aa, Zea mays
  Clone ID: MRT4577_131164C.1.pep
MAACVPTVDAEEACALLSSSTHHYLDVRMWEDFDKGHVAGARNVPYYLSVTPHGKEKNPQFVEQVSALYAKDQNLIVGCRSGIRSKLATADLVNAGFTNVRNLQGGYLSLLRSAN

SEQ ID NO: 218831 - protein, 99 aa, Zea mays
  Clone ID: MRT4577_131165C.1.pep
MAACVPTVDAEEACALLSSSTHHYLDVRMWEDFDKGHVAGARNVPYYLSVTPHGKEKNPQFVEQVSALYAKDQNLIVGCRSGIRSKLATADLVNAASLP

SEQ ID NO: 218832 - protein, 311 aa, Zea mays
  Clone ID: MRT4577_131166C.1.pep
MRPEERDAAVGRVRDQFPVGMRVLAVDDDPVCLKVLENLLRRCQYHVTTTNQAVVALSMLRQNRDLFDLVISDVHMPDMDGFKLLELVGLEMDLPVIMLSVNGETKTVMKGITHGACDYLLKPVRLEELRNIWQHVVRRKFSNCDRANIDGYEECNRPSNADFDLAHSQITAGPPDQSGRPSKKRKEYHSEEEDEGEESNGQDNDDPSAPKKPRVVWSVELHRKFVAAVNQLGIDKAVPKRILELMNVERLTSGDAPKSASDLSFPKVHSELSSSSCSFDGLLNSIIKVEKDDASFSDDLGCDLYSLGACI

SEQ ID NO: 218833 - protein, 115 aa, Zea mays; identical to SEQ ID NO: 218830
  Clone ID: MRT4577_131167C.1.pep

SEQ ID NO: 218834 - protein, 496 aa, Zea mays
  Clone ID: MRT4577_131168C.1.pep
AQQKEEEYHSEEEDEGEESNGQDNDDPSAPKKPRVVWSVELHRKFVAAVNQLGIDKAVPKRILELMNVERLTRENVASHLQKYRLYLKRLSAVASQQASIVAALGGNDPFMRMSAFEGLHGYQSFVSSAALPSFSPQGLLNRNNPASFAIQGVSASRPIQIATGNTTMSHSIGDPNNKYHLSLPGTSSLQGNLAQGLPTPVGQVQLPQKWIHEETDDLSTILSASGRANSGVPGTLQSVTNSHLLQQGFVERRQDKVVIQPSSSASSDRPEGTVGVSSSLMDSCASQQRVVPLSAFSSSASPMNGSFCSNGVAELGAASSGGTSIFPSNDLRIERDSKVGASSFGSVILLSPDTVPNQKYLNFGGGSDLRPNMEGGNAGNLLNPKLLWSCLPASQPPNLIGSHHPMSQRLNLGGSMVRQTTASASAAAPQTRIDMFISGDAPKSASDLSFPKVHSELSSSSCSFDGLLNSIIKVEKDDASFSDDLGCDLYSLGACI

SEQ ID NO: 218835 - protein, 99 aa, Zea mays
  unsure (1)..(99): unsure at all Xaa locations
  Clone ID: MRT4577_131169C.1.pep
MAWLVPHCAGVFSPVPRTRRWAATXKEKALADRKKALESRKIICARAKQYAEEYHAQEKELVQLKREARMKGGVQESKRGQAPREGCRAAGGGGGAARA

SEQ ID NO: 218836 - protein, 70 aa, Zea mays
  Clone ID: MRT4577_13116C.1.pep
FLAFCCNLLILNLFTLCNMVAPSPPSEPAEPSTDPHVKGDDEIRRMAEAIMDKVVDQLLNEAAEIVLRED

SEQ ID NO: 218837 - protein, 66 aa, Zea mays
  Clone ID: MRT4577_131170C.1.pep
CPRHPLDPSRLFRGHRWYRGVVVHGYPPCRIHRAVATCWCICDERHRSCGRTGGAQPSAATPWSAS

SEQ ID NO: 218838 - protein, 53 aa, Zea mays
  Clone ID: MRT4577_131171C.1.pep
STGSTAIGLLQVCNLNTFRTKFILELSDLMGHSGPQYFNEHTSIAGYGPSHTH

SEQ ID NO: 218839 - protein, 153 aa, Zea mays
  unsure (1)..(153): unsure at all Xaa locations
  Clone ID: MRT4577_131172C.1.pep
MAPRLACLLALAMAAIVVAPCTAQNSPQDYVDPHNAARADVGVGPVSWDDTVXQGDCKLIHSGGPYGENLFWGSAGADWSASDAVGSWVSEKQYYDHDTNSCAEGQVCGHYTQVVWRDSTAIGCARVVCDNNAGVFIICSYNPPGNVVGESPY

SEQ ID NO: 218840 - protein, 163 aa, Zea mays
  Clone ID: MRT4577_131173C.1.pep
YKTLYFVHLQNISIGGTRFPAVSTKSGGNMFVDTGASFTRLEGTVFAKLVTELDRIMKERKYVKEQPGRNNGQICYSPPSTAADESSKLPDMVLHFADSANMVLPWDSYLWKTTSKLCLAIDKSNIKGGISVLGNFQMQNTHMLLDTGNEKLSFVRADCSKVI

SEQ ID NO: 218841 - protein, 154 aa, Zea mays
  Clone ID: MRT4577_131174C.1.pep
MAAATALVSSSSLRAPAAFSVVVRAASRPAPVVAVVTPLPAAKAAAARGARLRAQATHNVKLITPDGEVQLKMPGDVYILDYAEEQGLDLPYSCRAGACSSCVGKVVSGSVNQFDQSFLDDDQVAEGFVLTCIAYPTSDLVIQTHKEDALVESY

SEQ ID NO: 218842 - protein, 65 aa, Zea mays
  Clone ID: MRT4577_131175C.1.pep
HHHNTIYPPPTKTKTPNSYKLKTKGINRTNFITQQKMAGKTKVIVKKQNSFQKPYKGVLIKEDPL

SEQ ID NO: 218843 - protein, 163 aa, Zea mays
  Clone ID: MRT4577_131176C.1.pep
MAPRLACLLALAMAAIVVAPCTAQNSPQDYVDPHNAARADVGVGPVSWDDTVAAYAQSYAAQRQGDCQLIHSGGPYGENLFWGSAGADWSASDAVGSWVSEKQYYDHDTNSCAEGQVCGHYTQVVWRDSTAIGCARVVCDNNAGVFIICSYNPPGNVVGESPY

SEQ ID NO: 218844 - protein, 72 aa, Zea mays
  Clone ID: MRT4577_131177C.1.pep
WCGDRGCGLDVRIAGVVVLVFRGVGVVCLPRYSMACVVVQCWGRWSCDGVGCLSRIIWLSRRVLLFLQRRKW

SEQ ID NO: 218845 - protein, 48 aa, Zea mays
  Clone ID: MRT4577_131178C.1.pep
IDDSFFTRSFTSGRFLEVVPTDLLSSKNFSSFRDSVSGRDEGLKEFYS

SEQ ID NO: 218846 - protein, 85 aa, Zea mays
  Clone ID: MRT4577_131179C.1.pep
PLYGGGGYGGGGAYGGGAAASGGGGAGYGGGTRGGGFGNSQGNWRNLTVGPPRPSFLFSPRFFSPSPKGLSSFLSGLLSPPCFFY

SEQ ID NO: 218847 - protein, 116 aa, Zea mays
  Clone ID: MRT4577_13117C.1.pep
GVKIFILGGGPPKLPRSGADNLGTHRRGKGPLLGPPGTKKKNERTPLWGNPKTAAGGATQTPSCFHQPQKLFSRGGKKNPGGGFYPPKKPLVFRHPGLPPGTLNRPREGPHFSLRG

SEQ ID NO: 218848 - protein, 134 aa, Zea mays
  unsure (1)..(134): unsure at all Xaa locations
  Clone ID: MRT4577_131180C.1.pep
MTFKCRNGGRNKHGRGHVKDIRCSDCAKCCPKDKAIKRCHARNIAKQGAITYVQQACPYDVXLLPKLDAKIXHCCETCEEHXHIVHLPCREKEEDQEPPEHFTRMEDRPAGGQRGPRPATGGAATSPAPAPAAG

SEQ ID NO: 218849 - protein, 133 aa, Zea mays
  Clone ID: MRT4577_131181C.1.pep
MSVAAEQEVAPAVVAVAVAVAEAEEWEVCACCGLREECTPAYAAGVRARYGGRWLCGLCGDAVGEEVAAGGGSVLELEAAIAGHAAFCHALGGRRTPAAAERLIAAVRRLLRGADAGGKEEKAVVVVEFQEAS

SEQ ID NO: 218850 - protein, 79 aa, Zea mays
  unsure (1)..(79): unsure at all Xaa locations
  Clone ID: MRT4577_131182C.1.pep
YETTVPTQDTKQAYHEISXDGYAARXAGRYVXVGIGPWKDTLVPPDPREKRLVAPGELVGRAHALALEVEPYSFRNEKQ

SEQ ID NO: 218851 - protein, 50 aa, Zea mays
  Clone ID: MRT4577_131183C.1.pep
FSKFHLSWLRIFGSLALFAVSVNTSELGLGKRRSIVGSWDGPRPSGSLLV

SEQ ID NO: 218852 - protein, 63 aa, Zea mays
  unsure (1)..(63): unsure at all Xaa locations
  Clone ID: MRT4577_131184C.1.pep
APTGSKVPQIHSELXSERHVLLDRXDYEAXRSHDVGLTRLVRMAPGEGGDTSPFLKGDLGEFG

SEQ ID NO: 218853 - protein, 53 aa, Zea mays
  Clone ID: MRT4577_131185C.1.pep
SVAMQLSSVKSGFNQSRRCQSEAAQLNVSAPIPELRRRMHTYKSLHHLDRPLA

SEQ ID NO: 218854 - protein, 115 aa, Zea mays
  Clone ID: MRT4577_131186C.1.pep
WGPLAPGLGERGVPTKPFAKSFSNQEIAFFPLGQGFALNFFSPGGELHSPHFGLCVPRTRRSIHRFVGSLKTVAFSDPPQYLFFFPPDKGVTKYNFFKNSECPGFPKKKKTAKHA

SEQ ID NO: 218855 - protein, 206 aa, Zea mays
  unsure (1)..(206): unsure at all Xaa locations
  Clone ID: MRT4577_131187C.1.pep
MRMRLLYDAAVYGWRGDGRRACRRRGLASRADILIRPMVQRMLSHRANSGRHGAFXNXQAFIXKATARYSDYGAPGHQRKGTEKLDDFFGHTRHENTAGCETAADVPLACGYCRVKEQKQRNPTYYGRGPYSYLINTTMGFPXALKLNLQQDPELXQQMPCQPSQLPFEFWMTPQXPKTLCHAEMTRRLDAHRQLSRSWRRIWHTR

SEQ ID NO: 218856 - protein, 36 aa, Zea mays
  Clone ID: MRT4577_131188C.1.pep
MKTFDPWPVFFRREWKRNWPFLTGFAITGLIIIKMT

SEQ ID NO: 218857 - protein, 77 aa, Zea mays
  Clone ID: MRT4577_131189C.1.pep
GTSLNLELAQLCGIMCFKLYARLVLTLSYYCSAVVLPFELYMLRYLISSSILDYGCLNLKIFVSLGCGLVSAIGYFI

SEQ ID NO: 218858 - protein, 54 aa, Zea mays
  Clone ID: MRT4577_13118C.1.pep
NLGFPFKLLGNVQPFCPPGLCCISFRSNSRIYSLIHLGPGLNIIHSPMAGRFAF

SEQ ID NO: 218859 - protein, 98 aa, Zea mays
  Clone ID: MRT4577_131190C.1.pep
MIISFIYSATPSPVTCEYVRRADNKLQKSQINTFTIVPMCSWRRGGGGPRSSGRGRGARSRGGAEAEHTPGEGDDRGPGADGDEGRDDHIAFSGGGVD

SEQ ID NO: 218860 - protein, 72 aa, Zea mays
  Clone ID: MRT4577_131191C.1.pep
FPGWRLSRKPVSPPLLVEFLSWFVGLYLYACQLIRVPFHPLCMQALGPALAGRMRPYSPCIPGFGLCPSRAL

SEQ ID NO: 218861 - protein, 43 aa, Zea mays
  Clone ID: MRT4577_131192C.1.pep
ARSSARAPRVPGQQPIYHVASDWRLNINLKFTSRCTGQGQEHT

SEQ ID NO: 218862 - protein, 82 aa, Zea mays
  Clone ID: MRT4577_131193C.1.pep
LHHCTRLLPPALNSTSSAMTELVKLHFVTIISLHSLRRHMLQPLMRNIILWISPLTVLTSRSTTVIHERQDTPDDLTHGYYI

SEQ ID NO: 218863 - protein, 132 aa, Zea mays
  unsure (1)..(132): unsure at all Xaa locations
  Clone ID: MRT4577_131194C.1.pep
AQQRQQXGXANXXADAQQQQXXPXNQXXAXNXAXXXQQQQXPXSQXPXAXPQGXRAXNQRAAXNXPXXXQQQQXXPXSQXXXXSXXTXXXQPQXXPXXQHXAXNXGTXXQRQQXXPXNQXXXTNPAAXXQQP

SEQ ID NO: 218864 - protein, 72 aa, Zea mays
  Clone ID: MRT4577_131195C.1.pep
KIVLWWTPGDPKKPHVYHSQMAARFLWGPKFLCGPKLGTPLAIHTPDKDPLDINPVNLLLFRQKEAIIHDKA

SEQ ID NO: 218865 - protein, 117 aa, Zea mays
  Clone ID: MRT4577_131196C.1.pep
PNGIPDHSEIATEKGTKRASPRPAGNQACSPRLGQYDNREKASRRDGRVRCFVHVPATVKAGGAGAIGDAQMRACAAWLTSDELGTLDGPKAFDEIPPQECAVCQTGIASWFRCTLI

SEQ ID NO: 218866 - protein, 248 aa, Zea mays
  unsure (1)..(248): unsure at all Xaa locations
  Clone ID: MRT4577_131197C.1.pep
PPRCGRSRTSAPPGRPHLLSSLRRTHPLLPWQAELPGTARARPWLPPNSPQRSAWSSISLLGELSASSIVPSADCPPPMAAPWDLPGACIPSTLELSGLPHCTPSFSSARHAWDACRHLAPPRVMKSLHASCLSAELHRVASPARPCACHGSRVPLRSRGSSAPAGPPPRPWRFSPRSTTAQPRAPSAHSQAAPSLSPMMSARSLLVFLSVPSSLAFKLTPRAPSNRPAVRFLPXHSLVSFSRLGSTT

SEQ ID NO: 218867 - protein, 73 aa, Zea mays
  Clone ID: MRT4577_131198C.1.pep
MGGPAPLLKALQTPFRASQLGGTGLPPPWRRNVEIHGTVWPGGLFPRVPPCTCWEPKFLVFFRGKKKKKNPNP

SEQ ID NO: 218868 - protein, 83 aa, Zea mays
  unsure (1)..(83): unsure at all Xaa locations
  Clone ID: MRT4577_131199C.1.pep
MPQLQENLCGLLYLARQFKLYKVRSVQFGXKGIPYLNTYDDRTIRYPDPLIKANDTIKIDLETNKIMDFIKLYLPFHGLQSVI

SEQ ID NO: 218869 - protein, 81 aa, Zea mays
  Clone ID: MRT4577_13119C.1.pep
PWPTGPGNLGKFHRDGDRSLQLLVFNEECLVSASHQLALTTSLPFIPTARNLSIYLSPWKHISDDAPARAADLMQVCGFHL

SEQ ID NO: 218870 - protein, 234 aa, Zea mays
  Clone ID: MRT4577_1311C.1.pep
MGRGRVELKRIENKINRQVTFAKRRNGLLKKAYELSVLCDAEVALIIFSNRGKLYEFSSTQSMPKTLEKYQKCSFAGPETALQNRENEQLKSSRNEYLKLKARVDNLQRTQRNLLGEDLESLGIKELEHLEKQLDSSLKHIRSTRTQHMVDQLTELQKKEQMFCEANKCLRRRLEESNQVIWQHAWEQSERHSEVQPQQLNGNNFFHPLDGAGEPTLQIGYGPHIFSVNLVFLP

SEQ ID NO: 218871 - protein, 31 aa, Zea mays
  Clone ID: MRT4577_131200C.1.pep
FFFFFFFFFFFFFFFFFFFFFFFFWGTPNVV

SEQ ID NO: 218872 - protein, 94 aa, Zea mays
  unsure (1)..(94): unsure at all Xaa locations
  Clone ID: MRT4577_131201C.1.pep
MPQLQENLCGLLYLARQFKLYKVRSVQFGXKGIPYLNTYDDRTIRYPDPLIKANDTIKIDLETNKIMDFIKLYLPFHGLHQVIYLVRLNVSTNS

SEQ ID NO: 218873 - protein, 45 aa, Zea mays
  Clone ID: MRT4577_131202C.1.pep
RSNHINYAYARDNETLFDIISVKMNLSIDKRCRINNLSTSMIALS

SEQ ID NO: 218874 - protein, 275 aa, Zea mays
  Clone ID: MRT4577_131203C.1.pep
VHYELDQTPGVPQMMAGAIAPPRQIKPQRAEYCSEIELGESQWINCDIRNFRMDILGQFGVIMADPPWDIHMELPYGTMADDEMRTLNVPTLQTDGLIFLWVTGRAMELGRECLELWGYKRVEEIIWVKTNQLQRIIRTGRTGHWLNHSKEHCLVGIKGNPLVNRNIDTDVIVAEVRETSRKPDEMYAMLERISPRTRKLELFARMHNTQAGWLSLGNQLNGVRLVDQGLRARYKAAYPDVEVQPPSPPRTSTPMDVDQSSSQKVAALDGGERPA

SEQ ID NO: 218875 - protein, 231 aa, Zea mays
  Clone ID: MRT4577_131204C.1.pep
MASSAGNRFLRQLSASNGDEGVGGGLQMDQQEYGPPDVGRRGSRRWSKKRAAAAAAARGYGAGSGNGVKQPASAAGKRVMVVVDESSGANHAMMWALTHVADKGDFLTLLHVLPRSGSGRGEEASSLANSLGTLCKASRPEVEVEALVIQGPKLGTVLSQVKKLEASVLVLSQCRPSPCWLSCFLRSSGEEFVEQCINQAECLTLAVRKQSKGVGGYLISTRWQKNFWLLA

SEQ ID NO: 218876 - protein, 95 aa, Zea mays
  unsure (1)..(95): unsure at all Xaa locations
  Clone ID: MRT4577_131205C.1.pep
MPQLQENLCGLLYLARQFKLCKVRSVQFGQKGIPYLNTYDDRTIRYPDPLIKANDTIKXIDLETNKIMDFIKLYLPFHRLHHVIYLVRLNVSTNS

SEQ ID NO: 218877 - protein, 101 aa, Zea mays
  Clone ID: MRT4577_131206C.1.pep
AKQVSVVGHDWRAIMAWYLCLFRPNRAAALVNTSVSYMRHMLVRAAAAAVTPIDYLHRTYGPSYYMCRLQTNNLSTAGRTTATTDRLARPMWVTARNTRCG

SEQ ID NO: 218878 - protein, 264 aa, Zea mays
  unsure (1)..(264): unsure at all Xaa locations
  Clone ID: MRT4577_131207C.1.pep
MASSAGNRFLRQLSASNGDEAVCGGLQMDQQEYGGAGVGRRGSRRWSKKRAAAAAAARGYGAGSGNGVKQPASAAGKRVMVVVDESSGANHAMMWALTHVADKGDFLTLLHVLPRSGSGRGEEASSLANSLGTLCKASRPEVHTXQHMHLHLLISGVQLXTXLAPKERAFSQLRRQXAWSLPAADQRIGGISSLXSLLQRQSREEFKEKYSNQAECLTLGVRKQSKVVGGKLISTRWKKWLRLSALEQLRLPIYTCIQLHKSYS

SEQ ID NO: 218879 - protein, 189 aa, Zea mays
  Clone ID: MRT4577_131208C.1.pep
MASSAEERFLRQLSASNGGDEGVCGGQQLGHKEYCAERRGSRRWSRKRAAAARGYCGGYDDYDVKQQAEAASAAARKRVIVVVDDTSGSKHAMMWALTHVASKGDFLTLLHVLLPHSASGGGCSRGEEASSLANSLGTLCKASRPEVEVEALVIQGPKLGTVLSQVKKLEASVLVLGQGRPSPCYRWLS

SEQ ID NO: 218880 - protein, 88 aa, Zea mays
  Clone ID: MRT4577_131209C.1.pep
DLEQVLDIELTVQEWAVTYGKELATVPWPVHRSVCEFASYIARFMCQLRARAIPPFRLCPAVKDVRCGPLAEYHSCPTAHMLAGEKIG

SEQ ID NO: 218881 - protein, 59 aa, Zea mays
  Clone ID: MRT4577_13120C.1.pep
GQYTMLMLPQLAVPCMSWRSKHTSQSTASKCYVSSALNAPHGSRHREGYARPNLHQESL

SEQ ID NO: 218882 - protein, 174 aa, Zea mays
  Clone ID: MRT4577_131210C.1.pep
ARPYFFGCFPKRGNLFSSPPAKSNFGQRPCEGFFVFGGGLSPPARSVWFFPPRPRWGLFLFFAGLPYILEKGFRSLVYAFAALGVIKCPPGVFLDGETILGAPLNYGGWVSPRLPPRIFKIFRVGWAGFLIPSFSRIWFFPGVPYGGKQKTPVILFLTKKRSFLWDLPPVLCPL

SEQ ID NO: 218883 - protein, 252 aa, Zea mays
  unsure (1)..(252): unsure at all Xaa locations
  Clone ID: MRT4577_131211C.1.pep
PSTSRLPALPQKKTARLLLLLRRAGITCGILAVLGCSDWSQAKRARILACSRRLKHRGPDWSGLYQHEGNFLAQQRLAVTKRHLVETEAAEKFGTELHSFVVGLEGSPDLKAAREVADYLGTIHHEFHFTVQDGIDAIEEVIYHDETYDVTTIRASTPMFLMARKIKSLGVKMVLSGEGSDELLGGYLYFHFAPNKEEFHRETCRKVKALHQYDCLRAXKATSAWGLEVRVPFLDKEFINVAMGMDPEWKMY

SEQ ID NO: 218884 - protein, 97 aa, Zea mays
  Clone ID: MRT4577_131212C.1.pep
LMQTCDQGHGISERGKHTLQAFVSCDSQQCMNGLGMSMQTVSVGPSMHMIAHSSNYVLSSKLIVAQASRQAKLILADASPVRVSPPSAMSSGMHIRP

SEQ ID NO: 218885 - protein, 235 aa, Zea mays
  unsure (1)..(235): unsure at all Xaa locations
  Clone ID: MRT4577_131213C.1.pep
LAEDLPDDPRAVRRLKHRGPDWSGLYQHEGNFLAQQRLAVVSPLSGDQPLFNEDRTVVVVANGEIYNHKNVRKQFTGTHNFSTGSDCEVIIPLYEKYGENFVDMPDGVFAFVLYDTRDRTYVAARDAIGVDPLYIGWGSDGSVWIASEMKALNEDCVRFEIFPPGHLYSSAGGGFRRWYTPHWFQEQVPRTPYQPLVLREAFXEAVIKRLMTDXPFXVLXLPXGLDSSXXVASVT

SEQ ID NO: 218886 - protein, 60 aa, Zea mays
  Clone ID: MRT4577_131214C.1.pep
GKTWKLFYVFFKTPPRWGVGSFGWLVGNKVVYLAKVCCLYTACVEKKIHVLFVLKGWQAF

SEQ ID NO: 218887 - protein, 588 aa, Zea mays
  unsure (1)..(588): unsure at all Xaa locations
  Clone ID: MRT4577_131215C.1.pep
MCGILAVLGCSDWSQAKRARILACSRRLKHRGPDWSGLYQHEGNFLAQQRLAVVSPLSGDQPLFNEDRTVVVVANGEIYNHKNVRKQFTGTHNFSTGSDCEVIMPLYEKYGENFVDMLDGVFAFVLYDTRDRTYVAARDAIGVNPLYIGWGSDGSVWIASEMKALNEDCVRFEIFPPGHLYSSAGGGXRRWYTPHWFQEQVPRTPYQPLVLREAFEKAVIKRLMTDVPFGVLLSGGLDSSLVASVTKRHLVETEAAEKFGTELHSFVVGLEGSPDLKAAREVADYLGTIHHEFHFTVQXGIDAIEEVIYHDETYDVTTIRASTPMFLMARKIKSLGVKMVLSGEGSDELLGGYLYFHFAPNKEEFHRETCRKVKALHQYDCLRANKATSAWGLEVRVPFLDKEFINVAMGMDPEWKMYDKNLGRIEKWVMRKAFDDDEHPYLPKHILYRQKEQFSDGVGYNWIDGLKSFTEQQVTDEMMNNAAQMFPYNTPVNKEAYYYRMIFERLFPQDSARETVPWGPSIACSTPAAIEWVEQWKASNDPSGRFISSHDSAATDHTXAVSRRWPTAAATXANGTVNGKDVAVAIAV

SEQ ID NO: 218888 - protein, 87 aa, Zea mays
  Clone ID: MRT4577_131216C.1.pep
FGSSGNSNTLASTTSGLSTKRGPLRPTRDGNPDKQQRNRRTEPGDNTAIATQASLGNPAAVARQPHRMRPPPAHPGHNSGRGAYGRQ

SEQ ID NO: 218889 - protein, 36 aa, Zea mays
  Clone ID: MRT4577_131217C.1.pep
IVALAKVWGNTNTPGSMYLALDWIQMLARAWVCLTA

SEQ ID NO: 218890 - protein, 63 aa, Zea mays
  Clone ID: MRT4577_131218C.1.pep
NYPFQLNGTQHYAFKLTYNHLGSRDRTVRTMSSFRNNCQPVENYQCLINNIFIANYNRMLPEI

SEQ ID NO: 218891 - protein, 219 aa, Zea mays
  Clone ID: MRT4577_131219C.1.pep
MAGRRAEEEYDYLFKVVLIGDSGVGKSNLLSRFTRNEFCLESKSTIGVEFATRTLHVEGKIIKAQIWDTAGQERYRAITSAYYRGALGAVLVYDVSKPTTFENISRWLKELRDHADSNTRIMLVGNKTDLRHLRAVATDDARSFAEAEGLSYIETSALEATNVEEAFQLILGDIYRAVSKKPVASDEVGAGQGGVKEGKTIDVATGADAAAHKKQCCSA

SEQ ID NO: 218892 - protein, 57 aa, Zea mays
  Clone ID: MRT4577_13121C.1.pep
SHQLSPPINMVIGQFLQPMAVRNMSPNVKEGWRRSPVPTQTRSSNCHHSQQVIICFF

SEQ ID NO: 218893 - protein, 219 aa, Zea mays
  Clone ID: MRT4577_131220C.1.pep
MAGRRAEEEYDYLFKVVLIGDSGVGKSNLLSRFTRNEFCLESKSTIGVEFATRTLHVEGKIIKAQIWDTAGQERYRAITSAYYRGALGAVLVYDVSKPTTFENISRWLKELRDHADSNTRIMLVGNKTDLRHLRAVATDDARSFAEAEGLSYIETSALEATNVEEAFQLILGDIYRAVSKKPVASDEASAGQGGVKEGKTIDVATGADAAAHKKQCCSA

SEQ ID NO: 218894 - protein, 219 aa, Zea mays; identical to SEQ ID NO: 218891
  Clone ID: MRT4577_131221C.1.pep

SEQ ID NO: 218895 - protein, 108 aa, Zea mays
  unsure (1)..(108): unsure at all Xaa locations
  Clone ID: MRT4577_131222C.1.pep
TTVGGKIFFVLKPPGLSGSGGDTTXFSQYSQEPIYVLFSPYISXMSALLCENPALXPYRIQQAIATSNLPLSHLFFQQSPALSLVQSLVQTIRAEQLQQLVLPVISQV

SEQ ID NO: 218896 - protein, 219 aa, Zea mays; identical to SEQ ID NO: 218891
  Clone ID: MRT4577_131223C.1.pep

SEQ ID NO: 218897 - protein, 52 aa, Zea mays
  Clone ID: MRT4577_131224C.1.pep
KKGAGCLSDPRVFTYPGQGIIFAFLVSKLILFAAPYNKFRLRNFCFPHLNNL

SEQ ID NO: 218898 - protein, 105 aa, Zea mays
  Clone ID: MRT4577_131225C.1.pep
NSLIQPRLGSEFFFFLTCPVRDRWVVHLVKQRIPFLGEVSHPRVRSLGWFQSQSFPDVSFVCCQVMNCFLKTLCRHVGTVFQCQLRGRGPRKCVWPLRSVAHLGS

SEQ ID NO: 218899 - protein, 219 aa, Zea mays
  Clone ID: MRT4577_131226C.1.pep
MAGRRAEEEYDYLFKVVLIGDSGVGKSNLLSRFTRNEFCLESKSTIGVEFATRTLHVEGKIIKAQIWDTAGQERYRAITSAYYRGALGAVLVYDVSKPTTFENIRRWLKELRDHADSNTRIMLVGNKTDLRHLRAVATDDARSFAEAEGLSYIETSALEATNVEEAFQLILGDIYRAVSKKPVASDEAGAGQGGVKEGKTIDVATGADAAAHKKQCCSA

SEQ ID NO: 218900 - protein, 53 aa, Zea mays
  unsure (1)..(53): unsure at all Xaa locations
  Clone ID: MRT4577_131227C.1.pep
XCGAXQVGFYLFTISPSTKGQEKWSLLTISAXNQFMXXISIKYICTIXXPSPG

SEQ ID NO: 218901 - protein, 126 aa, Zea mays
  Clone ID: MRT4577_131228C.1.pep
HESYGKTPGSLANCSTDTWAPTFLTVPFVSGTCCNAVERKKLPVPSVFVLEFLLRSEILRSSSNNARLYPVPPAARACGPRWSRRALYGFGSRAYSGLRVSGLSLRAKFTAIDGAQTVVVKFGAVA

SEQ ID NO: 218902 - protein, 205 aa, Zea mays
  unsure (1)..(205): unsure at all Xaa locations
  Clone ID: MRT4577_131229C.1.pep
MDAVSSAGVAPQSAFLSHSSFADAAIARALHSSLSDHAPEPPATAAAAAMLMHGAVAGTDCPPAAAPSPSQSSSARCRVGPAAGRAGKRRRPRPSKRAPTTYISADAATFRAMVQRVTGADEDXPAAAAXDRDSLGLLLPHLGVEQFLQAAGPASHVAVATAPYATASPHQAAYQHQQPLFPTLDSWNVMYGKKDEVVSVLTAGQ

SEQ ID NO: 218903 - protein, 128 aa, Zea mays
  unsure (1)..(128): unsure at all Xaa locations
  Clone ID: MRT4577_13122C.1.pep
GCLGASTNRGCKAIAQSGGAYSVLLKDGMTRAPGGRFLFARRAIEHKAFLEDPANFDTLAMVHNRSSXFRRLHRVKCSIAGTNLYMRFSCRTGDAMGMNMVSKGVHNVLDYLQADLPDMDVINISSNF

SEQ ID NO: 218904 - protein, 62 aa, Zea mays
  Clone ID: MRT4577_131230C.1.pep
YTLQFPFLTLHLISLNGGYNQCLTTLLPHKYNTSKATYPLYHKNTLTTNISKRSISLNTLHF

SEQ ID NO: 218905 - protein, 36 aa, Zea mays
  Clone ID: MRT4577_131231C.1.pep
SRFSRSITTAAQFGIDSPRGELRAGAVATGRVRVFD

SEQ ID NO: 218906 - protein, 80 aa, Zea mays
  Clone ID: MRT4577_131232C.1.pep
LGIQNILFDPIIKRVLRDFQENPGGGRGPPKNPGVIQKFQNLVSPGIVQIKKTGVEKTGLKFGPCPEKPGTLNIVSHFGN

SEQ ID NO: 218907 - protein, 64 aa, Zea mays
  Clone ID: MRT4577_131233C.1.pep
IHPVQLHTAPESRRTNTGSHNSSLRAQHLTNLLPKRQYHIFLVEFDSTFTQPHATHCIPPGYVL

SEQ ID NO: 218908 - protein, 236 aa, Zea mays
  unsure (1)..(236): unsure at all Xaa locations
  Clone ID: MRT4577_131234C.1.pep
MATERESKTFLARLCEQAERYDEMVTYMKEVAKIGGELTVDERNLLSVAYKNVVGTRRASWRIISSIEQKEEAKGTDKHVGIIREYRQKIELELEKVCEDVLSVLDESLIPKAETGESKVFYHKMKGDYHRYLAEFASGDKRKSAATAAHDAYKNATDVAQTELTPTHPIRLGLALNFSVFYYEILNSPDRACHLAKQAFDDAIAELDSLSEESYRDSTLIMQLLRDXLTLWTSSD

SEQ ID NO: 218909 - protein, 34 aa, Zea mays
  Clone ID: MRT4577_131235C.1.pep
VTLSDEGQYVGVSTICVPLEFLRSLTKGEEQAHK

SEQ ID NO: 218910 - protein, 60 aa, Zea mays
  Clone ID: MRT4577_131236C.1.pep
AGRAGNSVSPVLIGCFLSMRFEKLTRHVCKPGTMNNCHHEQNMVMNKVAHFKKKKKKRPL

SEQ ID NO: 218911 - protein, 55 aa, Zea mays
  Clone ID: MRT4577_131237C.1.pep
WSMNSRDAAADASRTETGDNVSPLQKQDHLISRTTGEDLFVTTQWPMPKHYMGCK

SEQ ID NO: 218912 - protein, 74 aa, Zea mays
  Clone ID: MRT4577_131238C.1.pep
LEEAGIVDPEPVAPEEGPEPELPEVGLLYSFVVQPLETVWAVTQSELVWSDPRVKKAGEHREDKEGESFVRFGH

SEQ ID NO: 218913 - protein, 39 aa, Zea mays
  Clone ID: MRT4577_131239C.1.pep
RVSKTWNPLRRHDPFFFFYKRKLGHEPIYQDIKLHARKI

SEQ ID NO: 218914 - protein, 96 aa, Zea mays
  unsure (1)..(96): unsure at all Xaa locations
  Clone ID: MRT4577_13123C.1.pep
ARSYRRHLALAWSAVQQPMSQLQQLSSAHLXAQPFSXQRKRHSVQSSSHLSVVSRVAHXHQQLLAFNPRNVASERASQQSCASSLSIRSGQSTIPW

SEQ ID NO: 218915 - protein, 65 aa, Zea mays
  Clone ID: MRT4577_131240C.1.pep
PSRWTVRTWRSWRLRGSLRKLESEPGMEMETPASPAREAAATPANRAAFHTGNPSSLAILSFSSS

SEQ ID NO: 218916 - protein, 41 aa, Zea mays
  Clone ID: MRT4577_131241C.1.pep
CDLRCTLRVRVFWARLAYLGSSGGFDGHLLASWLMSGALFT

SEQ ID NO: 218917 - protein, 244 aa, Zea mays
  Clone ID: MRT4577_131242C.1.pep
MSSVASKVAVPESVLRKRKREEQWATEKKEKALVEKKKSIESRKLIFTRAKQYAEEYDAQEKELVQLKREARLKGGFYVSPEAKLLFVVRIRGINAMHPKTRKILQLLRLRQIFNGVFLKVNKATINMLRRVEPYVAYGYPNLKSVRELIYKRGYGKLNKQRIPLSNNQVIEEGLGKHNIICIEDLVHEIMTVGPHFKEANNFLWPFKLKAPLGGLKKKRNHYVEGGDAGNRENYINELIKRMN

SEQ ID NO: 218918 - protein, 76 aa, Zea mays
  Clone ID: MRT4577_131243C.1.pep
MAAKAISSPVPVEWYPTLAVVMVSVGLMLTASFFIYEATTSRRNRSLAKEIVTASIASVFLGFGSLFVLLASGVYV

SEQ ID NO: 218919 - protein, 246 aa, Zea mays
  Clone ID: MRT4577_131244C.1.pep
MQMSSEASKVAVPESVLRKRKREEQWATEKKEKALVEKKKSIESRKLIFTRAKQYAEEYDAQEKELVQLKREARLKGGFYVSPEAKLLFVVRIRGINAMHPKTRKILQLLRLRQIFNGVFLKVNKATINMLRRVEPYVAYGYPNLKSVRELIYKRGYGKLNKQRIPLSNNQVIEEGLGKHNIICIEDLVHEIMTVGPHFKEANNFLWPFKLKAPLGGLKKKRNHYVEGGDAGNRENYINELIKRMN

SEQ ID NO: 218920 - protein, 170 aa, Zea mays
  Clone ID: MRT4577_131245C.1.pep
MEPATPPAPAAGVTATIDLSLVAADLGGAHLLPCGIRQNGGAPVSDYFKPRATGPDGYRGFVLEKRHGHNSNAEVNNFTSQAEFQSITYWNHDTTSSTEDSLPRCFHWLTVANAVSIISSPNVIDSFVGRQYVRRQGPLGQPFVRWQLVVRKVKEAYPPWGLFLNNLLTC

SEQ ID NO: 218921 - protein, 89 aa, Zea mays
  Clone ID: MRT4577_131246C.1.pep
FTKENPKKFGNRVKTVSTPFQYLSLNGGQHFWSFCPVPSKVPNQHRYLVMFPCTRYLTREKGGLLKYFVSHVQGGHGLINPFFVTNWAD

SEQ ID NO: 218922 - protein, 61 aa, Zea mays
  Clone ID: MRT4577_131247C.1.pep
KSFQLIKPYAADWLDCCPWPASGEHAPWETEVSSVPAHAALRDIFLLALHLPVQLDLVLCT

SEQ ID NO: 218923 - protein, 160 aa, Zea mays
  Clone ID: MRT4577_131248C.1.pep
MEPATPPAPAAGVTATVDLSSVAADLGGAHLLPCGIRQNGGAPVSDYFKPRDTGVEVEGVKMEEAFFRGRKLQGTTLALPDGYRGYVLEKSRGQNSDAEVSNFTSRAEFQSITYWNHDTAPSAEDSLPRCFHWLTVANAMHRAVTAEDLTNMAAMQNQDK

SEQ ID NO: 218924 - protein, 96 aa, Zea mays
  Clone ID: MRT4577_131249C.1.pep
DAVSAFSRARSDKRESHDLRMLVLHSSVSLICPSPLMRVGPPTTWFAPASEVAQVVNIDAAVEPWSTARPLVPALACNHGPPPSLPRRPMTTSSAA

SEQ ID NO: 218925 - protein, 125 aa, Zea mays
  Clone ID: MRT4577_13124C.1.pep
LRPQAIGVQAPFPRLFGSPRQGPYKVGPYNFVPGTSLASVCPRPSGTRWISLFGHYYSIWFNNLEGANVLETRDQKCLAYVTPRTYDGMTYIRFGMGGPILLRVLCQCFGGFRSNVKKNPKKKQG

SEQ ID NO: 218926 - protein, 52 aa, Zea mays
  Clone ID: MRT4577_131250C.1.pep
GLFKEGDLLDNGIVCEMIFCNIEIISRIFIQIYVFIIVFLKIKKCIFFFSNA

SEQ ID NO: 218927 - protein, 484 aa, Zea mays
  Clone ID: MRT4577_131251C.1.pep
VGRLPYRTGPAGSAQATRFHAHGREAISKMHNMSAAVLTSVLTLIDEYDLYGQVAYPKHHKHSEVPDIYRLAARTKGAFVNVAYFEQFGVTLIEAAMNGLPIIATKNGAPVEINQVLNNGLLVDPHDQNAIADALYKLLSDKHLWSRCRENGLTNIHQFSWPEHCKNYLSRILTLGPRSPAIGNREERSNTPISGRKNIIVISVDSVNKEGLVRIIRNAIEVIHKENMSGSTGFVLSTSLTISEIHSLLLSGGMLPTDFDAFICNSGSNIYYPSHSGETSNNSKITFALDQNHQSHIEYRWGGEGLRKYLVKWATSVVERKGRTERQIIFEDPEHSSAYCLAFRVVNPNHLPPLKELRKLMRIQSLRCNALYNHSATRLSVVPIHASRSQALRYLCIRLGIEVPNVAVLVGESGDSDYEELLGGLHRTVILKGEFNIAANRIHTVRRYPLQDVVALDSSNIIGVDGYTTDDLRSALQQMGILAR

SEQ ID NO: 218928 - protein, 121 aa, Zea mays
  Clone ID: MRT4577_131252C.1.pep
FGTTVFASTGLKDSYVTQLILGSVNCACTFGGLYVVQKCGRRKSLMIGAAWMMMCFFVYAFVGHFALDRKDPLSTPAAGAVLVTFSCLAIAAFATTWGPLVWAVVAEMYPSQYRSRCMAIA

SEQ ID NO: 218929 - protein, 103 aa, Zea mays
  Clone ID: MRT4577_131253C.1.pep
RVSSLLVCAGDQSSPWSRLPLDSGHGSEVLPRALWSRPNLSQITRSHGLICKDQLGGADSVKFGDILQPENALGRHSALFLLLLSHLMSRLSPSNSPSFWADG

SEQ ID NO: 218930 - protein, 46 aa, Zea mays
  Clone ID: MRT4577_131254C.1.pep
QTCKLLYMRHVSCWGHDVECNKNCMQKYDRVCEWRRREAFHSSESW

SEQ ID NO: 218931 - protein, 155 aa, Zea mays
  Clone ID: MRT4577_131255C.1.pep
HNVVTAQGCDNNMYENSGFVFHRCSVEADPNPWPVGQNLTGVETFLGRPYRKYSHVIFMECQLSDVVSAAGWVAWDRAHVINDTTKSVRYMEYANTGPGADTTHRVDWEGVHVLHDPAQVAKYTIDAFISGKECIPHQIPYDHEVPSGRGAIIVN

SEQ ID NO: 218932 - protein, 100 aa, Zea mays
  unsure (1)..(100): unsure at all Xaa locations
  Clone ID: MRT4577_131256C.1.pep
GVTVKELGLXRHAFRRLREVVGKRYNSGKDELTIISERFEHREENRKDCLRTLYTLIKDAMKADKLVEDARNSYVKGRLKANPQFMERLKRKTDKLMAAA

SEQ ID NO: 218933 - protein, 79 aa, Zea mays
  Clone ID: MRT4577_131257C.1.pep
ATPVQQNKWFGLVAAQKLLGPPKMNLGLGDEIKPEFELLTRPTRTPHQSSFNWEKQIQAYPNIALLFILGQARSFVLRL

SEQ ID NO: 218934 - protein, 88 aa, Zea mays
  Clone ID: MRT4577_131258C.1.pep
SHRIMLAGLESNLNLVICTIDSFKGVCGSMFDARTMSHPSGMSRTTTVLTVSSYSGSYSGVAAANTVDDLCDMIRGFVDVCVAATVRA

SEQ ID NO: 218935 - protein, 397 aa, Zea mays
  Clone ID: MRT4577_131259C.1.pep
MRRLLGHLHPHAQSLFASLPRKPSIATKLPFLLSRRLLSDAASPPAPSLPPPPPPSADVTNTELKKRLETYYGVDEEAELPSVAKAVLERNLTGAHSETDDDLIEELRSKPLPEVHDRDFESDFEEMHDTDEELNDLYNTREYVEKKIKSDEFFNMDDTKWDAMIKEATDKGHLTNMKECEEILEDMLYWDKLLPDEIKQKVETKFNELGDMCERGEMEPEQAYEMFKEFEDKMVAECTELIESKMPTDADELTESGGKKVELDDLPGEGPVLRWESRIVFVPSGDAYHPKNRKVKLSVTVKELGLSRHAFRRLREVVGKRYNSGKDELTIISERFEHREENRKDCLRTLYTLIKDAMKADKLVEDARNSYVKGRLKANPQFMERLKRKTDKLMAAA

SEQ ID NO: 218936 - protein, 91 aa, Zea mays
  Clone ID: MRT4577_131260C.1.pep
KWNLVVVEQKSSPGRGGFLAGVWMALPITPGFGREALLMDIKISKGGPFFVLGWSKKHGFCLQTKACLEAGFLNFQKTNCTHLGKWHQVPL

SEQ ID NO: 218937 - protein, 67 aa, Zea mays
  Clone ID: MRT4577_131261C.1.pep
VKKSDQGTTCLILAMTCCLNADPKVGRRFLVTSFLLVAIHTIKQIVDMVTLHQSVRTNCIRIFYTLL

SEQ ID NO: 218938 - protein, 106 aa, Zea mays
  Clone ID: MRT4577_131262C.1.pep
NIYTHLWFIRLHARSTGVQVRRAEGRRRNRRDSLSPVRACCHRVSVYVRGRPRRGLPRPRTSTTPSTTDRRSRSRTYSARVRPWMRRRIRIHSIGLACVASAWCSH

SEQ ID NO: 218939 - protein, 34 aa, Zea mays
  Clone ID: MRT4577_131263C.1.pep
TARPTSATCRRRTTSARLHGYVAEMRSRYPAGKE

SEQ ID NO: 218940 - protein, 64 aa, Zea mays
  Clone ID: MRT4577_131264C.1.pep
ARGTDLSSVSGRSSHPPRTRTTRTIITPPPPSPPTSPTYSPPPPPPAPPPTTPHTPPHSRLFPP

SEQ ID NO: 218941 - protein, 45 aa, Zea mays
  unsure (1)..(45): unsure at all Xaa locations
  Clone ID: MRT4577_131265C.1.pep
SKFVPSLPXALKMMRDQRRKQSEPFWSSMVMKKWLNIRPKLNDFS

SEQ ID NO: 218942 - protein, 66 aa, Zea mays
  Clone ID: MRT4577_131266C.1.pep
NLLGTLVVRAPLRSVSRSYECGSTLVVVPGSLLCFRSVFCLFSYVCSRLLYFIQILCLQKKKKKSG

SEQ ID NO: 218943 - protein, 87 aa, Zea mays
  Clone ID: MRT4577_131267C.1.pep
PTSREGRRAGNLARNELKLSDGGRLEPAGEEDTSDMESRGPVATASLREMEKREGARKPRCWKLGTERWSPRRGGQGARPAAGRAVG

SEQ ID NO: 218944 - protein, 91 aa, Zea mays
  Clone ID: MRT4577_131268C.1.pep
ISPTGFASSVPVDSARSYALTIIRGLVWDAISYVGNVAAMRKESRQKLPRFQDSPQVPGGVDLPKLGKGVSSSIRSTVECIRAFKDQRWPP

SEQ ID NO: 218945 - protein, 209 aa, Zea mays
  Clone ID: MRT4577_131269C.1.pep
MPDSPQLHQPPPPPAPPPASATPAAPAAANAQPKLTAVKLRMIIKGVLGRYQRWNPVHPTAGTFWGVGLGVGCGVCWGPGFGPEVIGYVGAGCGVGFSVGFTLAGVGIGLPQHSLIRNHDHGGFASSVPVDSARFYALTIIRGLVWDAISYVGNVAAMRKESRQKLPRFQDSPQVPGGVDLPKLGKGVSSSIRSTVECIRAFKDQRWPP

SEQ ID NO: 218946 - protein, 54 aa, Zea mays
  Clone ID: MRT4577_13126C.1.pep
HTAFRAPSSPFARAFTSFLNSAPHRAMRAMHQSFVLVLGHGAEVIPKTLTIAEH

SEQ ID NO: 218947 - protein, 82 aa, Zea mays
  Clone ID: MRT4577_131270C.1.pep
LRSYQCKMGTANLKNKTQMHIIKADYVTNKVGKDGYSCIIWVLLVQLLLRAERDQRTPVHYPQNPGTALEMFSKGQLSCLIK

SEQ ID NO: 218948 - protein, 67 aa, Zea mays
  Clone ID: MRT4577_131271C.1.pep
PGRTARKYRRTHPAGPNLLPRPPGDPDFPKRHQAMECIYTAGNGHNGYQSGAGAQSVGQRLRKAKDS

SEQ ID NO: 218949 - protein, 46 aa, Zea mays
  Clone ID: MRT4577_131272C.1.pep
ILKMEHLWFLPYKTGNIKGFKSIHYHKRFNVVKLKLLTTFWTPPVP

SEQ ID NO: 218950 - protein, 53 aa, Zea mays
  Clone ID: MRT4577_131273C.1.pep
SPNPPPLISIFSLNSTLRSPHHMHTLGLLGAPHIDYFQHLRLFSKLLIQKKRR

SEQ ID NO: 218951 - protein, 97 aa, Zea mays
  Clone ID: MRT4577_131274C.1.pep
RGAAAAAQSTRTPLSTSTCLLLPLLYLRSQRGVVHGDGFNKPRHHGGGKAPQSLHHRREEPAGGALASTRRQVLAQNTLQHMRLNIDSSVIEMLPPL

SEQ ID NO: 218952 - protein, 155 aa, Zea mays
  Clone ID: MRT4577_131275C.1.pep
VAVDTRDGIRLVFEVEPNQDFHGLVCEGANMLPSKFMEDAFRDRHGKIINIRHLDQVIKSVNGWYHERGLTGLVSYAEILSGGILRLEVSEAEVNNISIRFLDRKTGEPTLGKTQPETILRQLTTRKGQVRAHFQEYLSQSVYVLYTSGGLLMIC

SEQ ID NO: 218953 - protein, 75 aa, Zea mays
  unsure (1)..(75): unsure at all Xaa locations
  Clone ID: MRT4577_131276C.1.pep
QRIPGVISHDATSCPSPHDKVYCGSYASDTMGNACGYCNLYSQGYCVNNAVLITELFNEGLRCGACFXIRCEEHP

SEQ ID NO: 218954 - protein, 90 aa, Zea mays
  Clone ID: MRT4577_131277C.1.pep
YTRTTTRTPTRTVDSAGSAGKERQRERERHLIERLVGGASTKKLTGLSGQVVEVPNCWWPKSIGRRHIRLWRASWWGTRWPRTSLPSTCR

SEQ ID NO: 218955 - protein, 43 aa, Zea mays
  Clone ID: MRT4577_131278C.1.pep
RAHLYRAGGGGKTYRCFCDHVFDLPLCAFKAAAGQFCAFSLAG

SEQ ID NO: 218956 - protein, 523 aa, Zea mays
  Clone ID: MRT4577_131279C.1.pep
MKYNTRKDASGGGGGAPFAIPCVDIKSFVASLAFLTLFVVFWQLQPYGSVLTAARTSASPPCTLLPTTAAIDLASPDTTSSTAAKTDQPAAAAAVSATAAGANAAPVWLAKAARPARPEDPNKRVFRPYGSAAALFVQMGAYRGGPRTFAIVGLASKPTHVFGTPYFKCEWLPNPTAGDPSPRPVRTKAYKMLPDWGYGRVYTVVVVNCTFPSNPNARNAGGKLLVHAYYSTASRRHERFVALEEAPGSYDESRFSPPFQYDYLYCGSSLYGNLSASRVREWVAYHARFLGPRSHFVLHDAGGISPEVKAVLDPWVRAGRVTVQDIRAQAEYDGYYYNQFLVVNDCLHRYRHAANWTFFFDVDEYLYLPNGQKLAEVIGQLSGYSQFTIEQNPMSSKLCLQDPSRNYSREWGFEKLVFRNSITKVRRDRKYAIQARNVYSAGVHMSQNLYGRTTHKTEGLIRYYHYHDSINVMGEPCREFVPMPANGSKTMFEGVPYVYDDNMKRLAGEIKRFEKVTLGSART

SEQ ID NO: 218957 - protein, 94 aa, Zea mays
  Clone ID: MRT4577_131280C.1.pep
HTCFHQAHWSFPRALTLSHLPPSLACPSCRTASLCRHINDHSCPATLFSNTTDPSAAPSHACCDSLTLSNLKFLFGYNNSPCMGVYNIDPYRSM

SEQ ID NO: 218958 - protein, 91 aa, Zea mays
  unsure (1)..(91): unsure at all Xaa locations
  Clone ID: MRT4577_131281C.1.pep
FPQPTTXFISXHIPSTRGDLLKSPPATTAPRYFDSLFSTLLQPLPPHWALPYDPPLTNPKLLLPQYSLTQTISQINHRLPPPTSLIGALQL

SEQ ID NO: 218959 - protein, 328 aa, Zea mays
  Clone ID: MRT4577_131282C.1.pep
MGNTFGFRGGLRADVADLMQDAAEHLRNSGVFVKRAVASQYQSNRTGNDEIDESSAEELRDAASYVQHNAMLIQVPVVGTARTFWRLSDEATRMIRKLALILRNHHSVCKCLAAPLQASNVWVGSAGNAKLRGARFTDKGFSVERVREDYRNLSRVLQQLISISGGDTSKLPPDYIHFLSLLTEDNLTNKDEFLVVNHAALLPLKNRTEAFLMLYDRIVKYLGKRNRAKMNRILSCLPYQDDWLDTATANAKINQWIVNVQNTKEYRKTTLDLLRLNRNVRSHLHEYGHDDDVEEILYCEWPMLLVVMEKMLHREGELQDTDIENKFG

SEQ ID NO: 218960 - protein, 78 aa, Zea mays
  unsure (1)..(78): unsure at all Xaa locations
  Clone ID: MRT4577_131283C.1.pep
LAPGHPSGXALDMSSAGHMVLYSFSLKWRMIARSPQWMRLQVRLIRSSRRSTKNKAAAGGGGAFLRCMLSFFFSSCSK

SEQ ID NO: 218961 - protein, 133 aa, Zea mays
  Clone ID: MRT4577_131284C.1.pep
VGDRLERMPCAEDYLSVVLNQLCVLHEKTPVSDRVTRCCTESLVNRRPCFSALEVDVTYVPREFNAETFTFHADICTLSEKERQIKKQTALVELVKHKPKATKEQLIAVMDDSAASVEKCCKADDKETCFAEE

SEQ ID NO: 218962 - protein, 64 aa, Zea mays
  Clone ID: MRT4577_131285C.1.pep
KWLAPLTTPPPRRKGHPNPVFGRPPRPRPHVVDSLAPAVGDVLLPLLPLLDTRRTLTGVVGKSK

SEQ ID NO: 218963 - protein, 105 aa, Zea mays
  unsure (1)..(105): unsure at all Xaa locations
  Clone ID: MRT4577_131286C.1.pep
RXTRARRELHNPTGHNFQQSNFSLPPAPPAAGTLPYRGRTSPCPFHLILIPPPLRPPSRSTPSSPTTICSPFSATTTSAPFTMLCTTFPLNLFVLNLFAFFYTFS

SEQ ID NO: 218964 - protein, 42 aa, Zea mays
  Clone ID: MRT4577_131287C.1.pep
FVNTDRQQLRYIKKKGKIPTIPFLKSSTKSDNETYPGVVCPS

SEQ ID NO: 218965 - protein, 197 aa, Zea mays
  unsure (1)..(197): unsure at all Xaa locations
  Clone ID: MRT4577_131288C.1.pep
MVAARLRLELLLSVCLXSAWARPRSLAXIRLPSRGGAXADETDXETPGPRWAELIAGSSVYYNYRHHAXDSCHVIRKIMQRRGXICDENITLXMHYDIXAHSPENPKAGVIXVNHPHGGXVYAGVPNXYTXRDVYCYNCLXVLLANKTALMXGYGKAXDSVHDDHIFVYYSDHGGPGVLGMPTYPCLYGDDLADVLK

SEQ ID NO: 218966 - protein, 292 aa, Zea mays
  unsure (1)..(292): unsure at all Xaa locations
  Clone ID: MRT4577_131289C.1.pep
MASKAIKRRPISAETDKTGGKQMDTALSDPVTEPLLGNTPQEEKSKTYEPITRSGFWDGTAQECLRWTHLLAAFVAQSARNIVNVLSEFGYFLARLFGCSSASKSSQNGQTLPVNLSPLQEERLRLLRQRIDVPYDCSSVKHQXPLKELWRLAYPNRQLPPLKSDLWKEMGWQNSDPSTDFRAAGFMSLENLIYFARNYPDSFHRLLHKADGKMRTKAGVHFVQLLDDDGVAFDNLFCVAFQVLDSQWLARRASYMEFNEVLKSTRGQLEQELTIGGISRIQDMPSFRMLRR

SEQ ID NO: 218967 - protein, 53 aa, Zea mays
  Clone ID: MRT4577_13128C.1.pep
MAKDPIRVLVTGAAGQIAYSLVFPIAKGELFGKDQPLILHLLDIAQAQEALGG

SEQ ID NO: 218968 - protein, 321 aa, Zea mays
  Clone ID: MRT4577_131290C.1.pep
MASKAIKRRPISAETDTTGEKQMDTALSDPVTEPLLGNTPQEEKSKTYEPITRSGFWDGTAQECLRWTHLLAAFVAQSARNIVNVLSEFGYLLARLFGCSSASKSSQNGQTLPVNLSPLQEERLRLLRQRIDVPYDCSSVKHQDALKELWKLAYPNRQLPPLKSDLWKEMGWQNSDPSTDFRAAGFMSLENLIYFARNYPDSFHRLLHKADGKRAEWEYPFAVGGVNISYMLVQMLDLQSGKMRTKAGVHFVQLLDDDGVAFDNLFCVAFQVLDSQWLARRASYMEFNEVLKSTRGQLEQELTIGGISRIQDMPSFRMLRR

SEQ ID NO: 218969 - protein, 70 aa, Zea mays
  Clone ID: MRT4577_131291C.1.pep
GPKKKEPMGRQSQKKTPTAPSERSRAGVQVSLFPPPPPQGNQNFITPMHILLVRPHMIMCVALLQYYKDR

SEQ ID NO: 218970 - protein, 76 aa, Zea mays
  unsure (1)..(76): unsure at all Xaa locations
  Clone ID: MRT4577_131292C.1.pep
NLKAFLLVPSSLGFLSXLRSSTSGQAFPQCVFDRWHIMGSDPLEGGFQPAQLVLYIRNKKGLKVHMPPLSXFEDKL

SEQ ID NO: 218971 - protein, 44 aa, Zea mays
  Clone ID: MRT4577_131293C.1.pep
HILTEFINNNSLLHTTTCTLISLYTTLPPNLHDVLNTPQKTSFQ

SEQ ID NO: 218972 - protein, 73 aa, Zea mays
  unsure (1)..(73): unsure at all Xaa locations
  Clone ID: MRT4577_131294C.1.pep
RITVAAAFLALAVVAPAALAQAPGPAATPSGPPNVTAILEKGGXVGGGMRLMKETHXVTQLNSLLNSSYASSG

SEQ ID NO: 218973 - protein, 219 aa, Zea mays
  unsure (1)..(219): unsure at all Xaa locations
  Clone ID: MRT4577_131295C.1.pep
MEIGGQHPASSCSKEHQKIYRDWFALADSDGDGRITGPDAIKFFAMSSLPRADLKQVWAIADSKRLGYLGFGEFITAMQLVSLAQAGNEISQDSLQREDLISFNPPVMEGLDAQLAKSKHLAKRVDQDMDGFPQAQGPSTNHWFNSKSSKKIPLTAVTSVIDGLKRLYIEKLKPLEVTYKFHDFVSPLLTNSDFDAKPWXMLLGQYSTGKTTFIKHPAK

SEQ ID NO: 218974 - protein, 108 aa, Zea mays
  unsure (1)..(108): unsure at all Xaa locations
  Clone ID: MRT4577_131296C.1.pep
VQSCTPEVGSFVNDSEWHPACLEHYVRRDLSPTHPIKLVLALNFSVFYYQILNFRDLSCNPAKQVFDXQSLSYTACDXEFYKDMTLIMQFLHDNSTLLTSYTYYDGCN

SEQ ID NO: 218975 - protein, 96 aa, Zea mays
  unsure (1)..(96): unsure at all Xaa locations
  Clone ID: MRT4577_131297C.1.pep
MDGRMFGLEDSPAWGQLQHFLDVPDGDAGAAGDKAGGGGPTRTXYVRDARAMAAPPPDXKELPAAYAFVGNMPGLGTGHINVHVWDERVLLXSGKR

SEQ ID NO: 218976 - protein, 63 aa, Zea mays
  Clone ID: MRT4577_131298C.1.pep
KKKKKKKKKNKKKKKKKKKKEKKKKKKKKKKKKKKKKKKKKKKIKKKKRGPFCNLFLNCKRPF

SEQ ID NO: 218977 - protein, 544 aa, Zea mays
  unsure (1)..(544): unsure at all Xaa locations
  Clone ID: MRT4577_131299C.1.pep
MPDLSTSYLPPFPELSLDAGALAVDHAGNAAAAASADAASAYASSSASVGSGVDDLVIPAECRWKGHVRTFDMAGAGAVTTCPAARRGGGKKLSLIPSLEPARTQASASAPTLEERVSEWAAKKAAAGVPTHHCVLPFLTGAPMAVECRLCSKIIYVGEEIKCSVKKCPQMFHLKCVAEDTSNFTVESFRCPQHGCMVCKQKMFFWRCGRCTVAAHTKCAPWPVVHLKNDQGSAICWRHPSDWLLQNKNADFTNSVEEVFCRLPLPYVNEDLNIDSIIRDYAEAVYKPPPYTSIRRNVYLIKKKRTGVRVDIGCTNCRADSTCKEDCECRGLSMSCSKNCRCSDLCTNRPFRKDKKIKIVKTKRCGWGAVALEPLERGDFVIEYVGEVIDDATCEQRLWDIRRRGDKNFYMCEISKDFTIDATFKGNVSRFLNHSCEPNCKLEKWQVDGETRVGVFASRSIEVGEPLTYDYRFVHFGEKVKCHCEAVNCQGYLGSQXKEPNSKHSCHCSTASAVARVFAHAPRSSKIEANKSLVTLDQLYRGLF

SEQ ID NO: 218978 - protein, 51 aa, Zea mays
  Clone ID: MRT4577_13129C.1.pep
MATPSHRLPWLLLCLGVPELCSFSGISLYHELDIKYVDGLGKAHDNCRLLT

SEQ ID NO: 218979 - protein, 119 aa, Zea mays
  Clone ID: MRT4577_1312C.1.pep
MSATATKVKRRVGKYELGRTIGEGTFAKVRFAKNTETGEPVAVKILDKEKVLRHKMAEQVAFPALKYRAMFGLVYSHVFYIVHGPIWALAYLFRVLSVDLVELVISLTMTKTTTWFDAD

SEQ ID NO: 218980 - protein, 85 aa, Zea mays
  Clone ID: MRT4577_131300C.1.pep
TVKPQATIVALELRVLRKANLQPRSAAPAAKLKTPRAVRDREPVQRQGAAVQILPRATCLQHCLWTLMSQPVCFHHDICIIYIFS

SEQ ID NO: 218981 - protein, 167 aa, Zea mays
  unsure (1)..(167): unsure at all Xaa locations
  Clone ID: MRT4577_131302C.1.pep
LLXWPAGAVLVXXPVAAXALAVXXXXALAXCAXXXXGRVLSXRLVXVPLXPGXRPVVXGWLPCXAALALXGXXLLLLAXGAXXVAPAVXRLVLRARVXALGLLPVXAGLXVLPXXARNLXXPFVSFXLLXGXVRSSILSXLLRXXXXCLCLVXCXKXXXXASAGCVG

SEQ ID NO: 218982 - protein, 58 aa, Zea mays
  Clone ID: MRT4577_131303C.1.pep
TNRPTIGSALIFCIFLAVRMGGRRRKKFPLKYSRDINIPKKICKKEFMSPTRDVLVYP

SEQ ID NO: 218983 - protein, 76 aa, Zea mays
  Clone ID: MRT4577_131304C.1.pep
AQFKAIFSILDFTVFSIVNKISCAQLMLSRMSVFLNLGYSYEELLAGYHNAISLNMCMYFPRFAAFNFTKGGHAHF

SEQ ID NO: 218984 - protein, 130 aa, Zea mays
  Clone ID: MRT4577_131305C.1.pep
PLFFGGWVVFLFRWAGRFFFWKGGGGGTPINLGWVPFLGPPALLFLFSVRFFCGIVRGSNFFSGPGFGFGFARLLFDSLLGKVGWFPGPVRDFRVGPRVREKKKKKKKKKKKKKKKKKKKKKKKKKKKKK

SEQ ID NO: 218985 - protein, 44 aa, Zea mays
  unsure (1)..(44): unsure at all Xaa locations
  Clone ID: MRT4577_131306C.1.pep
FPLVQRVYFRSSRFCCSPPVFFIKSPSVPVVXPVLTLGSRKPMY

SEQ ID NO: 218986 - protein, 76 aa, Zea mays
  Clone ID: MRT4577_131307C.1.pep
VSGISARDFCSISIRGGLRCRSRPWRSPEGLPLVVRGAIALTVRLQPLSMTAWGFLSAGGRRERCGQWPLSHGEGV

SEQ ID NO: 218987 - protein, 90 aa, Zea mays
  Clone ID: MRT4577_131308C.1.pep
TRALEVYSSMRNMRNTFPYPTYAPAWRPGSWGSPGPGSHGRLSAGPPGNSAERFLNCAPRQDRTRRPISWGTGQVQAERRIAIHTERGWL

SEQ ID NO: 218988 - protein, 138 aa, Zea mays
  unsure (1)..(138): unsure at all Xaa locations
  Clone ID: MRT4577_131309C.1.pep
QVDMRPQLAAGSNKKVPVSVRQAQFHRIAEHYLQKANLDVIRRCADTELAIADAVNVEKGIYERSNSXSIYVNLCSQATRQHAKAKSDNDTSTLTKRTESGSDQISQEATSEGTNVSGSDMEEDLRAAISNQKNELED

SEQ ID NO: 218989 - protein, 157 aa, Zea mays
  Clone ID: MRT4577_13130C.1.pep
ALALPPVCRTTSSDAITFHPFTRAAHILQAARRQAHPGTPTPRRRRRHQQRQAIGRAACRGADNRDPLSRTAVATNSDSREGEPPAAGTRHDPATGRRAKHTAVTTNSDSREGEPPAARGTIRQPADGRSTPPSPPTAIAEKASRLPRGEATDERGR

SEQ ID NO: 218990 - protein, 74 aa, Zea mays
  Clone ID: MRT4577_131310C.1.pep
AFRGAKLGPPKSFGGKKPPGPPLNGLAGLRSFSWALNLPPRGGIFKRGLKNPFFVLNKRPVLGPPPDKRGSPKG

SEQ ID NO: 218991 - protein, 122 aa, Zea mays
  Clone ID: MRT4577_131311C.1.pep
MSVVGIDLGFQSCYVAVARAGGIETIANEYSDRCTPACVSFGPKNRSIGAAAKSQVISNAKNTVQGFKRFHGRAFSDPFVEAEKSNLAYDIVQLPTGLTGIKVTYMEEERNFTTEQVTAMLL

SEQ ID NO: 218992 - protein, 84 aa, Zea mays
  Clone ID: MRT4577_131312C.1.pep
TARPFFFFFYKKIAGSCNPTNAQTWRVFKFPFFREQTINPMLNVKKKAFPKASHGTFPPHYAINGPNHPPKYLCSVSKFSLCPQ

SEQ ID NO: 218993 - protein, 141 aa, Zea mays
  unsure (1)..(141): unsure at all Xaa locations
  Clone ID: MRT4577_131313C.1.pep
MSTPARKRLMRDFRRLQQDPPAGISGAPHDNNIMLWNAVIFGPDDTPWDGGTFKLTLQFTEDYPNKPPTVRFVSRMFHPNXNQWSPIYDVAAILTSIQSLLCDPNPNSPXANSEAARLFSENKREYNRKVREIVEQSWTAD

SEQ ID NO: 218994 - protein, 164 aa, Zea mays
  unsure (1)..(164): unsure at all Xaa locations
  Clone ID: MRT4577_131314C.1.pep
GVWRLHWPPIWAVFSANAPVGAGDDDDGRSRGFCIIQLPETQQDYVKLGLXEIQDLIMRRRNTIFLRIEESAKXECTKXLNEFISEFQHDDGDNELSDFTSFIXILACLCATNLKVXYKTXFTVITVIMAFGGSFSTIFXLNIGVSSTSYKDFISRLNLAVYMT

SEQ ID NO: 218995 - protein, 67 aa, Zea mays
  Clone ID: MRT4577_131315C.1.pep
FSSAASPCHRRLTCGGGPKAMASSSVSSYMELNRPNLEDFLPSDLFPQEAPRNLHLRDLFDIFPVLT

SEQ ID NO: 218996 - protein, 93 aa, Zea mays
  unsure (1)..(93): unsure at all Xaa locations
  Clone ID: MRT4577_131316C.1.pep
MSTPARKRLMRDFRRLQQDPPAGISGAPHDNNIMLWNAVIFGPDDTPWDGXSLLCDPNPNSPANSEAARLFSENKREYNRKVREIVEQSWTAD

SEQ ID NO: 218997 - protein, 180 aa, Zea mays
  Clone ID: MRT4577_131317C.1.pep
ISPHPSPLPSFPFCVAFAPPRFSDSRRNPAGSRSQRGVHSDRSAGDRNPQLGFEAPHDNNIMLWNAVIFGPDDTPWDGGTFKLTLQFTEDYPNKPPTVRFVSRMFHPNIYADGSICLDILQNQWSPIYDVAAILTSIQSLLCDPNPNSPANSEAARLFSENKREYNRKVREIVEQSWTAD

SEQ ID NO: 218998 - protein, 152 aa, Zea mays
  Clone ID: MRT4577_131318C.1.pep
MSTPARKRLMRDFRRLQQDPPAGISGAPHDNNIMLWNAVIFGPDDTPWDGGTFKLTLQFTEDYPNKPPTVRFVSRMFHPNIYADGSICLDILQNQWSPIYDVAAILTSIQSLLCDPNPNSPANSEAARLFSENKREYNRKVREIVEQSWTAD

SEQ ID NO: 218999 - protein, 152 aa, Zea mays; identical to SEQ ID NO: 218998
  Clone ID: MRT4577_131319C.1.pep

SEQ ID NO: 219000 - protein, 65 aa, Zea mays
  Clone ID: MRT4577_13131C.1.pep
STRLTRWCTRRQDNVFSAMQVLWPQPKRAEGPGELGSPTECCSCSSSYTYVPLVAADHSSFSFRV

SEQ ID NO: 219001 - protein, 152 aa, Zea mays; identical to SEQ ID NO: 218998
  Clone ID: MRT4577_131320C.1.pep

SEQ ID NO: 219002 - protein, 57 aa, Zea mays
  unsure (1)..(57): unsure at all Xaa locations
  Clone ID: MRT4577_131321C.1.pep
MACTRDQHISDGRIPYNLRTTGRVPLSHCGCVRIEQRKQMERXXPARGTHRXXXXXX

SEQ ID NO: 219003 - protein, 91 aa, Zea mays
  Clone ID: MRT4577_131322C.1.pep
SIECMIKLGQRDPGPTMQAINQPKLLPRECKTLTNAFFPGTERQAHGGVIRKYSVCNAARATPLVGCFPPNSSAGRGVFHRHHKQRVRCWG

SEQ ID NO: 219004 - protein, 152 aa, Zea mays
  Clone ID: MRT4577_131323C.1.pep
MSTPARKRLMRDFRRLQQDPPAGISGAPHDNNIMLWNAVIFGPDDTPWDGGTFKLTLQFTEDYPNKPPTVRFVSRMFHPNIYADGSICLDILQNQWSPIYDVAAILTSIQSLLCDPNPNSPANSEAARLFSENKREYNRKVRGIVEQSWTAD

SEQ ID NO: 219005 - protein, 152 aa, Zea mays; identical to SEQ ID NO: 218998
  Clone ID: MRT4577_131324C.1.pep

SEQ ID NO: 219006 - protein, 152 aa, Zea mays; identical to SEQ ID NO: 218998
  Clone ID: MRT4577_131325C.1.pep

SEQ ID NO: 219007 - protein, 456 aa, Zea mays
  Clone ID: MRT4577_131326C.1.pep
MEVFYYLVFGGLAAVVAALELGKSGKDRVATPTAFNSFKNGYVLVYSLMMSGDWLQGPYVYYLYSQYGFDKGDIGRLFIAGFGSSMLFGTIVGSLADKQGRKRACVTYCITYILSCITKHSPQYKVLMIGRVLGGIATSLLFSAFESWLVAEHNKKGFDPQWLSITFSKAIFLGNGLVAIVAGLFANFLADNMGFGPVAPFDAAACFLAIGMAIILSSWGENYGDSSDSKDLITQFKGAAKAIASDEKIALLGAIQSLFEGSMYTFVFLWTPALSPKDEEIPHGFIFATFMLSSMLGSSIASRLLARKLKVEGYMQIVFSVSAFTLFLPVVTNFLVPPSGEKGGSISLGGCLQLLGFCTFESCVGIFWPSIMKMRSQYIPEEARSTIMNFFRIPLNLFVCVVLYNVNAFPITVMFGMCSIFLLMAAVLQRRLMAVSDLHRSTKAVMMTAEDEPLNP

SEQ ID NO: 219008 - protein, 96 aa, Zea mays
  Clone ID: MRT4577_131327C.1.pep
VSGFFFFFFFFFFFFFFLGKKTFSLAKGENPPVFPPGVFAPYHISGLIRKGLIPFKDNYPKNFPNFPLYKNWPPSTVFWVRPPRWFYVPNSFGLVG

SEQ ID NO: 219009 - protein, 155 aa, Zea mays
  Clone ID: MRT4577_131329C.1.pep
MSNDNDYMAFLNKANQDTGADAATQEKATFKTKDQGAQVPKPISDVCKNAVYTSDADEPFQEVSLKWEGKNGLPSESEFAKLINHSSPDSADIKILDPLNWDSHGRYTDVIEAVREASQGNDVRDISSDERCYEDRVLGGFARRRQADWCQGTLC

SEQ ID NO: 219010 - protein, 113 aa, Zea mays
  unsure (1)..(113): unsure at all Xaa locations
  Clone ID: MRT4577_13132C.1.pep
QQQQXFQESPLDEGKAPTNQQQQKQQQKGPAQTQQAEANPAADKQQQLPNNQQTVSNSAADQQQRQQRLXPLAVPNPKGTAIPQQQQKQPHSQFSLMNPALPGQQPTVGGAIL

SEQ ID NO: 219011 - protein, 102 aa, Zea mays
  unsure (1)..(102): unsure at all Xaa locations
  Clone ID: MRT4577_131330C.1.pep
MPFPVTTQGSQQTQPPQRHYGITSPISLAAPKETDCLLTQKLIETLKPFXVFEEEEELXRRILILGKLGNLRKEWIREISASTNLPQSVLEAVGGKSRTFGS

SEQ ID NO: 219012 - protein, 97 aa, Zea mays
  unsure (1)..(97): unsure at all Xaa locations
  Clone ID: MRT4577_131331C.1.pep
MFERIKMEQSDGEHRCFVSALACDTDDXHSLHNAFSTYGEVLEYKIILHRXRHRCRGFGFITVSTEEAMRNAIEGMNGKELDGRNIXVNEAHSRERP

SEQ ID NO: 219013 - protein, 102 aa, Zea mays
  Clone ID: MRT4577_131332C.1.pep
LFSITLLGLIYPATNQGLDRALLGYRLAQLDLHIVKSWQTIEPPLLGDVGVSVIILETARARSPASHARLLPSRSLFPGAGDRLSGTQHSLPGIIIFSTCVS

SEQ ID NO: 219014 - protein, 34 aa, Zea mays
  Clone ID: MRT4577_131333C.1.pep
FGSASGLRGGDVRMGASQGKPPHGSYGHSFLKRS

SEQ ID NO: 219015 - protein, 68 aa, Zea mays
  Clone ID: MRT4577_131334C.1.pep
SLAAYGEFRNCDLVVEDKDFGILLSPAHVPVHSCWRFRRSRRCRNMASWSYGQKDIRECVSTVTVIEH

SEQ ID NO: 219016 - protein, 169 aa, Zea mays
  Clone ID: MRT4577_131335C.1.pep
IGYLEAGRDFSCFLSIPPPPGLLLASNTSRPPSHSSLTPHSLLLHPPSPYAPPAWHGALAAGARHLPGSPALAILSFLVVPSPARSALAVAPPLALVPALLPQPRRLLLPGTRHTPWFQSSSPSRPLPWSFQWMIERSQVFGWRRSEASATLTMCSTKGGVRGIDLWVF

SEQ ID NO: 219017 - protein, 84 aa, Zea mays
  unsure (1)..(84): unsure at all Xaa locations
  Clone ID: MRT4577_131336C.1.pep
CPPPTLPRXCPPLTSLFSPPSSSTSAPSLPLSSMARKLPPGINLTAHAPLAPYPLPPLACHTPXPPSPSCVTRPDLLFLRPHAT

SEQ ID NO: 219018 - protein, 75 aa, Zea mays
  Clone ID: MRT4577_131337C.1.pep
MGKADVVQSGAGGGEFAAKYYTDPPPAPLVDAAELGSWSLYRAVIAEFIATLLFLGVGGASVIGFTPLRSRLFLG

SEQ ID NO: 219019 - protein, 67 aa, Zea mays
  Clone ID: MRT4577_131338C.1.pep
HNNHITGEETLQHHLIYPQLSQLKYKQGDSSLHAEGQHTGTSKDPEINTSHTSTTKLTRIKAKTATI

SEQ ID NO: 219020 - protein, 91 aa, Zea mays
  Clone ID: MRT4577_131339C.1.pep
ASVFRANNVRNRVNQSQKSIADGVLILPLTYIIIMIVSAMIEWSICCLFRSVLVVLAGLYVCINELVYKLFFSRYSRSFDKRVIPQKIYTV

SEQ ID NO: 219021 - protein, 131 aa, Zea mays
  unsure (1)..(131): unsure at all Xaa locations
  Clone ID: MRT4577_13133C.1.pep
SRRRCTLLLFIPSQPPPAPHRTCLRRRHKAPPPFSKPAXCGTGKLKKMKWCTAXLKEMVNYLVLXNQATYDXLLSDVALYKHITPSILSXXLRITGSLSRXRLSMYLMAXGLIRLISDHSFQPSYTNATNI

SEQ ID NO: 219022 - protein, 198 aa, Zea mays
  Clone ID: MRT4577_131340C.1.pep
MEKLVYFATIISLSMAALLVPLRVQCEEAARAAAARSCHAGTGASASAPAAAAAWKRSCGGGKAGKQQPQVEGMFVFGSSLVDNGNNNFLNGSGVRADYLPYGVDFPLGPSGRFSNGRNVIDALGELLGLPGRVPPFADPRTRRARAALRGVNFASGGSGILEHTGQVTGKVVSLRQQITNFESVTLPDLRAQLRGPA

SEQ ID NO: 219023 - protein, 73 aa, Zea mays
  Clone ID: MRT4577_131341C.1.pep
KGSGVVFMEYDQSFVVFFQRHQVPKANFMMLVKDKSQIKRPTTGRRCDEWAQQSKIRYSSRLRRVVRHCRSRV

SEQ ID NO: 219024 - protein, 77 aa, Zea mays
  Clone ID: MRT4577_131342C.1.pep
NFEQGERSLLARNTNRCPQTRNRVKPSITIKICSRILAQGGLPKSPQTELRVDGVEKRGVCIDALAHHKQNQSGAQR

SEQ ID NO: 219025 - protein, 102 aa, Zea mays
  Clone ID: MRT4577_131343C.1.pep
HVSPNSIFIQQQARKAGHFLLSRWGRHKTMQQQMHMQTTPSVVEQIVPQAARITYRSHPEVFNTKITNLFRPSWKIHTYGSWLNVLSIKSNCKRTILTWLPI

SEQ ID NO: 219026 - protein, 64 aa, Zea mays
  Clone ID: MRT4577_131344C.1.pep
KRKNFLIPRCQDARGHLGPRWAGQTHGEFSLGQVKTDGLCFRFGKASLNLWLLSPPRRPFKSTG

SEQ ID NO: 219027 - protein, 84 aa, Zea mays
  unsure (1)..(84): unsure at all Xaa locations
  Clone ID: MRT4577_131345C.1.pep
VRKLGIRLEPFQPPRDLPQILSMLSQRKRRETLDTLSCCYTIPPPQQPTRRRRRCKFVFGTCMPASSSTYFSNILSXFSVEEDP

SEQ ID NO: 219028 - protein, 35 aa, Zea mays
  Clone ID: MRT4577_131346C.1.pep
NRPAIEIQPSTIGPVDTRNWTSRLVEKPVARSNRR

SEQ ID NO: 219029 - protein, 76 aa, Zea mays
  Clone ID: MRT4577_131347C.1.pep
KKKGESLASPEEKKEPGFWGFFPKAALMCPQFSSPWGVLFSRNVSLVSFGGPSPLMGGGPFDICYGCLRWGPGFVP

SEQ ID NO: 219030 - protein, 124 aa, Zea mays
  unsure (1)..(124): unsure at all Xaa locations
  Clone ID: MRT4577_131348C.1.pep
CCAFRCSCRSLRVCPLAPRVLGAWSAVAFAFFPPXLRSGLWXGXFCGXFRRLLSPRGWVSARPSCXGVGLLLVVLSRWCXLSRLPAAAFRWSPSPGXVVRARFRVGRPGPLCPAPWLCGRGGNR

SEQ ID NO: 219031 - protein, 169 aa, Zea mays
  Clone ID: MRT4577_131349C.1.pep
IQLGKYKHNVKLHFSPYVEHLMNDTSGFRFHSTKPPKISLLTSGVRRCRIWGCTQHKTPHGRFVEHKRDSSATRAGERHSHGWGRRHGGAQPGAPGKGAGRAGAWTRAKHRRAAAGRDPSWDRRYSREEHRSDLGQSRPRLGERQRAARGGPTAMEEKERREGAVREAS

SEQ ID NO: 219032 - protein, 70 aa, Zea mays
  unsure (1)..(70): unsure at all Xaa locations
  Clone ID: MRT4577_13134C.1.pep
TSSLGALYLNWVTFGSLSXXCXMLVFXAXIXSGHSLSFSAGRCGRGDRTCAALKSLASRPFCGAPLVLGL

SEQ ID NO: 219033 - protein, 65 aa, Zea mays
  unsure (1)..(65): unsure at all Xaa locations
  Clone ID: MRT4577_131350C.1.pep
ADGDDSTTAEERRAARDADHDGGSSQDDSRRRNGGDDADGDGYXGYQDNARKKTASAATADARAF

SEQ ID NO: 219034 - protein, 97 aa, Zea mays
  Clone ID: MRT4577_131351C.1.pep
AVEEEESPTVVMFAGEELRMEKARILSMFWSVTGDAPSDGNRQRGRVPLFFLLGVELLVSAVACSCSGSCGCVWCARALAGRCSRSSWMREGRYPCR

SEQ ID NO: 219035 - protein, 164 aa, Zea mays
  Clone ID: MRT4577_131352C.1.pep
ENTATSAPPAQSSSGSSTSAQPSSAASARSTNGPSLISRPAGLGSSSSLSQPPARSVQQVRASRPAAVDKGTQEATESAEDDRDENDDIHEKLQMIRVKFLRLAGRLGQTSHNMVVSQVLYRLGLAEQLRRTANGTFSIDRAREMAERLEAAGNEPLDFSCTIL

SEQ ID NO: 219036 - protein, 158 aa, Zea mays
  Clone ID: MRT4577_131353C.1.pep
PATCAARTATGATRVKVPPQGDHGGQRPYPRPHPRSSRQPCVATWRGLRWGPWCHRGAVELPTVRAYQPDFPWQLSSVPMRVGVQARHPHWFNPDGACIDGWNLGSRDHSTTRHVPLRCAIPSLPTSRIDLLKLRKERNVGGLRIKSDTKPPAASEGT

SEQ ID NO: 219037 - protein, 75 aa, Zea mays
  Clone ID: MRT4577_131354C.1.pep
MAGGGMLGGAFWATRALEVVKRNDSPGLLWKRIKLTTTRKNNAKKRLKRLWQNEAVIRACGASASDAASTADKQQ

SEQ ID NO: 219038 - protein, 101 aa, Zea mays
  unsure (1)..(101): unsure at all Xaa locations
  Clone ID: MRT4577_131355C.1.pep
MGRKFFVGXGAVLCGGTTDHVEKIVKTLNERHVSPSDVVEVVVSHAYVFLAVVKNHLHQYFHVAAHNCWVKNGGAFTGQVIADMLVXFGVPCVIIVHYEMR

SEQ ID NO: 219039 - protein, 97 aa, Zea mays
  Clone ID: MRT4577_131356C.1.pep
GRDLHPSPVFVTAAAVSTSDPAGHGLRATNTKKEQSRASPWGSPPAPLPSRFANAPHSLAVAQRAWLSCRRSSSASPSTWSTTNENLIFNNHPDFMV

SEQ ID NO: 219040 - protein, 61 aa, Zea mays
  Clone ID: MRT4577_131357C.1.pep
PVQFYPAMCRRLRVTSVANCIKRAFLPHVAASPVLLCTRSTRAIKVMTVIVVSIGTALWSA

SEQ ID NO: 219041 - protein, 87 aa, Zea mays
  Clone ID: MRT4577_131358C.1.pep
QSIIDSEQMRQNISTNANAIGNFLEVMFSEAEQVLNDVLKSTSDLKELLAFSAELQNTGLRRNLASVQAMSKQSNDFFEDIRIHVSQ

SEQ ID NO: 219042 - protein, 309 aa, Zea mays
  Clone ID: MRT4577_131359C.1.pep
MDPGTHMMVRTLQTTCINTSYAPQPRQIPVYPVVVKEVPADLPPIRVENVVNLEDSSEEQLPAPTPLAESLAFAAGSSTSALAFQAPAPGGDDPDDSGDDDDEDDDDEEGGDEHVHEEADYAQQDNFMGFGPVVEHYTSMFETGHFPNLLQEVLHALGTYVRPLYETRRMNEPPRACYYITRIHVRVMDAGDRGFRTLSAHESLKPLSTYAASCLRGGSQTSIVPGEAGEDRLNTLAGVVAGLNTDLDSATLDLYRVHLELENAHARIAALEAQLQGLDPPEAQVPTMALSPPRKRLRYGEPGSITRLL

SEQ ID NO: 219043 - protein, 69 aa, Zea mays
  unsure (1)..(69): unsure at all Xaa locations
  Clone ID: MRT4577_13135C.1.pep
RRPEPARGDXGPGTXFQTRRPRLRGRTRGRTRGSIITTDRYLCVYRLPAPKTLVIYIYIYIYRHMLIVT

SEQ ID NO: 219044 - protein, 312 aa, Zea mays
  Clone ID: MRT4577_131360C.1.pep
MVVEEAPADLPPVQVENVINLEDSSEEQLPTPTPLAESLAFAAASSTSASPAPAFQAPAPGGNDPDDSGDGDDEDDDDDDDDGEDGHVHEEADYAQQDHFMGIGPVVEHYTSMFETGHFPNLLQAVLHELGAYARPLYETRRVSEPPRACYYITRIHVRVMDAGDRGFRTLSAHESLIPLSTYAASVSDAARRTLWSLSHTYRQQLQNTRFRHLPQRLRGESQTNIVPGEPGEDRLNTLAGVVAGLNTDLDSATLDLYSVHLELENAHARIAALEAQLQGLDPPEAQVPTVALSPPRKRLRYGEPGSVTRLL

SEQ ID NO: 219045 - protein, 61 aa, Zea mays
  Clone ID: MRT4577_131361C.1.pep
RDSYWKTSEQAGVLFPYGQASKQIGKDWTLTPIYTVHIKRINSSEDAIYNRPYLFMCYEIL

SEQ ID NO: 219046 - protein, 122 aa, Zea mays
  unsure (1)..(122): unsure at all Xaa locations
  Clone ID: MRT4577_131362C.1.pep
FFLKETIPIPVYLSLLPRIGGYALAGWTXLNFNMGGFMGAMISNLAFGFRNIFLKRGMEGKAVIGMNYYACLAIMSLGILAPLGIAMEGPQMWAAGLQKALAEXGPNCVWGVAAQSVVYHLY

SEQ ID NO: 219047 - protein, 226 aa, Zea mays
  unsure (1)..(226): unsure at all Xaa locations
  Clone ID: MRT4577_131363C.1.pep
NSPQEDGFFYSHHGACHADSSQGTECKAQSSVTARKVHKADRERMRRDKLNEQFLELGTTLDPDRPRHDKATILGDTVQMLKDXTSQVNKLKAEYSSLFEEECELTKEKNELRSEKASLKSDVDNLNNHYQQRIQMLYLCTTMEPSVLVGPPPSYPFSLQVPIPAGAVTMHPQLQPCPFFQNQTSGAISNPCTPYMAYSQSCQAPSDQPSSQFSTPVLLSVVIDLT

SEQ ID NO: 219048 - protein, 299 aa, Zea mays
  Clone ID: MRT4577_131364C.1.pep
MRRGLGSEASLRRRRGPARLWVAVAALVVGTVCLFSSSSVGLLGASYRVQDVDVNKLWRTADSNGWRASSAPRTYWPPPPTESESNGYLRVRCNGGLNQQRSAICNAVVAARIMNATLVLPELDTNSFWHDESGFVGIYDVPHFIKTLKYDVRIVMSIPEITTNGKTKKLKGQQLRPPRDAPVSWYATDALETMKKYGAIYLSPFSHRLAEDIDNPELQRLRCRVNYHALRFKPNIMKTSSEIVNKLRSEGHFMSIHLRFELDMLAFAGCFDIFKPQEQKILWKYREEHFAEKELIPMK

SEQ ID NO: 219049 - protein, 180 aa, Zea mays
  unsure (1)..(180): unsure at all Xaa locations
  Clone ID: MRT4577_131365C.1.pep
ACPPPLPLTAAHPHPPISPPPPPPPPRPCASTSRIRSIYGRPPRAMDRRSLPPPQLKGHRSLRXDPPPPPRPPSMEGPRSPLPLLLSPLPRSRSAIFGGPPPPPXSPSMEGPRSPLPITALESVGGPPFLEGPPPPPRPAAKMAQEXPPPPRPAANXGTPHITESTPMRSPAPDPEASYG

SEQ ID NO: 219050 - protein, 248 aa, Zea mays
  unsure (1)..(248): unsure at all Xaa locations
  Clone ID: MRT4577_131366C.1.pep
MTKQQSCRLPHAPSYKPPHLPMYDGHLDPEQFLMSYEATISSYGGNTAVMAKSFVMAVKSVIQTWYSSLRPGTITSWQKFKDMLITSFQCFQTKPVTAQXLFQCTQDHAEYLQAREEAYRFSEMARGFRGRLHPRHVRSIHNANPSDDRGNQPQRQQHSSQSSGPQQSSFRPPAPRGRGGRSFAXRYKDQPRRLYCLFCGEDKGHTTRTCQVTIQKQKEIAEAEARQNXPKQVIHTASFYSPYIPEYV

SEQ ID NO: 219051 - protein, 115 aa, Zea mays
  unsure (1)..(115): unsure at all Xaa locations
  Clone ID: MRT4577_131367C.1.pep
KKKKXGKKXKXGXXKKKTPPKKKEEXXGXANPPGAPEGAARGAEAEAGKQRGERQERAXEGAGGEEAGQRGERRRGDXGQGHXAGAPGTNRGKASXRRRGEXDAERGGATPGRTG

SEQ ID NO: 219052 - protein, 82 aa, Zea mays
  Clone ID: MRT4577_131368C.1.pep
SPQIFRPNQLNSAQIGLWGTRSSVSNKTSINYRFCCYQTTSPIFDAIRHSYYFTNLRMTFIFRFIQYKCNSKIMRNIIYHLI

SEQ ID NO: 219053 - protein, 85 aa, Zea mays
  Clone ID: MRT4577_131369C.1.pep
GKTCHCITRRPGHLLCHIIVPELDHPEEDLGAALGHLATVCLKISGVPWDLHPTMFLPLGNYPNPALTPDRFAHSNYKITQMQHG

SEQ ID NO: 219054 - protein, 67 aa, Zea mays
  unsure (1)..(67): unsure at all Xaa locations
  Clone ID: MRT4577_13136C.1.pep
RSSHRKPWRKSSLGTQESCPSRDGSKMTIAPRRRGKRSRVWSASTPAGKRWMQHPLLCNEXPXRPRG

SEQ ID NO: 219055 - protein, 159 aa, Zea mays
  Clone ID: MRT4577_131370C.1.pep
KIVSCRLSGSIASGASLVETSEPESSDLGEEMHGLHLRLGPFHERRGPFCIGFSCDSEARDRQRRRRSVVPYRLSRLQTMAKLVAFSPDSAGTSCPQASDLLRISASRSASLRIVTKPDSIYCTPSLDVTVAALPSSYTVPPTYGRAVSASRPASRYPM

SEQ ID NO: 219056 - protein, 63 aa, Zea mays
  Clone ID: MRT4577_131371C.1.pep
LLLQIVYYTIFVLLWLSCVVIFLYFQAMHVFPRIVKFKEAMEVDYALCYDVVHDIEFRSCFRA

SEQ ID NO: 219057 - protein, 84 aa, Zea mays
  unsure (1)..(84): unsure at all Xaa locations
  Clone ID: MRT4577_131372C.1.pep
MQVSLPTKHPQNLIISSEKAKSIVQYITKVRLENSLVQAFVLLLQKXRDDVLHDMMACEAAASSPQPLSWPGVGVLGRGTILLG

SEQ ID NO: 219058 - protein, 273 aa, Zea mays
  Clone ID: MRT4577_131373C.1.pep
MERAAPVRSSHTSTAGLLAWPQPDGAASQAPRRPNQPTEEFRKVVFGGQVTEEADGLNKTKMRTTASAPKSKETTGIGMFKAESAAAAVTTASRDRQASQITFSQDGTIPPRKPTSVAGVARQRELSHTVESSGDGKMKRQVSNAKSKELSGHNIFADHEDPSPNRSSSSAAALAHVKNANVSSFSFGKADMDSTVKTAKKKGSSNKSTDLMNGKAISERDSAPAGKQPLNRAKPKGLSGSSIFADGKASTTGDHAGRRTRQPPGGDSSILLG

SEQ ID NO: 219059 - protein, 57 aa, Zea mays
  Clone ID: MRT4577_131374C.1.pep
TLASWSALASINFPSTRMTSACCTKVLSDFYSMHTSFNLQEAIFNFQEAIETQKPRN

SEQ ID NO: 219060 - protein, 44 aa, Zea mays
  Clone ID: MRT4577_131375C.1.pep
KHVIIFYLVHCTFDGFLHTIEECFFLVQGHCLTTSTSCWLRIID

SEQ ID NO: 219061 - protein, 189 aa, Zea mays
  unsure (1)..(189): unsure at all Xaa locations
  Clone ID: MRT4577_131376C.1.pep
ITACPPPLPLTAAHPLRPISSPPPPPPRPCASTSRIRSIYGRPPRAMDRRSLPPPQXRFTALYVDPPPPPRPPSMEGPRSPLPLLLSPLPRSRSAIFGGPPPPPXSPSMEGPRSPLPITALESVGGPPFLEGPPPPPRPAAKMAWEXPPPPPRPAAKMVWEIRXSPPPILTPAPDMEGPPKGLGRRGHG

SEQ ID NO: 219062 - protein, 200 aa, Zea mays
  unsure (1)..(200): unsure at all Xaa locations
  Clone ID: MRT4577_131377C.1.pep
MLTHHPEMNTDGFFSVSSPWRCSVASRSKVFGRLVIHPRTTTECRVEITRKXFGRDMMDLAEDVSRYDXSPXAPPXPILXVSEAFKADXRELKINLGVGVYNTXXLQTYPFNGVXKKAEXCMMEKGEXNNSIFPYEXLAALXKATAELLLAADKPVINXGLVATLQSLSITGALRLAAEFIQRYFPESIVVISAPTWGNH

SEQ ID NO: 219063 - protein, 65 aa, Zea mays
  Clone ID: MRT4577_131378C.1.pep
ILVLMDLDMPLLIKEMKKQHEFKRNVCFSFRGPYLIHIYEMQYRIYREIKHDMNKGNCNWFGVDG

SEQ ID NO: 219064 - protein, 67 aa, Zea mays
  unsure (1)..(67): unsure at all Xaa locations
  Clone ID: MRT4577_131379C.1.pep
DQFSYSISIYLESAIRNCDGFXVTGKVVEKILDWERSAQKQVKILLKPAHVILQRLFNFFLFHFVTL

SEQ ID NO: 219065 - protein, 86 aa, Zea mays
  Clone ID: MRT4577_13137C.1.pep
ARPLMTYCSSLRRDLDLRSAIHLPLKRLLVEWLEKVYEIRTMFGNEGMSALHASVVPAPLMYVATSVSPSVIHNVDHDMVWSFTWS

SEQ ID NO: 219066 - protein, 101 aa, Zea mays
  Clone ID: MRT4577_131380C.1.pep
KRTHQYYHWFLWGDYMSRRWRSCRGCCGPRNAPPGVRVPEPNCMHHSIARRGSIHYCQTYFLSSWTLKAQAKTCGPREYRCDCGTLFTMCLITCLLLKEWS

SEQ ID NO: 219067 - protein, 34 aa, Zea mays
  Clone ID: MRT4577_131381C.1.pep
SNTEKKKKKKKKKKKKKKKKKKKKKKKKKKKWQL

SEQ ID NO: 219068 - protein, 84 aa, Zea mays
  unsure (1)..(84): unsure at all Xaa locations
  Clone ID: MRT4577_131382C.1.pep
MQVSLPTKHPQNLIISSEKAKSIVQYITKVRLENSLVQAFVFLLQKXRDDVLHDMMACEAATSSPQPLSWPGVGVLGRSTILLG

SEQ ID NO: 219069 - protein, 52 aa, Zea mays
  Clone ID: MRT4577_131383C.1.pep
GKYGSLAMFSMLGFLVQAIVTGKGPLENLDDHIADPVNNNAWAYATNFVTGK

SEQ ID NO: 219070 - protein, 140 aa, Zea mays
  unsure (1)..(140): unsure at all Xaa locations
  Clone ID: MRT4577_131384C.1.pep
MSISMRLAIPAPAAAPPRLRVRAAXRRRQGTGAVSPXRAAVRTETAALRGCASLPLKPLGAGQPCRHRGAAAVCHSSAYLSAQTMQWISAGASAVLLLAKGTAIHKSFLVPFFALQAPCSIISWIKGDYGQWTAFLALLV

SEQ ID NO: 219071 - protein, 70 aa, Zea mays
  Clone ID: MRT4577_131385C.1.pep
RNKPLFRHRMLMSFSWMHICYTGSAATIRCISGCLYNNLDKRAFVQFKSMEQRLEHFGPCCIQYIRKNYI

SEQ ID NO: 219072 - protein, 211 aa, Zea mays
  unsure (1)..(211): unsure at all Xaa locations
  Clone ID: MRT4577_131386C.1.pep
MHAFIPIVALLGLAAAQSDSASSTSSAPAPGSTAAXSPTAPSATSTARPSASTSQPRTRPRSTRPTSARGMSAPRATLAPRTPRSTASALRLAPRTSTTXSGTTPTGVATAGASATDSSTPADTTAGSTTGTGSAAESTESSSQSGSSRASSAASAASSAGASAASSASSSANAQATGAAAALSLSTEMLTLSGGCRRSARRRPCLVNWEC

SEQ ID NO: 219073 - protein, 76 aa, Zea mays
  Clone ID: MRT4577_131387C.1.pep
ELIIHVTEACKEKPFAVANDRNTGLGLKDGFMLQDDIWFQRWIFASSRERESKGGTGQVDLLPGNRLLSFTWYYSR

SEQ ID NO: 219074 - protein, 136 aa, Zea mays
  Clone ID: MRT4577_131388C.1.pep
YGTTNDEPPTTQTAAAIFQELCYSNKDQLSAGLIIAGWDHRHGGQVYSIPLGGSLHKQSYAIGGSGSTYIYGYCDANWRENMSEEEGIKFVKGALSEAIKWDGSSGGVIRMVVLTGKGAQRHLYLPDQNYDGPGKQ

SEQ ID NO: 219075 - protein, 203 aa, Zea mays
  unsure (1)..(203): unsure at all Xaa locations
  Clone ID: MRT4577_131389C.1.pep
MGEGSKAMLAKPIQLADQVAQQAGWQCLRADCTELRSRAMKLAELLRQAARVELYERPAARVMADTERALHKAAGMAARCFQSHSRLRRFFTLNPVSGLPRTLALLDTALEDIAWLIRVSSPQDDDGDGDGDLRGLPNIAQNEPVLGMVWDNIARLHTGGLAARADAXXTLASLARXNSYFAKYIVEEDGVAPLVKLLKEAPT

SEQ ID NO: 219076 - protein, 104 aa, Zea mays
  Clone ID: MRT4577_13138C.1.pep
TRQIHNVLTNPIMQRDLIDVQDTSLRSQEHAEEPRSYAHDSNVRKSCDSSHDMIERGDDWICLVHVPPDAYICSSNLQRKFNDSAPLPTIYPRMAALLLGTRLI

SEQ ID NO: 219077 - protein, 84 aa, Zea mays
  Clone ID: MRT4577_131390C.1.pep
VVNSTDEASGYKSLRCLGYVPIYLSVTWAKPLARNRNCLLTRTFLIKAHHCMEWVSKSSICYKNLMGLGISDIIQCASILDIPT

SEQ ID NO: 219078 - protein, 38 aa, Zea mays
  Clone ID: MRT4577_131391C.1.pep
VQKKQHDFHVCTSSQMRVRIQAILLPRLSTFSGRTFSK

SEQ ID NO: 219079 - protein, 228 aa, Zea mays
  unsure (1)..(228): unsure at all Xaa locations
  Clone ID: MRT4577_131392C.1.pep
RDIHGKFSLVDLAGNERGADTSSADRQTRMEGAEXNKSLLALKECIRALGQNKAHTPFRESKLTQVLRDSFIGENSRTCMIAMISPGISSCEYTLNTLRYADRVKELSPHSGPSGEQPVQMETEVMEASSNGTSLTGNEEEGLSSQMSSFNEAMTQIRELEERALEELREIIQQGPNWLELSEMTDQPDYDLETFVNKAESALTQQAKQAKHFSALREVIKALRXSHA

SEQ ID NO: 219080 - protein, 89 aa, Zea mays
  Clone ID: MRT4577_131393C.1.pep
KTAPQIRGGGQKRGDKIFSNNGGEKGPPGKPNYILGLFSKREGKTGPIFETRNPTPPWLQGPKTGESERVWLKNPPKKQGNLYPKLEKF

SEQ ID NO: 219081 - protein, 90 aa, Zea mays
  Clone ID: MRT4577_131394C.1.pep
GQATRNASDDRARPLHAWLSSHYSRPCADNRLSLLRVYAFYKITLDERTYLDLIICRGQCKFISYGSRQLDQITPITPYWLIRLYMIGTP

SEQ ID NO: 219082 - protein, 98 aa, Zea mays
  Clone ID: MRT4577_131395C.1.pep
RSQASLSMSRRHRRRRGTGVAGSAVPLPGVHRTRVSPPIHKCKVLCTYECCAHIELDFLQAKFSRQNRQQRSESLCSVRIVHKLLWGYIRLPVPSKKL

SEQ ID NO: 219083 - protein, 142 aa, Zea mays
  Clone ID: MRT4577_131396C.1.pep
GPLERPARSRGNDTPSGDQLLNASKDLHGLHSQIDASTSLQSDQNATAVLYGVDNETSATIKTESCYSSNADFAFCGNTFLESCQSIGDASGGGSFSSSELNGQPLNDSILDMESSSFSFLNQMPQSFMFSDLADDFNQNAG

SEQ ID NO: 219084 - protein, 110 aa, Zea mays
  Clone ID: MRT4577_131397C.1.pep
VSPLRTAPWPCVLRLSLTRHRKDLLKLPRVRVIKLLRHLTKCPTSPVSCAWLPIPHLQLTPGFLSALTRLPYCDHFPHAILSRPAGPVHLLWRLHPVASPELSKAREHPP

SEQ ID NO: 219085 - protein, 303 aa, Zea mays
  Clone ID: MRT4577_131398C.1.pep
GSERGAKRKAAGASAMASEEVLHKVQNLIERCLQMYMNKKEVVDALSHHSRIEPCITELVWQQLEQQNPLFFKAYDMRLMLKNQIMVFNRLLQDQFEIMNKEFSSGIPSMSLPNDSNSNLLKQDSCFLPETAPGNAMPDGIMHNGSSSGIINDTPSGDQLLNASKDLHGLHSQIDASTSLQSDQNATAVLYGVDNETSATIKTESCYSSNADFAFCGNTFLESCQSIGDASGGGSFSSSELNGQPLNDSILDMESSSFSFLNQMPQSFMFSDLADDFNQNAEITPFLTPETNFSDSTGGDHTG

SEQ ID NO: 219086 - protein, 94 aa, Zea mays
  Clone ID: MRT4577_131399C.1.pep
IIAGGTNTRKKGTTGPRIPTRHLVQCAKGYGIYKNECNGYANLSGGDNSTTGTTIDEPTVIPSGNYVPRAKQTTKITARTSKHGHFIDHPNVPI

SEQ ID NO: 219087 - protein, 105 aa, Zea mays
  Clone ID: MRT4577_13139C.1.pep
MPRFSVGSSCHAFHFDEMCFIKFHQNDYVAAGCQRLNGEDFCHMNDLIQLYMTAFLEGNNEVLGVIEKAIAALVDSFEKTNLENTPGTEKEQMVSTSLRHLFDSH

SEQ ID NO: 219088 - protein, 64 aa, Zea mays
  unsure (1)..(64): unsure at all Xaa locations
  Clone ID: MRT4577_1313C.1.pep
GEGGWEVVGRVERAGCXGDPAEMKRRRRVASYKAYAVEGKVKASIRRGIRWVKAKCDRIAAIHN

SEQ ID NO: 219089 - protein, 103 aa, Zea mays
  unsure (1)..(103): unsure at all Xaa locations
  Clone ID: MRT4577_131400C.1.pep
NAYITTQCSLSPTAIITQLRSPVTLMVLEHPALQAYILQQCATLLMLSYIQPXIAQLLQHSLAHLTIHTISSHQQQQFLPSLIQLALMNHEPYFQQHLLALNV

SEQ ID NO: 219090 - protein, 876 aa, Zea mays
  Clone ID: MRT4577_131401C.1.pep
MDLLSTLLRRLCLCPPLAGITPARRRSLSDDDDDSAHAHAHTHPHHHHLRGRLHRRPRRRHEPQPHGHLLLPTSDPYAAVVVAGPHETTVARTYVFRNSEAPRWEASFLLPLAHAATGLEFHVKDADPFGSDLIGVAWLPAAAVLASAAAPIESQWLDLARPDARGPPAPGGGSAIRVSAAFVPAAASRGRSGVGVPAYFPLRRGCDVRLYQDAHVAAGELEGVGVVPGFLPGRCWEDLCMAVLGAQRLVYVAGWSVHTTVRLTREAMSPEMAAKVAELEELGGEPVEHMSLGELLKYKSQEGVRVLLLVWDDRTSHNNFFVKMLFGRSIVLQLCMAWVEKLSATSAAAAVQVVGTLYTHHQKCVLVDTPASESTRRITAFLGGLDLCAGRYDTPSHRLFRDLQTVFHGDVYNPTFGGDVNGPRQPWHDLHCRLDGPAAYDILKNFEQRWRKATKLREMFGGKAAHRKDDALLKLERIPWILSPTKPKQQPPSAAADTGAADHDDDERDQPALHVLPDGDPERWHAQVFRSVDAGSVKRFPRPWERAEMARRHLVGDKNLAVERSIHAAYVAAIRSAERFVYVENQYFIGGSYAWPSYRNGGACNLVPMEIALKVASKVRAGEPFAAYVVLPMWPEGNPGSGPAQEILFWQNQTMEMMYSVVAAALEGKGGHPQEHLNFYCLGNREPAEDAGDGNKWAPADPLDDATTSSAAAHARRHRRFMVYVHSKGMIVDDEYVIIGSANINQRSLAGSRDTEIAVGAYQPDHTGACPRGKVHGYRMSLWEEHLGKEAVRRPEVLRPESPRCVKLVNRIARDNWRRYAADDDKLGPLQGHLLRYPVHVRADGRVEPLPGNELFPDVGGRVVGAPNNLPDYLTM

SEQ ID NO: 219091 - protein, 52 aa, Zea mays
  Clone ID: MRT4577_131402C.1.pep
NFTPLGSHQGSLGGAGHFFFSRFLSKKKKKKKKKKKKKKKKKKKKKKKKKKK

SEQ ID NO: 219092 - protein, 51 aa, Zea mays
  Clone ID: MRT4577_131403C.1.pep
LNVVGLANDFCVYAVVCVLALAFKNDKVPDTNGMPLEVITDFFFVGAKQAN

SEQ ID NO: 219093 - protein, 79 aa, Zea mays
  Clone ID: MRT4577_131404C.1.pep
TRKKKNLSRVFLPWHFVRVLVSRGLWGFSPSLCWVERQRLTVGLVWEGPPPPCDRRVVPWCGEVVFLGNRSVFVFLQTK

SEQ ID NO: 219094 - protein, 112 aa, Zea mays
  Clone ID: MRT4577_131405C.1.pep
TFLGKMSDSMRAAHHQTDTNVLFVYGIFFLKKADPDISCLDANEFSDVSLYELVGAQQLAAVGEPLLPQERDRIGLPDACLLDAAPAGEHDAAALTVVRYVFAVRLGALEQV

SEQ ID NO: 219095 - protein, 462 aa, Zea mays
  Clone ID: MRT4577_131406C.1.pep
MPTQKRPPPPPPPSPSPSAAPGAGSPPPSSPPLPTAEPAEKKPKLEVNGSAGAEANGNANDFGAKEGTEVEASESESEDADAAKQEFVPVKLSDVRKEVQCPICLGIIRKTRTVMECLHRFCRECIDKSMRLGNNECPACRAHCASRRSLRDDPNYDALIAALYPDIDKYEEEELAFNEEENDRNKQIQASIAEAFRKQSEVIGRKSTAKATAAAFVRRSRRNIRPNGQNTYFRGRGKASSDDVALACSEDEEDGNGESCSKEASSAEESSPEKKQKRLPKWPTPRSSPARACNDEVASDEKDDVGISRENFSTSPLRAWGKNGTRSQTRHSSFSGSNGRMVKGGRMIKLVECLRNSDDNEGERDVHLCLLPLDGQTAPNLEKSYLCCGPTLSIKQLCQFVASQTSHKDEEVEMYALKPSCSKPVSTNTCGPDKARLAGEERLSDLRSSFTFPNGVLVRSNT

SEQ ID NO: 219096 - protein, 72 aa, Zea mays
  unsure (1)..(72): unsure at all Xaa locations
  Clone ID: MRT4577_131407C.1.pep
MAAKISSMLMLLALSACVANATIPPQYSQAPIAALLPPYLSXMTASVCENPALQPYRLQQAIRTGPSPLSPL

SEQ ID NO: 219097 - protein, 135 aa, Zea mays
  Clone ID: MRT4577_131408C.1.pep
EDEEDGNGESCSKEASSAEESSPEKKQKRLPKWPTPRSSPARACNDEVASDEKDDVGISRENFSTSPLRAWGKNGTRSQTRHSSFSGSNGRMVKGGRMIKLVECLRNSDDNEGEVNTKVHVICFLVYWSVALLSY

SEQ ID NO: 219098 - protein, 204 aa, Zea mays
  unsure (1)..(204): unsure at all Xaa locations
  Clone ID: MRT4577_131409C.1.pep
STAKAXAAAFVRRXRRNIRPNGQNTYFRGRGKASSDDVALACSEDEEDGNGESCSKEASSAEESSXEKKQKRLPKWPTPRSSPARACNDEVASDEKDDVGISRENFSTSPLRAWGKNGTRSQTRHSSFSGSNGRMVKGGRMIKLVECLRNSDDNEGEAPNLEKSYLCCGPTLSIKQLCQFVASQTSHKDEEVEMYALKPSCSKP

SEQ ID NO: 219099 - protein, 213 aa, Zea mays
  Clone ID: MRT4577_13140C.1.pep
MAPLSWRHHTLLQALLSRGPLSERDFHALFTAISGGKNPATHQQLFSDTLMKINNELGYLQFDLRACINQYDGTVYYGVVNNISDEESKLGSKYSVPQIAFYKGLLEAIVHEAGNDGSITSIEALHVRIDNQVVIADGTQDTQSRLPSSITNFLFSQKEKTLTELIQDRWLAYTSEGKIGLGIRSFLDLRSWFRSNDIPSCEVCNEAGIKAST

SEQ ID NO: 219100 - protein, 181 aa, Zea mays
  unsure (1)..(181): unsure at all Xaa locations
  Clone ID: MRT4577_131410C.1.pep
MHMVTHVSTGLALGHSHSEEDATKAXLQAANGITLEKNFRKKRVAYAKSSHGTLHKGVXSNSLADTVIEAALFAQXYDAIGWAPKEYNTXDKHNNNYDSHNDGNTAHSALDWDEKSDYYYDYDYGFYYEGTTDLYYDSNYDVCYSYDQQTQQYDHQYDHSNTQATTEAASEATKTSTSNCG

SEQ ID NO: 219101 - protein, 148 aa, Zea mays
  Clone ID: MRT4577_131411C.1.pep
RLAELSHSHAVSTLSPQLLLENARSSSCRRYKPSLPSLYYGRLLLLLLVGVELFLGAGMELGLSLGDAAVPDAGRAAPELGLGLGVGIGSNAAGTGRGSKAAGTTGTTGWWAAPATPESAVRLNLVSSLGLQWPPTDGGICHVWRDEA

SEQ ID NO: 219102 - protein, 165 aa, Zea mays
  unsure (1)..(165): unsure at all Xaa locations
  Clone ID: MRT4577_131412C.1.pep
SSPSSSSPSSPPPSPPLAPRPPLPPGRRPQQLRPASAQDQERPSPSSRRSLPRRXVATPLGPPSPWPPSCWKSNSALSMGMANSSSSMPPSPPPPSVGGGGWPPAPLLLGPSAMLFILLTDRFLARNVRNRSHMPPAALVAGSTSPPPLPFSAITARLLYLYLAA

SEQ ID NO: 219103 - protein, 241 aa, Zea mays
  Clone ID: MRT4577_131413C.1.pep
MNGIDHEDEEWLVKATKLSGAKDADLEAEEWLVKSGQPNDALDSDFRFIHEFSEQGAAEPLHIYVSDKNEADFQYVKDILKKSGFSCGDVDWYASNQPVSPVVFDEAECSCQEVSMASDEPHSIVRRMLLFDLINEVLLDIYDSSLVIGPWHSRFDLRTRPIPMGYHVLEEVWAKVSCYLSLHWKEGQTVEDIVAHDLMRKDGWMNLVYDAECTALDMEDLMVEDLLDDVVIQIVLESIDE

SEQ ID NO: 219104 - protein, 156 aa, Zea mays
  unsure (1)..(156): unsure at all Xaa locations
  Clone ID: MRT4577_131414C.1.pep
GAYINLQSKSXSAWTTLYEAXLYYSIIVEEALLRSGLFKYCLIXIDENPGDETLILSWQAIQQEPAWQRCPSHQADIVYVTXKRITGNKGCDVALGKTLKGXTPFSXVSLKTTAEELLEKESPLKLVTXDEEQGKLERHNRKAMAYSQAQLGITSH

SEQ ID NO: 219105 - protein, 101 aa, Zea mays
  unsure (1)..(101): unsure at all Xaa locations
  Clone ID: MRT4577_131415C.1.pep
GHPNTPAACLCPRAWPRALSAFGTCKLSPDATAHSPMVIMIWRGLRSQQCLTLWMLLLHTSGTHEPDEPDRYLHTCSAXXFIDEMPTIRDDCGWLYIFYYT

SEQ ID NO: 219106 - protein, 120 aa, Zea mays
  unsure (1)..(120): unsure at all Xaa locations
  Clone ID: MRT4577_131416C.1.pep
GTGPENPARPTRPRFLKAEHDTKKGGNEEKERGAHEASAATRTSGGGGRQTPHGETPPTNKRPTHDKRPPKQQPQPRQNPTQPPQTSPGQQTGTSGRGQXGSPRQGQREESQRHQCSPAE

SEQ ID NO: 219107 - protein, 43 aa, Zea mays
  Clone ID: MRT4577_131417C.1.pep
YYNLISCYYQETIYSLAFFSCDFSITDWPHLEFHPASTTARSQ

SEQ ID NO: 219108 - protein, 85 aa, Zea mays
  Clone ID: MRT4577_131418C.1.pep
MFITKKTVFYGRSNYSPNKGRQGVIHKKILSNTKDQKGSHIFLWWQSHFEPPNDWENNMPEIFFAPVKITFKRKKFHKKKKGHRA

SEQ ID NO: 219109 - protein, 182 aa, Zea mays
  unsure (1)..(182): unsure at all Xaa locations
  Clone ID: MRT4577_131419C.1.pep
ALPNLPHRMVSLARTGWLAAALVPMPMAFFLMCKQQHVGALVAASAMVGLSSGFIFSTAVSVASELFEPNSLGVIPCIMIPNIAMGSLVYGQIAAMVSDGNGXDDFDGXALASFTAKIVCMGVKWYXATFLVWGCISLSGVSVXSVVLFIRPYHGCMPICCSVQVVSSFSMCAMCNRGDLCW

SEQ ID NO: 219110 - protein, 315 aa, Zea mays
  unsure (1)..(315): unsure at all Xaa locations
  Clone ID: MRT4577_13141C.1.pep
MVSASSLLLPSSVRDLASCVSDGAVRVACTTPASTFTVSSSSPSPPSTLSVAVSYRATPQVASSPPLLLRLTWSHSPRGQPTLSFAGPTASSPAVLLRRRRGTYCLPSSSSAHAPPLAIFWDLTGARYDGAGSSSPEPVSGFYVVAVASAEVVLAVGDLXGVREGEXRARSRGRAPSWPCPAWSSSRRXPGAAAHTARVRFAEGAPEHEVAVGCCRGLGGRPGEEDELWVSVDGKRAVHARRLRWNFRGNQTVFVDGAPVDVLWDLHGWWFRRDPPGCAVVMLRTRSALESRLWLEEEARAPGFALLVQAFRTPP

SEQ ID NO: 219111 - protein, 88 aa, Zea mays
  Clone ID: MRT4577_131420C.1.pep
CNLSEQETISAAVHRIPTGPILERFTVTCTYRATRSQIDHAGHVDLRLAFHAWTRRGSVSDRRTAGGHSSISSTLRCLFFIVRPKLVV

SEQ ID NO: 219112 - protein, 51 aa, Zea mays
  Clone ID: MRT4577_131421C.1.pep
TLTNLFLFFNFPPPFPINHNFFLKLFTTKNLFSINLNSQKYFFFLPLFLSK

SEQ ID NO: 219113 - protein, 223 aa, Zea mays
  Clone ID: MRT4577_131422C.1.pep
METSAVAAPMTWLLLTLLLSLSAAAAAAAETVRVITTPVFPHIPRLQASKDFQVLVRIEAPPAAQLQKRVPVDIAVVLDVGGGTGTRLDAVKKAVKFIIRQIHDDDRLAVVGPYNYRLVTGFLNTRDARRNAEKSVDQLEPRGEFTSGSGAGLEEAIKILNGLPTSASRSSRARFVILVTDTAVAESSSRFVSQMPREFLPPVHTFGLGAAAHEPQGAVLHRQ

SEQ ID NO: 219114 - protein, 134 aa, Zea mays
  Clone ID: MRT4577_131423C.1.pep
ALRKVGQIRKGPPGIPGLGNTLRKLFCTNKICPQLLFDTPRGVQSWVFGKNSFNCKGPGSWVFPCWGIPQRKQNLAPRGGFFNFKPMAAKILWKKKFGETGWGEPNDPPVSINFFVKKFCMTVPSNYLVPPFAG

SEQ ID NO: 219115 - protein, 75 aa, Zea mays
  Clone ID: MRT4577_131424C.1.pep
KSTGILSICKSRVQLGGAPEVKHQLPNRMKKANVCIGPPHEAPLQQKIFMGDEKKELLKILPTKSKNSWCPNLST

SEQ ID NO: 219116 - protein, 77 aa, Zea mays
  unsure (1)..(77): unsure at all Xaa locations
  Clone ID: MRT4577_131425C.1.pep
MVLPLQGGMVLAKGAAKRGHQXVRXDSSPGMTKPGMLRLTRGGGVKRISGLIYEETRGVLKIFLENFIRDAVTYTLH

SEQ ID NO: 219117 - protein, 90 aa, Zea mays
  unsure (1)..(90): unsure at all Xaa locations
  Clone ID: MRT4577_131426C.1.pep
RPLQHESMNVIKVYFKRIIAEWRLERIRNTFKGIKGSHTWPFQXYVAYLLRXYFFNNLHYRLSTCPFYSQIAKKWLDSQFARSKASVERS

SEQ ID NO: 219118 - protein, 152 aa, Zea mays
  Clone ID: MRT4577_131427C.1.pep
MRNGTNQAAMFTDKNTFDIVLWQKHEGDGKVLQPWQTMIAGYLAGTAGPICTGPFDVAKTRLMAQGRTGGRKCTGMRSLILDNCDSLSTVELNSSSMVNLSLAGCRSMTLLKLSCPNLQNVNLDGCEHLERASFCPVGLESLNLGLCPKLSD

SEQ ID NO: 219119 - protein, 111 aa, Zea mays
  Clone ID: MRT4577_131428C.1.pep
RGSCSTADLMMIFSGGYEGAGVLFAHISRAFYILVLYYLGIMYSVCGAACARLRVCDAHDTLLVACKKFRSLTVRCTRVLVGTRVHVGWGLAFCTVWVGTLAFHRKTICRL

SEQ ID NO: 219120 - protein, 149 aa, Zea mays
  Clone ID: MRT4577_131429C.1.pep
QPQQFFIIFFFFYYFFFFFFFFFFYFFFIFCCSQKKNSIREKQKKRQEKRGPPRRPLGRKGPRAPKKQARKGQKLGEQKRGGGRHTHPREKNQTFCAWKKKKSREEQQQQKGELCGPQQKKQGAVAALTGKQELPSVCGKNLPRRAIKR

SEQ ID NO: 219121 - protein, 124 aa, Zea mays
  unsure (1)..(124): unsure at all Xaa locations
  Clone ID: MRT4577_13142C.1.pep
MSTIAADDTRVLGQDPLIPPALLTSEIPLPEKATNTVVKGRQDAADIVLGQSDRLLVVVGPCSIHDPATAQEYAARLKEVSDRLDKDLCIVMRAYLEKPRTTVGXWKGLINDPDIDNSFKINKG

SEQ ID NO: 219122 - protein, 330 aa, Zea mays
  Clone ID: MRT4577_131430C.1.pep
MLCAVGVQRKTDSQSMVLPKSSRVCCMASTLQLLFSIAITALAFFLHPCASTDEFHRELYGWSNGIATWYGAADGAGTDGGACGYQNAVDQPPFSSMIAAGCSSIYDSGKGCGSCYQAVCTGNDACSGNPVTVVITDECPDCPCPDEQVHFDMSGTAFGALAKPGQESQLRGAGAIQIQYTRVQCEWPGVDVTFSVEPGSNPNYLAVLIEYEDSDSDLDSVDMMQTQGGTSGQWVPMQQSWGAVWKINSGSVLQGPFNIRLTFSSGRALVASNAIPAGWNAGVAYRSGGVAVTRARPRSGACRGYEAAGTLDGLVHRHLVVLLLLVLLTL

SEQ ID NO: 219123 - protein, 339 aa, Zea mays
  Clone ID: MRT4577_131431C.1.pep
MASTLQLLFSIAITALAFFLHPCASTDEFHRELYGWSNGIATWYGAADGAGTDGGACGYQNAVDQPPFSSMIAAGCSSIYDSGKGCGSCYQAVCTGNDACSGNPVTVVITDECPDCPCPDEQVHFDMSGTAFGALAKPGQESQLRGAGAIQIQYTRVQCEWPGVDVTFSVEPGSNPNYLAVLIEYEDSDSDLDSVDMMQTQGGTSGQWVPMQQSWGAVWKINSGSVLQGPFNIRLTFSSGRALVASNAIPAGWNAGVAYRSGGVAVTRARPRSGACRGYEAAGTLDGLVHRHVVVLLFLFLVLLTLGAEMRCNFFLVLGACEFGLHGLSSSVYFSCIAA

SEQ ID NO: 219124 - protein, 73 aa, Zea mays
  Clone ID: MRT4577_131432C.1.pep
PTRSPTRPRSRAAVLFFFFFVFLWQRNNKHIYKNIHFGTGIWPYFSLLNYDLPLHVTPVLCTFIKNKMQKNEP

SEQ ID NO: 219125 - protein, 70 aa, Zea mays
  Clone ID: MRT4577_131433C.1.pep
IVTKTAWTWSAQGGVVSGTRGDADDGAGGRSSLVGAAPVQVPLPVSGARTTGPKGPIWAPVGLVSYKYGW

SEQ ID NO: 219126 - protein, 66 aa, Zea mays
  unsure (1)..(66): unsure at all Xaa locations
  Clone ID: MRT4577_131434C.1.pep
MRRKPXRCYRQIENKAYPKCGYCGGVPDPKIGTYDVGIKRECGDDFHYCVHLVAXDKEKVSLDPLD

SEQ ID NO: 219127 - protein, 96 aa, Zea mays
  Clone ID: MRT4577_131435C.1.pep
NIPNGILQSEAAGLWWVLIETNQLVRKNFARVSLQSTIAISRLASSDTTDYAQLLTSLGHIQKQATLVFARQSAEIKVLMSRLHKVIEDSLRIIEF

SEQ ID NO: 219128 - protein, 110 aa, Zea mays
  unsure (1)..(110): unsure at all Xaa locations
  Clone ID: MRT4577_131436C.1.pep
RLLFVYXRTKLYHQKHERRGSSRSCYKGIKXIGLRLVVRPQXFVIKIVDKEEGRKAARRELXGXNAPAKSTXARCDTVRHSLCLCSNVLVVFSPIQHIRTQETGWGPSTV

SEQ ID NO: 219129 - protein, 75 aa, Zea mays
  Clone ID: MRT4577_131437C.1.pep
TISIIVKSRISIKKGSRVTAHSYKTKRVKATHNRVENIFMGVAYFIQEKEICGDEWMALAREAGDQYNVKCSQEP

SEQ ID NO: 219130 - protein, 448 aa, Zea mays
  Clone ID: MRT4577_131438C.1.pep
MTEPAPAAAAEEKRAVADTAAAVVAKGKEKEEAAPTLAAGARGRFVAYPARVTEHTDVVADAARFRAALEGLHAHMNTRLKVPPTRPKDLDLHQLYKEVTSRGGIDKLKAENRWREVTASFIFPATATNASFMLKKYYMSLLYHFEQLYFFRVQGWYQQEIDSRTNSSIEVKTEAQAYHKRKRGINASLSGPASSSDNVDVDVIVDGKFEHGYIITVIMGSKSTKAILYNCTEEPALPTSELAVASNNNDLKGGRRRRRRKKKLSTTDPRHPKPNRSGYNFFFQDQHRMLKPQCPGQDRLISKMIGERWNNLSPEDKAVYQERGVQDKERYRTQLAAYRKLTGQPISNAVPIEQRLPLTDVTIDEVDSKVSEGDMLLSNQAYSSSDESDHSGEKTVEDELNTETSPEVSMETTGSLRHPDPCADEDHFELRRRENPKADEKYNAPPDS

SEQ ID NO: 219131 - protein, 129 aa, Zea mays
  unsure (1)..(129): unsure at all Xaa locations
  Clone ID: MRT4577_131439C.1.pep
MALEPIALLLTVLIVEPLTVLLLXPRRRQQEGRSAASPTPPRRRDRLRLPLPPSPRGLPLVGHLHLLGALPHRALMSLARAHGPVLLLRLGRAPTVIVSYAAALEEVMRARDLTFANRPASAMAERLLY

SEQ ID NO: 219132 - protein, 47 aa, Zea mays
  Clone ID: MRT4577_13143C.1.pep
KKKKKKKKKKKKKKKKKKKKKKKKKKKKKKKKKKKKKKKKKKRGGRF

SEQ ID NO: 219133 - protein, 169 aa, Zea mays
  unsure (1)..(169): unsure at all Xaa locations
  Clone ID: MRT4577_131440C.1.pep
HRLQLXTTDAVPYLLWEFYNMWETXPFSPTDXKXFPFNLGRPEGMSENKMRDILYMANHNLNAEISFAGFNLLVPNVAQINQTNGVEGFGSLGLMANTCTSDWGRPPNFLLVDFYNEGSTNGSVFEVAARANNVTYNRECCGTTSAADAQLQPVYFGLVAAAFAAVLAL

SEQ ID NO: 219134 - protein, 62 aa, Zea mays
  unsure (1)..(62): unsure at all Xaa locations
  Clone ID: MRT4577_131441C.1.pep
IVTCMFTCPTKHTHTHXXKDKTKKYYPTHTNEKKGSTESKGGXCINYXCYXYNYIRVDIFSL

SEQ ID NO: 219135 - protein, 66 aa, Zea mays
  unsure (1)..(66): unsure at all Xaa locations
  Clone ID: MRT4577_131442C.1.pep
KKKKKKGXNRGGKKKKKKREKKKKKKKKKKKKKKDKNKKKKKYNKPFKKEKKKKTFPHLWGFAGAT

SEQ ID NO: 219136 - protein, 85 aa, Zea mays
  Clone ID: MRT4577_131443C.1.pep
VNLQMELWDPTLAKGIKIFLATSTPLFGHVATNYTVNYQKAAIQLSCSGNGYGMHAGPSPPRRAEASKFDDDVNPRYTHGYQGGG

SEQ ID NO: 219137 - protein, 358 aa, Zea mays
  Clone ID: MRT4577_131444C.1.pep
MKWLPVSVPCDWCKHFLLNVSWLYLLVLIWNFYTCFSGYGMHAGPSPPRRAEASKFDDDVNPRYTHGYQGGGRGGARFREGPPPYGRGRSYGRGYGAPHGKDLINIDGEYVHRNDPNLSPREGDWICQNPNCGNLNFARRTHCNNCNKFRYSAREAYEPRRSPPFRSYPSPPRGPPRMVGPPGDRAPAREMARYRSPPHGWGASDPRAYAGRSPPERAGRFTDPSTKGRMGFRGERDPRDRVKYEWSATDDYVQRERPYDGYLDRSRRRSGSPRGNWGNDLRDRSRSPARNRPMKSSFTGRGRPDDYAADPYGSRGRPNGMEAGRGRGHAYRAGSGPYPGETRGDQRAAPRARNEDGY

SEQ ID NO: 219138 - protein, 75 aa, Zea mays
  Clone ID: MRT4577_131445C.1.pep
FSPWEHPLLMFLKKWPKPVPTVAKSFLFPPPPSGGWVGKNLVSNPLLVIFSKGGFQESPILNFLKNPKNFKRLVF

SEQ ID NO: 219139 - protein, 42 aa, Zea mays
  Clone ID: MRT4577_131446C.1.pep
RRFSGFKRAKALSYRLACLRYVIQPISSGSLPEITLFERERS

SEQ ID NO: 219140 - protein, 95 aa, Zea mays
  Clone ID: MRT4577_131447C.1.pep
MGPTFLVGRNWKCNGTTDHVENIRKTLNERNVPYLNVDKVPSIPYYGDLSIVKRHVRPELHVDAYNYYVKKLRAFANENSAYMLIKLVVECIVLV

SEQ ID NO: 219141 - protein, 96 aa, Zea mays
  Clone ID: MRT4577_131448C.1.pep
LINQNLGTIPRISIFPFKHMSPLYISNPILRIFHYTSANRKGGVTKKRMAEHGQTQTHKPKIDRGRRRKMAISHTSRPADPSEFRSGQLSRDDEHP

SEQ ID NO: 219142 - protein, 68 aa, Zea mays
  unsure (1)..(68): unsure at all Xaa locations
  Clone ID: MRT4577_131449C.1.pep
FPVGNRPVSAVLLVAVMSLLRARRASAWYFRLRWLVHLLVVTFSRGQPFIPLXNHGVLSAPYRGTWST

SEQ ID NO: 219143 - protein, 132 aa, Zea mays
  Clone ID: MRT4577_13144C.1.pep
CLDIRIYDAQSLVGALLADKVDVLGHVVNVLDVDHAEVRVLEVVLNVVVIGVRAVRRHRSSSSVAESRSHPRFLPAVVVAAASASPDLFSGDAEASLVRRHSLVVIDGAFHVLHCQGQPRVQRYAPTSSVCS

SEQ ID NO: 219144 - protein, 135 aa, Zea mays
  Clone ID: MRT4577_131450C.1.pep
LGLLLAIKKLTKDQVQTIIEKIANQLSGWKSDLMTKAGWKVHVQFVLTGMVIYLAMAVDLPPWALKAIDKIRRGFLWRWRKEARGGHCLVAWGKVCRPLELGGLGISNLIDLAWALRMRWFWLAKTDPGRPWGLL

SEQ ID NO: 219145 - protein, 131 aa, Zea mays
  Clone ID: MRT4577_131451C.1.pep
ACVRSRQGALQACSRSASRWLRTRHIGADTCMTPSFLPPSTVRGARWQGIGCWIFQRATKLGSGNDGYRRDQFEVRKDGGRAGDGGGRGSTWGGFVPHAGDIPMSRTRRSRGGGKVRELWRRGCSGLKKRR

SEQ ID NO: 219146 - protein, 41 aa, Zea mays
  Clone ID: MRT4577_131452C.1.pep
MTLIIKRFKTALKGHKEYPKKKKSRGKRSCFKCALELKMLL

SEQ ID NO: 219147 - protein, 100 aa, Zea mays
  unsure (1)..(100): unsure at all Xaa locations
  Clone ID: MRT4577_131453C.1.pep
LPAPDGSMQTVGGDPFGGSLAVPPPFYVQMADLEKKQQFFTQEQIMWHQYQRDGMQGQLSLNRFDRAPKPAMPXGCPWHKXANPMPMGYPGNTGYYYPTY

SEQ ID NO: 219148 - protein, 103 aa, Zea mays
  Clone ID: MRT4577_131454C.1.pep
RCPSPGAASPFEYVTGSDGAPLIRILPEFIEKVITSCGGGKGGTAATEHLCSTPELRKHYMQLVGARAERPWSPGLETISEADKRRRMLSPVRLVGLAMPSSR

SEQ ID NO: 219149 - protein, 330 aa, Zea mays
  Clone ID: MRT4577_131455C.1.pep
PTRPPTRPPTRPPTRPPTRPDPRVRPRVRSEALRVRDEMVGFGCLPDVVTYNTLLNGLCKQHRLLDAEKLLNEMEERGVTPDLCTFTTLIHGYCRQGNFENALQLFDTLLRQRLRPDVVTYNSLIDGMCRKGDLAKANELWDDMHAREILPNHITYSILIDSHCEKGQVEDAFGFLDEMVKKGNLPNIRTYNSIIKGYCRSGNVKKGQQFLQKMRQDNVFPDLITFNTLIHGYIKEENMHGAFNVFNIMEKEMVRPDAVTYNMIINGFSEQGNMQDAGRVFKGMGDSGIEPDRYTYMSLINGHVTAGNSKQAFQLHDEMIHRGFAPDDKF

SEQ ID NO: 219150 - protein, 118 aa, Zea mays
  Clone ID: MRT4577_131456C.1.pep
GEYFQMDLGMNFCRVIGVHSRPVLHSVRGHDLAACCLCLAGGHFQKQSCGCYLQIRSCQRLICHAGMQCAKAVASDAATYPGVILAATWMGSSPRSRRRGRPCASARAKRCSKWSAFF

SEQ ID NO: 219151 - protein, 200 aa, Zea mays
  unsure (1)..(200): unsure at all Xaa locations
  Clone ID: MRT4577_131457C.1.pep
GRETPTHTNPRSSAPHHPAQLYVSLSLPSHATETTATPNSATVPVAARQACLASRTWAPSATDSLKAVGIKGLGGRSISGRKLSXAPGRQAXSMRKTRAAVAADQERHNSGYFELQDIPNTTGTXWELYGSXAPSXYNPLQSKXLHTVPPSFTQRRLLVQVLLLGGGSLLVYLQAAGERTSRAIXKGPHETPQSGPGGKN

SEQ ID NO: 219152 - protein, 104 aa, Zea mays
  Clone ID: MRT4577_131458C.1.pep
SGRPKYVSFFLGHRVLSLHVHRTSFGRDHVYDSSCIASGFRLNPARHTDQHGDTFLSSVWIHKIQTISVLQCRTKLSQSVLRSIPGMCSSGERGHGSSQLRWPR

SEQ ID NO: 219153 - protein, 56 aa, Zea mays
  Clone ID: MRT4577_131459C.1.pep
MKNRSMGWDQAVVIAFHTKAEFDSHMTKAHEASKLVAIDFTADWCGPCRAIHPLLF

SEQ ID NO: 219154 - protein, 200 aa, Zea mays
  unsure (1)..(200): unsure at all Xaa locations
  Clone ID: MRT4577_13145C.1.pep
MEPKNSRLDSAATSPXPRRRPARAAGALSPPRERRAAYSXAPPSPXARPXRRPPRASPAPAPAPSTRSISSSTSPARPAAPAAPRPYTRASPRGTRAAVTTTATATATRSFSRAGRTPRAGRPCRSTGRKGLGRRRGDLAGPGPGPGPWLRTRRRGPQNSSSARPHRPRRLRRPTSSSRRARSGLRSRRPRRPTNPRSVR

SEQ ID NO: 219155 - protein, 80 aa, Zea mays
  Clone ID: MRT4577_131460C.1.pep
KKKKKKKKKIEKKKKKQKEKKGWGGKNDRAATLSYEKTDLWYIVLRPHSGCLGALWCLRSASPLLHNSKLPPAMQSYTVS

SEQ ID NO: 219156 - protein, 82 aa, Zea mays
  Clone ID: MRT4577_131461C.1.pep
MEMKRMLFAVLVVIDASVTAVLSSTEVVAADTPTASESSDEAAASAGAGAAAGAAVSMPSVSSGTTALDAELDALLLYLLAY

SEQ ID NO: 219157 - protein, 90 aa, Zea mays
  Clone ID: MRT4577_131462C.1.pep
ICRLPFFWQGLVIFGRLFPRPRQFPWTKQSRLGVLFSWRLVFFWVPYSWSLTPSLGCGRLGGVFLAVVYLFLPCFLAGACFFCSGPVFFF

SEQ ID NO: 219158 - protein, 66 aa, Zea mays
  Clone ID: MRT4577_131463C.1.pep
VKFAQEKDARRFITYPMLAITELDRNHVLHHRIHVLIQRDDHPLKLVIHPNVFHLYEVFARKMNIY

SEQ ID NO: 219159 - protein, 73 aa, Zea mays
  Clone ID: MRT4577_131464C.1.pep
ITHAFRLLAIVARLHPRIPDRSALSHNAESILSRLDAKVPQHQELTYILIQHKANSTPVTLLETTTDILQLTQ

SEQ ID NO: 219160 - protein, 126 aa, Zea mays
  unsure (1)..(126): unsure at all Xaa locations
  Clone ID: MRT4577_131465C.1.pep
GRLLTALXPRAPLPAQAREVAXGTYLPPAPXNPGFXFFRATPKDTPALRAGNVEPYEVILPPXWKQTRVANILSGNYWQPKCAQPWVEGEVRGQKQGKGQGGGLXVIPLTNSPTRRCEDIREPREG

SEQ ID NO: 219161 - protein, 110 aa, Zea mays
  unsure (1)..(110): unsure at all Xaa locations
  Clone ID: MRT4577_131466C.1.pep
MRRSSPTVTTSTCYTNVVTTTDEGEYERYKKEDKDPXHKQYLGEAGSMRSGTFTLYEKHXAKNYPQHAHWNNISAEVTGASAVGALSYLLNELLEKNIDHHVAGEACPQK

SEQ ID NO: 219162 - protein, 93 aa, Zea mays
  Clone ID: MRT4577_131467C.1.pep
HRLPNLILQWPEPDRRPSPGPPFWRTCPSHWPPRTRLPRPAPNPPPWPSRRPSPRPSSPTPPPSSSPTSATEPMGPRACKLPSSTSPAAAVAD

SEQ ID NO: 219163 - protein, 48 aa, Zea mays
  Clone ID: MRT4577_131468C.1.pep
NHFLSPCSHLCISYTQVTAGTCVYDMHSLATLGGSVNNRLYMLDMPSS

SEQ ID NO: 219164 - protein, 81 aa, Zea mays
  Clone ID: MRT4577_131469C.1.pep
PSISRVVFHEVGADPSTRICAATHLPSDGPGFFLLFFAPEAHILYWPRYSVSLVLPHQLCLDSRACPLSVLTRSCPTFWLY

SEQ ID NO: 219165 - protein, 98 aa, Zea mays
  Clone ID: MRT4577_13146C.1.pep
TSKSLKRHTVNPLHFISPHTPNVGAVGVSVSKSKPTSPATSSALDPRSAPQFWFQWGRFRSRSRVMSSGRCSVHLRACLPAGFFFRESPHRVFLITHR

SEQ ID NO: 219166 - protein, 86 aa, Zea mays
  unsure (1)..(86): unsure at all Xaa locations
  Clone ID: MRT4577_131470C.1.pep
TGEERCWIAMVGELXSRDXDCCGIPESAFXLEGKGGVLEFVERRVKEKRQMVIVVGEGAGXQELIGRSRNFVESQDACGNKXVLDV

SEQ ID NO: 219167 - protein, 115 aa, Zea mays
  unsure (1)..(115): unsure at all Xaa locations
  Clone ID: MRT4577_131471C.1.pep
FKAIGWPLIILKSGQAGRFKFWFMPWMVYHFXAPHIPFKSFEEWNAAQAQLNGTVHCNYPQXYVNEANWNWRLMKTILTRCHVYDKERYYVPFDELAPQESQPIKFLRKFMPDYA

SEQ ID NO: 219168 - protein, 443 aa, Zea mays
  Clone ID: MRT4577_131472C.1.pep
MSTASGVSAGSVLQLPSFRVPAKRFLPRRTAAGAPAGNFFVKRDIIYNRSYHQFLPLKHIGGLQAAVLPVTPPLLDGEGKKKQMAEEYGFTQIGDELPDDITLKDVMDTLPKEVFEINDVKAWTSVLISVTSYALGLYFIAKSPWYLLPLAWAWTGTAVTGFFVIGHDCAHKSFSRNKLVEDVVGTLAFMPLIYPYEPWRFKHDRHHAKTNMLIEDTAWQPVWQKEIESSPFLRKAIIFGYGPIRPWMSIAHWLIWHFDLKKFRPNEVPRVKISLACVFAFMAIGWPLIILKSGLAGWFKFWFMPWMVYHFWMSTFTMVHHTAPHIPFKSSEEWNAAQAQLNGTVHCNYPQWIEILCHDINVHVPHHISPRIPSYNLRAAYDSIKQNWGKYVNEANWNWRLMKTILTRCHVYDKERYYVPFDELAPQESQPIKFLRKFMPDYA

SEQ ID NO: 219169 - protein, 121 aa, Zea mays
  unsure (1)..(121): unsure at all Xaa locations
  Clone ID: MRT4577_131473C.1.pep
MDFYYRIEILCHDINVHVPHHISPRIPSYNLRAAYDSIKQNWGKXFEILLLWCISPDLYILTYFLMLQYVNEANWNWRLMKTILTRCHVYDKERYYVPFDELAPQDRPGIKFLRKFMPDYA

SEQ ID NO: 219170 - protein, 307 aa, Zea mays
  Clone ID: MRT4577_131474C.1.pep
MAAAPAGGGPRALSQREQDIQMMLAADVHLGTKNCDFQVERYVYKRRTDGIYIINLGKTWDKLQLAARVIVAIENPQDIIVQSARPYGQRAVLKFAQYTGAHAIAGRHTPGTFTNQLQTSFSEPRLLILTDPRTDHQPIKESALGNIPTIAFCDTDSPMRYVDIGIPANNKGKQSIGCLFWLLARMVLQMRGTILPGHKWDIMVDLFFYRDPEEAKQLEEEEALVALDYGAVAEYTAPGADNWGGEWGAGEAAAPAASIPAAGADWAAAPAPPADGVWDAAVAPPPAAAPGWEQGAAPVAASTPTWE

SEQ ID NO: 219171 - protein, 177 aa, Zea mays
  Clone ID: MRT4577_131475C.1.pep
MSTASGVSAGSVLQLPSFRVPAKRFLPRRTAAGAPAGNFFVKRDIIYNRSYHQFLPLKHIGGLQAAVLPVTPPLLDGEGKKKQMAEEYGFTQIGDELPDDITLKDVMDTLPKEVFEINDVKAWTSVLISVTSYALGVHLAAYEHQHDPEHVPAAIAAGSGKKPRTIRVASPGVAIEG

SEQ ID NO: 219172 - protein, 68 aa, Zea mays
  Clone ID: MRT4577_131476C.1.pep
MAYRAYPPPQGAFPPQARTVSSYGPPSPRRAWTPSMPPSEVSGSLDGGSLIRLARGILSGEASRLSLD

SEQ ID NO: 219173 - protein, 50 aa, Zea mays
  Clone ID: MRT4577_131477C.1.pep
YGWGMVPVAALSWHRTGWVCRVRGWVGERTKEGTRLGSPEPRSAARSKRT

SEQ ID NO: 219174 - protein, 100 aa, Zea mays
  Clone ID: MRT4577_131478C.1.pep
GRDRRRLRSHDSSPGAGTTARGTHVCSAVLTGRTRRRAARVQLRSAFRMPRHCTRLASWWSSSEQSSSPLALIKTHVCVWVGACQTQSQTAPTRGRPGIR

SEQ ID NO: 219175 - protein, 107 aa, Zea mays
  unsure (1)..(107): unsure at all Xaa locations
  Clone ID: MRT4577_131479C.1.pep
CVITLIYFFYYSLNVRKNEEGRRNNQKTTGQREEKEQEKNQNXXQNXTRARGDGARRSPATDGGDSTAAXGRRRDLCXWLVFFSSASTGMEGAAAAVFLPFLVSLAT

SEQ ID NO: 219176 - protein, 53 aa, Zea mays
  Clone ID: MRT4577_13147C.1.pep
VHNSKIKAPTRQTSIYHRGAEKYGTTVSTLKLRLIASPDEAGNRSLANSTHGP

SEQ ID NO: 219177 - protein, 94 aa, Zea mays
  Clone ID: MRT4577_131480C.1.pep
WSGRLDSSCSASPSGLSSPAAPPRSLLVAGCFGATAARASHARHTDADDAIRLPSSFGAGGRTWNCCDSAIKDASLPACSCNDAVYKCSTNCNY

SEQ ID NO: 219178 - protein, 107 aa, Zea mays
  Clone ID: MRT4577_131481C.1.pep
RATPHLVSLYVLVQSVSRTAPVHSSPATASPPAPKGLSLQQTSYEKGAGQKKMDRNATNKKGHQNTLRVSETLASPSHIYIAIAIPRFFNSFLALSISLPSPSLSDS

SEQ ID NO: 219179 - protein, 124 aa, Zea mays
  Clone ID: MRT4577_131482C.1.pep
KKKKKKKKKKKKKKQTRSQGKKSKITNPTIQTTYPLLLQTPRGGGLRGSHTTFALVNLLLFSSGPLNKKYRPSFSPLRPGKPLAFPNLTVCKHLPLSAAGVITKRPPPMLFSKHSPPSMDYGTP

SEQ ID NO: 219180 - protein, 100 aa, Zea mays
  unsure (1)..(100): unsure at all Xaa locations
  Clone ID: MRT4577_131483C.1.pep
GNKGKANGWEKPAKGLSKGSTLNGXNSPLNQEKVPRVKEQVPGKFRKKAFLHWDTGXGRNKXEFPETENKKNDLGVEDQQVQEAPAXXEENEGEEEGHYE

SEQ ID NO: 219181 - protein, 161 aa, Zea mays
  Clone ID: MRT4577_131484C.1.pep
LGTSRPAGVATSNIDTGRRTVASTTNASFFYLLNSGSSPSSASCPASSLPSLSTPRFLQTCAILETVHAAIGLVPTAPLLAFLQWGGRIHFILAVVRQIPEVQSSPSVFITFIAWSISEVQVVSERHFISFCICIVLLCSHSHQQLQIMSNLYGVMSLLPS

SEQ ID NO: 219182 - protein, 98 aa, Zea mays
  Clone ID: MRT4577_131485C.1.pep
PGAGEVQKGGQRGGRHARADAERRREGPRGGLLHLRRTPGEGAAGPPARDRRSATRSPREGTAASGLRTPDEGASRDGSTTRSLHLQGRPVTDPRSSA

SEQ ID NO: 219183 - protein, 83 aa, Zea mays
  Clone ID: MRT4577_131486C.1.pep
PFSFFGGSPCGRLSLFSSPGRRIKAFSLRKWSGFWKGRTSSPGKGTMVATTALSRRKTVILASPPHENPLFCYLDSSRSSHNL

SEQ ID NO: 219184 - protein, 138 aa, Zea mays
  Clone ID: MRT4577_131487C.1.pep
LSLLTRFLSRAEPRRPPGRRSPSPTELLCPEPLLPRPRAAARSHRDSALCAPCFPVLSPSSATAWPSASRAPGAAKRRAPSNRRRHRVTPLGPTRAIRCCPQEPTPPSVSSSRVMEFTIVRFLSLPHYSLSPLMNVIH

SEQ ID NO: 219185 - protein, 229 aa, Zea mays
  Clone ID: MRT4577_131488C.1.pep
MPLWGTAASAQPAAEGDAARAPSGSGGGGVKVIRSLLPTRRRLRLDPPAKLYFPYEPGKQVRSAVRIKNISKSHVAFKFQTTAPKSCFMRPPGGVLAPGESIIATVFKFVEHPENNEKPLDKCKVKFKIVSLKVKGPVEYVPELFDEQKDQVAVEQILRVVFLDAERPSPQMDKLKRQLAEAEAALEARKKPPEDNGTRIVGEGLVIDEWKERRERYLARQQEEGVDSV

SEQ ID NO: 219186 - protein, 59 aa, Zea mays
  Clone ID: MRT4577_131489C.1.pep
FIGSFYFDLLFFSFFFFLFFFFFFFFFFFFLLTKNRVTLFLALFNLVPGTASKTQVLQM

SEQ ID NO: 219187 - protein, 111 aa, Zea mays
  Clone ID: MRT4577_13148C.1.pep
TKQQAGTPPQFPRFHFFFLTHPTQPVTPTYINGVRLKQQPFIHDYLYYLQNYNTNLIHFHCKLFHYTFNHPNPHDILLNQLLHILQYKQKFNPYLQLHLNPHFQPLYISTI

SEQ ID NO: 219188 - protein, 46 aa, Zea mays
  Clone ID: MRT4577_131490C.1.pep
TLQEDYVEGEDLGRLDCGHDFHTACIKQWLVIKNLCPICKKTALDT

SEQ ID NO: 219189 - protein, 72 aa, Zea mays
  Clone ID: MRT4577_131491C.1.pep
GCILLRPPHCKLCVMARAFMLPVFVSRFIWVPEWALPVHAFFFVITVLLLTRVRPILVETRHVYCWSLGAKT

SEQ ID NO: 219190 - protein, 74 aa, Zea mays
  Clone ID: MRT4577_131492C.1.pep
CSSITASYSVLCTTISFSAGLGSTCADSIFSYATEVANVPPFTTPNLLASGQSRLTTHEKLQGAFAPFVRLLES

SEQ ID NO: 219191 - protein, 66 aa, Zea mays
  Clone ID: MRT4577_131493C.1.pep
SGVGIGRLEKRAVLLSVANCFISRWTSLFFSCYHFSFFPLLSCMLKRGKSQGSKLFFILPVFRLCW

SEQ ID NO: 219192 - protein, 112 aa, Zea mays
  Clone ID: MRT4577_131494C.1.pep
VCCVLLSGGDAAQHYYSHVRGVVCELCSLCLWTLKPEGTCQGHAGSHVGGTRFCERWHPARRRHRNRSVKHFVYNPFVLSLKTAVTSRPLAARYLSDVSYYLTDHEPSVAER

SEQ ID NO: 219193 - protein, 89 aa, Zea mays
  Clone ID: MRT4577_131495C.1.pep
MGVCDMRVNGPAISCFLPYGCAASFCHLIFCIHGENYTDNSTVRMSTLSLSFILVFLQSLALDYELPCFVAHRIEIWNQRPNSLELDYN

SEQ ID NO: 219194 - protein, 70 aa, Zea mays
  unsure (1)..(70): unsure at all Xaa locations
  Clone ID: MRT4577_131496C.1.pep
TCVLCSVDCALSILSINVPSHNLYGINSELLGEDYHFAMIPNMALLGKKXXXKKKKKKKKKKSTLRCYHC

SEQ ID NO: 219195 - protein, 102 aa, Zea mays
  Clone ID: MRT4577_131497C.1.pep
AGLFAFDTEEEVVRLANATEVGLAGYFFSRDLHRVYRVAEHLEVGMVGVNTGLISDPAAPFGGVKESGFGREGSLYGISEYQITKMVTYGGMGKPLQGKESE

SEQ ID NO: 219196 - protein, 108 aa, Zea mays
  Clone ID: MRT4577_131499C.1.pep
MPYTKGDASKGASLFKTRCAQCHTLGAGEPHKVGPNLHGIFGRQSGQAEGYAYTAANINKGVHWDENTLFEYLENPKKYIPGTKMAFAGLKKEKDRSDLIAHLKEATA

SEQ ID NO: 219197 - protein, 101 aa, Zea mays
  Clone ID: MRT4577_13149C.1.pep
SLKGQAWGQINFRSNKVNIKLKTWQRRVSHSLEKVSVKVCQPILCLYTGYALNVPNQDCGLWTSIFGLCASKFFLNVSRTVEVPIGCFRRYGDIAPRFFLY

SEQ ID NO: 219198 - protein, 151 aa, Zea mays
  Clone ID: MRT4577_1314C.1.pep
FLGRDFSRVLTTMRGTVGYLAPEWISGTAITSKVNVYSYGMVLLEIVSGRRNAGRKASTDDDCCHAKCCFPVQVVDKLLNGGVESVVDASLGGDVNLDDVERVCRVACWCVQDNEYDRPTMVEVVQFLEGLFEPDMPPMPRLLHAIAGGSP

SEQ ID NO: 219199 - protein, 104 aa, Zea mays
  Clone ID: MRT4577_131500C.1.pep
IYFSPSRFYNFLPFQNTSLFPNLIYYQNIPLPSPFLSPKKPPLYNPSHLLPPLIFPFSLPFSLIIIPSLFYIHTPSHFYFLHTPFTPFFLFPPSFFFPILPFSL

SEQ ID NO: 219200 - protein, 56 aa, Zea mays
  Clone ID: MRT4577_131501C.1.pep
KTNGKPEWAESLKQNMPFKQKKKGICFSRIKHPNIKFYKGVIKGITIKLEKGLNPN

SEQ ID NO: 219201 - protein, 392 aa, Zea mays
  Clone ID: MRT4577_131502C.1.pep
MSLATSSITKTKRKKLHRISIYAEDVALFLLPTQNDISTTLDILNIFGNASGLRNNVQKSSIYPIRCSEQTILEVQSLLPCGVASLPCKYLGLPLSLHKLTKQQFLPFIEKIADLLPSWKAELLNKAGRRILVQHVLTSMAIYTAMAIDFPKWALDAIDKIRRGFLWRGRKDAKGGHCMVAWEKVPSIARSFSAVLVSEVGNGVNTLFWVDKWINGKKVAGIAPRLFCTISKRIINKRTVQEAMVNRRWISDIRGILSAGALIDFLHLWEALTNSRLHPDIEDMHIFSIAPDVFWYRLLRKFGLHSLSPQQVETSFFGWWEKSSAQVLSMRKKGLDFLIALGAWMIWKHRNKVVFDGRTPSISFLLQAAGDEREMWQLAGAKGLSFLAGQTS

SEQ ID NO: 219202 - protein, 188 aa, Zea mays
  unsure (1)..(188): unsure at all Xaa locations
  Clone ID: MRT4577_131503C.1.pep
MEQAIDIDMMPTDSCVGVWQDHRDEMIADEQGNRTTPSXVGCKDVERRIGDVGKNQPAMNPINTVFDAKRLIDREIMDVFVQRDIKMWTVKVISGPGDKPKIVGQHNSEERXFVDEXISSMVLIKMREIAEAXLGSTTENGVGTVPAYFNESEREATKDAAVIAGIKGLRIISEPTAGAIAYGVDKKD

SEQ ID NO: 219203 - protein, 34 aa, Zea mays
  Clone ID: MRT4577_131504C.1.pep
IVSIGNNPVLSHPLQQLDCFHCLHRNGWLRTRRI

SEQ ID NO: 219204 - protein, 80 aa, Zea mays
  unsure (1)..(80): unsure at all Xaa locations
  Clone ID: MRT4577_131505C.1.pep
SRADEPALLDALERGAIALVLLDVFWNEAXIDERFLALPNVLLQPHHASGTIETRQAMGWLVRDNLAAHFAGEPLLTPVV

SEQ ID NO: 219205 - protein, 262 aa, Zea mays
  unsure (1)..(262): unsure at all Xaa locations
  Clone ID: MRT4577_131506C.1.pep
LLPPPSLCADLQPRKWPRLLQSPPLEGPLPLYPASPPSPLPDTPXXSPAPELPXPPPAPSPPPYPPPPPPLPASPSKPPAAPPFPKAPPKPPPXPPAPKPTPPPEPPPPLKPPWWPLYPPMPKPNAFSLPPPPLSLPSSXPPSSPSPPLPPXPNPNPPPLPSGPAAQLQPYSHEPPPGLDPCADPESPLHPXAATATAPPRALPLPPPARRPPYPRRRPPRPARTRTRTRGGREQAPAPALSVAKHLSPSSFACPLSLDSPA

SEQ ID NO: 219206 - protein, 91 aa, Zea mays
  Clone ID: MRT4577_131507C.1.pep
AVKSKTAGMLSRAEGQPSRPPRCTRFSVHEEAVACGTSAECLSLRTLDFMLTSIGDISSSSIWTHIVRVWLRPRVRGRVGGRVGGCVGRPG

SEQ ID NO: 219207 - protein, 58 aa, Zea mays
  Clone ID: MRT4577_131508C.1.pep
KKKTQKLQMNDRPTVFHIATTTAKISIMIQLIHLTTPEENNSKVYQCVLYCCLRGRVG

SEQ ID NO: 219208 - protein, 49 aa, Zea mays
  Clone ID: MRT4577_131509C.1.pep
FSPPRFKHTPYPNLFLKALQDKVTGFMLCPRSMQLCFYLTNPQPPQFFL

SEQ ID NO: 219209 - protein, 87 aa, Zea mays
  Clone ID: MRT4577_13150C.1.pep
MDTALCDDLLQVVFGLLPPSAAPAVSLVSRRWLALLRAATSSLSLRLPASSAATLAALLSHYPFLAALTVVSAGTPVHDADAVLLAV

SEQ ID NO: 219210 - protein, 234 aa, Zea mays
  Clone ID: MRT4577_131510C.1.pep
MQELGISVYVAPGKGRTDGKGSVKSPRSLPIKQGGGHPTTQHVWALILGLARNIAADDAVVKGKGGPAGWQTELAVGLQGKTLGLVGLGRIGAHVARVGVLAFGIRIICWSANLTQDKADAMAQEYGLPTTGAGMLAEDEKTFQVVSKEELFQTADIVSLHYVLSDRSRGIVAAHELASMKSTAFLVNTSRAPLIDEAALLDTLRNGRIRGAALDVFDIEPLPVDSPWRNENWD

SEQ ID NO: 219211 - protein, 51 aa, Zea mays
  Clone ID: MRT4577_131511C.1.pep
NTKTYPKHSKRDSKLKNFVFFFFTHTPHNTYFLHPTRPFLLFFNHHHKLNR

SEQ ID NO: 219212 - protein, 139 aa, Zea mays
  Clone ID: MRT4577_131512C.1.pep
PGKKVILFGVPGAFSPAFSNQDVAGFFPPGGQVKTQGVGGVLFFSVYGPFVFKGGGKTFPQNKPVKFLPPGFWGVPQGVGLGVVFPGKGLGGRSKRFAFFGGGLPVPVANIEEGGPFPFFGAWGVLKGLFKPPPPSVLF

SEQ ID NO: 219213 - protein, 134 aa, Zea mays
  Clone ID: MRT4577_131513C.1.pep
MVCAVGVRFISVRAKRPYFQSLVARSSSTLLLIARSWGYKQAREGRIPGLYVTLVLRDYVSVGMVCMRSKGLKFHHYTSCSTPTHALRSLSLGAPRHVAGSVHRQGTQAKGSIGYEISTGLRPIGNEWGPSSNA

SEQ ID NO: 219214 - protein, 72 aa, Zea mays
  Clone ID: MRT4577_131514C.1.pep
FLCALPRSTISALRPYLIRKPDRGYSTHGSQLHACRCMGGMEPRMKTALKGGSLRADLMHIKGRQHIREKRS

SEQ ID NO: 219215 - protein, 75 aa, Zea mays
  Clone ID: MRT4577_131515C.1.pep
CQCVTIPVCHTNCGERNHLLATVEARIRPTYMRHWTCISATRCGLVLSQHLTSTIDVYTPPSKYVTGDICVNIAY

SEQ ID NO: 219216 - protein, 114 aa, Zea mays
  Clone ID: MRT4577_131517C.1.pep
GLAVFSPCFLAVSSTSSLASPPWAMHSWSIGGVCGPPCASPWWRRAASPTWLRRSRLGPSCSICLWSAVLTRSWPARVADGGFVSPLFWVWLSPRLPEFSFFSVGKNRTARPCG

SEQ ID NO: 219217 - protein, 83 aa, Zea mays
  unsure (1)..(83): unsure at all Xaa locations
  Clone ID: MRT4577_131518C.1.pep
ARGPRVFFFFFRSEISFYWWITLNPXYLSPNNTVSSLRAQLVFVVWMFAKESLSYKNITSMPHSGAAVTPSKQTCQLSTRQIT

SEQ ID NO: 219218 - protein, 151 aa, Zea mays
  Clone ID: MRT4577_131519C.1.pep
EELQDLIPKIQVMARSSPLDKDTLVKQVRATFDEVVAVTGDGTNDAPALHEADIGLAMGIAGTEVAKESADVIILDDNFSTIVTVAKWGRSVYINIQKFVQFQLTVNVVALIVNFSSACLIGSAPLTAVQLLWVNMIMDTLGALALATEPP

SEQ ID NO: 219219 - protein, 64 aa, Zea mays
  Clone ID: MRT4577_13151C.1.pep
HVQSFLFCHGFHEKWQSNAHTLMLSNKKKVQCATMLCINVFRIHLAQVKKNWQAIHICRQLAIV

SEQ ID NO: 219220 - protein, 58 aa, Zea mays
  Clone ID: MRT4577_131520C.1.pep
KSEKWKSSRYYCDGVNWEQTSLPSASLSKAFLSVGDTFGNLKESVEGRCTIFISRGSK

SEQ ID NO: 219221 - protein, 120 aa, Zea mays
  Clone ID: MRT4577_131521C.1.pep
MHASPIHVRRRHASMDSMVCVIHLVLAVSLALAGPIIAGGSTEEVGLARKQADEAYAARQMTAQATTTASTMGKEVHRRVLGSINPSTLDPDKPACLGSCPAAGRPYTGRGCQKAYQCSG

SEQ ID NO: 219222 - protein, 87 aa, Zea mays
  Clone ID: MRT4577_131522C.1.pep
YMPSFLPYLSQATSGHMRSSSARCTMGGTRCCTSTFPWTSCTPRRWRPPLGLSLLSPVLAAWIPASPALVGVHARLPLALANPKLCR

SEQ ID NO: 219223 - protein, 124 aa, Zea mays
  Clone ID: MRT4577_131523C.1.pep
MRTTGSAKLQEHIRSDVAMAKMFEDAVRADHRFEIVVPRNFALVCFRIRPQGTAMTEEDADVVNRELMERLNRTGKAYLAHTAIGGKFVLRFAVGSSLQEERHVRSAWELIKKTTTEIFEEETM

SEQ ID NO: 219224 - protein, 91 aa, Zea mays
  Clone ID: MRT4577_131524C.1.pep
QGGRRKALPGEGTNGNRLSYFKKPGSNAGEIKTLKQWGGENHTIFLKQPPTTRCGGQLLEDHGKRAAHWPKAGKKQNFLKTRNPGRRTCPH

SEQ ID NO: 219225 - protein, 31 aa, Zea mays
  Clone ID: MRT4577_131525C.1.pep
SQTTLHKCKSYSSHMTIRQVIANAQIKMHYL

SEQ ID NO: 219226 - protein, 182 aa, Zea mays
  unsure (1)..(182): unsure at all Xaa locations
  Clone ID: MRT4577_131526C.1.pep
RGGGRNPNRAERHGKNRAEQAAARHPWKRARHAGAEGRAGHQVQQRSXRGRRRAQRSKLRAANRQREQGAXGSHGSFKAERQEERAGRRXLGQGTGRGRPGRAERSLGRAGRGXSELGRRGSSTAGVAAQDAGARHWAXGGASGKEKPRGREKCRARLEEQRRSSAHREFSMARGVRWRAGL

SEQ ID NO: 219227 - protein, 70 aa, Zea mays
  Clone ID: MRT4577_131527C.1.pep
TRTQATSLALFGWTPNFNSGEADHGGEHSKERSVLTGDSLHVDRSPQRAREHVATLRLVLLHGTGGLGAQ

SEQ ID NO: 219228 - protein, 149 aa, Zea mays
  Clone ID: MRT4577_131528C.1.pep
RPGFGLRRKRRSKDGKRRGRKKGTKNKGSAEVIKKLGDATLLFAEEKFNEAIPILHEIVRIAPNLSDSYYLLGSIYSEIGELDKAINFLMLAAYVSPKDASLWKKLIPLAKMRTNMYGCTLLLDNYLQSLPTEPYSWDPSGLSYGNLCE

SEQ ID NO: 219229 - protein, 162 aa, Zea mays
  unsure (1)..(162): unsure at all Xaa locations
  Clone ID: MRT4577_131529C.1.pep
FSSISDGSSSVEMRAEPYGCMADLLCRRGYLEEALEFIKTMPFDSSVAAWSALLNSSRIPGNARLSQFAASCLLKLDPENPSNWVALSSVHASGNDWPETWPIRESMSRECVKKEPGCSWVELCDGVHVFVTADQSRPETXQILQSLDYLKEDTSVMPWQVS

SEQ ID NO: 219230 - protein, 52 aa, Zea mays
  Clone ID: MRT4577_13152C.1.pep
VRDILFSGRGQPSVPVANPNADDLLITSDASIFFMTRTSTSDSFPCIIITVY

SEQ ID NO: 219231 - protein, 111 aa, Zea mays
  Clone ID: MRT4577_131530C.1.pep
AHSSVVMAPHGLRSLTGFALIEGRPPPRPSEEGSCACAHAMKGVVQSCTAAPRCVGRHRGLPYMCLGQQSCIGGVMFSGGIGSPPLPLQETKPHHEMCGMRHMFSIHTIFF

SEQ ID NO: 219232 - protein, 57 aa, Zea mays
  Clone ID: MRT4577_131531C.1.pep
NIISVVTAQYYAHTGSEILHLPPSYQFHICQSAPQRYVVKPNTEPHRSPPITNTCVS

SEQ ID NO: 219233 - protein, 87 aa, Zea mays
  Clone ID: MRT4577_131532C.1.pep
MNKYSKGSRRQPQLLPTLSLYFYLAVATFVLCLLLTSPAWFPGLCSARASSFLTTLPGLFTAFLLSPRCLFVVGNLNIALLVGESRL

SEQ ID NO: 219234 - protein, 46 aa, Zea mays
  unsure (1)..(46): unsure at all Xaa locations
  Clone ID: MRT4577_131533C.1.pep
RTAWARKLGRRRDSVLQTGDPAGFILADTLACGAVGPLLGVGVVXG

SEQ ID NO: 219235 - protein, 215 aa, Zea mays
  unsure (1)..(215): unsure at all Xaa locations
  Clone ID: MRT4577_131534C.1.pep
VVFSAKEKFIHAEYVNKEFLRNRSMDENQLAQQMWNSVAANDKKTAYSLIVRSRANVNLVYGEIPSSPFLTLGKALQQEQPVSPPVXALDFSIAIHMTRFLLGSXSPASTSSRTDDMEDGCEGLSLLHLACRVADVGMVELLLQYGASVNMNDSRGRTPXHHCILKGRHRHAKLLLSRGADSQAMDRDGRTALQYAIDGGTSDEDILALLEDHSR

SEQ ID NO: 219236 - protein, 133 aa, Zea mays
  unsure (1)..(133): unsure at all Xaa locations
  Clone ID: MRT4577_131535C.1.pep
MNDAYSDLVVCXALTADSASAXQMPCPCTVPXGLDGAGAGLTTIIAARGXLHPYAQFLLHPQYTTLAGAPYYPXSGQTSATFHSLQLLCWLHQIRMMHAHAVAQDPLMMMHLERVVADRMNLHNPALMQQQLQ

SEQ ID NO: 219237 - protein, 227 aa, Zea mays
  unsure (1)..(227): unsure at all Xaa locations
  Clone ID: MRT4577_131536C.1.pep
MELDAAQNPNPEPPISAYYQTRAEHHAVVSSDWLDHAAAAXSPRCARRRPRRPTPLXGSNGGGVIEEFNFWRRKPEAAEAVAAIMALAAVIRSSRATTMMELEIELKKASDKLKSWDATSISLPAACDLFMRFVTRTSHLEHEKFDAAKSRLIERGEKFGEISLKARKTIAMLSQDFISDGCTMLVHGYSRVVLEILKLAASNRKLFRVLCTEGRPPGTGLRMSNEL

SEQ ID NO: 219238 - protein, 121 aa, Zea mays
  Clone ID: MRT4577_131537C.1.pep
MGDLLGSPRVAFTTSRPAGRCRPAVPALNAAPNLTQALTAMGGDHGGGHAGGDFRQKVWSMTGGPYCRPVHWRRNTAIAMFGVFLICIPIAMKSAELEQRPHHPVRPIPSQLWCKNFGKEY

SEQ ID NO: 219239 - protein, 79 aa, Zea mays
  Clone ID: MRT4577_131538C.1.pep
KVPRQISSVFHQACFTVLKLFAPSLTSITHAHIMVLLLGMRNVSPLCKMREVQNHKTLITQIWHHLVFVEQIWHYRTLV

SEQ ID NO: 219240 - protein, 73 aa, Zea mays
  Clone ID: MRT4577_131539C.1.pep
SFRSKEPKPRFLYSSPAPRRASTRAGGRCGRIYLQTLAVRATGRRQTEADAAAGLLRPRLELPGWTEERRSPK

SEQ ID NO: 219241 - protein, 150 aa, Zea mays
  Clone ID: MRT4577_13153C.1.pep
LGCLIQKTHNPFLICGHGAQFWLAYREINPSALAQLVKHSTKKPCPPKKHLTLARIQKGLKNPGGLQLCFLKRPTFRPEGIPGCPQKEPQTFWHKKTVFFFLPKIVKCPKLYFKFRTPKRNGVPKFQAPPSLHKNVSVLTNTPKGPPPIG

SEQ ID NO: 219242 - protein, 192 aa, Zea mays
  unsure (1)..(192): unsure at all Xaa locations
  Clone ID: MRT4577_131540C.1.pep
DCLSSPIAYHLSVLPCFLRAPLLIHPNHFLALADYKEHHFQSKAHDPPYKTYPHXPGIQQKNCFICMKNPPCWVVPCPTSWTGKHGHGRRHFHLLYIFKGSRLDYIEPSSHCCHIPHGHRTELHLIDISEHECWILLTSDGCAKDDRRLPTXDQTLVRRISDCPFRGKDLXATVQTALANENIXALNDVGPK

SEQ ID NO: 219243 - protein, 79 aa, Zea mays
  Clone ID: MRT4577_131541C.1.pep
CNGPEAGGQWPVTTGQSIGRESGKGPIARPPPLEREMGNDAIQIRPARGETKRGSSEITGGKTKVRHVHTRATERSTEA

SEQ ID NO: 219244 - protein, 106 aa, Zea mays
  Clone ID: MRT4577_131542C.1.pep
NAGPMQFRWQSSPHATLAADGSEARASTGSGHMEQAGGPESPTAEDGGHLSTSIGPPPALPENYFFLPPEPLVGVGETVSRTHTRAKTGNGRRDKRHGGKLLPAGS

SEQ ID NO: 219245 - protein, 65 aa, Zea mays
  Clone ID: MRT4577_131543C.1.pep
PRGCPWIRRRPRMRERPIPRALSSPDRSLSVLRASIADASSARRLLLLSSHSERASVCLSRRPRV

SEQ ID NO: 219246 - protein, 178 aa, Zea mays
  unsure (1)..(178): unsure at all Xaa locations
  Clone ID: MRT4577_131544C.1.pep
MASKILSLLELVALIVSASKAVIMAQSGLASLLLXPQGLHQVLNXGLKHLAAQAYKXLQQALGGCVVHHPINQXLQQQALAHLTIQTIVTQQQQQLLPSLSQLDGENPVDYLQQQLLASNPLALTNVSAYQQHQQLQQXLPPLRQLNMVNPDVYLQQKQLLLSSPLTVGNAPTYLHQQ

SEQ ID NO: 219247 - protein, 88 aa, Zea mays
  Clone ID: MRT4577_131545C.1.pep
QKHGLSLVSFLNHTSLRRFSVSLNHNSSNHQARKRSIDKHKDDKVYTILLRITPAHGHKESKYKSALLVRSQLNNILEFQPTRPRTRG

SEQ ID NO: 219248 - protein, 59 aa, Zea mays
  unsure (1)..(59): unsure at all Xaa locations
  Clone ID: MRT4577_131546C.1.pep
SQITMQHFKSGFNSIIAGLEKKNRVISILHRLTVTYHESLHAFSXYFXLEHAVPLLKIT

SEQ ID NO: 219249 - protein, 87 aa, Zea mays
  Clone ID: MRT4577_131547C.1.pep
CISKWGPASRCYLTRTLQVVPIQLSHVNMLKYMIFCHLLKDFSTRYERLVSLTTNQTAGSCCTSHIDLGSSRGLASCFFLGRFSFGG

SEQ ID NO: 219250 - protein, 190 aa, Zea mays
  unsure (1)..(190): unsure at all Xaa locations
  Clone ID: MRT4577_131548C.1.pep
MKFYFLDVVNLALQFKITATNFGALGPSLICYLRHNAFPQRDLHDYSGDISHDPLVVKLPNIGRWYIAIXLSTKHRRMLQXINTCSRXTCISLKWQLTGCLNGKTGTNCSWEAYGLHRVPKRSPSVPFESYYVPTDGTASLEDSHFYLEQFLSNSSHEQFAWTYFFLDVPQGSAGALIHVQLKSDKDYHY

SEQ ID NO: 219251 - protein, 72 aa, Zea mays
  Clone ID: MRT4577_131549C.1.pep
TFAITGTAPNVTTGSRATHFAWSLALVSMISAMIRPTRSTIPPMCSRSCLKWSYAHRIVISSIRRSMVQSDI

SEQ ID NO: 219252 - protein, 100 aa, Zea mays
  Clone ID: MRT4577_13154C.1.pep
ALGRALEARSPVKSYCTHDALTTMHREDIQPLERFLPCDALHRRRYGHHDPVDSRHLHTTRVERLLQHPEPPFQREPCCDAATSLCSGTFTSTKMDLGLT

SEQ ID NO: 219253 - protein, 113 aa, Zea mays
  Clone ID: MRT4577_131550C.1.pep
YLQFKVQYASLNPVRLRSEHLRRAYPVTGEPHTVPNPTPRPHHSRAHAVRDTARWVPRAMWISKRARTSCVTRRGSRTLTLKPSRSARDTSTRIIGDRIARLQMPWPPDPHRV

SEQ ID NO: 219254 - protein, 122 aa, Zea mays
  Clone ID: MRT4577_131551C.1.pep
RGFSPIPGVSPLKTDSLFRGGKTPGFFGNTPPFGGPPFAKCGGPPGLTANFPRVFPPFFFPPSVWEGGIFAPPGISKVWEPQGPFRFFTPHLKFRKSGIFVKFALRLSPQIPNSNLFFKLPS

SEQ ID NO: 219255 - protein, 109 aa, Zea mays
  Clone ID: MRT4577_131552C.1.pep
LTRPNPVFKRGKGAFLVDKLFQGLKKTGPAKFERKNPGSNLLGKTIPFPPKRKKLRPPYKNGPKGLYSGGFPQGGKRKGVPPFGIPGPPTDRNPLKGFPPIWAGEAPGP

SEQ ID NO: 219256 - protein, 193 aa, Zea mays
  unsure (1)..(193): unsure at all Xaa locations
  Clone ID: MRT4577_131553C.1.pep
RSRGFXGFITYTVXYEFLXANTAXXGKXLGRRRVRATRPPESPGGFRSSGGYGGGGYGGGGGGYGGGGYGGGYGGGSGGYGGGGSGDYGGGSGGYGGNYGDRAGGGYGGGGDYGVAGGAEGSFAAGGSDSFGSSNFADSGFGENPAGSFGAMGGSSGADGFSAGTPGDGNKNDEIMDDLFKDDEPDSYANKRS

SEQ ID NO: 219257 - protein, 64 aa, Zea mays
  Clone ID: MRT4577_131554C.1.pep
QSNLLKRVAHRDGLSQSLRTALGVGGGTPSVHFGWYDLLNEPQLRINEAFVGIKKNPQKCTKTP

SEQ ID NO: 219258 - protein, 62 aa, Zea mays
  Clone ID: MRT4577_131555C.1.pep
EFHYRPTGPLTSYTTPYEDSISHTADLCLGWINRKAGDSYCMSCHHLNFIRRYICQLSTDPR

SEQ ID NO: 219259 - protein, 46 aa, Zea mays
  unsure (1)..(46): unsure at all Xaa locations
  Clone ID: MRT4577_131556C.1.pep
RLRRKLPRSSRKAXPQSLLLPSLLGLRPPRAVAWVLLGXSWPEARV

SEQ ID NO: 219260 - protein, 92 aa, Zea mays
  Clone ID: MRT4577_131557C.1.pep
YSVLRNSANSICHYKVVPVHNLCTVLLQYLLHSLILSGFKAFVFIWFFSHTFLWMIKFSSDSLFLHWPNLGASGFVFNPFICNCFSHNWLGL

SEQ ID NO: 219261 - protein, 90 aa, Zea mays
  unsure (1)..(90): unsure at all Xaa locations
  Clone ID: MRT4577_131558C.1.pep
EGENRVAXSLSLKSFCCTFPSEDLWSCEIEVIVSLVFKAESVCSEVSFIFCSGTFVNPSFCRSWSLLLFGLHFLPLQMHFYLCKSICLSA

SEQ ID NO: 219262 - protein, 121 aa, Zea mays
  Clone ID: MRT4577_131559C.1.pep
MARSIDCATDSSVKNVALDTLFLIVLQAAVVIALGKFIHLGLRRHNLPSATSQIIAGIVVGSLGLHDVIVHVDVENAEDTYLSLRVGGENLLHVLRRPGGGRRRAVRHAPSHHLPIRERYH

SEQ ID NO: 219263 - protein, 173 aa, Zea mays
  Clone ID: MRT4577_13155C.1.pep
MSTHQANTLRLYLTCIRNTLEAAMCLQNFPCQEVERHNKPEVELKTSPELLLNPVLICRNEAEKCLIETSINSIRISMKVKQADELENILAKKFLRFLSMRAEAFQVLRRKPVQGYDISFLITNYHCEDMHKHKLIDFIVQFMEDIDKEISELKLSVNTRGRLVATEFLKQFL

SEQ ID NO: 219264 - protein, 329 aa, Zea mays
  unsure (1)..(329): unsure at all Xaa locations
  Clone ID: MRT4577_131560C.1.pep
MDDAPAAIVKAKGGRGAFLAHFFIVLPVVTLCVVVYAPRYFSGPPPYYGGGANDVGGISAPRPSSMTRTSSSSSAHLGGLGYVAGRRDADEDDQQLGVGDGGALPQQVVLDNQVGSPCSSLPNHTICCDRSDYHSDVCFMAGDVRTDAASLALLLFAPRAASSAPEPPAAEERIRPYTRKWDAYITKTIHEVTLRVARPEEAAAAHRCDVRHDAPVLVVTAGGYSHNMFHVFNDGFLPLWLTAQHLRRRAVLAVLSYSPRWAGTYGEILAGLSRYHAIDLLRDKRTHCFPGAVVGTRYHDYLAVNSTRLRDKQTIADFHDFLXXVYSDD

SEQ ID NO: 219265 - protein, 70 aa, Zea mays
  unsure (1)..(70): unsure at all Xaa locations
  Clone ID: MRT4577_131561C.1.pep
KWGGAYCIIPYXDRGGWLEEIPQISSTTXXAKRHSFPPLLFSLLPPLSPPFLYPPPPSSPLPPPPFSPFP

SEQ ID NO: 219266 - protein, 102 aa, Zea mays
  unsure (1)..(102): unsure at all Xaa locations
  Clone ID: MRT4577_131562C.1.pep
AXXRXLXXVLPPSSVLGXGPLXXVXPAXLPXCLRRGAXAFXSGPAXVSXSVVAGWXRXRXPSPPPXAVCCPPLXLAFSPLVVFFPRPASLGLPXCVPPLCVF

SEQ ID NO: 219267 - protein, 143 aa, Zea mays
  Clone ID: MRT4577_131563C.1.pep
AKSESMTNPWSTPRLRGDDADLFLGADELPLTDPEDTSPSSTRSACRTPSSARRSTSSSWRCSCSRMSSSRTNSSERLCPRMMSRLPEGSCQETASTYFSAELRRDASRSSDDLVEFKMVRWSRYFSCTLGCITVRCKSYTSV

SEQ ID NO: 219268 - protein, 43 aa, Zea mays
  Clone ID: MRT4577_131564C.1.pep
TPLVVWTEQPFKAWLTLRGGHQHLVFKNKRLKRRFPFIGGALF

SEQ ID NO: 219269 - protein, 133 aa, Zea mays
  Clone ID: MRT4577_131565C.1.pep
GLDYTGSEQDPEFYMDRTGHVSARSNRAACAPAGITKGVVTDLMRVAAPAALVGQGSAVSSQHGHDAPLAGGPDAAVLCLELYVRWKATAARAVRPQLMGHTAPCSSVPGDPCPTKGRWVLLAAACESDHLTN

SEQ ID NO: 219270 - protein, 60 aa, Zea mays
  Clone ID: MRT4577_131566C.1.pep
TKPPGFKIAPLGFTSSCPCGSGKRSFFRADVCPFLKKKKKKKKKKKKKKKKKKKLSRGEP

SEQ ID NO: 219271 - protein, 95 aa, Zea mays
  Clone ID: MRT4577_131567C.1.pep
PLPQFPPRPFVTLFPGNKPVALALIEGMFPFNPLQRIPVEKGLEHPYLEGVKKVPEKPICRDPFLFDFEQQVFGEAQIKQFIFNGAIEINPNFRN

SEQ ID NO: 219272 - protein, 52 aa, Zea mays
  Clone ID: MRT4577_131568C.1.pep
QLLQAQHLILDLKRPSFSINFKLFLECLPFTNSIILEPYSFCRPCTHPLRNG

SEQ ID NO: 219273 - protein, 118 aa, Zea mays
  unsure (1)..(118): unsure at all Xaa locations
  Clone ID: MRT4577_131569C.1.pep
CASQMTYQLIIQDMRVSLQMFLKLQPGFCLMLSLLLIQGGRVIVVSTLLLDTLPAVTTPTERADDDDETPMDVDIKINLDVDLERQITAVIDPKLLEHLVNAMLRGTLSINDXDMNEP

SEQ ID NO: 219274 - protein, 86 aa, Zea mays
  unsure (1)..(86): unsure at all Xaa locations
  Clone ID: MRT4577_13156C.1.pep
EENNHASASLSWRYXQQGXQRGPXXATGSNVDQXXGNPSRXGVEQRXTGGMRXHGTGTXTGGMGQLGEHGGAGMGGGQFQPAREEH

SEQ ID NO: 219275 - protein, 126 aa, Zea mays
  Clone ID: MRT4577_131570C.1.pep
MAKFVGVNSVGIAGDAKDRLEVVGESVDITCMINLLRKKVCRADIVVVEEVKDKKKEEEEKKKKEEEEKKKKAEEEAKKKKEEEELKKKLCPYLYPPPPCSGACCRGPSPPMFLCEPEQPAGCHIM

SEQ ID NO: 219276 - protein, 48 aa, Zea mays
  unsure (1)..(48): unsure at all Xaa locations
  Clone ID: MRT4577_131571C.1.pep
SSAEAGXPXXERGEARXCVCAFCPGPQLLPRSXSGAPVLPRGVSVPAP

SEQ ID NO: 219277 - protein, 76 aa, Zea mays
  Clone ID: MRT4577_131572C.1.pep
GSLGVSPGCLARFLGWAQGLRGRRSDRRRHQFLAVSLTPPLIRSPPLIAPALLQSEREDTYHLKSKLVPGFSSARA

SEQ ID NO: 219278 - protein, 150 aa, Zea mays
  Clone ID: MRT4577_131573C.1.pep
MSKQKSVIRLGVPNDKNRSKAMQMASKFVGVNSVGIAGDAKDRLEVVGESVDITCMINLLRKKVCRADIVVVEEVKDKKKEEEEKKKKEEEEKKKKAEEEAKKKKEEEELKKKLCPYPYPPPPCSGACCRGPSPPMFLCEPEQPAGCHIM

SEQ ID NO: 219279 - protein, 185 aa, Zea mays
  Clone ID: MRT4577_131574C.1.pep
MDTTFITIHDLSDDAHILYSSDSIVDILGHTPDEVVNRSVWQFFHPDELPLAKAQHSRGVRLDKAAVLSYCRLKNRQGEWVGCECCFSVVYDVLVCCTSVYRHGMRSQKRAVEAPIVRKLFASSPKDPRYHMLSHLSTKFDLGHEDQTHEPRAALVLNRFTRTLTGMYATSGIEQIIGISSEAMK

SEQ ID NO: 219280 - protein, 64 aa, Zea mays
  Clone ID: MRT4577_131575C.1.pep
RVIHLGPPQKRQRTAGGTEEAGSEAQGVQRRVSPPPLPPSGPPPPQPPPPSGPPPPPPPGGNLP

SEQ ID NO: 219281 - protein, 85 aa, Zea mays
  Clone ID: MRT4577_131576C.1.pep
YQIVKTLGNFSVLFIDGSFSGDEATYTSPITAQPNGSYMAHSGPHIRTLLCLCRRGRALAPCSIALVASSSAWPPSSPGVAWPLF

SEQ ID NO: 219282 - protein, 93 aa, Zea mays
  unsure (1)..(93): unsure at all Xaa locations
  Clone ID: MRT4577_131577C.1.pep
SDETRGPHICLNPCSHFGVDVWTTRTPQAWRVSQLTSNLHTVFIHHDCTSSGNTRTCRPHSVKAPVTAPHVLLLTWCNIXRVRSGGKMTRLDT

SEQ ID NO: 219283 - protein, 115 aa, Zea mays
  Clone ID: MRT4577_131578C.1.pep
EVRRKWITSFLKPNTLLVFCSLDGSFSGDEATYTSPITAQPNGSYMAHSGPHTRTLLCLCRRCRALAPCSIALVASSSAWPASSPGVAVLTCCSSPCPLGELLTSCIFLAQACVI

SEQ ID NO: 219284 - protein, 223 aa, Zea mays
  Clone ID: MRT4577_131579C.1.pep
QGKLSNLYESLLGHNSLSGSIPATILKQRNLTILYLGKNSLRMVLPSDIGHTLPHLGALSLYNNMFYGPIPASLGNASILMILDLTANSFTGHVPSSLGNLTYLSLLQLEQNNLKANDNEGWEFIDALRKCQFLEKLLLSYNQLGGAIPNSVGKLSNNSLQYLRFGRNNLSGAVPESMGNLIALNTLDLEQNNLNGLIGSWVGKLNNLVRLSLSDNNFSGPIP

SEQ ID NO: 219285 - protein, 115 aa, Zea mays
  Clone ID: MRT4577_13157C.1.pep
LVVSPPRLIYRDGTCRLLRIPHRRVLLVVRNRRDALGRLARPPVHAAPCNNNDSRGAVEAPDRLVAAAAYLYPWVYRAHHCRWLVTHSPFCGGAPPHIDPRGSDLLIVVDETLYP

SEQ ID NO: 219286 - protein, 78 aa, Zea mays
  Clone ID: MRT4577_131580C.1.pep
AWCAARVGVVHRSPLISMVVCCSIYWPSALLDLHSADALQVSKDRPLSRIGFVRAGPAPSGMDEVPMGPMSLVACLCC

SEQ ID NO: 219287 - protein, 92 aa, Zea mays
  Clone ID: MRT4577_131581C.1.pep
KKPINMIALWSHQKVYHPCAINAAFAEFISTLIFVFAGQSSGMDISMLTRSCTTTPAGLISVAVAQTFALCEALSVSAIICIGQIHPFISFR

SEQ ID NO: 219288 - protein, 78 aa, Zea mays
  Clone ID: MRT4577_131582C.1.pep
SRFHFESWPCSRPDSYTRQRCVALLFMANLPRGGHVGTVGATRGVGNRPRALGDSTAAGPQRAHRPATSVVRSRARKR

SEQ ID NO: 219289 - protein, 101 aa, Zea mays
  Clone ID: MRT4577_131583C.1.pep
SSLAYLGLCKDALHVFERMLQQGIQPDSVAFLGVLSACSHAGLVEEGLHYFLMMARGYNIDPNSQHLACLGDLLGRAGRIQDAYNIGIKLSCENNADIGGA

SEQ ID NO: 219290 - protein, 76 aa, Zea mays
  Clone ID: MRT4577_131584C.1.pep
PPRCGPGCGRRWARASPPVRPACCSSRCWWPVRAACCWRRRRGSWPRLWALARRGGRVVSPRRAGPSPVGGRFFSL

SEQ ID NO: 219291 - protein, 97 aa, Zea mays
  Clone ID: MRT4577_131585C.1.pep
ATEDATDIGIHWDKCCMCYISLDDGKHQANSHSTGYYQCMRDEEEIGVVEYAREAATHRFYGAPEGIQQQLVDAATAMGGYINCGALRTTSLIHVEF

SEQ ID NO: 219292 - protein, 53 aa, Zea mays
  Clone ID: MRT4577_131586C.1.pep
FIQNGEKIRTFSSISIRNFFCKHMDRFGMLQDRYGMYSECFKLWGRVCLGGKC

SEQ ID NO: 219293 - protein, 64 aa, Zea mays
  Clone ID: MRT4577_131587C.1.pep
RTSSITIPTDWHRTAYTPPAPHRPNSEVPLISDDIFLLPISRLYRYGIYPHDLQFMSMALIIDR

SEQ ID NO: 219294 - protein, 207 aa, Zea mays
  Clone ID: MRT4577_131588C.1.pep
TAQEDKLLVEYVRHHGEGRWNSVAKLTGLKRSGKSCRLRWVNYLRPDLKRGKITPQEESVILQLHALWGNRWSTIARSLPGRTDNEIKNYWRTHFKKAKPSKNVERARARFLKQRREMQSQLLLLQGQDQHRQEEEQPDHDDDGASEATPGVPLEEEEEQQQQQHEDLRMMLQQDMDDLLFQFCPMASCTSSCPGGGSCAFVVSASA

SEQ ID NO: 219295 - protein, 65 aa, Zea mays
  Clone ID: MRT4577_131589C.1.pep
THVCVTAISASLIAIAWISLCIMSGIGIMQHRKLCNMINSGHESSRITAKCWWANVLVHKDHLIS

SEQ ID NO: 219296 - protein, 82 aa, Zea mays
  Clone ID: MRT4577_13158C.1.pep
WGLIPPFPAFFFFGPPPSPPIKGGSFVPSLSRGPIPSQPLGPAFFQKSPVLAFVRANASPGQKSPGENVFMVYPLEAKGLAF

SEQ ID NO: 219297 - protein, 146 aa, Zea mays
  Clone ID: MRT4577_131590C.1.pep
LFFFFFFSQVGGLTFSFLIFSYFFPTSEHCSHFNLMFLCFPALTSRTVVKGGGRTKRFFSDVLPYSFTQYFLVLSAPPQRPYACPEDKIPLISPPFVVAPLLDTFHVLASGSLGRHIGFSTQKMPSLPLVFVIRASHCGDSPKLSS

SEQ ID NO: 219298 - protein, 407 aa, Zea mays
  unsure (1)..(407): unsure at all Xaa locations
  Clone ID: MRT4577_131591C.1.pep
LGTAAKRKHGWPVTSFVLPWIRDAPAGSGKSSTDNVTRPPLLPVHDDRPAAGCSCSALRSVLANRFVAVASGPLACALLVCATAGGLGGHPAARNNMLGVLTWXWITDAVXLGVASLAPLFLFPAFGISXDVISFVLGSFILALAIEQYRYSIHRRLALNVRAPRSRVRTNLLLLGVCGTTVFISMWIHNNTPCTVMMVQYSGFVFGPTETNRPKGPDDVFFPYHRDAAAGRAVLCYTFHAMASSPLAPTRTCSPLVPKLPRRPSLPSPCRSPRRSARWPRLASVRATPGSSWTAAATEEQKERKRCLRCGGSYRDEENHPTACAFHGHVTGEKGLFSLSPPHQGIDGEWSDKSGIIVYRWNDEGSRPNTGRANWKRRWSCCQEREEDAPPCQRGWHVSYDDGYTLF

SEQ ID NO: 219299 - protein, 46 aa, Zea mays
  Clone ID: MRT4577_131592C.1.pep
IASIRFRLSKRYYSSRPGFFRSRVGLSINHQHRSWILTHPITGMCQ

SEQ ID NO: 219300 - protein, 54 aa, Zea mays
  Clone ID: MRT4577_131593C.1.pep
YLLSYALFLLPLLLFNSQVCLTKDKTTPMMDMIVINMKKKAVTFSQPPPVAGSG

SEQ ID NO: 219301 - protein, 84 aa, Zea mays
  Clone ID: MRT4577_131594C.1.pep
VHVHADPSLLLPFPIVSRRPRRRPTPQLPWWLGFPTNAPPSCTYLDHLLHLKHSCRRVEGRHEGDSGDSGLCGSVQSSHPQQPA

SEQ ID NO: 219302 - protein, 88 aa, Zea mays
  Clone ID: MRT4577_131595C.1.pep
VSKWRLTSPAAKMQEFVHSLSHLIHVFRTKLVCLAWKKWMNNLTKWISIQIHDLLLTNVNSRPLDCQWVTRQYFLVPKVVQQVGFTNL

SEQ ID NO: 219303 - protein, 114 aa, Zea mays
  Clone ID: MRT4577_131596C.1.pep
AVEVVHTDDEPVSSASAADAAAASSAHAFDLLYRRLQRTTGPGNQSNTKHDKDNSDGDARRTKCRPKLRKRKRPDDNHASAAAGREMTLHYSGGKQQRTQAGTPEEGHRTERKE

SEQ ID NO: 219304 - protein, 151 aa, Zea mays
  unsure (1)..(151): unsure at all Xaa locations
  Clone ID: MRT4577_131597C.1.pep
MVLLILRADRRVVFMFDRSAESPPLTTWHVRLMIRYTTVCVQKDRETSPHSVLYLLQLSDEPPSYLTXDLXSKYGCYTAGLSPNPDNIDKNHELXVIHSRXGMVCEIACVFHDMLVRKDVKFGKCVSIKDGSHIFTXGXLHYLNNASLIHA

SEQ ID NO: 219305 - protein, 257 aa, Zea mays
  Clone ID: MRT4577_131598C.1.pep
IHLRDSNSYMGQAAYISQHHSFENSYHIGFYVSVPEKLRWPVLVTAILASVVGSQAIITGTFSIIKQCSALSCFPGVKIVHTSSTVHGQIYIPEINWILMILCLAVTIGFNNTKHLANAQGLAVITVMLVTTCLMSLVIVLVWNKSIFIALGFLIFFGSIEVMYFSASLGKFHEGAWVPITLSFIFMVVMSVWHCGTIKKYEFDVQNKVSVNWLLNLGPSLGIVRVRGIGLIHTELMSGIPAIFSHFVTNLPAFHQV

SEQ ID NO: 219306 - protein, 144 aa, Zea mays
  Clone ID: MRT4577_131599C.1.pep
HAFEKKKGGAGTLEAGRAGHFFAALPLTLPPLPLPLYVTQSLTRTDPLPWSFSPSPMTDLSASYGVSTPRHLPVAMAGRRSTPVAILLTAAFVPISFVVRPIFDTHRSAAVELFNFSADGSFDELKQEDPCALKNKHTIDLPKH

SEQ ID NO: 219307 - protein, 296 aa, Zea mays
  Clone ID: MRT4577_13159C.1.pep
MRENPLTGVELTARVHGLEKAQEGVSKPGGPEHAEEKALACGSRSVEAPQCTYAKLGARRGTDELAPHVGERQNGRVWAARGKFPSGPKWVPKPSRQGQSDRSHFALSLTDLKGKQRRSPRSDCCATHRGETDNSRVLPRAQQEAPPRPTLGLGLGRRSPPRPTPGLGLSLGLGRIASSPDPSLGLRRSLRLARPWARTDRAMGDTSLPYPLASSGYEGTRPASHLARPGNSGSQPPTEERGRQQDPSSTDSCASIGLRHFSDGHVIAYPGLKHFSDNHVGMYTGLRHSSARHVSA

SEQ ID NO: 219308 - protein, 111 aa, Zea mays
  Clone ID: MRT4577_1315C.1.pep
ERPLLRLQPPSKSIRDKSPATIPVPVDKAPGSVIPAVASDMSLVSVDLSVVQFVFVVGQCVKVVLKKVMFIFVKTIFLLVSALLSATADEMLSLYGFLYVAYRFVNTFGVL

SEQ ID NO: 219309 - protein, 87 aa, Zea mays
  Clone ID: MRT4577_131600C.1.pep
LEGPRTLSWSDLCRLIQIMCMGGNLSTLNSRAVDLRSCGHKRVPVHTMADLILAVRCRSIGSQQKIPLRPNHFTKETLDLFAFNPQA

SEQ ID NO: 219310 - protein, 159 aa, Zea mays
  Clone ID: MRT4577_131601C.1.pep
EPLGLTVQEIKPDGHCLYRAVENQLSLHSNGAARYSYQDLRQMTAKYMREHAANFLPFYLAEGKADVGPDPMASFERYCEEMESTAAWGGQLELGALTHCLKKHIVVYSGSFPDVEMGKEYKSGPGGSGAGGASIRLSFHRHAYGLGEHYNSVVPAGSS

SEQ ID NO: 219311 - protein, 90 aa, Zea mays
  unsure (1)..(90): unsure at all Xaa locations
  Clone ID: MRT4577_131602C.1.pep
NPKYSIMKDLFKRARSDKIDKSVKDLVMFLFGLALLSSGFSLCDPNTFGSRIHCMLKLGLSIIXDHGPXAATHMPPVEGDAGQSKMEQVD

SEQ ID NO: 219312 - protein, 124 aa, Zea mays
  Clone ID: MRT4577_131603C.1.pep
GTRVSGRHRQAKEAFLLETRDHADRAVSHWPETRSVDPYGEPQRAGRYHSHWPLEGAAVSLGRGRAPALLHGVIGSRQIASSACGRTGGAYPHGASIEPVGPAAGDDGGRADVDAAGAPSRIGH

SEQ ID NO: 219313 - protein, 87 aa, Zea mays
  Clone ID: MRT4577_131604C.1.pep
MVLFLVPTTLGEEPIRVGEDRDKRPDDDEGLEDARTLTMNIDWTRNRHVQGVEPLPDDVSGEERPEEADRALALGEGPLVKRAIHLG

SEQ ID NO: 219314 - protein, 95 aa, Zea mays
  unsure (1)..(95): unsure at all Xaa locations
  Clone ID: MRT4577_131605C.1.pep
GWLHRRSSPMASGLHPVVLVFFGRVAFSCLCSNMGLCLLLLFLFALLLRKRLACCLDPKYHLARCSLERSFVGMGLCNIAXKKPQKKRRPPTVSS

SEQ ID NO: 219315 - protein, 153 aa, Zea mays
  Clone ID: MRT4577_131606C.1.pep
LNCFYFTKCLPFKPRTTAGSRTTLSDGQVVVVSQFRAPVAPRLQATRSNFHGASDVAKKGERKRRAATRTTMPGQPTPGLPRDLCPCAQYYLSMRVYDILCALLGCSVYARVDCDSETFRQRTQLSDFNKGPSGLNLSIRTLYKSKKKKKKAA

SEQ ID NO: 219316 - protein, 69 aa, Zea mays
  Clone ID: MRT4577_131607C.1.pep
LPSSLDRCEQARRQEPALPGHNGGAKEHRVFCTGKMVTASYRHSERQSKGGRTPEAATPERKPNICAHR

SEQ ID NO: 219317 - protein, 170 aa, Zea mays
  unsure (1)..(170): unsure at all Xaa locations
  Clone ID: MRT4577_131608C.1.pep
YQCAGFGSLGLMTSVLVCPDGKTIEAEAAHGTVTRHFRVHQKGGETSTNSIASIFAWTRGLAHRXTGVCFFTTFYNIIIXGGGGSFTASXRLGYSLNYAPXAKLDDNARLLDFALKLEAACVETVESGKMTKDLAILVHGSSSVTRSHYXNTEEFIDAVATELRSRLGAN

SEQ ID NO: 219318 - protein, 412 aa, Zea mays
  Clone ID: MRT4577_131609C.1.pep
MAFEKIKVSNPIVEMDGDEMTRVFWQSIKDKLILPFLDLDIKYYDLGILHREATDDKVTVEAAEATLKYNVAIKCATITPDETRVKEFNLKHMWKSPNGTIRNIINGTVFREPIICKNVPRLVPGWTKPICIGRHAFGDQYRATDAVLKGPGKLKLVFEGKEEQIDLEVFNFTGAGGVALSMYNTDESIRAFAEASMTTAYEKKWPLYLSTKNTILKKYDGRFKDIFQEVYEADWKSKFEAAGIWYEHRLIDDMVAYALKSEGGYVWACKNYDGDVQSDFLAQGFGSLGLMTSVLVCPDGKTIEAEAAHGTVTRHFRVHQKGGETSTNSIASIFAWTRGLAHRAKLDDNARLLDFALKLEAACVETVESGKMTKDLAILVHGSSSVTRSHYLNTEEFIDAVATELRSRLGAN

SEQ ID NO: 219319 - protein, 146 aa, Zea mays
  Clone ID: MRT4577_13160C.1.pep
MTTSLKKNRKKRGHVSAGHGRIGKHRKHPGGRGNAGGMHHHRILFDKYHPGYFGKVGMRYFHRLRNKFHCPSVNVERLWSMVPAGKAAEAVGADQAPLVDVTQFGYFKVLGKGMLPSRPIVVKAKLISKVAEKKIKAAGGAVLLTA

SEQ ID NO: 219320 - protein, 57 aa, Zea mays
  unsure (1)..(57): unsure at all Xaa locations
  Clone ID: MRT4577_131610C.1.pep
NKMKETGVMDLAKKGLKPPSRFNVGFXQNLKNNEGGVYIVYNPNNGGLLKITSFIVA

SEQ ID NO: 219321 - protein, 69 aa, Zea mays
  Clone ID: MRT4577_131611C.1.pep
NGPRSARLFGLATVAPSADLARLVTGSRSKGELSDSDALCVNRREMGTEIEARSNDYIRVCTKIQNGLL

SEQ ID NO: 219322 - protein, 130 aa, Zea mays
  unsure (1)..(130): unsure at all Xaa locations
  Clone ID: MRT4577_131612C.1.pep
PAWCXDGDGXARGXWRAKGCLXPPGRSGEXXPFXEXGESDLIXECLAGXXMWAACVSHNWMDAGGLWVCALLGLGCCAVKXXXGTGXLXGLSCVXLXVLCSGLVGCARGGWVSAXGGGXSXXGCKRXCQK

SEQ ID NO: 219323 - protein, 97 aa, Zea mays
  Clone ID: MRT4577_131613C.1.pep
DFLVGQLNFIGPCKVDVTIQVDGNTVASTDLRQYKDHGNWIEILCVDNLVLIGKGRLDGTGPAVLRKISCTKKYDCKILPNSLVMDFVNKWDVSGVT

SEQ ID NO: 219324 - protein, 191 aa, Zea mays
  unsure (1)..(191): unsure at all Xaa locations
  Clone ID: MRT4577_131614C.1.pep
LLNVEDTYVLSAAYRNVLECERAACRMISSMEQTKLDAGNERXTTLIRDYRGEIXIRLTLICHACTTVCIETVFVXPASTRPRSQGPLSPTEGDYYTYLAXEVKSGPDTQDAADNKCGYSCQLAXLTXSTPLLVGLHYFQVYYNSTXDXACSLAKQAXFDEAISELDTXLSEESYKDXTLIMQLLRDNCTY

SEQ ID NO: 219325 - protein, 172 aa, Zea mays
  Clone ID: MRT4577_131615C.1.pep
MSSLRPSLLLVVSLLAAALLAAAPSSASRDLRPLQASFVVRGRVWCDNCRAGFETPASTYIAGAKVRVDCKSKTTGANTCSFEGHTDRTGTYNILVIDEHEHELCESVLVSSPDKGCANVVAGRERAPVFLTSNNGVASNVRLANALGFQKDVALPRCAQILKMYQDEDDRV

SEQ ID NO: 219326 - protein, 70 aa, Zea mays
  Clone ID: MRT4577_131616C.1.pep
ATVQGRSDSKFQSTLGGASGLFPQLSIFMLNMLCPSGLCFTHLIWHDLQCMCSPLYENRFFVPVQDNRLC

SEQ ID NO: 219327 - protein, 141 aa, Zea mays
  unsure (1)..(141): unsure at all Xaa locations
  Clone ID: MRT4577_131617C.1.pep
RAWRWGRGRPGRGCRGGRRRRRWCPLPGGRGGGRGPRPAGAGSPSPGPASAPWASXPPPGASGACRAGPWRCRRRRGRPRPGGGGRAGPSRRPCRXWCWCGAGSPSPCPPGPGRPCPAAGRRGAAXXPSPCACVAAGAQTV

SEQ ID NO: 219328 - protein, 230 aa, Zea mays
  unsure (1)..(230): unsure at all Xaa locations
  Clone ID: MRT4577_131618C.1.pep
LQVALIFPTDESVLKDDLSTIRNDSPLLLTKTFMHRSSSTPCLSPSGKDLQQQKDRGCPIELLVCPSRCSRTRQLVKDVARAIKKGVDPVPIKSGLGGAYYFRNSKGENAAIVKPNDEEPFAPNNPKGFIGKSLGQPGLKRSVRIGETCFREVAAYLLDYDNSANVPPTLLVKISHPVFHMNEDINFANKNIADGSIQAVSKTASXQQFIPHDFDASDHGTSSFPVSAVH

SEQ ID NO: 219329 - protein, 138 aa, Zea mays
  unsure (1)..(138): unsure at all Xaa locations
  Clone ID: MRT4577_131619C.1.pep
MRECISIDIGDGGIQVGNEXWELYXTRXDIQEDXQENGDESIGGGDECFNNFYXERRGKARAPRGLXVDIDATVIDEVITNVYSEIFHAEYVISDXEDHGRQLXRGHYKRGKETGDLCLCCIRKMDDDCTVLQDFVVF

SEQ ID NO: 219330 - protein, 146 aa, Zea mays
  Clone ID: MRT4577_13161C.1.pep
MSTHQANTLRLYLTCIRNTLEAAMCLQNFPCQEVERHNKPEVIHRTSPELLLNPVLICRNEAEKCLIETSINSIRISMKVKQADELENILAKKFLRFLSMRAEAFQVLRRKPVQVSNLTLITLSSVLCTKHELPVRHRDTSLWTAG

SEQ ID NO: 219331 - protein, 84 aa, Zea mays
  unsure (1)..(84): unsure at all Xaa locations
  Clone ID: MRT4577_131620C.1.pep
CLQFNKDGXFIFRENSTSPXHCDSRYWTMCHLPMFGCNDATHVYNDLQEDIKSYPDAFHRVIAFHNINXTHCVNFISYKPPVSN

SEQ ID NO: 219332 - protein, 384 aa, Zea mays
  Clone ID: MRT4577_131621C.1.pep
GKDWPPSSSFDQRLPRHGAEFISALPFPEYTDPRYGPLNLTVKLPDGALKPDLGPKTYIAYGFYQELGRGDSVTKLHCDMSDAVNILTHTAQVPYARYQLEKIEETRKKMKEQDLQELYGVSELNLSSPFTDSRNISADEMSKTSCLDVNDVPPVNTESEVQSGAGQCSDYIDKDRSYAGMHNGERTGGALWDIFRREDSDKIQDYLRKHATEFRHIFCNPVKQVIHPIHDQTFYLTEEHKRKLKEEYGVEPWTFEQKLGEAVFIPAGCPHQVRNLKSCIKVAMDFVSPESVNECMKLTGEFRRLPPDHRAKEDKLEIKKIALHALNQVVNFLDPSSEWSKSWFAQPKNKKKAGAEEQEKPKRKRGRPCRKSNDEAAGDRHRKK

SEQ ID NO: 219333 - protein, 117 aa, Zea mays
  Clone ID: MRT4577_131622C.1.pep
RGREGGTRMPDKRRNLHHIEMMELLLVKWAARCRSSTAAASSSERSLPQGTEPAEPSGSSGTGTDRSQCASDGDCEDDHYRVSATEHPSTDAARERAPASARDFRVHKSVIYPTSLT

SEQ ID NO: 219334 - protein, 95 aa, Zea mays
  Clone ID: MRT4577_131623C.1.pep
SGRKKEIKKAHDQFHGGGPSGRGGQLTLPISRLNKSYEPGGLTPHDQFHWPSFLPRKNNSLGHEKSTDPNRGGGRASYPTYTGEGPRLSLLREDP

SEQ ID NO: 219335 - protein, 94 aa, Zea mays
  Clone ID: MRT4577_131624C.1.pep
SRINSKFDLMYAKRAFVHWYVGEGMEEGDSPGARGALPALEKDYEEVAAEGAQPHLEGQGSSCGEGFVRPPRGSRVGCQKTSLEDWPPGPWFGI

SEQ ID NO: 219336 - protein, 40 aa, Zea mays
  Clone ID: MRT4577_131625C.1.pep
ELAEECYFFFLWVQNSLAIVRSGSKDSRFISAPRCDEVVD

SEQ ID NO: 219337 - protein, 65 aa, Zea mays
  Clone ID: MRT4577_131626C.1.pep
TCEEDLWYGGILASEDRSSASSITHSHSGYQLVTPQVSGSLDTRPTVRPRPPLPTRGRPGFRRLS

SEQ ID NO: 219338 - protein, 390 aa, Zea mays
  Clone ID: MRT4577_131627C.1.pep
MTGSGSTGANGKSQSSRAKAMLLALGKSFPDQVLPQEKVVESYLQESSCDDPATRAKLQRLCTTTTVKTRYTVMSKELLDKHPELKMEGTPTLTPRLDICNAAVIDLGAAAARAALDEWGRPAADITHLIYISSSDLRLPGGDLHLAARLGLSPNTVRTSLLFLGCSGGAAALRTAKDIAENNPGSRVLVTAAETTVLGFRPPSYDRPYDLVGAALFGDGASAVIIGAGPMTPAENPFLELEFSTQEFLPGTDKVIDGKISEEGINFKLGRDLPEKIESRIEGFCRTLMNQVGIKDFNDIFWAVHPGGPAILNRLEFCLKLQPEKLKISRKALMNYGNVSSNTIFYVLEYLRDELKKGAISEEWGLILAFGPGITFEGLLVRGVKKTFTS

SEQ ID NO: 219339 - protein, 65 aa, Zea mays
  unsure (1)..(65): unsure at all Xaa locations
  Clone ID: MRT4577_131628C.1.pep
AVVVIPTVLFVLLSPGLLIYLPALGRIVGFGTMDIIGLDILVLSVIRFAHISIXVIATGVHIHCG

SEQ ID NO: 219340 - protein, 89 aa, Zea mays
  Clone ID: MRT4577_131629C.1.pep
TLQKTGKKKGHRWPYKKNPEKPCFPIGGRTPFFLTPQWGFPYRQEKIFLFFYAPLESFFPKTLSGKSGKKKLLRGGPRALFFPKPGNAG

SEQ ID NO: 219341 - protein, 59 aa, Zea mays
  unsure (1)..(59): unsure at all Xaa locations
  Clone ID: MRT4577_13162C.1.pep
DSLFSLFPPPPLANDSNRTKPPVSRCSACTSITRARWDLPSAHPPVXGIPRTSGKLSRS

SEQ ID NO: 219342 - protein, 209 aa, Zea mays
  Clone ID: MRT4577_131630C.1.pep
MPPKRKSPATIAPAAGSPRKTRSMVAAAAAGKRATEPAPAKAVPAKKEDEAAVAELKGRKRGKKEAEAVTVATEPKGRKRDKKEAEAVTVATEPKGRKRGKKEAEAVAPAAEEEDGVDVAAGAKRVIVEACTQCRQFKIRAQKVKEDLESYVSGVSVIINPQKPRRGCLEIREEGGEVFISLLNMPRPFTPMKKLDMDKVIKDIAKKIS

SEQ ID NO: 219343 - protein, 42 aa, Zea mays
  Clone ID: MRT4577_131631C.1.pep
NSARGSTLTGHKQQSQRVRLTLGGDSAPPSSLDRGGEHILLP

SEQ ID NO: 219344 - protein, 93 aa, Zea mays
  Clone ID: MRT4577_131632C.1.pep
HAYGCEWLQQSAGTHPARRDRRPVPPSPESESDGADRGAAEHVLLQLPVQAHLRIRSGQVLLHQLRPQLLRTRQRLHRLHRPLSQARHSEHVQ

SEQ ID NO: 219345 - protein, 105 aa, Zea mays
  Clone ID: MRT4577_131633C.1.pep
KNKRKDYNNIIYTHIKYRESIYYITGVRVQHLILHNWEAQYPPTNKFMDFPPALAPPSSRNSKTQLFHHLQQHGFENPEYGVYFRKSYPTKEKTSQGNAGLWDSR

SEQ ID NO: 219346 - protein, 413 aa, Zea mays
  Clone ID: MRT4577_131634C.1.pep
LRSYASILYLMLPDNFQMILRGKKIDHHNIINDLMLKKQLTYNPTVGDGLPKDMHVAAKVTIGFVKDARQHIDIQGFNVYHKNRLIKPFWRVWTSAGVAGRGIIGVLEVNFVEPAHDKQDFERTNCLARLEARLNRMQKKYWSDNRHRIGYGTNDASTDSVKRKTGLSLRPFGQGSWKSGYLQTIRSDGRSCSNTTNNIMNASMSSPETSKLSGPNREFSSTTVCQHRAEKSANTIRSERSVLHGLSNTDGGKTETANAPSKSTSPILRTSLPPTPNEGKRSERIAAKYQSKQVNATTNGDRESIVDPEAIIKKLKEENSSLKERILMVQESLSRELQIERDKNKSLTERFEDVERQLELAIKEQEATVELFAEERKCHDQEVENLKRKLTEASSTIQDLMEQLNAARSCCKR

SEQ ID NO: 219347 - protein, 142 aa, Zea mays
  unsure (1)..(142): unsure at all Xaa locations
  Clone ID: MRT4577_131635C.1.pep
YTHRAIRSILYLTTVATKILSLCALRALYVSSSHAFIIPQCSLAPSAIIPQLLPTVTSMSFEHPTVQAFXLQQALATSLXQHPIAQLQQHSLAHLTIQTIATHQRQQFLPALSQLXLSEPCLXLQQHILAFNPLSLANIGAY

SEQ ID NO: 219348 - protein, 65 aa, Zea mays
  Clone ID: MRT4577_131636C.1.pep
SSLFGGRPTIIFGGSIFRPVRATHEARPAVWVPFVSRFYYPRALGDSMSGCPGAPDSSPNFVTNA

SEQ ID NO: 219349 - protein, 42 aa, Zea mays
  Clone ID: MRT4577_131637C.1.pep
QRWQIGQGAAGGSIVWLPLLYTIGTYVLVGRVRREARPCPKS

SEQ ID NO: 219350 - protein, 148 aa, Zea mays
  unsure (1)..(148): unsure at all Xaa locations
  Clone ID: MRT4577_131638C.1.pep
MYTTLTKDMAKFATLAAVFGVLLVAAAASRTGRDCYDQVRRGEMLSHCQDFLDEVSDTGRCYRDXGKQRTRRHERXRQLEQCCDQLSEMDQECMCEGLKEIVKEQVRQSPRSFGRQSTQDEEEVVECARKLPQMCRMGQSCYQIRVHY

SEQ ID NO: 219351 - protein, 73 aa, Zea mays
  Clone ID: MRT4577_131639C.1.pep
MPPTDPLSIGGSKGSGRVPSAGGDGFFDRSLHENFDPHCHKLTFPNYDGESDTLPRLTKYEIYFHGMRKLAEE

SEQ ID NO: 219352 - protein, 146 aa, Zea mays
  Clone ID: MRT4577_13163C.1.pep
MTTSLKKNRKKRGHVSAGHGRIGKHRKHPGGRGNAGGMHHHRILFDKYHPGYFGKVGMRYFHRLRNKFHCPSVNVERLWSMVPAGKAAEAAGADQAPLVDVTQFGYFKVLGKGMLPSRPIVVKAKLISKVAEKKIKAAGGAVLLTA

SEQ ID NO: 219353 - protein, 53 aa, Zea mays
  unsure (1)..(53): unsure at all Xaa locations
  Clone ID: MRT4577_131640C.1.pep
AVKFAELITKIDRRXSGKELEKXPKFLRPVYAGMVKIIPPKPMVVKTFSAYPP

SEQ ID NO: 219354 - protein, 117 aa, Zea mays
  Clone ID: MRT4577_131641C.1.pep
GPPTQGSQQKWTFLLTIISKHFFPNQLIYMVPIWDGGFSEKFISQGNPTNLSYIGENFLPITLQLACLGAQSSIKITFQKILLGGFKTQNPWNGLIKKNMLICHAWEKMFKVKKTKK

SEQ ID NO: 219355 - protein, 92 aa, Zea mays
  Clone ID: MRT4577_131642C.1.pep
KIFNTNCAQCLTFDKGAVHKQGPNLNGFFVRQSFTTVIFSFFFGNKNKAVVCEEDTFVEFLFNPKKYIPGTKMCFPWLMKSYVRVYLILYLL

SEQ ID NO: 219356 - protein, 45 aa, Zea mays
  unsure (1)..(45): unsure at all Xaa locations
  Clone ID: MRT4577_131644C.1.pep
GFFTKDVHVSLSHSLFKIRSSFLRYDQPLEMGSXNNXYWGGGGDV

SEQ ID NO: 219357 - protein, 114 aa, Zea mays
  unsure (1)..(114): unsure at all Xaa locations
  Clone ID: MRT4577_131645C.1.pep
VVLVQRPIHNGVNAQTYYKKHAHQRLIPTYFIEGDHVNLMVSPMNGVSTLKAKGKLVPLYIVRFLILEKCCPESYRLQIPXELLXAHNAFHVSKLKKCLERQQHTIENSDGTTE

SEQ ID NO: 219358 - protein, 1055 aa, Zea mays
  unsure (1)..(1055): unsure at all Xaa locations
  Clone ID: MRT4577_131646C.1.pep
MQSMESLAQLEVLCEKLYNSRDSAERAHAESTLKCFSENSEYISQCQYILDNASTPYALMLASSSLLKQVSDRSLSLMLRLDIRNYVINYLGTRGPKLQNFVIVSLIQLVCRITKFGWFDDDRFRETVKEATDFLGLASQDHYFIGLKILNNLVTEMNQPNPAMPLTLHRKIAGSFKDQFLLQIFQISLTSLNQLKSEAPDDFGHIPLDLALKCLSFDFVGSPVDESSEEFGTVQLPASWRPLLQDPSTLQIFFDYYKVNDIRVSKEALECLVRLASVRRSIFVEDPARSQFLSHLMLGTKEILLTGQGLADHDNYHEFCRLXGRFKVNYQLAELLNVEFYGEWIGLVAEFTTRSLLSWQWASNSVYYLLSLWSRLVTSVPYLKGETPSLLDETVPKITEGFITSRINSVQAILADNSLENPLDSVEVLQDQLEFLPFLCRFQYQSSSLYIINIMEPLLQAYTERSRLPAPGDADELSVIEGQIAWMVHIIAAIVKVRQVTGVSQETQELIDAELSARVLQLISVTDTGAHTQRYQELSKQRLDRAILIFVQSFRRSYVGDQAMHSSKLYGRLSELLGLNDHLILLNVIVGKIATNMKCYAESEDVIDHTLSLFLDLATGYMTGKLLLKLESVKFIIANHSPENFPFLAEYKCSRSRTTFYYILGSLVFREDSRPPISTFMEGLQQVALNLEATPDAAFRTDVAKRAFVGWMRDLRGIAMATNSRKTYGLLFDWLYPSRMPLLLRAISLCTDEPEVTTPLLKFTYEFVLNKAQRLTFDSSSPNGILLFREVSKIIVAYGSRILLLPNGTDIYGSKYKGIWISLTVLSRALCGNYVNFGVFELYGDRALADALDISLKMTLSVPLSDILAFKKLSKAYFGYMEVLFNNHIKFVLNLDTNTFIHIVSSLESGLKGLDAGISSQCASAIDNLAAFYFNNITSGDSPPSPASVNLARHIGECPNLFPQILKTLFEIMLFEDAGNQWSLSRPILSLIMTSEQMFSELRAHILASQTVDQQQRLSQCFDKLMTDVNRNLEPKNRDRFTQNLTAFRRDFRLK

SEQ ID NO: 219359 - protein, 137 aa, Zea mays
  Clone ID: MRT4577_131647C.1.pep
QDLIGWTPPLYLSLTPPGRGPLDCRDPSPSREDSHADPAGPPACDDADPGDAAAADALGARLEAAGAVLGGLPGEDRAPGPHAGGGLPVRVHPPVVPSAGAGSPGASLALAGAARGKELSRREENVLHVWLWKTGSR

SEQ ID NO: 219360 - protein, 129 aa, Zea mays
  Clone ID: MRT4577_131648C.1.pep
SRPAVACRSACEAFGTPQYCCSGAYGNPSTCRPSTYSQFFKNACPRAYSYAYDDSTSTFTCATGIGYAITFCPSTTSGKYSGENPQAASSATGTMVYLGDEQLATGASATATRASQLLVAAAAAAVALL

SEQ ID NO: 219361 - protein, 64 aa, Zea mays
  Clone ID: MRT4577_131649C.1.pep
VSLGILVFKIRKVIPLHFFFIRKFTSSFALKNDKMGKLGHVSFPLSIFNFGANWLKPKYPAGIV

SEQ ID NO: 219362 - protein, 52 aa, Zea mays
  Clone ID: MRT4577_13164C.1.pep
PKPKLSIRPFLFYINLINLCYPKNVRYKQIPTFASTNPHQSYKTPILPPLIF

SEQ ID NO: 219363 - protein, 115 aa, Zea mays
  Clone ID: MRT4577_131650C.1.pep
LASLWSHGHGRRTPFSLVESYRCPRHAGRGVTEQRHIRLLPRAIFTRRRTSASSEERDCGGGGGGHEELRRSGRRGGGAGGELLAAEVDHRAGSRRGGLRVLAGVLPAGWCSSRR

SEQ ID NO: 219364 - protein, 128 aa, Zea mays
  Clone ID: MRT4577_131651C.1.pep
PRVPKKKKKKKKKKKKKKKKKKKKKKKKKKKKKRGGRSFWMRILTSRTACCASVLSFFCLAPTYNLIGLGRFFTIVTGWNLPWAPPYLLWLAVPLLSAGGIARGQARMVLPSNCSPFLVGDWHPPCGV

SEQ ID NO: 219365 - protein, 147 aa, Zea mays
  Clone ID: MRT4577_131652C.1.pep
PHGAAPKKRPRKTNTWWVNQPPVEKKFLARKLGQANPLRGVPSPPAGKKPPPGGIYFFFRGTAKNPRPTQKIYPPPGGKRKNFWPPPPWQSGKGRPRPFNYFSAQKRGGKPWGARKNQKCAGGREKKPGGPRKKKTEARGPLFCHPP

SEQ ID NO: 219366 - protein, 73 aa, Zea mays
  unsure (1)..(73): unsure at all Xaa locations
  Clone ID: MRT4577_131653C.1.pep
PRDNAEIAESLVKRXNLKTLETGLSAKGPRARDFVWGPAPRMPRAPKRPEDRAKKDNPRPAKFSWIFKRKPVV

SEQ ID NO: 219367 - protein, 59 aa, Zea mays
  Clone ID: MRT4577_131654C.1.pep
FAKKIFGERVGPPPKKKGPFSKKKKKKKKKKKKKKKKKPKKKKKKKKKKKSKKKKKKAA

SEQ ID NO: 219368 - protein, 79 aa, Zea mays
  unsure (1)..(79): unsure at all Xaa locations
  Clone ID: MRT4577_131655C.1.pep
AALDCSGATLYTRYLCLLYCHAALFTTEXHPRDESSAPESQRVLMLPSDIAAPLTPSQKTGATSSYIEQREQTGXSFFL

SEQ ID NO: 219369 - protein, 112 aa, Zea mays
  Clone ID: MRT4577_131656C.1.pep
HGYQEAPVLGGEEKQRVQHGEAPAARGVEDVLVGGEMIDADAASVASHSVSRRLGGLDRISSLSARHQYQWMAMVSGAELSSVCSASSPASCSESAIYSIDGPSGGFRATRI

SEQ ID NO: 219370 - protein, 81 aa, Zea mays
  unsure (1)..(81): unsure at all Xaa locations
  Clone ID: MRT4577_131657C.1.pep
INRFGRICTLLSRVALQSXHFQLLTFNDPFITTYYMTYMFTFDTVHXHWKHNHMTLNDSXTLLFTDKPVTVFGIKNPDYIP

SEQ ID NO: 219371 - protein, 100 aa, Zea mays
  Clone ID: MRT4577_131658C.1.pep
HLLRNPALPRYAIFREFISAWKSHFGCQSDTLAREFTTSDFYPGHHFHLSTEISFPLSMNNPEERLADAGSKNSAAVPREGKERCELQPKSTRNGSLYSN

SEQ ID NO: 219372 - protein, 116 aa, Zea mays
  Clone ID: MRT4577_131659C.1.pep
QNPIRVCKFIHLRGNVWGADVPCCNRSMFPPGGVRPCCKVRPVRAYPSYLAAGGFWEWGPPTCFNTTPEHCPAGAWLIYQLTQGIICWGCLGQSNLTKWCLKTRDKYHLLYQRNFG

SEQ ID NO: 219373 - protein, 199 aa, Zea mays
  Clone ID: MRT4577_13165C.1.pep
SNGSASNVIRRKLVIIGDGACGKTSLLSVFTLGYFPTHYIPTVFENYVTDCRVDGKSVQLALWDTAGQEDYERLRPLAYSKAHVILIGFSVDTPDSLDNVKHKWIEEATRLCEGVPIILVGLKKDLRDDPVAIEEMRKKSQRFVTAHDGEGVAREIGAKRYLECSSLSGEGVDDVFEAATRAALLTFEKGETTGCCVVL

SEQ ID NO: 219374 - protein, 70 aa, Zea mays
  unsure (1)..(70): unsure at all Xaa locations
  Clone ID: MRT4577_131660C.1.pep
VSLPAGSSGRFAGCLLFWPSVVCRCALRLFFLAVPVGCALALFRTFFPAGXVVRLGVVVKCIPARSRGSA

SEQ ID NO: 219375 - protein, 439 aa, Zea mays
  Clone ID: MRT4577_131661C.1.pep
MAAATTAGAGAATPQPPRQYKLAPQSELRVEVLPDAPLRVRLVTGTAEIFGTELPPEGWVPVPPRSKIAIFTWHGATVELDGVSESEYTSDETPMVIYVNTHAILDARRARARTAAAQGGDKEASQGPRVIVVGPTDSGKSTLCKMLLSWAAKLGWKPTYVDLDIGQGSITIPGCISATPIEKPIDIIDGIPLEMPLVYFYGHPNPSINADVYKVLMKELAKTLEKQFSGNAESRAAGMVINTMGWVEGLGYELLLNAIETFKANVVLVLGQEKLWKMLKDAVQSKSNIDVVKLHKSEGVVLRNSKYRQRTRSFRIKEYFYGIANDLAPHSNIVNFSDVSVYKIGGGHQAPRSALPIGAEPVADPTRLVAVNISTDMIHTVLAISYAKEPEEIISSNVAGFIHVTDVDIQRKKLTYIAPCPGDLPSRLLIASSLTWYEA

SEQ ID NO: 219376 - protein, 164 aa, Zea mays
  Clone ID: MRT4577_131662C.1.pep
FGTRRVTALPVLIHNFFVPIPPPTPTLRTNQPPSPSRDRWLPCLCAHSSPGPKPAPSGAVGNCWEGRSTGGASASGSPYRRRRGSDGIRYRMTSLLNSLFHGFILLGRAYALVPCFVARIILLGCAYALACACSMFVDWINVWRGKIVSLLFGLRYGALGLLLD

SEQ ID NO: 219377 - protein, 82 aa, Zea mays
  unsure (1)..(82): unsure at all Xaa locations
  Clone ID: MRT4577_131663C.1.pep
EHEGRGDRRNRLFQVIXPQNQQGGXALMDTRRPPAPPGTHVGYYICSIVIATTIAALPELNSGFFKKKLSKIGLLVKAKYCY

SEQ ID NO: 219378 - protein, 63 aa, Zea mays
  Clone ID: MRT4577_131664C.1.pep
HSSTAFSWHAFLQVAERALFLWNNEHLFDMISQNRQVILPIIYPALERNTRWHWNQSVLNVTM

SEQ ID NO: 219379 - protein, 38 aa, Zea mays
  unsure (1)..(38): unsure at all Xaa locations
  Clone ID: MRT4577_131665C.1.pep
AGGQQKDFRNNIYMINEAHRLYCTLASDHAXVITKILL

SEQ ID NO: 219380 - protein, 176 aa, Zea mays
  unsure (1)..(176): unsure at all Xaa locations
  Clone ID: MRT4577_131666C.1.pep
FICCLLFAIETKGGKGKKGGHESDGYGDEENVSTSDQPYDKYLEETPQMSDVPGEHMTEDSAGDMGRGRVRGRGRGGRGRGRGYHQQNNNQHHQHYQNSSHHSNSSSTRXWEPHRHXHPVMIEQQQQQQAAQPQPLTAANKQPPGPRMPDGSRGFSMGRGKPQTLTPRVSESEPEQ

SEQ ID NO: 219381 - protein, 81 aa, Zea mays
  unsure (1)..(81): unsure at all Xaa locations
  Clone ID: MRT4577_131667C.1.pep
QKPARXXVXSDXCIKXXXXEXKXRLRLRXLXRWRRAGGNVKFHAEVEXYQSCASXPSSFXCGVXHFRXPXIAXLRFCAQRH

SEQ ID NO: 219382 - protein, 469 aa, Zea mays
  unsure (1)..(469): unsure at all Xaa locations
  Clone ID: MRT4577_131668C.1.pep
MSQQEAVDPPSATDERLGGLPRSGSTSRLNAQAPEFVPRAAAVPPPPPQQKVVRLFAPPPHAAFFVAAPRPPPPPFEYYAAVATGGGGRFGPPAAAAEQEAEAEQPPRDGSFDDPVPKIRKQVEYYFSDINLATTEHLMRFISKDPEGYVPISVVAGFKKIKALVQSNSMLASALRTSSKLVVSDDGARVKREQPFTESDLEELQARIVVAENLPDDHCYQNLMRLFSVVGSVRTIRTCYPQTPNGTGPATNRSAKLDMLFANKLHAFVEYDTIEDAARAIVELNDERNWRSGLRVRLLSTCMTKGGKGKKGGHESDGYGDEENVSTSDQPYDKYLEETPQMSDVPGEHMTEDSAGDMGRGRVRGRGRGGRGRGRGYHQQNNNQHHQHYQNSSHHSNSSSTRXWEPHRHXHPVMIEQQQQQQAAQPQPLTAANKQPPGPRMPDGSRGFSMGRGKPQTLTPKVSESEPEQ

SEQ ID NO: 219383 - protein, 66 aa, Zea mays
  Clone ID: MRT4577_131669C.1.pep
GPLISIHWPFFNNLVTGKTLAYPNLFPLNNIPFSPVGLIKKRPPPIAFPKICPPLMANGTPLLPPL

SEQ ID NO: 219384 - protein, 81 aa, Zea mays
  Clone ID: MRT4577_13166C.1.pep
ISWKGRQNTIGGFDRSTSCKYVSENKKVLWVYRRLKGCFLPQTQWDHFFLWTSNFWGFGYSNQRLFCNELSRIMDPTIVIS

SEQ ID NO: 219385 - protein, 97 aa, Zea mays
  Clone ID: MRT4577_131670C.1.pep
SSCSVQCRPKGSKHFLPPKRLGAKNLGQFEPWASTVVVAQLGFEPCLICRLLLQKVGCVDSLVLLPNTSDWALRGPTLGLFLGSSVNPSIPSTDSPS

SEQ ID NO: 219386 - protein, 115 aa, Zea mays
  Clone ID: MRT4577_131671C.1.pep
LLRAKLAGLRRAYRDVSIVYVDYYAEVTGIVGAPARNGFAPATALDACCGGGGFHNANWTGRCSEPGAVQCADPSRYVSWDGLHMTEAVYRIMARGVLDGPFAHPPIMSGRCKKE

SEQ ID NO: 219387 - protein, 767 aa, Zea mays
  Clone ID: MRT4577_131672C.1.pep
MVVGTALLRGVSSAWILLFLSSLLLSPSAASVDFGHCGGCDDADDGALSSTYNILQCQKVSDFLIAAAYFSIPLELLYFATCSDLFPLKWIVLQFGAFIVLCGLTHLITVFTYEPHSFHLVLALTVAKFLTALVSFATAITLLTLIPQLLRVKVRENFLMNKARELDREVGRMKRKEEASWHVRMLTQEIRKSLDRHTILYTTMVELSKALELQNCAVWMPDETRSTMILTHQLRERDIMDPQKHSIPIDDPDVQEIKATKDAKVLGPDSALGVSSRSKHEAGPVAAIRMPMLRVSNFKGGTPEVMQTSYAILVLVLPNDGSLGWGRRELEIVEVVADQVAVALSHAALLEESQLMREKLAEQHRDLLQAKDEAMRAGDARNSFQTAMYDGMRRPMHSILGLVSMMQQESMNPEQRLVMDAIAKTSSVASTLMNDVMQTSTMNCEHLSLVRRPFNLHSFIKEVVGVVRCLTGCKGVEFEFQVENSLPERIIGDEKRVFHIVLHMVGTLTDRCNAGCISLYVNVHNEVEDRHNHDWMLRRANFSGGYVCVKFEIRIRKSKGYLLSSSSSQISQGSKPNNSEMGLSFNMCKKIVQMMNGNIWSVSDSKSIGETIMLVLQFQLEPVTPVSGASSDLYRSSAIPNFNGLRVLLADSDCTNRAVTHRLLEKLGCRVLSVASGVQCISSFAAESSFQLVVLDLDMQTMDGFEVARAIRKFSSNSWLPLIIALAARIDDNIRDRCQRSGVNGLIQKPVTLAALGDELYRVLQNN

SEQ ID NO: 219388 - protein, 91 aa, Zea mays
  Clone ID: MRT4577_131673C.1.pep
LGTSRPAGIIPSGRARSLFLPPLLVATIGGSRCRRTPGAQIFFMPFSSDEYQKVRPSLGLLFLLCENEHANPNLLLFIFGSDLLRVYMHVS

SEQ ID NO: 219389 - protein, 920 aa, Zea mays
  unsure (1)..(920): unsure at all Xaa locations
  Clone ID: MRT4577_131674C.1.pep
MVVGTAPWRGXVSSVWILLLLSSLLLSPSAASVDFGHCGGCDDADDGALSSTYNILQCQKVSDFLIAAAYFSIPLELLYFATXSDLFPLKWIVLQFGAFIVLCGLTHLITVFTYEPHSFHLVLALTVAKFLTALVSFATAITLLTLIPQLLRVKVRENFLMNKARELDREVGRMKRKEEASWHVRMLTQEIRKSLDRHTILYTTMVELSKALELQNCAVWMPDETRSTMILTHQLRERDIMDPQKHSIPIDDPDVQEIKATKDAKVLGPDSALGVSSRSKHEAGPVAAIRMPMLRVSNFKGGTPEVMQTSYAILVLVLPNDGSLGWGRRELEIVEVVADQVAVALSHAALLEESQLMREKLAEQHRDLLQAKDEAMRAGDARNSFQTAMYDGMRRPMHSILGLVSMMQQESMNPEQRLVMDAIAKTSSVASTLMNDVMQTSTMNCEHLSLVRRPFNLHSFIKEVVGVVRCLTGCKGVEFEFQVENSLPERIIGDEKRVFHIVLHMVGTLTDRCNAGCISLYVNVHNEVEDRHNHDWMLRRANFSGGYVCVKFEIRIRKSKGYLLSSSSSQISQGSKPNNSEMGLSFNMCKKIVQXIKIIEYLKHLYPQIFLYSXTSSLDLAVTXSLLYTNXLPNYRMCLVAIVWPFCASAWNIYYLTSNWAYXGHIGPYVELTFXHNYFYGISSVVCVTCIDIFNWYACSSPNLSDSIXVMFWFAICSSSCGSGQCILDLMCNHXVLTDTSPPLCXMMNGNIWSVSDSKSIGETIMLVLQFQLEPVTPVSGASSDLYRSSAIPNFNGLRVLLADSDCTNRAVTHRLLEKLGCRVLSVASGVQCISSFAAESSFQLVVLDLDMQTMDGFEVARAIRKFSSNSWLPLIIALAARIDDNIRDRCQRSGVNGLIQKPVTLAALGDELYRVLQNN

SEQ ID NO: 219390 - protein, 62 aa, Zea mays
  Clone ID: MRT4577_131675C.1.pep
YDTDSIRRRRVRKPSAESVRSPGPLHAPDHATRCVVSVAADRHPRRRATVATWRTRSTRCGA

SEQ ID NO: 219391 - protein, 92 aa, Zea mays
  Clone ID: MRT4577_131676C.1.pep
AIFYGLQQSERGFTFKIIRAWMYWMEDAFQVEQDVQILDQVFSDNPGVIDVSLNCIEVTYLSVPLCESISFPTKRGEKAAQKNMFSFVFSSP

SEQ ID NO: 219392 - protein, 96 aa, Zea mays
  Clone ID: MRT4577_131677C.1.pep
SIFYTIPRITGSHEVPVRSTLRERVHSRAGHAARAVSSRLRTQSRTGVNPSTTSKYLSARFMLKYKLNVWFRLRTASDVRACGGPQIRAMLLQHNA

SEQ ID NO: 219393 - protein, 116 aa, Zea mays
  Clone ID: MRT4577_131678C.1.pep
SMLLRAPKPPANSFSTTNPRSPASPSGTSLPSSFPTANCFQPPAGDATATVAADGKSSGRRTETDRTPMRVSWWVGSEDACAVPFAMDRQTVTGVENRGQEHAAVAAHATVDSWVG

SEQ ID NO: 219394 - protein, 115 aa, Zea mays
  Clone ID: MRT4577_131679C.1.pep
RPGNHRTIMDGSWMSACSLSCCRCWSTVLCIAADVVNVGHAKPLTPAWGVVHHYHGKLTLGTWKPAHMTFYEQHLVLTHLVAGAGTYDTRAYSYGVQTVNVSTVLYHRLLGLRRM

SEQ ID NO: 219395 - protein, 278 aa, Zea mays
  unsure (1)..(278): unsure at all Xaa locations
  Clone ID: MRT4577_13167C.1.pep
SATRPFPPDAAPXPCPRAGATPAPXADAALLPGGLRAESLPRHVAVVMDGNSRWARARGLPSAAGHEAGRRALEEVVRLSRAWGVRTLTAFAFSHENWSRPKVEVEFLMGQFEREVRESLSEFLREGIRLRVIGDSSRLPVSLQRTARXAEEATRNNSQLDLALAISYSGRRDIVQACRXVAQKKSDNLLEPEDIDESLFAGELETSHSNANGNELPYPDLVIRTSGELRLSNFLLWQSAYAELFFTDTLWPDFGEADYLQALVSFQSRDRRFGVRKL

SEQ ID NO: 219396 - protein, 33 aa, Zea mays
  Clone ID: MRT4577_131680C.1.pep
SDRHIGRWKLYGSGCVSIPHQMRLMLRYRAGTM

SEQ ID NO: 219397 - protein, 43 aa, Zea mays
  Clone ID: MRT4577_131681C.1.pep
VVTLASILSATLTLEVSSLILDVCSIAISPEYPRKAAADNLYS

SEQ ID NO: 219398 - protein, 151 aa, Zea mays
  Clone ID: MRT4577_131682C.1.pep
QAFFFFFFFFFSFFFFFFFFFFFFFTRPGGRPGRDPSKTGASGWENPILQPYRNQQGIAAGILPLSPLVPQQSSALLQQVPLGHLLAQNIRGQQPQKLGLAKPGAYSQKQKFLPFKQIGSLNSGSYLQQQQLPFSQLPGGYPQQFFPFNPL

SEQ ID NO: 219399 - protein, 44 aa, Zea mays
  Clone ID: MRT4577_131683C.1.pep
SRNGAEVSCPRRMLPNVGGSYRADGGQPSSGLIEKARAPAREPA

SEQ ID NO: 219400 - protein, 172 aa, Zea mays
  Clone ID: MRT4577_131684C.1.pep
SGRLRGCALALLSLSLQEQYSHPMPTATGRAVARGPEEHGPTREVEIGITHIKYIYIGTLPAPPHLCKAARAITLFSAGMGLPRTHIGSAGEGELTGRAAATRRPSPTSRPPAITEGVAPAGHSFIVSRSLFLLLSWPGDTCGRDDPGQNFFCLAFWGRGVLASAAPPGFCL

SEQ ID NO: 219401 - protein, 82 aa, Zea mays
  Clone ID: MRT4577_131685C.1.pep
KKKNPGLTLGGLGKQQRQGAGTIQNSDTGVYLDKKKKQPQNCFEYYRGRGSLPNQTLGHDPTLKTTSPTKSSPTRGVWLEKG

SEQ ID NO: 219402 - protein, 255 aa, Zea mays
  unsure (1)..(255): unsure at all Xaa locations
  Clone ID: MRT4577_131686C.1.pep
GRTVRCQAAAAAVEEVDEQKIAEAIKXEVEEQPRQVKLVFGEDIRWAQVPASCSMAQLREAVRSKFPGLKAVLVKYKDKEGDLVTITNQDELKWAEELAEAGSSLRLYVTEADPEHEPYVDDTNMERNVNSNSDNRTIRRNRGDEDRSTVTCIDDWIVQFARLFKNHVGISSDEYLDLHEVSMKLYTEAIEDTITTEEAQEVFHLAEGNFQEMAALAFFHWGNVHMSRARKRLLLSGDSPSELVLEQVKEAYEWA

SEQ ID NO: 219403 - protein, 207 aa, Zea mays
  Clone ID: MRT4577_131687C.1.pep
MYKAGGGKPSLEPIPSTPLGSSCDSICLSIVPCPDDEDNYVLADLSVGRDLGHYDLHVYSSKTHQWSTKPLQLPESPAVRTNDDLPCQFNKVLVLGANEFGWVDLWRGIVTCKVLDNDPVLRLIPLPKPEINNPHVIGGDVEFIRDVTYRNGIFKFIEIDNFCIPAIARDETSNIISKTMQHFDSNDIIHDSELIYPVLQRDLYCPW

SEQ ID NO: 219404 - protein, 129 aa, Zea mays
  Clone ID: MRT4577_131688C.1.pep
PGAGRIGKHRKHPGGCGNPGGMPPPRILFDKYHPGYFGKGGMGYFPKLPNKFFCPPVNIKRLWLMGPPKKGGETGGAKAPQIDVPQLGYFKGLGKGGFPPKPIVVKAKFFSKVPKKKIKAPGGAVVLPP

SEQ ID NO: 219405 - protein, 726 aa, Zea mays
  unsure (1)..(726): unsure at all Xaa locations
  Clone ID: MRT4577_131689C.1.pep
MAAARESLPCPLLLLSCCSTPRAAAATKTLKVTFYPLAPPPPPPGAMADTVQYRLERMTDELDDLERRGLFTRGELADVVRKRRDFEYRLRRHSPLRQDFLDYIAYELCLDSLRNLRKRAIIRAAAEDDEEEPQHDARSSDDEGGRRKRKDKSKKKWKKSVSXDVAGVLRVLDIYRMATVRFKGDLDLWFRYLEFCRDKRHGRMKQVLAQAIRFHPKVPGLWIYAAAWEFDQNLNVAAARALMQSGLRSCPQSEDMWIEYLRMELTYLNKLKARKVALGEDVKTLQKKDNDASQWKEENKELFMPLNEQVKDPKEPGSAGDALEEKEDLFWRQGLLIIQTIYHGAVEALPSSLTLRKKFLEILNSVDLAHSDELKLEVLDDLKRDFSHSEDYWDWFARLQLSNLNSSSNSNRKDAISNKLNRSIQVYDEAIRKLPNSKMYSLYAKFWMDVIYTDREDXSHYSRILNLMLXFTSSILKVYENAESCGCLTEDLACQYISLYLKLERLEEAKTLAEKLCDGPLSNAANLWSLRFTMEINSIATAPGSSSLSKENLSSLLDLFSTVLSKLSVTEAERLWHMAMKLFSHDKVCFEKLVKCAMLSLSLAGGSDSGASVSSAIVGWYLQRDGVKHARKMYKRLLALPRPSLKFMQYCIALEANLASLGDNGALKDARRLYDSALDLYPQEREVWRSYYDLELKMGTSESANAVYSRARKVLGDSTALTAPRG

SEQ ID NO: 219406 - protein, 174 aa, Zea mays
  Clone ID: MRT4577_13168C.1.pep
PEGVQSFFFFFFFFFFFFFFFFFFFKHKHPLTTKKMHRPGRRAKANTSTRGGGGTEPDPKPNLGKTKAKAGAKGKSVPNHKHKKNTNRKQKSQSRRSQKRNQTNRNGLTPTAPFQKRKPPAPLKKRKTPTHRERRYGKRAPFPFHGHEPPGLGRAAGGSGSIKRKGGDTRIHRG

SEQ ID NO: 219407 - protein, 417 aa, Zea mays
  Clone ID: MRT4577_131690C.1.pep
MAPPSLPRLGPAAAPGPGHGARPENDLVEEPEELAGEAPEQQSVAMRLMVLVMTIVLVVSIATTAQEKMKPWKETSRSSKITMSSRHGLAATPSRLPVKAAFIYVSFSHFDLLWLVLDTLHESPSSPSYPSALLSVRFAVPWPEIESVRSCSPVLPLEAPPAPPLGAPAYGVADGGDPDDGGGDDSSSHDTDFSADQEPEGWVARPITRDAARGCHFHDALDTLLRRALNQRTWSIEYCCVVYQHSRGVYPDRWEATCLVRRPENSLQGAEVCSEHYSISERDSAEAAMQDAAQRALSHYCSVLGGVADGLNLKYYPHRPSGSTGGVIVSPVGEDNPRLSSTVNLAVVLNTELDHALNELSRARAEIALLRAERAERRHLDDGSPAPVGTQHLYRSPRRGRQSYGNPDCKTKINLEP

SEQ ID NO: 219408 - protein, 33 aa, Zea mays
  Clone ID: MRT4577_131691C.1.pep
MEQLKHHRHSITTTSTNCCNNMQQLIKRVGRTR

SEQ ID NO: 219409 - protein, 362 aa, Zea mays
  Clone ID: MRT4577_131692C.1.pep
MKLWKETSRSSKTTTSSRCGLAATPQSAACEGRVIYVSFLHFDLLWLDLDTLHESQSSPSYPPALLSVRFAVPWLDSPATWRDYTTACEIESVRSCSPVLPLEPPPAPPLGAPASGVAAGGDPDDGDGDDSSSHDTDFSANPEPEGWVARPITRDAARGCHFHDALDTLLRRAFDRHTWSVEYRCVVYQHSRGVYPDRWEATCLVRCPENSLQGAEACSEHYSISERDSAEAAMQDAARRALSHYCSVFGGAADGLDLKYYPRRPSGSTGGVIVSPVGEGNPRLSSTVNLAAVLNTELDQALDELSRARAEIALLRAECAERRHLDGGSPAPVGTQHLYRSPQRGHQSYGNPDCKTKITLEP

SEQ ID NO: 219410 - protein, 287 aa, Zea mays
  Clone ID: MRT4577_131693C.1.pep
MRLMVLVMIMVLVRGILSVWKGYIGLITWVNVKTWLSTTSGVAAGGDPDDGGGDDSSSHDTDFSANPEPEGWVARPITRDAARGCHFHDALDTLLRRAFDRHTWSVEYRCVVYQHSRGVYPDRWEATCLVRCPENSLQGAEACSEHYSISERDSAEAAMQDAARRALSHYCSVFGGAADGLDLKYYPRRSSGSTGGVIVSPVGEGNPRLSSTVNLAAVLNTELYHALDELSRARAEIALLRAERAERRHLDGGSPAPVGTQHPYRSPQRGHQSYGNPACKTKINLEP

SEQ ID NO: 219411 - protein, 42 aa, Zea mays
  Clone ID: MRT4577_131694C.1.pep
MAHKIITIKMRAMRSFQSSNLPKRFCHCQAPEHALPIHHIDL

SEQ ID NO: 219412 - protein, 324 aa, Zea mays
  Clone ID: MRT4577_131695C.1.pep
MARLRHTARKSVIPFLPSRLAERPLRRPVAGQSSHLERLHHRLHEEQERRRQEQEQQDSSFSLQQEIESVRSCSPVLPLEAPPAPPQGAPAPGVAAGGDPDDRGGDDSSSHDTDFSANHELEGWFARSITRDAARGCHFHDALDTLLRRALNRHTWSIEYRCVVYQHCRGIYPDRWEATCLVRRPENSLQGAEACSEHYSISERDSAEAAMQDAARRALSHYCSVFGGVADGGVIVSPVGEGNPRLSSTVNLAAVLNTELDHALDELSRARAEIARLRAERAERRHLEDGSPAPVGTQHLYRSPQRGHQSYGNPDCKTKITLEP

SEQ ID NO: 219413 - protein, 146 aa, Zea mays
  Clone ID: MRT4577_131696C.1.pep
RNDSEGRLDTKEPAGARRAPVRSPLTGWDEESVLLAAMVVEDTPVCESRRKRRASTSSVGGSAGSSTRKRRPRRQSPAKILPVVFAIDDEKSDTAADGKSEVKAGKEEEKPVLVGDKEASDSGEKAVAAANMSCMDRLREELSCAE

SEQ ID NO: 219414 - protein, 149 aa, Zea mays
  Clone ID: MRT4577_131697C.1.pep
GAEVCSEHYSISKRDSAEAAMQDAARRALSHYCLVLGGVADGLNMKYYPRRPSGSTGGVIVSPVGEDNPRLSSTVNLAAMLNTELDHALDELSRARAEIAQLRAERAERRHLDDGSPAPIRTQHPYRSPRRGHQSYGNTDCKTKINLEP

SEQ ID NO: 219415 - protein, 346 aa, Zea mays
  Clone ID: MRT4577_131698C.1.pep
MVLVMIMVLMARLRHTARKSVIPFLPSRLAERPLRRPVAGQSSHLERLHHRLHEEQERRRQEQQGSSFSLQQEIESVRSCSPVLPLEAPPAPPLGAPASGVAAGGDPDDGGGDDSSSHDIDFSANHEPEGWVARPITRDAARGCHFHDALDTLLRRALNRRTWSIEYCCVVYQHSRGIYPDRWEATCLVRRPENSLQGAEACSEHYSISERDSAEAAMQDAARRALSHYCSVLGGVADGLDLKYYPRRPSGSTGGVIVSLVGEDNPRLSSTVNLAVVLNTELDHALDELSRARAEIALLRAERAERRHLDDGSPAPVGTQHLYRSPRRGRQSYGNPDCKTKINLEP

SEQ ID NO: 219416 - protein, 388 aa, Zea mays
  unsure (1)..(388): unsure at all Xaa locations
  Clone ID: MRT4577_131699C.1.pep
AAAVWVEVVSIATTAXXKMKLWKETSRSSKTTTSSRCGLAATPSRLPVKAAMARLRHTARKSVIPFLPSRLAERPLRRPVAGQSSHLERLHHRLREEQERRRQEQQGSSFSLHQEIESVRSCSPVLPLEPPPAPPLGAPASGVAAGGDPDDGDGDDSSSHDTDFSANPEPEGWVARPITRDAARGCHFHDALDTLLRRAFDRHTWSVEYRCVVYQHSRGVYLDRWEATCLVRCPEDSLQGAEACSEHYSISERDSAEAAMQDAARRALSHYCSVFGGAADGLDLKYNPRRPSGSTGGVIVSPVGEGNPRLSSTVNLAAVLNTELDHALDELSRARAEIALLRAERAERRHLDGGSPAPVGTQHPYRSPQRGHQSYGNPACKTKITLES

SEQ ID NO: 219417 - protein, 211 aa, Zea mays
  Clone ID: MRT4577_13169C.1.pep
NDNAGIRETRATWVGVSWAESELELAATGSRALVPGSLLVLPSWAKLEDAAARRQRGNVAMEEPWARRGSNLEAEPQQGRKLHWRAGKTPSRGARTQPRHRDNRRENGRSMTREGPQPRIEEKGDWASRKGRASSTRGLDAKRHGRSERAGESRVRGGRRTQRAGRRAAGDIAGSAELSKGQRGKRTGAADRGTDQEEGGLRRLGGRLPGR

SEQ ID NO: 219418 - protein, 60 aa, Zea mays
  unsure (1)..(60): unsure at all Xaa locations
  Clone ID: MRT4577_1316C.1.pep
GSPDPCVLSFSLLAPNLWGLFIRVCLPGYLSLIKKPEXCLGVCQTSSPRKSFTNIKVQVR

SEQ ID NO: 219419 - protein, 103 aa, Zea mays
  Clone ID: MRT4577_131700C.1.pep
TTATPPPRGSDLGRRCRPVLVDAPRIVSHPGDGAGGWISNIIVTSYIKFVEAAGARVIPLGYDEPKDRLLEVCVLRERAAIVLSWTLCRTRLPSRRQRRRSRR

SEQ ID NO: 219420 - protein, 467 aa, Zea mays
  Clone ID: MRT4577_131701C.1.pep
MVSASPDPRALTQPRLRKTVSASPDPRARTQPRPRKTVSASPDPRARTQPRLRKTVSASPDPRARTQPRPRRSHHLARPRARTDHVTGGAIITLPLASSGYGEQDQRPIWLAPVKQVAMRLMVLVMTMVLMARLRHTPRKSVIPFLPSCLAERPLRRPVAGQSSHLERLHHRLHEEHERRRQEQQGSSFSLQQEIESVRSCSPVLPLEAPPAPPLGAPASGVAAGGDPDDGGGDDSSSHDTDFSADQEPEGWVARPITRDAARGCHFHDALDTLLRRALNRRTWSIEYRCVVYQHSHGVYPDRWEATCLVRRPENSLQGAEVCSEHYSISERDSAEAAMQDAARRALSHYCSVLGGVADGLNLKYYPHRPSGSTGGVIVSPVGEDNPRLSSTVNLAAVLNTELDHALDELSRARAEIALLRAERAEHRHLEDGSPAPVGTQHPYRSPRRGHQSYGNPDCKTKINVEP

SEQ ID NO: 219421 - protein, 99 aa, Zea mays
  unsure (1)..(99): unsure at all Xaa locations
  Clone ID: MRT4577_131702C.1.pep
GAWLGGSQPEEKRKEVGRPPAKYCCFWELSKGILEIAKFGVLVSVAVGVTYLVAPGSKTLKKVMGLRPYVVFPPXGPRPPPPKKMREKAREISRKRHQN

SEQ ID NO: 219422 - protein, 63 aa, Zea mays
  Clone ID: MRT4577_131703C.1.pep
VTYITHGLTAMCAAIPYIYCAPCAALRSHQIVLHYLTQLTLSKAHYYTRPLHRIHSMGILTPM

SEQ ID NO: 219423 - protein, 79 aa, Zea mays
  Clone ID: MRT4577_131704C.1.pep
KQKNPSFFFAPHFQSFTSFAPKIPLALNKTPYIRVNSQPQQPKFFSPNPALFYSNLIFLFGFKLYPLPPPYKNFLNKWV

SEQ ID NO: 219424 - protein, 72 aa, Zea mays
  unsure (1)..(72): unsure at all Xaa locations
  Clone ID: MRT4577_131705C.1.pep
VLFRKKYYGKVAYFLSFGVTXLSIMPGGSYPFENSEDPMNFPXTISIILCVQYFIPDYVRVSLYCIPLFSYI

SEQ ID NO: 219425 - protein, 106 aa, Zea mays
  Clone ID: MRT4577_131706C.1.pep
ELPAGRHACGRHHQPRVWRWSAGELFELVFERSAADREPTGSTASRRFPWLQNSVESCESYTQTQLHLLLVITHRADSTGARTLDGGWWRGVRDRRDAMHEDHPGG

SEQ ID NO: 219426 - protein, 87 aa, Zea mays
  Clone ID: MRT4577_131707C.1.pep
PRHGARLQGTGGRHGRRRRIRVPGRAQLLRVRAGAGAHQGARVWRHPAGQRANLQRWQRAVDRLDYVVSSLGIEHTCAPGILHDCHQ

SEQ ID NO: 219427 - protein, 134 aa, Zea mays
  Clone ID: MRT4577_131708C.1.pep
RGRGPPGHGGGGGAQSPPPRGGVWPPGPPGFPRFFFPPFQKPQAPCPLSLFGVPPLKIYGVVFPRFPFWGAPPPPGAPFFFCPKKFFFLPPLQKKIKRSAPFSPPLCPACFFLSPQAPSFFCARTKVCARIMHK

SEQ ID NO: 219428 - protein, 109 aa, Zea mays
  unsure (1)..(109): unsure at all Xaa locations
  Clone ID: MRT4577_131709C.1.pep
GAGKERHRVCGKGERXKPHREGASADNIQGXITKAXIRRAXARRGXVKRIXSGVIYEGEPRKCSRSLLENGIRXDAATYTEHASHRTVTAMDAVDALKGQGRPLYGFGC

SEQ ID NO: 219429 - protein, 98 aa, Zea mays
  Clone ID: MRT4577_13170C.1.pep
GPGQRVIRFTQLTGLSPQKFTTGGKGSLETQPTGFGKKHKNLLGPGPCLGKRKPRGEGGGHLKQHVLENGAKDSQFSLKGFLKRAPPVVKEGGNGFSL

SEQ ID NO: 219430 - protein, 110 aa, Zea mays
  Clone ID: MRT4577_131710C.1.pep
KAWEILSHPTSRADYDKQLQSSRQNIEIIAFEVQVGDMIIESPADADTVELSYPCRCGDYFSITSCELSGMGISVSGDGDGKVKLQASDFPSASVVLGCGSCSLKIRLVL

SEQ ID NO: 219431 - protein, 493 aa, Zea mays
  Clone ID: MRT4577_131711C.1.pep
MEGGEGSGFDGAHMKKRRSSAVRRPRPEGGPAAVQRDNGSPPPLSVTSRSAPRSLLLTSDENATGPDGGNRRREFLLNAPSPERATKGSIRLRSEAAAGGSRKSDGSSHAPEGNREKLGKVKLKIRNVLPKPNPDTSPVKPPRPVDSRHQQKHGHLKEGTKDSDRPTSSRDKKARKERSIQETMAHVQADKFQREPTSDPVRKSRRLAKKSVDNEFDEDFGTSNLGTPEDWDGTRESKSKGSGSKKSASRKGKNRSKVYGADNDFVTSRSGKKRSRESADDDNTEEEPTSDSEPDVEDTEQKTTATESPVNIRSEPLTTRRRALQSWMDGSSISTVEFPDGLPPAPSRSKKDKLSEEEMLAKKAEAAQRRRMQVEKATKESEAEAIRKILGIDSEKKKEERKQKERGEKERASRAQNMAANSIRWVMGPTGTVISFPHAVGLPSIFDSKPHSYPPPREKCAGPSCTNDYKYRHSKLNLPLCSLKCYKAVQGNA

SEQ ID NO: 219432 - protein, 121 aa, Zea mays
  Clone ID: MRT4577_131712C.1.pep
VGLVSLSFPYVQPRCGVCSRGVKSGGSSAVFTAECSHAFHFPCIAAHARSSSANGVLSCPVCASPWRQAPFLASLRLHCSFHDDKHRGGGDGRKTSPLAKLYDDDEPLLAPKATANGGGFN

SEQ ID NO: 219433 - protein, 484 aa, Zea mays
  unsure (1)..(484): unsure at all Xaa locations
  Clone ID: MRT4577_131713C.1.pep
MALSSEIRFGHQIPLSHCDTDSYEEEEEEEGEEEEDEEEEFEGEEEEEEMDEVTVSSPLMLPATEARGGVSVVEMVTGALRRSLMLCSSSAGAGVREPEQEEDGATPPGGMQIGGPTDVRHVSHVTFDRFVGFLGLPADLEPDVPRPVPSASVSVFGVSPTSMQCSYDRRGNSVPTILLTMQKKLYSLGGLQAEGIFRINADNSQELYVRDQLNRGIVPDGVDLHCLAGLMKAWFRELPSGVLDSLTPEQVMHCNTEEECSHLASTLPPVEAALLEWAISLMADVVENESYNKMDARNITMATGPNMTKMADPLTALIQAVQVMNFLKTLILRTVKEREEAAKVARAFPSRSCSPSDRDAPRPVQQLDMXSSAQASEXCRVSXVDEAKFVQFLFRVEVALHHDPQGGTDGPKNHDSGGGYQRSNSEITPLDTGLTGQNEFSNNSEEGLFDKFKFRKGVGRLCRHPVFQLSRSMKKSDEAEQACV

SEQ ID NO: 219434 - protein, 68 aa, Zea mays
  Clone ID: MRT4577_131714C.1.pep
YVSHLTIMCQPILNNYHEQRPSSVVCLHQATHSLNCANAFSETSLYGMRFITWAPNNVRPGICCKFQC

SEQ ID NO: 219435 - protein, 55 aa, Zea mays
  Clone ID: MRT4577_131715C.1.pep
RPPSQKRHGKKKKPGPTLSTPLQTTNRAPQTARFSSWAAPGSLAAARGILVRFGG

SEQ ID NO: 219436 - protein, 39 aa, Zea mays
  Clone ID: MRT4577_131716C.1.pep
PLLVKGPISPPMVPLPPNLTNSGGGGFQFSQRLGKPNLA

SEQ ID NO: 219437 - protein, 48 aa, Zea mays
  Clone ID: MRT4577_131717C.1.pep
VAVAVAVEWAHGHAGEDRVHVVVTEDYKVAWSGENHLCWLTFYSIFDA

SEQ ID NO: 219438 - protein, 142 aa, Zea mays
  Clone ID: MRT4577_131718C.1.pep
FAGYFPNRPSIARTNMPVEEPVDATALAAFLDNPDQALRECFPSQVQATLVMAVLDLLSTHSPDEEYLGGMETAPWNDDAPVQDAYGKFNARLKEIEGIMDERNKDRRLKNRCGAGILPYQLMKPFSQPGVTGMGIPNSTSI

SEQ ID NO: 219439 - protein, 93 aa, Zea mays
  Clone ID: MRT4577_131719C.1.pep
QRNTHPKWPLLWAALPAFSDSPPTSFAAATVLLRSALTRPISTGFRRDPTTLGPFQVPTAKLGGPQTQKSLQNFDIGGNRKRMPVPIIRAFGV

SEQ ID NO: 219440 - protein, 61 aa, Zea mays
  Clone ID: MRT4577_13171C.1.pep
QAHSLRYSASSEVPAMLLNHVSIDVTCEMLRGTTLEADMEKKNAMTVHMKLVKKNSTHNFF

SEQ ID NO: 219441 - protein, 72 aa, Zea mays
  Clone ID: MRT4577_131720C.1.pep
LPFNYLSGPPCSIMKNHDCRLRNQNAKPGGKTQPALSGRRVALGSGRRPRAPESWSGRSGCPRRATARCWPA

SEQ ID NO: 219442 - protein, 48 aa, Zea mays
  Clone ID: MRT4577_131721C.1.pep
PPLTKGTNGGAHGFPPFITIYLAPPLETKFYTGGFHKRADQGGGSTPS

SEQ ID NO: 219443 - protein, 206 aa, Zea mays
  Clone ID: MRT4577_131722C.1.pep
MGDDKPWADMVAKDDQQLGDGKSTHDVGITEQNESSKHASKLEYRTPSSSQESRTHQRPVMGGQLQGSSAGSWRRSDSKIYMDKNVNWDLVRTAPTWSRHKVHDHNNRVWQRLDTIHPRERASSTKQVPRRSNTSQRALFPDWKSKDEGYGHGYVPFDDNEHTQCSSHIEATHRWHNNEASTGSWRPQNRLRVFQEITNEINQNVV

SEQ ID NO: 219444 - protein, 93 aa, Zea mays
  Clone ID: MRT4577_131723C.1.pep
NRAVRRFSELKALNSKTGSILRHAGSRIRSPAGHGARAITTGFTSTPAEYQMNTSVGVSALIPVSLEPVDRSSRLVSSPRAGTLAARRMCALP

SEQ ID NO: 219445 - protein, 81 aa, Zea mays
  Clone ID: MRT4577_131724C.1.pep
GTPAAAVTTSPLLPPGKQPCDPTPSPFCFWRRTCMRGTIIGYYKRPQQCLTLDRGRMPCSPQPFDCVVSWLLDIIPVYMSA

SEQ ID NO: 219446 - protein, 106 aa, Zea mays
  Clone ID: MRT4577_131725C.1.pep
MCGLKGMKKGMVDHHAQPCTQAWDQLNSVQEAAQEGLAMERRGPLIHPSVYDYGDQSNCWLVTAPEFVRLRSLSTNVHIPYDDERQSLSINVHTFIHNLISHGLLR

SEQ ID NO: 219447 - protein, 80 aa, Zea mays
  unsure (1)..(80): unsure at all Xaa locations
  Clone ID: MRT4577_131726C.1.pep
GSLRFSGGAIATADVTYRYFIVCLASAISNDSFENTLCSYSHFFDCNFITYRXTYRFLFYHFLTYCFENSMLEAIENING

SEQ ID NO: 219448 - protein, 65 aa, Zea mays
  Clone ID: MRT4577_131727C.1.pep
EESTYGASRHFRNKGGSHITTAISRCVVRSCTTLWDARTCGGYPLYHHNIIWYPPIIQRCPVLRA

SEQ ID NO: 219449 - protein, 142 aa, Zea mays
  Clone ID: MRT4577_131728C.1.pep
PGKYMAFFLMFPGDVVPKDVNPPVAPLKAKRPLPFVDWCPPGFKWGIKFQAPTVVPGAALPKVQRSVCMISNSPSVVGVFFPLNNKFGLMFPKRAFVPWFVGEGMEEGEFFEAPEGLAPLGKDFEGVPPEGGRYYGGEEGEY

SEQ ID NO: 219450 - protein, 79 aa, Zea mays
  unsure (1)..(79): unsure at all Xaa locations
  Clone ID: MRT4577_131729C.1.pep
MVLFLANTTSVDESGKQHFLDASVAYKRVVLNDIEYLARFGYSKEXRISGIVDSPYAVSTLDIPSTRFDQDDMEQWWQH

SEQ ID NO: 219451 - protein, 46 aa, Zea mays
  Clone ID: MRT4577_13172C.1.pep
FGIVPVFPDPFDPRSKSAKRINAQLDSHGDGGGAVPSGIYGRAPVG

SEQ ID NO: 219452 - protein, 34 aa, Zea mays
  Clone ID: MRT4577_131730C.1.pep
QKTGHRTLRIEEFEGQPISMNERTANHTGASMKH

SEQ ID NO: 219453 - protein, 206 aa, Zea mays
  Clone ID: MRT4577_131731C.1.pep
MLAKFASLALFVSAALAAPHKAASPVISASATTISDALHTTVFDGHTITFIESTFSPEPTESLKTTVYDGHTITYVDSTYVPEPTESLKTTVFDGHTITFVESTFRPEPTGDLHTTVFDGHTITFVESTFSPEPTESLKTTVFDGHTITFVESTFRPEPTGDLHTTVYDGHTITFVESTYVPEPTETLKTTVFDGHTITFVESTFS

SEQ ID NO: 219454 - protein, 53 aa, Zea mays
  Clone ID: MRT4577_131732C.1.pep
GQRLSHLPALNLCSWIPSCRPLPRAVQHPLAFRPLPWRQGIACSLLRPICNAT

SEQ ID NO: 219455 - protein, 323 aa, Zea mays
  Clone ID: MRT4577_131733C.1.pep
MSASRPDHRRRHPPFLRDLSSPISSSFRLPPASMRREAQASTPPPPPPLLSLDDLSHLSPSRQPATPPQATTTPSPQPPRGAVLFSSPLRSNGSPGPSAWWTPSREENPREGSPMDGVVQYQQQSPTTPSGQQSQQQKVALITLPPPREVARPEMPRDSAPAAGRVDEEEWVTVFGFFPGDTNMVLREFEKCGIVLRHVLGPRDANWVHILYQSRHDAQKALAKHGQQLNSVLIIGVKPVDPWQLQYLNENTNENYQGSATATFTSQPVAPSGFATRNALAPLPSNTLTNGSCNDSSNLGASGAVASPTKSVLSKVMDLMFGL

SEQ ID NO: 219456 - protein, 298 aa, Zea mays
  Clone ID: MRT4577_131734C.1.pep
MSAELKRDYEIGEEIGRGRFGVVHRCTSRATGEALAVKSVDRSRLGDDLDRELAQLEPKLAQLAGAGNPGVVQVHAAYEDEAWTHVVMDLCPGPDLLEWVGRRRGAPVPEPVAAAIVAQVAQALALCHRRGVAHRDVKPENILIDADDDAGSDEEDQAEAAPRARLADFGSAAWVGAGGLGRAEGLVGTPHYVAPEVVAGGEYGAKADVWSAGVVMYALLSGGALPFGGDSAAEVLAAVLRGSARFPPRLFGGVSPAAKDLMRRMICRDEWRRFTAEQVLAHPWIVSGGGARAMERPT

SEQ ID NO: 219457 - protein, 70 aa, Zea mays
  unsure (1)..(70): unsure at all Xaa locations
  Clone ID: MRT4577_131735C.1.pep
RGSARXPXRLFGGVSPAAKDLMRRMICRDEWRRFTAEQVLGEFFRSFPRQPLSSSCSVDLISPCSSMQFI

SEQ ID NO: 219458 - protein, 80 aa, Zea mays
  Clone ID: MRT4577_131736C.1.pep
RWSPSEKKKFKLSKLTCREGIVKVPKIIYGVHAQAKNKPFELELSWICDESTPQHQKVPNKLLEHAKTVAQVVFEEMDAA

SEQ ID NO: 219459 - protein, 80 aa, Zea mays
  Clone ID: MRT4577_131737C.1.pep
QSKNAPRNYDRSLEGAGLAVLIYLATGKMVRKWDHPRDDKKEENEEERTCWRADLSLDFKVDVGSALCGLLVLHAGSRHS

SEQ ID NO: 219460 - protein, 387 aa, Zea mays
  Clone ID: MRT4577_131738C.1.pep
GAEAPLHGALLPGFPCVGAEASMYASLPKLQSAQDSNTFIPLGSMVLGGFSPLLEFDAAFPWHRFHPWPTPLPLLPSSLCSAPLPIAAARWHPSLVRHGGSSTLASFPLPMEPSLCCSSLLHALHSSTDTPPLLASRSQQAAACPNLLLFPRRPSLLRAGPMQSLLPRCQRCVSAKCLTKCPSEVMCRGQLHGCSLCPRYSLHSLAVLAVLPSPRPSKQADASLVAPPFFFLLRRSLLLLPRQQAAAGAVKPLQPALADARSRAPSSGANTSPLQHTLCFIVGAPPHAQHVDNLRNLTAMLLPRRCASALSNCAVSWHGHCSTMLAVCSRPGRVPPLCCAIAAGRHHQSSQPHGVFQRATSFNFISVSRARRRVRIHAACGATTTEV

SEQ ID NO: 219461 - protein, 93 aa, Zea mays
  Clone ID: MRT4577_131739C.1.pep
MAGKGDGPAIGIDLGTTYACVSVWQHDRVNISANDQGSRTTPSCVAFTDSERLNGDAAKSQVAMSPINSVFDARRVSGRRVSEASVQTQTKLW

SEQ ID NO: 219462 - protein, 506 aa, Zea mays
  Clone ID: MRT4577_13173C.1.pep
MVSQHGILLAVNIISDHFGPIVSKVCGCLLRHGALSLQDIVRRLELSPGQVKNSLLILIQHNCVQAYTSPRGAGDRTVTLYLAIFDNVLHRLRFSKFLSVVRVDIPESEVLLEGLLQNGRLTFEQLVERTIFKVSEDSPLPTREEVRMNFNKLVYAHYVERCPKPEPFFDPLAVEQPTSTRKRAPKTVEAVLSLEQKVVCTAALSDAERFSEIPYFMDGSSSAKDGHHAVAGNKRKHETLEVDEDDSIIAESEVLWRINFERFIFCLKKKFCAERKKAKMRLGTLAIWEAFFEANVTNNDNKTVTSPIDGILERVGQKEGGMSMTLDHITSVLNDLECTSTANNPEEFTFDLNKLVETCRNDEIESLVKKKHGQEAYTIFRLLLKQGSPVETDEITDRTILDKQVVHETLYKLWKDEYIDSERVPSTSATGTGSAQFFVWRVKNIYREHFMDNLYHAALNLRQMVNYMAELLLEGSKDEIKLRNRKNILILALTRHDESLMLFHDF

SEQ ID NO: 219463 - protein, 66 aa, Zea mays
  unsure (1)..(66): unsure at all Xaa locations
  Clone ID: MRT4577_131740C.1.pep
SQVEDFYLIXYTSPNEHXFQMPTNLSSIILDGXSFLKLALKYHFLSLRTILLSKYKITYQFYPVFP

SEQ ID NO: 219464 - protein, 136 aa, Zea mays
  unsure (1)..(136): unsure at all Xaa locations
  Clone ID: MRT4577_131741C.1.pep
MAAARRAGHGHAHRRRGPPISQPRRRLILRLHLLLRARSLRRLPTRPGCGRRRRRLAVPPITPVLDVYCGRGDKKXKRGERLNHSYGNARPRNKKKGTEAARILAPPAPRRKDHVDDGEIISIGIDEDILEYDGRA

SEQ ID NO: 219465 - protein, 249 aa, Zea mays
  Clone ID: MRT4577_131742C.1.pep
MTMTSEDGDILALLSEPSLKEEQLEASESDAMFSAIMKAIESNKNVVEVSPEEAAWADSCFVQTSELSYDDWGAMRSMLLDALEKPTESPSDTSESAHNAISEAKPHSLPAENISEHGDIHMEQINNTDDDKDGTEAFEIADVIRRVDDNGKQIDSYVADAGDELVLEQTQSTGSIFKVWDLELPFSDDDDDGELELVKDLKKLLKENSLPEDIYPTLPPDDAAKPLSQISINEIVAGLSDLSIQQAHE

SEQ ID NO: 219466 - protein, 96 aa, Zea mays
  unsure (1)..(96): unsure at all Xaa locations
  Clone ID: MRT4577_131743C.1.pep
FSXSLSSSSLISFSFSRSPGPCPFPPHSSSDRFLSSSAFSASSSAHDTYESIVESLRGHSFPRRVPCPSATPHVLPNGHGDTVTVFDRARLLAGGV

SEQ ID NO: 219467 - protein, 120 aa, Zea mays
  Clone ID: MRT4577_131744C.1.pep
VHCMTMTSEDGDILALLSEPSLKEEQLEASESDAMFSAIMKAIESNKNVVEVSPEEAAWADSCFVQTSELSYDDWGAMRSMLLDALEKPTRSPSDTSESAHNAISEAKPYSLPAETFLSM

SEQ ID NO: 219468 - protein, 65 aa, Zea mays
  Clone ID: MRT4577_131745C.1.pep
NYSLEQDMKPSEPPSCMTHYRSQRDLCSSTDGITPRLDLRGNARMQWCLLATPLQPYLGPGGQAA

SEQ ID NO: 219469 - protein, 72 aa, Zea mays
  Clone ID: MRT4577_131746C.1.pep
IQLAGSVECEHPEHYQESKFATLTNVVCHVVKQPNSLLPNSNEGSQLYGSDSFLNSSQRECAVNAAKNCWSF

SEQ ID NO: 219470 - protein, 129 aa, Zea mays
  unsure (1)..(129): unsure at all Xaa locations
  Clone ID: MRT4577_131747C.1.pep
GGRVSGGGGGYGGCAVXRGVTAVACAVMAAAATAVAVATVVAAVATVVVAAATAATAATAAPTGTGGTELWCPRRQLILFATVLFTLVXECLSSFVSCLLLLICVFDLHVSLCQLLVLCSSSAPSDPCI

SEQ ID NO: 219471 - protein, 72 aa, Zea mays
  unsure (1)..(72): unsure at all Xaa locations
  Clone ID: MRT4577_131748C.1.pep
KGDPPCTGPLSPGVGGVPPRGPVPFAGALGPVPLVFFPSFLATLAGFPRQVLNXGAPLXGFRLRVLRNLDPK

SEQ ID NO: 219472 - protein, 69 aa, Zea mays
  Clone ID: MRT4577_131749C.1.pep
GNGGGRTRPPTRPGRGQIRLFKTLLTAVRCNKNLQGDLRTRIYLHIKNLLLYLCHCFDFFIIGLYISVH

SEQ ID NO: 219473 - protein, 91 aa, Zea mays
  unsure (1)..(91): unsure at all Xaa locations
  Clone ID: MRT4577_13174C.1.pep
RLPALTSFXXRAPYPLPYXRPLGXXMFGIRXWAGPGPGEDXAEEGKXGSXXVGGSIRYRASRXXGAXXVEGGKESRLTEEXGSSGSWTQLA

SEQ ID NO: 219474 - protein, 68 aa, Zea mays
  Clone ID: MRT4577_131750C.1.pep
CSTITHVWSHKLAHHNMNFKCLREEYTGSYYNWGHLCLNFELLLRACLIHLILSQRKILRERRTHDPM

SEQ ID NO: 219475 - protein, 221 aa, Zea mays
  Clone ID: MRT4577_131751C.1.pep
MAVKDCGGHKGCECERERLYRRCCAAVVALILLVLFIVLVVWLVLRPHKPRFYLQDLSVLCLNVTPPASTYLFTTMQATVAARNPNERVGVYYDQADAYAEYKGVAITVPTRLPVQYQGPRDASVWSPFLRAPDGGVQLPPQLAVALAQDETAGYVLVDVRVDGWVRWKVGTSWISGHYHLRVNCPALLTVNDGRGSYGANTGGGTGYFRFQQAAACAVDV

SEQ ID NO: 219476 - protein, 47 aa, Zea mays
  Clone ID: MRT4577_131752C.1.pep
VLQVCTPPSGSPGDTNGRHFHSTVATYSALVTTMIAARMELSRARQV

SEQ ID NO: 219477 - protein, 221 aa, Zea mays
  Clone ID: MRT4577_131753C.1.pep
MAVKDCGGHKGCECERERLYRRCCAAVVALILLVLFIVLVVWLVLRPHKPRFYLQDLSVLCLNVTPPASTYLFTTMQATVAARNPNERVGVYYDQADAYAEYKGVAITVPTRLPVQYQGPRDASVWSPFLRAPDGGVQLPPQLAVALAQDETAGYVLVDVRVDGWVRWKVGTSWISGHYHLRVNCPALLTVNDGRGSYGANTGGGTGYFRFQQAAACAVNV

SEQ ID NO: 219478 - protein, 208 aa, Zea mays
  unsure (1)..(208): unsure at all Xaa locations
  Clone ID: MRT4577_131754C.1.pep
QKDYIKKRXETNENFVVNGLHAAKKPKLLNQAPXISLEALKPIGPMXSLAASQMSNMANPTRVIKISXRXRKSKGLKMPAGHSGPGSPWSSFEDQALXVXVHXMGENWELVSDXLNSIIQLKXIYRRPNEFKERHKLLTDKSCCDGADXAXDSRSSQHYPSXFXXIPKGSSRQXXXPXQGPFEEXALKXHFEKXXCLXKIASTRRKVK

SEQ ID NO: 219479 - protein, 101 aa, Zea mays
  unsure (1)..(101): unsure at all Xaa locations
  Clone ID: MRT4577_131755C.1.pep
MACPLEKXLDVMVSTFHKYSGKEGDKFKLNKSELKELLTRELPSFLGKRTDEAAFQKLMSNLDSNRDNEVDFQEYCVFLSCIAMMCNEFLEGFPDKQPRKK

SEQ ID NO: 219480 - protein, 46 aa, Zea mays
  Clone ID: MRT4577_131756C.1.pep
GFFFLKKKKKKKKKKKKKKKKKKKKKKKNKKKKKKKKLVPARAAAR

SEQ ID NO: 219481 - protein, 38 aa, Zea mays
  Clone ID: MRT4577_131757C.1.pep
GHLDSLSRVPDPRRPSRFRNRAGGVGEADPLLRKHGPA

SEQ ID NO: 219482 - protein, 70 aa, Zea mays
  Clone ID: MRT4577_131758C.1.pep
KKPNGGKAHPKGEQTGGMFGPIPVFLSWTLKINPFSKGPVTKKNPGGGKFYANPPNGEFLGRIHHKGLVF

SEQ ID NO: 219483 - protein, 45 aa, Zea mays
  unsure (1)..(45): unsure at all Xaa locations
  Clone ID: MRT4577_131759C.1.pep
XLQVAAKIIFMELCFQSSNHSITLSICDLTLNVLYIFLQSFAECC

SEQ ID NO: 219484 - protein, 87 aa, Zea mays
  Clone ID: MRT4577_13175C.1.pep
DGFFTGRKKQELYWTALLKRNPRFPPSKGGNDTITAGLTLLAIKTLANPPELNWPSPKQGPSGKIWPPPWRAAFPLRGKKPGGTPLG

SEQ ID NO: 219485 - protein, 52 aa, Zea mays
  unsure (1)..(52): unsure at all Xaa locations
  Clone ID: MRT4577_131760C.1.pep
ACCMRAWVSHITLLLYLVYIRRTQQXILVAKRRQPCSELTDLPRLDDKKNKK

SEQ ID NO: 219486 - protein, 56 aa, Zea mays
  Clone ID: MRT4577_131761C.1.pep
HPVGSVAQTTSPHQSRCLSPMSWTRSQHFFLNGRRCRRRARPVRRRGVGEGHHSVG

SEQ ID NO: 219487 - protein, 55 aa, Zea mays
  Clone ID: MRT4577_131762C.1.pep
QDLTVTIICTQIKMPSITSSGIICTLIDLVRYVKQNQLKSILGIQVLSEVNEAFC

SEQ ID NO: 219488 - protein, 135 aa, Zea mays
  unsure (1)..(135): unsure at all Xaa locations
  Clone ID: MRT4577_131763C.1.pep
MTVTLNTNLRDIKCKGICEQPPGTWYNFLELCVRGYYDRTDLHRNIKXYMVHGGDPTGTGKGDSTIWYGKVADELRESIKHXARGIMTMANRGTNTNGSQVFITYAKXSHLDEHYTVFAKDIRGFEXLCLMEKEQ

SEQ ID NO: 219489 - protein, 39 aa, Zea mays
  Clone ID: MRT4577_131764C.1.pep
YKFIYFPPLNSMISLNFYLNNYYFFLLKQSFIYQKFLSI

SEQ ID NO: 219490 - protein, 44 aa, Zea mays
  Clone ID: MRT4577_131765C.1.pep
LMVRGLLALNDSIYSTQNYAWCVVLSVRTMVQLLCALAEPYSQQ

SEQ ID NO: 219491 - protein, 229 aa, Zea mays
  unsure (1)..(229): unsure at all Xaa locations
  Clone ID: MRT4577_131766C.1.pep
MAKFADVLCAVTLLVLLPCSDVALGQTTDPSEVNGLRAIKGRLVDPMQNPMNWNRGDPCRSNWTGVFCHKVNDDTFLHVTELQLFKRNLSGTLAPEVSLLSHLKTLDFMWNNLTGSIPKEIGNITTLKLILLNGNQLSGILPYEIGNLQSLNRLQVDQNQLSGPIPKSFSNLRSVKRLHMNNNSLSGAIPSELSTLPLLXHLLXDNNXLSGPLPPEFAEAPAMKIFQAD

SEQ ID NO: 219492 - protein, 45 aa, Zea mays
  Clone ID: MRT4577_131767C.1.pep
LLDQYIDPWSLLNTTKYISCTSILIPMAKAYAINFFNAKKLLALD

SEQ ID NO: 219493 - protein, 81 aa, Zea mays
  Clone ID: MRT4577_131769C.1.pep
GVLGSSSKWGTRVTRCWLGFVEGLYEEAADARVKRQVLVGPDMVKQLCALANGDWIPPTEKKVTFSLPSTLSLVKKDHKEL

SEQ ID NO: 219494 - protein, 96 aa, Zea mays
  unsure (1)..(96): unsure at all Xaa locations
  Clone ID: MRT4577_13176C.1.pep
GGRHRPLRAFSEVGWLLLAHRFVFRFWFLGEREEMAACDVXYRCSLGGLVWATDDHSLNNSFSTYGEVLESKIILHRETQRSRGYCLRTFSTDDAM

SEQ ID NO: 219495 - protein, 141 aa, Zea mays
  unsure (1)..(141): unsure at all Xaa locations
  Clone ID: MRT4577_131770C.1.pep
MQAAPGSVSWAASQPSVLDRCGGGAPSASLKWRAGGIGGGECRVRGRDVVVPRSCARAQEKRLPRVRKSKEERRXXVESFIKSYRVSNEGKFPSINLTHKEVGGSYYIVREIMRDIIQENRVLGPGGLYAMTLSFEDCADS

SEQ ID NO: 219496 - protein, 63 aa, Zea mays
  Clone ID: MRT4577_131771C.1.pep
GSPDCIVKLWYVASSTDLLTAEDSHGGLVNRLSLFKALPTKTTPVYSLRFSRRPLLLAPGAPT

SEQ ID NO: 219497 - protein, 48 aa, Zea mays
  Clone ID: MRT4577_131772C.1.pep
YVNHTRFKYFLHLNLTNFHYYFLYIYYYEYVYIIIIFYTLFLYQFNLL

SEQ ID NO: 219498 - protein, 112 aa, Zea mays
  unsure (1)..(112): unsure at all Xaa locations
  Clone ID: MRT4577_131773C.1.pep
HYLYMNTDIRRRERVLLWMVSIYAIHNLVIRGSYLYLEIALAITSVRILSISLAMSWSRRCVRLGNDKSKNGLQATRXVVWWGRAGGAWPYPSSPGGRARGWREAMESGRGE

SEQ ID NO: 219499 - protein, 66 aa, Zea mays
  Clone ID: MRT4577_131774C.1.pep
SRRSSSPSSGFPGFIIPCILSRTTLLIFFSTPFPIPFPPFPHPNMVARTRRNKDLLVDWKRRVSRP

SEQ ID NO: 219500 - protein, 115 aa, Zea mays
  unsure (1)..(115): unsure at all Xaa locations
  Clone ID: MRT4577_131775C.1.pep
PGVGFKGITGHRVSVSLRGAVLVCNRSKSNQYESRLLVRIEGVVSKQEVVWYARXRMAYIXKWLXPISPXRNGCIWGKVTRPPDKWGVVRAKCXSNVPPESMGRKVKVIRYPSSL

SEQ ID NO: 219501 - protein, 58 aa, Zea mays
  Clone ID: MRT4577_131776C.1.pep
RGNYNNKFGYLQVKSLRVQNSNPACSLSNIPRLVGPGSKESAGCLWFGLVMVIDKGKR

SEQ ID NO: 219502 - protein, 160 aa, Zea mays
  unsure (1)..(160): unsure at all Xaa locations
  Clone ID: MRT4577_131777C.1.pep
RERTFPEPGCSPVGGPPPGAQRGGAXEPPPPPQGFFPGPAKPKTRGFSPKGKRXFKRKKLPPNLXSPFWGPPXPGVPGGGHFRAGPFPPGXPPPWGPGLPPKKGKLGFQGVGXFPCPPGVPPPPPPGVPPKKRRGGVSLSRFFGSKVSLWKLDCFLGPLV

SEQ ID NO: 219503 - protein, 83 aa, Zea mays
  Clone ID: MRT4577_131778C.1.pep
QQAYLLSHASESVRVLSSEPIRVRNNVVAAQLDCEWTARDSLRRPNVTSPSKLSEARRRARNGARAKFEYSYEFVDYLVIMKI

SEQ ID NO: 219504 - protein, 71 aa, Zea mays
  Clone ID: MRT4577_131779C.1.pep
TKKFLEKKNREASLLNKVFLKVSKTGCPFENELYIVPPEGLFGTRFSPPGPGFFMPNKFEVIFVKFIWEPL

SEQ ID NO: 219505 - protein, 146 aa, Zea mays
  unsure (1)..(146): unsure at all Xaa locations
  Clone ID: MRT4577_13177C.1.pep
PARFRAVARRRDARGDACGEQAAACGEQATTPWSATYSLQPPGVKFIRGRGMGKETEVNEYELQRAANIRENMKRMRSLNLPVPSTMVNEANGSHRASKKHKTRKLAYSTNGPTLRSRTXRDIVDDNHEDSTSEIVMENLNIPSMM

SEQ ID NO: 219506 - protein, 197 aa, Zea mays
  unsure (1)..(197): unsure at all Xaa locations
  Clone ID: MRT4577_131780C.1.pep
MAGQRWVGKVAAAAVVALLLLSTALPGGARREPDVNNNGRSFVFNYTLAKAVVEYAAAVYMTDLTALYTWTCSRCNDLTRGFEMTCIIVDVQNCLQAFVGVDHNLNAIIVSIRGTQENSIQNWIKDLIWKQVKLNYPNMPNAXVLRPAITNAVRKARKLHGHSDVIVTGHSMGGALASFCALDLAMSFGSNXVHLMT

SEQ ID NO: 219507 - protein, 114 aa, Zea mays
  unsure (1)..(114): unsure at all Xaa locations
  Clone ID: MRT4577_131781C.1.pep
FSQLAGLSPSPFLAHPPLXPFSQHSAPNAGALWQLQRLLPFSPTCLCRNPGSXFQQPIHCVVPLFSDFLMQSIVHIHKVFLCSCLVASPEMKKGTSARASTFKGGISRHTGGPV

SEQ ID NO: 219508 - protein, 253 aa, Zea mays
  unsure (1)..(253): unsure at all Xaa locations
  Clone ID: MRT4577_131782C.1.pep
MAGQRWVGKVAAAAVVALLLLSTALPGGARREPDVNNNGRSFVFNYTLAKAVVEYAAAVYMTDLTALYTWTCSRCNDLTRGFEMTCIIVDVQNCLQAFVGVDHNLNAIIVCIRGTQENSIQNWIKDLIWKQVKLNYPNMPNAKVHIGFYSSYNNTVLRPAITNAVRKARKLHGHSDVIVTGHSMGGALASFCALDLAMSFGSNNVHLMTFGQPRVGNAAFASYFXQYXAYTVRMTHXRDIVPHLPPYFFFLPN

SEQ ID NO: 219509 - protein, 72 aa, Zea mays
  Clone ID: MRT4577_131783C.1.pep
ICTEETKAWLFVEQYSSCNSSARGTTVEFRYLRSLLEQYSHVISSYHQWQPRELHGNSHGNNGASNSSQDPD

SEQ ID NO: 219510 - protein, 62 aa, Zea mays
  unsure (1)..(62): unsure at all Xaa locations
  Clone ID: MRT4577_131784C.1.pep
RGXTPERALRLGLLASTYLLXXGVLSPRSPLARXGGXLSXTRXVKKGVRXLXVLGTLAGSLL

SEQ ID NO: 219511 - protein, 81 aa, Zea mays
  Clone ID: MRT4577_131785C.1.pep
HPSNPKEEAREERVSGTLVTRLERRCRCWLLLLTPPPAFLCSSFSRGYSVRKAPSSRLGWTDRPADPSSPPTSTAGWLQGR

SEQ ID NO: 219512 - protein, 63 aa, Zea mays
  Clone ID: MRT4577_131786C.1.pep
GGGGYCYLGQLHLASSVNLEYMCSSPSSSFQLDSTSSSYKYLRLLPKYGEAGNFFIANRFQNI

SEQ ID NO: 219513 - protein, 121 aa, Zea mays
  Clone ID: MRT4577_131787C.1.pep
VPLFGKKKRSSLGALSWNLMAPVGDNKKSPPPYNFWISGSCGIQCGNPKKIFLKLSNFSPPLKRAPKGPPPVLVTLKTGGVFFFHGKLDWGGVIFFLNVRMDWGKTPCSSGLDLEAFPWGP

SEQ ID NO: 219514 - protein, 31 aa, Zea mays
  Clone ID: MRT4577_131788C.1.pep
KCVSFIHIIMPVDTNHIFLTGLLNLTTFNIR

SEQ ID NO: 219515 - protein, 170 aa, Zea mays
  unsure (1)..(170): unsure at all Xaa locations
  Clone ID: MRT4577_131789C.1.pep
GTXXRPARGQNFQXQTPNASQPHRRQRPATATRRSPGACKHNHPSPRGARDSHTPSPALTGRGRTTPAAQGGEKTKELTGPSGKASPTTKGGTAPTASEAARVHRTYTPTAVHKVRTATATKAEGTGKKKAGEPRAGHACEIGQTGSDAPGLYSALLRTKVKPGEGTTLE

SEQ ID NO: 219516 - protein, 70 aa, Zea mays
  Clone ID: MRT4577_13178C.1.pep
FGSSGLYCDVHRLLCSEPTVSKLHNRDLKRMDGHKHGMWAVMNAYLHCRLMILLSFGSTHICRLCKDPNS

SEQ ID NO: 219517 - protein, 245 aa, Zea mays
  unsure (1)..(245): unsure at all Xaa locations
  Clone ID: MRT4577_131790C.1.pep
MASGGFVDWRGNLVNRQVHGGVKAAXFLHFLTFVTNMVNVPILLNLVTYLRGTMHMGVSDSATTVTNFVGATSGFTLIGAFLSDSYITRSRTILLFGPLEFLGYGLLALQAYIPSLHPPICNIEAEPSNCKEAHGWNATLFYAALYICAFGEGCIRACLPSLGADQFDHEDPSESHQQSSFFNWFTFGISFGGFVGLIFIVWLENYKGWDIGLGLSAILILLGLLVFAAGLPFYRNKXPEGSPLT

SEQ ID NO: 219518 - protein, 324 aa, Zea mays
  Clone ID: MRT4577_131791C.1.pep
MYVARESTKLWRRVCAETTAELQLLFEKWQLLLAGLVFQYIHGLAARGVHYLHRPGPLLQDLGFMALPELGQEKGYLSESLFTFIFISFFLWSFHPFVYHSKRFYTVLLWRRVLAFLVASQFLRIMTFYSTQLPGPNYHCREGSKLATLPPPNNALEVLLINFPRGVLFGCGDLIFSSHMIFTLVFVRTYHKYGSNRLIKLLSWLMAIIQSLLIIASRKHYTVDVVVAWYTVNLVVFFVDKKLPEMPDRTNGLSLLPVSTKDKDGRMKEELHKLEKDGRMMDEFHKLLNGNTVDATDWRQRVQMNGKHGEDTNHTVSDATPTGT

SEQ ID NO: 219519 - protein, 62 aa, Zea mays
  unsure (1)..(62): unsure at all Xaa locations
  Clone ID: MRT4577_131792C.1.pep
GRLIVPLGGGCDPRSQSHVPVGGSDCPTSCHGGXPCPEAPSTPLAGSLEQLSPVGVVIVLKS

SEQ ID NO: 219520 - protein, 181 aa, Zea mays
  Clone ID: MRT4577_131793C.1.pep
LIRSGQPARRRPQRPEHPPVAPTRQRRMRGVRCYAREDGAECECPCPGLLVSVRTPSRLGTANGAGRDGTHVARTSTAVQVVRHRPPARIPATARAGPSQSRRLDGSRRAGWRAHVPCRCAGAGERQWCARQAEAEAGQGQPSRAVQAQQSAPAVPGAWPGRIYLPASRCVCVRTEKLPRA

SEQ ID NO: 219521 - protein, 137 aa, Zea mays
  unsure (1)..(137): unsure at all Xaa locations
  Clone ID: MRT4577_131794C.1.pep
ENTNCDDPELKEKLTRLCKTTTVRTRYVVMSDEILKNYPELAQEGLPTMNQRLDISNAAVTQMATEASLSCVRSWGGALSSITHLVYVSSSEARFPGGDLHLARALGLSPDVRRVMLAFXGCSGGXAGLRVAKGLAE

SEQ ID NO: 219522 - protein, 69 aa, Zea mays
  Clone ID: MRT4577_131795C.1.pep
QLVRVFQLVLGPLPVPDQLFHALLDPAVTASRLPALVFHSLVDWVVHILRYTEPGREHLVHIEHSRTHE

SEQ ID NO: 219523 - protein, 121 aa, Zea mays
  unsure (1)..(121): unsure at all Xaa locations
  Clone ID: MRT4577_131796C.1.pep
RKKTKEKKKKKKKGXKKEKKKRKKXRKKRKKKKKKKKXEKKXKKKKKKKKTXNTIGGPQVTKASSTLTHTRIRRGGPDWGNSAGKGKRRIGVARLAWRCSHFAPPHRVPGQREEARPPARA

SEQ ID NO: 219524 - protein, 95 aa, Zea mays
  Clone ID: MRT4577_131797C.1.pep
GVSVNGCVLVFWSTQANISYGRRRGSSKKVYAALATVYKSVRRTCSCNSQRGQTCRQPCHQRLRICFPNLSKVGKVPHLSQQAFSPEDTLLYFMA

SEQ ID NO: 219525 - protein, 196 aa, Zea mays
  unsure (1)..(196): unsure at all Xaa locations
  Clone ID: MRT4577_131798C.1.pep
MAETVGSIVVGEVVNRTSSFILIKHRERLSTREGIERLEMACVKMEAALELSSRPGCWXSRPSPPXTNASLLRWRRMLRRAADECDAALRRLKLRELQEEDARARLARAPLPRRVARALLCLASALLLLARGGGDDERSRARSXXQRFERLAGGAAEFLMCAQLGFAPRRCGGGGGLSLGGLVVNARATSTRGCKV

SEQ ID NO: 219526 - protein, 88 aa, Zea mays
  Clone ID: MRT4577_131799C.1.pep
GGDDFSTSFLLLEGAAQKTCSLCVRSCCGGSSSLRLAQWCPCCGGSSSLRLARWCPGLCRFRRLLAPGVRRCGSLLVVKNRSCLVWVC

SEQ ID NO: 219527 - protein, 502 aa, Zea mays
  unsure (1)..(502): unsure at all Xaa locations
  Clone ID: MRT4577_13179C.1.pep
MESAIAAVAGELVSRFISFALNRCCSSSYERSEEKRERLRHLLMRSHTVVEEADARHITNSGMLTQLKVLSEAMYQGYHALDTLRFQLDDEVSDDDSPAXAPLPPLXLKRRRAVLAPAAKGEGKAQAALENLETAMANSAEFVALLCGCERLSRRPYDAYLYLGSIMFGRHAEKQRLLNFLLQQQPGDXGHPPPVLPIVGALAAGKKTLVAHVCADDRVRSKFASVLHLSGDDDFLLNTVHHEKAMLLGVSSLVVVELVSDVGDEEWDAFYSFVARAAGAGSKVIVIAKHARSVARFGGSARPPIFLGALSYEEFWYLFKNLAFQAADPGEHPRLVHIAEGFAKELHQGGSLVAANALADVLRRNLNAQVWLSILNRCRRVVEKNLCAYGQQPKLLLEQGREVDITEFVVPSPAGIGHLRMIPCTSRGSSKAYSRVVNDLPKVAFGELLLDPSVRPKGEFSLLTWKSRLPPYTSFTNFVPNCTADMPQGHSLSGRKRQAVPF

SEQ ID NO: 219528 - protein, 51 aa, Zea mays
  Clone ID: MRT4577_1317C.1.pep
IPPPITITKGGERFCPSMCMKKPPTANPLGDWSIDPKNQPAHASAHVFYFG

SEQ ID NO: 219529 - protein, 104 aa, Zea mays
  Clone ID: MRT4577_131800C.1.pep
MPHFSLGQDTSAASSSGAGDYSLSFSMSSGFLGANRGTLQSNSQSNFSGDQHQQLQRLDGPLLFGHAHAAAAMHPASDNQLTASAALQLWDGLRHSGMKEKGRS

SEQ ID NO: 219530 - protein, 375 aa, Zea mays
  unsure (1)..(375): unsure at all Xaa locations
  Clone ID: MRT4577_131801C.1.pep
GSAGSRRALPRICRLRRPTEGGSWSCRSRXAERGMVVGGHRGMGMNAVGAPPGARFGAARERENTLLSFGRAAAHAAVAFVEFDVQVTKDGCPIIFHDDFILTQGTGAVYERRVTDLLLEDFLSYGPQKESCKVSKPLLRRAGDGRVLNWTTEDDDSLCTLQEAFQRVSPRLGFNIELKFDDSIMYHRKDLQCALKAVLQVVFEHARNRPVFFSSFHPDAAQMMRELQSLYPVLFLTEGGTSKHHDPRRNSFDDAVRVCLEYDLHGIVSEARGVLKNPSAVARAQESNLALLTYGQLNNVWEAVYIQYLMGVHGVIVDRVEEISDAVAGFGLGKPGLGRGGAGVDGAKTHQAQAFSQQQLGFLLRLIPELIEQRH

SEQ ID NO: 219531 - protein, 97 aa, Zea mays
  Clone ID: MRT4577_131802C.1.pep
TLYIVLVPAYSSGCRRNRELRLLLQPTGPRRSRPICMAGPPQPPTISTNIPVSPRLHTRRTPRPSDDKLSDEYFAAEEEKERSSPEINTPGKTALHR

SEQ ID NO: 219532 - protein, 124 aa, Zea mays
  Clone ID: MRT4577_131803C.1.pep
GAVYERRVTDLLLEDFLSYGPQKESCKVSKPLLRRAGDGRVLNWTTEDDDSLCTLQEAFQRVSPRLGFNIELKFDDSIMYHRKDLQCALKAVLQVQSFPLLRIELSKVSIDLHSDSVYSHPFQR

SEQ ID NO: 219533 - protein, 207 aa, Zea mays
  unsure (1)..(207): unsure at all Xaa locations
  Clone ID: MRT4577_131804C.1.pep
AFQLSLVRVLALGTSLNFENNRLRRFFCILHQVLFLTEGGTSKHHDPRRNSFDDAVRVCLEYDLHGIVSEARGVLKNPSAVARAQESNLALLTYGQLXKLSSIYSIYSYQFMDRLTAFPTTGCVYNLSNVWEAVYIQYLMGVHGVIVDRVEEISDAVAGFGLGKPGLGRGRGGAGVDGAKTHQAQAFSQQQLGFLLRLIPELIEQRH

SEQ ID NO: 219534 - protein, 139 aa, Zea mays
  unsure (1)..(139): unsure at all Xaa locations
  Clone ID: MRT4577_131805C.1.pep
MGESLRGPRRTXPAPDPPRRRRRSRHPPRRRSSRPGRCRRHPRRRTSSSRSRCATGWPPXPAGAEAQHDDLQPAQQAXAAWPAPRAPRPAAPTSPPAAPRPAPAPARTAPPRPPPSPPPSPSLCHQPPTRPIAVQDNLI

SEQ ID NO: 219535 - protein, 132 aa, Zea mays
  Clone ID: MRT4577_131806C.1.pep
APVVSLHSVGVLSYSTYSPPSVPSPFPLELPHSAAHSFPPFSSLHHIIHSIHTFTPLNCSICIPLTTFIIQSATLPLLFNQFNATTKLISLNTHIQLIKDHMNNIDPKSLHYLQPNISTLFQKHGLNPLTPI

SEQ ID NO: 219536 - protein, 209 aa, Zea mays
  Clone ID: MRT4577_131807C.1.pep
LVGRERGSDDDELNEAVVARSEPKNLVQPNASVPLTSQGFNQLLDQPGPSDPSVVYKDSICNRCGKVAGAGSVLKCYRCMLPCHISCIEATGSPISTGRWCCKNCSAGTKEPVEGDMVLAHGNPNCLHESCVVCDRLAACRSPKCDNSRALVISSVDPEIDTCYSCKICGGTEEDEKRFLICGNVLCRYMYYHIGCLKSMQISTSVERG

SEQ ID NO: 219537 - protein, 148 aa, Zea mays
  Clone ID: MRT4577_131808C.1.pep
DEQWMQLVNMWSTPKHKEKCVNNKVIRGKVRFQQKTGSRSYIAHMHAVKQAKYGDAPPSAIDLFKECHCSRKTGFAEPVKEAIDTMEALVAEPGVEGKESKTPTEAVAQVLSSSKFLYNIGLVPATKKSCNGGDPTRVAELEAELESE

SEQ ID NO: 219538 - protein, 134 aa, Zea mays
  Clone ID: MRT4577_131809C.1.pep
MGEVKHLCLAKFKEGVVVDDVLKGMTDLAAGMDTVKSFEWGQDVLNQEMLTQGFTHVFSLTFASAADLAAGHCTPPLLRSRSRSTCACGRGAGSSTSTVYCLLPVMYVLSIYVHVPTYYYCLVIFGINFRSLLW

SEQ ID NO: 219539 - protein, 171 aa, Zea mays
  Clone ID: MRT4577_13180C.1.pep
MGVMPFGPGNGVKDDHPAAVTSLVSGASGDGLSVDEASFVATTSSVTSMVAAKEETRQAVADDLNSSRSCPCEWFVCEDDQNSTIYFVVQGSESIASWQANLLFEPVKFEEVDVLVHRGIYEAAKGMYHQMLPYVKAHLKSWGKSARLRFTGHSLGGSLAPTATLMLLVQG

SEQ ID NO: 219540 - protein, 107 aa, Zea mays
  Clone ID: MRT4577_131810C.1.pep
MGEVKHLCLAKFKEGVVVDDVLKGMTDLAAGMDTVKSFEWGQDVLNQEMLTQGFTHVFSLTFASAADLAAYMAHDSHTAFAATFMAAIDKVLVVDFPVVVAKPPPSA

SEQ ID NO: 219541 - protein, 198 aa, Zea mays
  Clone ID: MRT4577_131811C.1.pep
MADFEDRVSDEEKVRIAAKFITHAPPGEFNEVFNDVRLLLNNDNLLREGAAHAFAQYNMDQFTPVKIEGYDDQVLITEHGDLGNSRFLDPRNQISFKFDHLRKEASDPQPEDVDGGLKSWRESCDSALRAYVKDHYSNGFCTVYAKTIDGQQTIIACIESHQFQPKNFWNGRWRSEWKFTITPPSAQVGGVLKNQVHY

SEQ ID NO: 219542 - protein, 119 aa, Zea mays
  unsure (1)..(119): unsure at all Xaa locations
  Clone ID: MRT4577_131812C.1.pep
FIWKGRNEVNGGSCIVSWDIITRPLNLGGLGISNLYFQSWALQAKWLWLEKTDPNRPWYGLKFPIQQHVRKFFASSVITLIGNGSNTXYFAPDRWLDGACIKDFAPAVAASVGKTRCFL

SEQ ID NO: 219543 - protein, 54 aa, Zea mays
  Clone ID: MRT4577_131813C.1.pep
GSTRFVHLSPICSRVLGPASLPISKSNRCEATNYAIVSFRNILCYRLRVIQRAS

SEQ ID NO: 219544 - protein, 85 aa, Zea mays
  unsure (1)..(85): unsure at all Xaa locations
  Clone ID: MRT4577_131814C.1.pep
PLVRGRVGITPIHISRICVYVKKRIFSAMIFVKNHXRNLTDDSLLNDCLVTFIEHAIFSNVSEDDIIHLFMAIKKRKSKSLRVLG

SEQ ID NO: 219545 - protein, 71 aa, Zea mays
  Clone ID: MRT4577_131815C.1.pep
GLFILGPSSGGFPQPFLGLSSTPFAQKTFFFLCNLFFVYSECLFILDKMRVCPLFLVCFYPLGTRVTYKHI

SEQ ID NO: 219546 - protein, 48 aa, Zea mays
  Clone ID: MRT4577_131816C.1.pep
EYTSRRPPSIWGVFLNFFSVDNQYAKKAGYTNRLVFGRSLTGTDIVKV

SEQ ID NO: 219547 - protein, 172 aa, Zea mays
  unsure (1)..(172): unsure at all Xaa locations
  Clone ID: MRT4577_131817C.1.pep
MATTGWPSLPTAHPGILGTLRRRRAPQDKSIKIADFGAARIEVKTEGMTPETXTYRWMAPEMIQHRPYDHNVDVYSFGIVLWELITGMLPFTNMTAVQAAFAVVNKGARPVIPQDCLSSLSHIMTRCWDANPEVRPPFTEIVCMLESAEMELLSNVRKARFRCCISEPMTTD

SEQ ID NO: 219548 - protein, 75 aa, Zea mays
  Clone ID: MRT4577_131818C.1.pep
VYVRLPARLVASVSSMVAGYTCNIQVQSPQVGYDRLCEACHLSNRSVISVSPQAVSWSRHASARPCRQHGYTARV

SEQ ID NO: 219549 - protein, 96 aa, Zea mays
  Clone ID: MRT4577_131819C.1.pep
IMILFEKKVFAEQDESISSTFPNPPANVQTEKGSTDWKSSTFFLLPGQHSEARKVMPGSGDASERPKAPEVECIKYLPGLGMRTQFSGRNADHASL

SEQ ID NO: 219550 - protein, 41 aa, Zea mays
  Clone ID: MRT4577_13181C.1.pep
GANTILGRPKYLLIYPNEYNNYYMENNIQLPRPLIYKGGAP

SEQ ID NO: 219551 - protein, 104 aa, Zea mays
  unsure (1)..(104): unsure at all Xaa locations
  Clone ID: MRT4577_131820C.1.pep
FVPDGTKMGTASMLDQAIXYIKFLKRQVQELQPPAPAAAGAGAGPSVSAVGGLPLIVWAGLVRPVDIHGPTSPSSSSSMGGAGAHAALGFGFSSAGGQSSHGMH

SEQ ID NO: 219552 - protein, 65 aa, Zea mays
  Clone ID: MRT4577_131821C.1.pep
GRGNHSHHRAPAGAFPRLLPATSHATEPAMIYGLLFPLQSSPSNQCPQIRPLVSSPDQGQKRGAP

SEQ ID NO: 219553 - protein, 73 aa, Zea mays
  Clone ID: MRT4577_131822C.1.pep
EHKTLPGAQIKNILAQVHNKPQHEHTIEAPQKASVAPASPASPAASAAAAAAAAAAAAQQAAAKAKGVAGMGS

SEQ ID NO: 219554 - protein, 97 aa, Zea mays
  Clone ID: MRT4577_131823C.1.pep
MRAAIPNVIGWIAISFAKGTKMVYKHLATLYFVFVFDSSENELAMLDLVQVFVETLDRCFKNVCELDIIFNFNKRWRSLDSPSPASMEGSTWLFGGH

SEQ ID NO: 219555 - protein, 71 aa, Zea mays
  Clone ID: MRT4577_131824C.1.pep
IGTLKAGRGGRYSLDPRSVACLRQCDADELRSRLSKGCDHGSTTTPGEISVVTTNAARAKRRTDKERLKDE

SEQ ID NO: 219556 - protein, 105 aa, Zea mays
  Clone ID: MRT4577_131825C.1.pep
YNSQLWRAPSSQWTVFPPPMEGLQKAPWRSKKRGLYPCPKIIQFPPPSGCFIFPFVGQKRKAPLVGPPGGGFPPWSGGFVGGPPSQLTKGPAWPQITVSIVGVPG

SEQ ID NO: 219557 - protein, 119 aa, Zea mays
  unsure (1)..(119): unsure at all Xaa locations
  Clone ID: MRT4577_131826C.1.pep
MMGDRAGRGSAGESSGAAAAARSYSAGGFSIVGPWEESRDIITTLGAYDPQXLAAPXGTALEMAGMDRYVQLQQDQVPFKVRAKRGCATHPRSISXRERRTRINEKLKKLQDLVPNMDK

SEQ ID NO: 219558 - protein, 119 aa, Zea mays
  Clone ID: MRT4577_131827C.1.pep
NKAQLQDIYKSESGKNSPSTELKAGRGGRTLPLQRRGGGGGGARNRGNTHSGRGLLGLDSTEPTKGFLRHGEQLGNLYWQLLGHKKQGILWRSPSWAQKNQEFLGQPEGRGGSRQKNVK

SEQ ID NO: 219559 - protein, 132 aa, Zea mays
  Clone ID: MRT4577_131828C.1.pep
VVTGLECSFRRCRVDVEFFVSIRGVFGVPDVSREGLELTVRRIGDSFRIPVADFRYLGNGLLANTNGNRRLLRLITISSPRLVRLKSRDIQKQHHKKRKTTQNLKFHNRTSTLTLNSLSSSPKHINQPKGSN

SEQ ID NO: 219560 - protein, 75 aa, Zea mays
  Clone ID: MRT4577_131829C.1.pep
CGHPDRHHPALRWGCVLKYGGSHDDRMLPPPQLADVHTRHDLRHVRHHQQHIASHPCQRRTMSVDLRMCICLMPT

SEQ ID NO: 219561 - protein, 191 aa, Zea mays
  unsure (1)..(191): unsure at all Xaa locations
  Clone ID: MRT4577_13182C.1.pep
NPGRVFLKLNFQKKLGLFGPPPHRKKGGGNPGEKGKKPKFPPGGKKKKPAPGGKKKPKVFGLGKKTGPKGAPPPEKPPKGNRQKTXGGQPKNPPGKPPXLDRGFLGPPPEXNPFLKGGGXKPPGGKGPPGPPQXGPPPKNXGKKFWGXPIPGAPKGXKPAGLKKGPFLNPPPPRGGNHPTPPPKKKPPPFW

SEQ ID NO: 219562 - protein, 44 aa, Zea mays
  Clone ID: MRT4577_131830C.1.pep
AFQKILVCYFWNNIWRVMIKTSDCCAAVLKICMCAFDCLVHPSR

SEQ ID NO: 219563 - protein, 105 aa, Zea mays
  Clone ID: MRT4577_131831C.1.pep
MSSKEEEEEERCQPNDESMSPRGSISHSALHASANIDDRENEIEDVEEDEIRHLCAHLNKENKAILMKLLRRIGNQGKTLLKLEETLIETKENLEKLSKEHEELK

SEQ ID NO: 219564 - protein, 30 aa, Zea mays
  Clone ID: MRT4577_131832C.1.pep
ESFKKAGRLHSPLIIIINFLFVLHNLLFYT

SEQ ID NO: 219565 - protein, 100 aa, Zea mays
  unsure (1)..(100): unsure at all Xaa locations
  Clone ID: MRT4577_131833C.1.pep
TTTPAAFDTDXGMKKPEDIARMLSEQPSREFTTEDETDSDEYTDDGDEGEDDGKMQYRIQFQRPNPVGTTTNTAPAPAATTAAPPVPTSAPTSAFLAMVQ

SEQ ID NO: 219566 - protein, 104 aa, Zea mays
  Clone ID: MRT4577_131834C.1.pep
KRRVRTINQARSPVHSTIRLTDHYLQDKFLIAQQYHVQYYLFELFFVILFIIPAHQCLLFPIIIIAKGSETPRYVSFSINRLLVMPHFALPTGRPSTARFPFLG

SEQ ID NO: 219567 - protein, 49 aa, Zea mays
  Clone ID: MRT4577_131835C.1.pep
SLGVTQSRLPSCGCISTSLLRLYTRERCYVRRLRWDNKLGICMYNDSSS

SEQ ID NO: 219568 - protein, 124 aa, Zea mays
  Clone ID: MRT4577_131836C.1.pep
QPAPPDHIVSIGRRKDEDLNHSLFYTADGYRSRTLLLNGGVPTRLPIGTGTAGREHAPTNTEQSKACRDATEGRTLLMGGMRADDKSRETYKLLRKVRGYVLLLAPDGQKTLGVCPWWAWISTG

SEQ ID NO: 219569 - protein, 308 aa, Zea mays
  Clone ID: MRT4577_131837C.1.pep
MDPRGKGMVVNDKEKESFVNDPKDDKPTDSGSSHKRKDGKKKKTRLIKEIVYYDDSDESTSSQKDDDNYEKKKTVSDLDNAKKIWDTLKISHEGNDVTMLTKMELVEGELGRFAMIRGEEPTQTYNRLKTLVNKIRSYGSTRWTDHDVVRLMLRYTKMTPEEILGKFVSERMMIKKARYVDDALNGPIHEPQTVALKTTRSKEALPSKVAQVEAAGLNDEEMALIIKRFKTADQEQGNKREKKKAYKKAKGEAHLGKEWDSDCSSSDSDNEGLAATAFNKASLFPNEHHTCLMAKEKKIVRKARGSLI

SEQ ID NO: 219570 - protein, 980 aa, Zea mays
  unsure (1)..(980): unsure at all Xaa locations
  Clone ID: MRT4577_131838C.1.pep
MDPKGMGMVVNDKEESFVNDPKDDKPTDSGSGHKRKDGRKKNIRRIKEIVYYDSDESSSSQKDDDNDYEKKKTVNSNFSFDYSRIPQSSNAHLLSIPLATTVLLASLCRDEYHKVSGLDNAKEIWDTLKISHEGNDVTMLTKMELVEGELGRFAMIRGEEPTQTYNRLKTLVNKIRSYGSTRWTDHDVVRLMLRYFTILDPHLVNNIRENXVHQDDARGDTWKVXSERMMIKEARYVDDALNGPIHEPQTVALKAMRSKEVLPSKVAQVEAAGLNEEEKALIIKRFKTALRGRKEHPNKTKTKGKRSCFKCGKIGHFIANCPDNDSDQEQGNKREKKKAYKKAKGEAHLGKEWDSDCSSSDSDXNEGLAATAFNKSALFPNEHHTCLMAREKKXRDDEIDYSCLFKGLDRTKVDKINELIDALNDKNRLLEKQEDLLYEEHDKFVEAQKSLALEIKRNEMLSYELSTCHDSISSLKSINDDLNAKLEIANKSTSCVEHVAICNRCKDFNIDACSEHLVSISNLNDEVASLNAQLKTSKSEFDKLKFARDAYTIGRHPSIKDGLGFKREVKNLTSHKASISIKEKGKAPMASSAQKNHAFMYHDKRHSRNVYRSYVAFDSHAMIASSSSIMHDRNLARKNAMPRRNVVHVPRKVNYESSTNFHTCNASFTICRKDKKVIARKLWERCKGDKTCIWVPKTIVTNLVGPNKSWLCNMGYNCLFTNVDVSVFRRSDGSLAFKGVLDGKLYLVDFAKEEAGLDACLIAKTSMGWLWHRRLAHVGMKNLHKLLKGEHVIGLTNVTFEKDRPCAACQAGKQVGSSHHTKNVMTTSRPLELLHMDLFGPVTYLSLGGSKYGLVIVDDFSHFTWVFFLQDKSETQGTLKRFLRRAQNEFELKVKKIRSDNGSEFKNLQVEEYLEEEGIKHEFSAPYTPQQNGVVERKNRTLIDMARTMLGAVTPQVLPWLEHTLVLRTVITCGRNLRRT

SEQ ID NO: 219571 - protein, 64 aa, Zea mays
  Clone ID: MRT4577_131839C.1.pep
GRPPRLGKRPAGRTVVLLRFAWVSKEACRSYQQRTPHPLCHMCRQDIRYMMRAHASAPRPRTRG

SEQ ID NO: 219572 - protein, 47 aa, Zea mays
  Clone ID: MRT4577_13183C.1.pep
INNAPLYLKWNDFFNQTPSNGTKFPWLIACINIESGFVSYSPVAYLL

SEQ ID NO: 219573 - protein, 33 aa, Zea mays
  Clone ID: MRT4577_131840C.1.pep
HRTIVAVHDSTLGGLFIATNADAEKGSWFYPSS

SEQ ID NO: 219574 - protein, 131 aa, Zea mays
  Clone ID: MRT4577_131841C.1.pep
KPEERKRTRPPGQATNGRTNLRNLAPKTLTRAIKQWKFKAQPTGALSHEVEQARVRERSEGAGERHRVAGGSSGSRAGSSGEPGPDAEQGKTPWANAAWGQAKELRPDAIRGAEFREELEGKLCGPGAHAS

SEQ ID NO: 219575 - protein, 560 aa, Zea mays
  Clone ID: MRT4577_131842C.1.pep
MDPKGKGMVVNDKEKESFVNDPKDDKPTDSGSSHKRKDGKKKKTRRIKEIVYYDDSDESSSSQKDDDNYEKKKTVNSNFSFDYSRIPQNTNAHLLSIPLGKPPHFDGEDYGFWSHKMRSHLFSLHPSIWEIVESGMQFDSSDSPMFINEQIHKNAQATTVLLASLCKDEYHKASGLDNAKKIWDTLKISHEGNDVTMLTKMELVEGELGRFAMIKGKEPTQTYNRLKTLVNKIRSYGSTRWTDHDVVRLMLRSFTVLDPHLVNNIRENPRYTKMTPEEILGKFVSGRMMIKEARYVDDALNGPIHEPQTVALKATRSKEALPSKVAQVEAAGLNEEEMALIIKRFKTALRGRKEHPNKTKTKGKHSCFKCGKIGHFIANCPDNDSDQEQGNKREKKKAYKKAKGEAHLGKEWDSDCSSSDSDNEGLAATAFNKASLFSNEHHTCLMAKEKKVNSRKSTYASSSEDESSDDDEIDYASLFKGLDRTKIDQINELIDALNDKNRLLEKQEDLLYDEHDKFVEAQNSLALEIKRNEMLSCELSTCHDSISSLKSVGVSRPGGP

SEQ ID NO: 219576 - protein, 328 aa, Zea mays
  Clone ID: MRT4577_131843C.1.pep
MDPKGKGMVVNDKEKESFVNDPKDDKPTDSGSGHKRKDGKKKKTRRIKEIIYYDDSDESSSSQKDNDDNDYEKKKTVNSNFSFDYSRIPQSTNAHLLSIPLGKPPHFDGEDYGFWSHKMRSHLFSLHPSIWEIVESGMKFDSTDSPMFINEQIHKNAQATTVLLASLCRDEYHKVSGSDNAKQIWDTLKISHEGNDVTMLTKMELVEGELGRFAMIRGEEPTQTYNRLKTLVNKIRSYGSTRWTDHDVVRLMLRSFTVLDPHLVNNIRENPRYTKMSPEEILGKFVSGRMMIKEARYVDDALNGPIQEPQTIALKATRSKEAQVEAAG

SEQ ID NO: 219577 - protein, 100 aa, Zea mays
  Clone ID: MRT4577_131844C.1.pep
DKYPDFFTPFDTDGFIGSLLDVHHGVYDYRYDDTKGVYIAIHNALLEVRNPVDVPFNVTVCQGSTISSALNRMLYFIKTFLSTEQSFDHIFVSINLSVIH

SEQ ID NO: 219578 - protein, 59 aa, Zea mays
  Clone ID: MRT4577_131845C.1.pep
MGDAQLVEVAEDKKKEEKKPDPVAEAAAAYYNQYYYHYPPPAAVVYDPYPRPGNTCSIM

SEQ ID NO: 219579 - protein, 122 aa, Zea mays
  Clone ID: MRT4577_131846C.1.pep
MAKQKIVIKVPMASDKSRSKAMALVAAAGGVNSVAIAGDGKDQVVVVGEGVDSIKLTTILRKKMGDAQLVEVAEDKKKEEKKPDPVAEAAAAYYNQYYYHYPPPAAVVYDPYPRPGNTCSIM

SEQ ID NO: 219580 - protein, 52 aa, Zea mays
  Clone ID: MRT4577_131847C.1.pep
MAKQKIVIKVPMASDKSRSKAMALVAAAGGVNSVAIAGDGKDQVVVVGEGVD

SEQ ID NO: 219581 - protein, 84 aa, Zea mays
  Clone ID: MRT4577_131848C.1.pep
VVSGEGLESVIICSRLGSSVGQDGAAQAGQVYAWFLIATRARSTGSLDSSASPHDAPSVVAWSLRPVLARSSYLCPCLAPVLPL

SEQ ID NO: 219582 - protein, 164 aa, Zea mays
  Clone ID: MRT4577_131849C.1.pep
MEAKMGRFFESVSNFFTGGDHIPWCDRDLIAGCEGELVNAANEEQRNESLMRLSWALVHSRQTDDVNRGISMLQASLDNSASPLQTREKLYLLAVGFYRIGDYSKSRQLADRCLEIQADWRQAISLKKAIEDKIAKDGLIGIGIATTAVGLLVGGIAAAVARKK

SEQ ID NO: 219583 - protein, 64 aa, Zea mays
  Clone ID: MRT4577_13184C.1.pep
SPRTPRHLSRLCSGTTMRGARKEDRTWYVPVHSPLHSCLFIAESSWQGAGKEDRTENDFHLTIG

SEQ ID NO: 219584 - protein, 136 aa, Zea mays
  Clone ID: MRT4577_131850C.1.pep
SNNVSGPALFSHHHLLPGGRYVFGGLHRHGGGGFDFDKGLVVELAVAAMEELVRMAQLGEPLWLPALAVDGATTIETLNEEEYARGFFPRGVGPKLPELRSEASREAVVVIMNHVSLIEMLMDVNQWSTLFSSIVS

SEQ ID NO: 219585 - protein, 88 aa, Zea mays
  unsure (1)..(88): unsure at all Xaa locations
  Clone ID: MRT4577_131851C.1.pep
HKKNKWSKGNQKDKVTGIVLFDQATSNKVLSLGAECPTRSAPSILSERLRVNGSLARRXAIKNLMAKGLIRMVSVHSNQQIYPRASNT

SEQ ID NO: 219586 - protein, 58 aa, Zea mays
  Clone ID: MRT4577_131852C.1.pep
LARLHAQRYTHRAAPRTTKYSLTASRFYAYSPDSPITVPACTLQFRMLMLHTPPSAPP

SEQ ID NO: 219587 - protein, 81 aa, Zea mays
  Clone ID: MRT4577_131853C.1.pep
RPSLLQSKFCFYEEKENSRVDLTLRFQPVTRQEPFLVPLWRPKPTMALVFLKVGWGNLSFLAWKEGQNDHVIPRDDHLVKQ

SEQ ID NO: 219588 - protein, 138 aa, Zea mays
  unsure (1)..(138): unsure at all Xaa locations
  Clone ID: MRT4577_131854C.1.pep
ENPGRPTRTRVPERVESPCMQGLSRRSSVADYEPKDGGEGGTTHDVGTKGSELEDTIKHEQLVSSVVLPADLATDHVKIDADLSSSKAVESTVKQRDETAELPRKGASVLYCVLPVRSSDSAASTSIXQDQDSLSVHV

SEQ ID NO: 219589 - protein, 66 aa, Zea mays
  unsure (1)..(66): unsure at all Xaa locations
  Clone ID: MRT4577_131855C.1.pep
MMPKNKGKGGKNRKPGKKEADDHKRELVFKEDGQXYAQVXRMIGKRRRQAICVDVXRRLCHIRTTM

SEQ ID NO: 219590 - protein, 38 aa, Zea mays
  Clone ID: MRT4577_131856C.1.pep
PPGVASCNQKHRLATSNEGGTSSVWAGHPFLHMNVKSS

SEQ ID NO: 219591 - protein, 54 aa, Zea mays
  Clone ID: MRT4577_131857C.1.pep
SGCLVDVGSMECQCYCRRLACDCSKYGFMSSFLVIGWLVQNLCVWSLSSRIPSL

SEQ ID NO: 219592 - protein, 81 aa, Zea mays
  Clone ID: MRT4577_131858C.1.pep
FNVIGYTLLLSLIEYKTLVMRGDLESANEILPSIPKTQYNSVAHFLESRGMLEEALEIATDADYKFDLAEQLEKLRVVKAV

SEQ ID NO: 219593 - protein, 64 aa, Zea mays
  Clone ID: MRT4577_131859C.1.pep
LRLQSEGGNPFSSLLHPPSFQGFPPWVPQLETLLNFFRVGPKFRRNFRPNKMGPPLLNLRGPGP

SEQ ID NO: 219594 - protein, 32 aa, Zea mays
  unsure (1)..(32): unsure at all Xaa locations
  Clone ID: MRT4577_13185C.1.pep
KNCDEDVNRSDNXLTSMLLITLVMRLSYQSTS

SEQ ID NO: 219595 - protein, 120 aa, Zea mays
  unsure (1)..(120): unsure at all Xaa locations
  Clone ID: MRT4577_131860C.1.pep
SWTAALDLRQHALGPVLTYQRADFXSIFHTLYALPDTMRLLDPTLHQFLPQGNIDYIVTEXICXETVANHEDTLARIDKLSKVNPTLGIRDCRLGISCPASTKTQTPSIFEAAIAMTNQS

SEQ ID NO: 219596 - protein, 174 aa, Zea mays
  unsure (1)..(174): unsure at all Xaa locations
  Clone ID: MRT4577_131861C.1.pep
MATKIXLALLALLALFVSATYARLIPQCSXAPSAIILISSLRPGTSMDFQHLAAQAYRLQXSLAGSVLQHPINQAATXALAHLTIQTIATQQPQQVLPAVKQLDVVNPVAYXQQQVLASNPLAMTNVAAYQRQQQLRQMLPALSRLAMVNPGPYLQQQQLVXSRRLVEEDAPTY

SEQ ID NO: 219597 - protein, 25 aa, Zea mays
  unsure (1)..(25): unsure at all Xaa locations
  Clone ID: MRT4577_131862C.1.pep
LDXRXCXXXTRARLANFVXRPXLMC

SEQ ID NO: 219598 - protein, 156 aa, Zea mays
  Clone ID: MRT4577_131863C.1.pep
YGSASCNQNAIHASEMQQVHTFMSISFLFYPRRNISSLLLRKQLSWKMEQFRIEFTRNVSKKSTYTRLAALVKEARRLRLLADLVKEVRRPSSTSADGPRRSNRPRKSNANMYGLAWVNVIEGPCNVYSLDFVLLISCGLKCIEINCNDFNFYGFK

SEQ ID NO: 219599 - protein, 397 aa, Zea mays
  Clone ID: MRT4577_131864C.1.pep
MEALTARSSVLSPPGIAGDTSPSLPLPLRRASAAFLGPRRSPSALAISTRWLRAPPRRGGRLLAGEGEEVPPDPADDAAGRAEDFLVLENNVTLRQSNDMDTIKHDDAGTSGIGGSNTGGSRTGLFRTPISGGVHSATAVHDLPPPALAVRNLMEQARFAHLCTVMSRMHHRREGYPFGSLVDFAPDPFGHPIFSLSPLAIHTRNLLADPRCTLVVQVPGWSGLSNARVTIFGDVIPLPTEQQEWAHQQYVSKHQQWASQQWGNFYYYRMHTISDIYFIGGFGTVAWVDVNEYEALQPDKIAMDGGEQNLKELNAMFSKPLKELLSTDEGEVDDVALISMDSKGIDIRVRQGAQFNIQRVPFEVDHSVETLDEATEALRRIISKSRWHTKSSVIGRP

SEQ ID NO: 219600 - protein, 55 aa, Zea mays
  unsure (1)..(55): unsure at all Xaa locations
  Clone ID: MRT4577_131865C.1.pep
MVSGSGVXXKXXVVDARXHMXGRLXSIIAKEXLNXQKVVVVRXEEXXMXGGLVRX

SEQ ID NO: 219601 - protein, 117 aa, Zea mays
  unsure (1)..(117): unsure at all Xaa locations
  Clone ID: MRT4577_131866C.1.pep
HGNPNFSXHAVGSENVRGTKFFCQKCGEEGHHARDCCKSLWCEICRKDTHVMAKCVWPRQIKPMMPIVGMAADGLGFFSSQYAKPSLRKPNLSCLGLVKILEGFVSASELEKDFSFH

SEQ ID NO: 219602 - protein, 97 aa, Zea mays
  Clone ID: MRT4577_131867C.1.pep
RSLLASCRIHGDMERGQLVADKIMDLEPTSSASYVILYNMYLDAGELSSASKTRDLMKERGVKKEPGLSWIELSSGVHSFVAGDKSHPESKAIYRKV

SEQ ID NO: 219603 - protein, 79 aa, Zea mays
  Clone ID: MRT4577_131868C.1.pep
LLPGPVYSGMKSTNHVASQERMTICCNPSMTSWSFIVGTCLDRTLVYNQAEYETNTVDSSSFTYYSFFCLREIDSVQMC

SEQ ID NO: 219604 - protein, 64 aa, Zea mays
  Clone ID: MRT4577_131869C.1.pep
GPTKYMVIQGEPGAVIRGKKGSGGITVKKTGQALVVGIYDEPMSPGQCYMVVERLADYLYEQGM

SEQ ID NO: 219605 - protein, 112 aa, Zea mays
  unsure (1)..(112): unsure at all Xaa locations
  Clone ID: MRT4577_13186C.1.pep
SLYALVGIGSQMAALILLAIVPSIVAMLYVETRTIITXYIACYSLTSFMSXYCSXWSVXLNGRKHCIKATILTAXLPAFWYLSIGLLTHTIAILYQSSATIPFGTMDVMNML

SEQ ID NO: 219606 - protein, 57 aa, Zea mays
  unsure (1)..(57): unsure at all Xaa locations
  Clone ID: MRT4577_131870C.1.pep
SGSKMEPPPRWCEPGELAGALDEGVVGVEPVLEKPLPQVAQNXMEHGPGDDAARVGG

SEQ ID NO: 219607 - protein, 120 aa, Zea mays
  Clone ID: MRT4577_131871C.1.pep
RLNINRALQRSGGGGGGGGPDKCGVRPGTTRASYYRGEHSTGELLPPAAPLVVDPRTCRPARYPEDGRNRVEGPRSLFFTARLAFPAVASYGSLETRTEVEVPGLLLAQDCLAVPNPSSL

SEQ ID NO: 219608 - protein, 240 aa, Zea mays
  unsure (1)..(240): unsure at all Xaa locations
  Clone ID: MRT4577_131872C.1.pep
NTLQAEVENLSLQEQALDERISDMREKLRGLTEDENNKRWLYVTEDDIKGLPSFQNETLIAIKAPHGTTLEVPDPDEAGDGRFHQXECYLEFSQGXIDVYLVSQFDEKFEELGGVATPVKHSSVPRHQPAEDFNTYAGQSSTPMDVAHDVQHGQKIPQDPSALHDFGGMTRISPSDVHTDSDYWLLTEGDVSMTDMWKTGQEVQWDQMDFLSEDVVTPRAHNQQPVTVDGPHMEVPSMDP

SEQ ID NO: 219609 - protein, 92 aa, Zea mays
  Clone ID: MRT4577_131873C.1.pep
MRAGVRQSCSRATPSVAPLPPLRRLTTFSSYFQAYQWHPVVLVWAVTLEGPFLAIEPLPRPFLLNPWVGTFCHLAYQTNLVQGFFFCPPTPR

SEQ ID NO: 219610 - protein, 44 aa, Zea mays
  Clone ID: MRT4577_131874C.1.pep
PLPLAHVNEALPDLDAYKQVRDPVPHPGSSLLAGLQGANPPLLL

SEQ ID NO: 219611 - protein, 100 aa, Zea mays
  unsure (1)..(100): unsure at all Xaa locations
  Clone ID: MRT4577_131875C.1.pep
GGHVHIITCNDDLYQMIIVAYTDVKTIVSNFKASXCAPCHVIAPVYAXTSTTYPKLIDLTIHINHLIXFNSSYDIHATTTFFLLNNGQLIYKLVDANKPE

SEQ ID NO: 219612 - protein, 975 aa, Zea mays
  Clone ID: MRT4577_131876C.1.pep
MAAVEAVAAAGATTTFIFAPNAAGVFRDNRRAIADDTGVLEIAMAPKRKRQSSTVAIIPPIDPNSQLPFAGNHMSVVSEPDLLHLMSIGVLPPRELCSWRICHGVTVPTEDTHESVIYVPFLLRGLALPIYPFFCGLLDFYHLNLTHLNPNSILQISIYVHLCEAFLGVLPHFGLWKYLYHYRPGMAGGQHQLVGGASLEMRRGRKTEYLEIPLKDSIKGWRLEWFIVENHGNSLPPRSGRQPDVRTPSWTESPTDQEVAEAGALLAKVGLLKERGLTAEAVVADFVFKNIQPLKDRAYPAYLYRGLADPTRVTNRRILAVDLVSRFEMILRGKVSNVGAPIVYSAWNLPPSKAFTHFVSNPPVADGSLGLRVRPSAEEVSALVASIGEIPDDERQVHFEVPLDPNDVEISAMLDMLAEESSNAAPAGTLAVAPLLEAGTTLDVQRPVSVRPRRPCRANQLDLSADEQKKKKRRLRQVSSLDRGTGPSVPAAEEVPVSEFTDADPNGCGMSVADPNGCTPSVADPNGGVACVADKDDREEENEVPLTRKNSRQYIASGESSGVPSPALSALVGLQELALANVDQTLEDMVPEDLLSEPADGDAMDVCADVFDAELGSSRAASRASSTLERVTEGPSALEAAAAESLTLRDGVNAHPAPEGVAEDGSARVGGVSHDPAPEGVAGDDPAQVGSASYDPAPEGVRAGSPSCTSMDVHVGSPPHSGGMVMAQVSGQGVALEASVPADQVLGSVDGTELVPAGSLQAASGGDFMPGHQLISHDLGVSSFFSNLQALVDGMASQLRSQGMARQIFVLEEKHSQGQAELEEKRALVASRDNLDRLYRDSSNSLTILERSHRFTMEELDNLRCRLQESTDDVIRLRQLISAKDAAIKELRASKKSIAQELETAQLAIKVVEETSVTLRAQRDRAMDKAIRAGRILMRRPSIVVPDDIRADVNATPDSSSRPSSSVAPEKDIAK

SEQ ID NO: 219613 - protein, 166 aa, Zea mays
  unsure (1)..(166): unsure at all Xaa locations
  Clone ID: MRT4577_131877C.1.pep
QAPEGPILCINXCGFFXTAETMNMRSKWHKEMITKHDXAKMDASLYXRIANGSDARHAXDAASTNTAIAVAQVELQTMNVQQTADVVVPSEALSXSPKGGSXGPNRCIACKKRVELTGFNCRCGNLYCALHRYSDKDDCKFDYRTAVRDGIDKDNTAVKEDKLHKI

SEQ ID NO: 219614 - protein, 403 aa, Zea mays
  Clone ID: MRT4577_131878C.1.pep
CGDASAAVSQLVEEDKLASNQRRRRCRPLSSDDQRHRRILHMLKKKKFVLKVELHKWLERLEKKDGKIMDRKTLTRTLNKRTRGGSCKCIKVSAPLVTNYARSRLFDVILHSSVGDVSPELVEQFRTRQRNFDTESRAGAAAKVKQNQHMTAIPGLRISRRVKVYKPLLLEAMYANGFIGAKMIRAKLFHKFLWAYVNSLPNWCNAFGCTKAGQYDKSLNQSCLLFSMEAAMKEMPLELFLQIVGSAKKIDNMITLCRLGKTLSEIPTEEYNQILDTHANGRLSRLVNILDKLKLVQLAKEFLEDAGVSSNAMYTHSMELRPYIEEPMPRILPSSQLNNHRKIRHDFVLSKKEFVDSYWETLECCYLTAGLADPLSAFPGSSVPEVCLICCTSLMHRIIAYVE

SEQ ID NO: 219615 - protein, 168 aa, Zea mays
  unsure (1)..(168): unsure at all Xaa locations
  Clone ID: MRT4577_131879C.1.pep
IRHEEHAYSGLRKDLHKHCEVQTLAPPDATLGNAIKYXLMIECLHNIAVMELLRXTAKSVTELXTVLAAHDLGPLILLLPHTLHKCNPKFSPETVDTVXIQTMELSHDLDXELNTYAMIVREXYGWHFPQLTXLSTDSIQSAKAAMMMASXVNAIKLDFSEILTHDQL

SEQ ID NO: 219616 - protein, 71 aa, Zea mays
  Clone ID: MRT4577_13187C.1.pep
PRGRRSRLTSCGGSHLGHALARGHDRVACVALSPMRSRTNGTCVQDVGTRMRCTTRGGFVVEPQNHPSWFC

SEQ ID NO: 219617 - protein, 76 aa, Zea mays
  Clone ID: MRT4577_131880C.1.pep
LFVCTVWLTLNKFHGLNCGINLGVKGGSKDCLHPTQYCSGVNWTVYPTPMFSVCIVQHDLVLAYLRGIALCRARCG

SEQ ID NO: 219618 - protein, 234 aa, Zea mays
  Clone ID: MRT4577_131881C.1.pep
MSASSAACRVCGGVAECACHGGAGARCGAAVADLNRGFPGMWHHHHQQPEEEEEPSVAGGGAAAGLQEFQFFGHDDDHDSVAWLFNDPAPHLHRGPAPAAAGNGVVPEAAQRRAPLFDGYAHAQYGQLPGHGLMFDVPLSRGGGDDDAAVLEAGLGLGGAGAGDSNPATTSSATIMSFCGSTFTDAAANGSASGADPEVDREAKVMRYKEKRKRRRYEKQIRYASRKVYAEMRP

SEQ ID NO: 219619 - protein, 122 aa, Zea mays
  Clone ID: MRT4577_131882C.1.pep
LIFFFPSFSLVFFFLFYRFFPLGAINEMPNGASNVALSEAWGDFTSKRFRTQLFNGAFATGYGCLSRRDTHLRKCGSFINLRAHRTNPNPSLVPNFDPFIKKPGTGPTKAWLPNKEKSTDLP

SEQ ID NO: 219620 - protein, 115 aa, Zea mays
  unsure (1)..(115): unsure at all Xaa locations
  Clone ID: MRT4577_131883C.1.pep
RRKLGIRLERHWRLGYLPVAPALDGLRAHPYLQAQTDPEPESDPEADVIEGRAKLGKLIEGYFNMENICSDAHLMQHRDGXGWVDTYLIAGYRKAHGLQKDLQYIKETVQHSVAL

SEQ ID NO: 219621 - protein, 119 aa, Zea mays
  Clone ID: MRT4577_131884C.1.pep
LTYMVDLSGGHTTSVSYWDRLVRLMNLTKVVEAFPTWNLLWVLVMLVACPVNYDVNTFKVMDAMAPIALIHGFFRTLNLIKGLLWFYQVLSGTAAASSMDTWLIPIMLSYMDAFYEAMG

SEQ ID NO: 219622 - protein, 49 aa, Zea mays
  Clone ID: MRT4577_131885C.1.pep
KNLKKKKKKGTLSVSFSPSSHTLSLLPYIFSIVSSIFFSVPVFKQRPLC

SEQ ID NO: 219623 - protein, 139 aa, Zea mays
  Clone ID: MRT4577_131886C.1.pep
KKISRPPRTNGANITGRRGQGPPPFENKGLLGGQTKTGKGGGEGEGNKNRGGKQKIRDRGQHPKTPPPGTKKKPNHWSGGSHPPPKRPFSLGQPFPSRETTDPGPTQAEKLGGGKTNHGFGGPALKTHPPATGLKPQNR

SEQ ID NO: 219624 - protein, 269 aa, Zea mays
  Clone ID: MRT4577_131887C.1.pep
MNTFSSHNARTALLLLALSFSLAVASDPMFSCGPSSASRAYPFCDRSLPAARRAADLVSRLTVAEKVSQLGDEAAGVPRLGVPPYKWWSEGLHGLAFWGHGMRFNGTVSAVTSFPQVLLTTASFDESLWFRIGQAIGREARALYNLGQAEGLTIWSPNVNIFRDPRWGRGQETPGEDPAVASKYAVAFVRGIQGSTPAGVAAAPLQASACCKHATAYDLEDWNGVARYNFDARVTLQDLADTFNPPFQSCVVDGKGSCVMCAYTVINGV

SEQ ID NO: 219625 - protein, 53 aa, Zea mays
  Clone ID: MRT4577_131888C.1.pep
FSTVVRPPDHTVKLRFCSNHNTWKVLVTFRFVLVVTFTFVLVFVLVLILLVAL

SEQ ID NO: 219626 - protein, 71 aa, Zea mays
  Clone ID: MRT4577_131889C.1.pep
NGNPRGPLLFAKACLEEDVFQIPPSEEKLSQFFNGKGLRNKIFVFGRILNFFLDPPKSRTLKRVWFGPLSR

SEQ ID NO: 219627 - protein, 63 aa, Zea mays
  Clone ID: MRT4577_13188C.1.pep
CTLFYYLFLLVGGALYNVSGVVHSLFSLSFYIFFLLIFNDAKNLPVFERNLFFILFKNKKRGE

SEQ ID NO: 219628 - protein, 68 aa, Zea mays
  Clone ID: MRT4577_131890C.1.pep
IVCLCVRCRILRGQRERNANFHTARQGMSPLFRQRSGKITLGQEGPNGAFFRAFIAFFFFFFFKNYKI

SEQ ID NO: 219629 - protein, 98 aa, Zea mays
  Clone ID: MRT4577_131891C.1.pep
QMPCDSDSLGCLEVSKRLVEVLLAKKLLWGTGIVSLRTKYFPPSILIGLYHLVGERRQPVTEIPRAKERRKGSLWGLMSSCAGFPIYRCPLVGHTLHW

SEQ ID NO: 219630 - protein, 84 aa, Zea mays
  Clone ID: MRT4577_131892C.1.pep
RGTGTPGGVAGTDLTREPKEPRDDDIFTFGHTQPLNSTRRTRSKTARPAPSVIEPTVYTADNLKQCRRISGVRFDTSETGSRRR

SEQ ID NO: 219631 - protein, 54 aa, Zea mays
  Clone ID: MRT4577_131893C.1.pep
MEMIKRILIAALLVVAVSATAVLASTEAAAAGAAPALAAAPAALLFSLLAYYLH

SEQ ID NO: 219632 - protein, 142 aa, Zea mays
  Clone ID: MRT4577_131894C.1.pep
ILAFKKPRYQLLTPSLTVRPLVRSPAVVCFFGPQVDPTSVSPLGSLPLGGNPFPPLDSPGTQTHPRPPRGPQAARRPPGRQARGPPSLKWRRRTPRRKRRPCLCSWRPGRGRGPAVPWPRTVTARRARGGFAGRSSASENPA

SEQ ID NO: 219633 - protein, 202 aa, Zea mays
  unsure (1)..(202): unsure at all Xaa locations
  Clone ID: MRT4577_131895C.1.pep
EPTRPPTRPPTRPPGANREVNQQPPIKXPAHPNKTERPQPSGKPXPPTYHRANPREXGDDQEDPHRRAPRXPSRPPQCWPPPRPPPPAPQPPPSRRRPPKPPLAPPAPAPAPAPPRGPPPAAPRPPSPPRPPRSSSPSSPTTCTKRTDGRTRAWHWHAWTVEHLCMHGRRHLQRCSHIVLLVCYEYLCMHGNGLCYLIIIIT

SEQ ID NO: 219634 - protein, 49 aa, Zea mays
  Clone ID: MRT4577_131896C.1.pep
LSPLFLKSPLRMLKLLQHSSVGAFNGCRFPKQCFLVSPPLYHIKKLSSL

SEQ ID NO: 219635 - protein, 65 aa, Zea mays
  Clone ID: MRT4577_131897C.1.pep
PPQHQKKTHLPDNTFGVPSTVYLEKNNYFKKSPINMKTIYSSPQNKRLSHCWPTRDNIPINIFNA

SEQ ID NO: 219636 - protein, 92 aa, Zea mays
  Clone ID: MRT4577_131898C.1.pep
MAGALPLGQKVIPFFFCYVFVLNQIFDIFLLFLVKPPFLCVCGRKYHHLGNLTRHKKFECGQEKRFVCSTCGKAFKRKDQLTAHSIQHYPHQ

SEQ ID NO: 219637 - protein, 102 aa, Zea mays
  unsure (1)..(102): unsure at all Xaa locations
  Clone ID: MRT4577_131899C.1.pep
GPGFPLGGCLLRLSLGLCPLQVQSHLQPWPKEKSHINIVAIAHVDSGKSTTTGHLIYKLGGIDKRVIDRFEKDADKMNKRFFKYAXELDKLKADPHRVITID

SEQ ID NO: 219638 - protein, 70 aa, Zea mays
  Clone ID: MRT4577_13189C.1.pep
HHVNRLHIERSSAIEYSSPIKTLRQAYISMPTLSIIVLNLDTLQIKIQLVLIMLNLSMVIIRLYIRLIII

SEQ ID NO: 219639 - protein, 49 aa, Zea mays
  Clone ID: MRT4577_1318C.1.pep
GMYSLIFLNVRPLPFQFQQFCLLSVLVSVQILTREFSNRNTYTLYHHLL

SEQ ID NO: 219640 - protein, 63 aa, Zea mays
  Clone ID: MRT4577_131900C.1.pep
LAFDVAQQVVIDVRLLRHVAHRSSSCSGDDFASSAGVCLVRTRPRVSPRVSVVAGRDSCRPVV

SEQ ID NO: 219641 - protein, 87 aa, Zea mays
  Clone ID: MRT4577_131901C.1.pep
KPNIPFWNYPKGPRKALPHFQGGRTPFFKRLVKKNLGSMKNKTAPIKPTKLRGSLGGKHAWSPQGGGMGNSDAEELCFCLGARNLGF

SEQ ID NO: 219642 - protein, 93 aa, Zea mays
  Clone ID: MRT4577_131902C.1.pep
THRVRLKGDPRDDFSFPWLFPAGMRPGADRVANLWDRLLCARPSTLDVALPISDPTKASRRKVRGERALEEWLAADNAGDTEAWPRGHGYRED

SEQ ID NO: 219643 - protein, 59 aa, Zea mays
  Clone ID: MRT4577_131903C.1.pep
SARGHKQSYIYANCLDLHYPPLVRGTSDQSRETDSDGNGYRARLRRRLSSYAPSTHASW

SEQ ID NO: 219644 - protein, 48 aa, Zea mays
  Clone ID: MRT4577_131904C.1.pep
MIAYLYIDVSHIQSMPKEPTSTSLNEEASKNQVLLHMTHVLYSLFISK

SEQ ID NO: 219645 - protein, 288 aa, Zea mays
  unsure (1)..(288): unsure at all Xaa locations
  Clone ID: MRT4577_131905C.1.pep
MTERHRASRQYHDDPRGYREAPPPPLARTRLLSPRRLEAPPPPLARTRLLSPRHLDEELSSRHAEMRRIRGDNQRLADEIVSLRQTMPRLKEDLQVSSQAVPKLRAEKELESRELTQRNLKLEAELRALEPLRQDALHLRSEASKLQSLKQELAAKVQGLSKELEHQKSESQKMTAMVAERDALCQELLQARANLEFEKKXKPELTAQVQXMEKDLVAMAQEAEKLRADISKRNTPSFSGRGAYGTSLSTPGMGLQGMYDGGYATAGSRYGSGAGAWSSHDPHGYPHL

SEQ ID NO: 219646 - protein, 75 aa, Zea mays
  Clone ID: MRT4577_131906C.1.pep
MAAKGKEVYVGAIDEGTTRTRVIEYDQLVQAVGSHQVQFKQHYQVEDWCEHDHRRSIETDGVCLKEAEGKGQDGR

SEQ ID NO: 219647 - protein, 65 aa, Zea mays
  Clone ID: MRT4577_131907C.1.pep
PFKRPPGQVPVAQLPHQPLWGPPSHSALHLIQEFGKSPQSILVIPKNEKVRCTRPPLSCLVWPII

SEQ ID NO: 219648 - protein, 118 aa, Zea mays
  Clone ID: MRT4577_131908C.1.pep
LRDISRYTGLLMKKCYTSATLGHTHTLGRSLLVSFMHADWTTSRCLEIPLSSLLASTHLDLIAHTLFAITTGLALLPSLGVRWQQSQTSTSSSGLAPVLLNGGDDRLCRNRRLKGFDA

SEQ ID NO: 219649 - protein, 80 aa, Zea mays
  Clone ID: MRT4577_131909C.1.pep
PPANYPSRGRLEHHRRGGRMVLEPCGGLILRRRRGLRRPTEWTGARTNGSPAPDTFYKRCLPEEDGSPLPEALASPRRSD

SEQ ID NO: 219650 - protein, 64 aa, Zea mays
  unsure (1)..(64): unsure at all Xaa locations
  Clone ID: MRT4577_13190C.1.pep
DCDPPHYVQLGKALCAEPKVPLGPVPPPKTLGEWAGLFKIFFXGKAKKGVGCSRVVVKGSGEKF

SEQ ID NO: 219651 - protein, 64 aa, Zea mays
  Clone ID: MRT4577_131910C.1.pep
KGNEFGIRRVFKENIFVKGRVVNFGLFKKKDKLCHRPYVYVTLDFFRTVEVFFICFCYKLFFFL

SEQ ID NO: 219652 - protein, 314 aa, Zea mays
  unsure (1)..(314): unsure at all Xaa locations
  Clone ID: MRT4577_131911C.1.pep
MADKVTVVPSRDPWPFSTVTVDDMKALVADGLLRPLSGDPQPEWMAPASEADPTPLRGGPDALEEGRAEPRPVLGSDDLIPARRDPNEWHGQALRFWTRGALKPLFVLDDEREEESRDELREYAEQAMGSLRSTMEILSRDVPRVLQGSLRFLRAALAEANERLAQRSTEVADLWLLCDELEVEAAVAWAEAASARTEARQRQLELGQVIEFETTLNDSVKALALAAEQKEADRVAMSEAISAFCQVFGLDDVPSGSSPXSRLRALGGHVRSRLRRALHHGVRRAFAVLASHYDVDLERVSEGYCLPDEDEAAL

SEQ ID NO: 219653 - protein, 331 aa, Zea mays
  unsure (1)..(331): unsure at all Xaa locations
  Clone ID: MRT4577_131912C.1.pep
MAHRTVRCATGAPTVRHRCANGHFQRLVLTQSRWTHGAPDSEQSTVRCTPDSPVRCPGPRCFHTAKSLFIRRETDVWGSLWFLRAALAEANERLAQRSTEVADLRLLCDELEVEAAAVEAEAASALTEAQQRQLELGQVIGEWDQSRSQAAEAVGRAEALGGQLAEVSARAGALAEDLSVVVGSAQSAQAIASELRARAEGTFRPLCDFDSASFFNSCLKNYVRLSTEFETALNESVKALAQATEHKEADRVAMSEAISAFCQAFGLNDVPSGRXPQSRLWALGGHVRSRLRGALHXSVRRAFVVLASHYDVDLERVSEGYCLPNEDEAAL

SEQ ID NO: 219654 - protein, 118 aa, Zea mays
  Clone ID: MRT4577_131913C.1.pep
TSTGDEASSYTTISRVCQNQQSIISRPFLQVVLGTTPTQPRSHLSLHLIFYPHTRPLLILLSTYYSPLLSHPDLIGQDPSYQISKTFYLIYHTPIPLMSSYLLETFMTILFLLVFNLM

SEQ ID NO: 219655 - protein, 360 aa, Zea mays
  Clone ID: MRT4577_131914C.1.pep
AGLGCLRCPSPSASPAPRWPPLHRCPRRGPPGPRSLLPPARGLQPLGTREGHSKNSPKTFSSSGHSGVRLNNEGFVLDRPGIDCGEDQDCVLGGIVALGKFDALHIGHRELAMHASKTGTPFLLSFVGMAEVLGWTYRPPIVAHCDRKRVLSSWAPYCRNVVPLEYQVEFSKVRSLSPRQFVERLSKDLRIKGVVAGENYRFGYKASGDATELVKLCEEFGLSAFIVRSVMDTAKRSLNGFSGAINSSDKGQVSSSRVRHALAMGDMEYVSELLGRKHRLLLMVNQHCLHEKKSMVLPNSCMLNMPPAEGLYENCDLVNGGYLGPCRVIINSDTIIIEMKDDNSLSLNPIQEVQLGIEFG

SEQ ID NO: 219656 - protein, 70 aa, Zea mays
  Clone ID: MRT4577_131915C.1.pep
GTNHIIFPYIGGEGYRRTVFFSTFLGGGLQLGGGGARTQKATGGGGGNKVVSLGGTRIINSPCSNRRVFI

SEQ ID NO: 219657 - protein, 38 aa, Zea mays
  Clone ID: MRT4577_131916C.1.pep
LSYSVTYIQSTVRRFTTFLLVKPWLYPTYSTRSTFPFC

SEQ ID NO: 219658 - protein, 45 aa, Zea mays
  Clone ID: MRT4577_131917C.1.pep
PRTLGRCGRRHHPKEARGQAQTEAECCCPGHGRSTAGLKPARDPT

SEQ ID NO: 219659 - protein, 48 aa, Zea mays
  Clone ID: MRT4577_131918C.1.pep
RIARVVLQHEDITTKIEGDWKRLNTLMHYQVIGGVFSPLQLPRMFSSR

SEQ ID NO: 219660 - protein, 61 aa, Zea mays
  Clone ID: MRT4577_131919C.1.pep
PHIQSWYNRGRHDLNAATSQMWQTIRNEQYSIQGTYFIARCDKHFQFVPDLPPVSVHRLEV

SEQ ID NO: 219661 - protein, 118 aa, Zea mays
  unsure (1)..(118): unsure at all Xaa locations
  Clone ID: MRT4577_13191C.1.pep
LRTERRSLHTHLSPRPKAFPLVPFFSHFSPPCSATAFRQHHERIACSIHIDQVXIQVRKLXWKLYCLKHGIQAEGXMPGDKTIEEGDDAFSTFLRGTGAXKHVTRADFGELDPTGMDE

SEQ ID NO: 219662 - protein, 210 aa, Zea mays
  Clone ID: MRT4577_131920C.1.pep
MSPRNLNVLITSFSGLGLPPTLVLPLSPSTTVTELREHLDDRLPTTQSRLILTTLSNKQLPNSSDSPISEFLSTTDDEFLSLRLAVPLCGGKGGFGSQLRAAGGRMSSRKKKSQEDHGSSRNLDGRRLRTVNEAKALAEYLAIKPEMEKKEKEKRRERWEQIVQASEQREAEIKSGSKSRLDGQWVEDKEESSERTRGSFGGHEGRQLQR

SEQ ID NO: 219663 - protein, 67 aa, Zea mays
  Clone ID: MRT4577_131921C.1.pep
SHVASHGRVLLLGRSIGCLVYSSCSVCARDVAASGCDCCCCSDDGLRMTGGAGVGRRSLRGGRPWRR

SEQ ID NO: 219664 - protein, 43 aa, Zea mays
  Clone ID: MRT4577_131922C.1.pep
DLLSRILNSSNSPTGSEAGSIPSVVPVPRRSRPSTQSHLMTHE

SEQ ID NO: 219665 - protein, 50 aa, Zea mays
  Clone ID: MRT4577_131923C.1.pep
VIGCRCHRRWSAASMRLCGDEGTSVESMGVEASHPYCEAKRPKWKISQGL

SEQ ID NO: 219666 - protein, 36 aa, Zea mays
  Clone ID: MRT4577_131924C.1.pep
STALSGFIIALQACEPLNIHDSGFRECYTALGIYRQ

SEQ ID NO: 219667 - protein, 147 aa, Zea mays
  Clone ID: MRT4577_131925C.1.pep
YMDTDYSIGSTNMHGVTTDMTTETVAEHAEREMANCITGCVCLFYTPHNTYVWDDSSIFLIIVEPPPQAIYRIIISMTTDRCDQIFAGVCTCSCYRFRMRGRTWRTSPWPEPTGSRYLFCWGTPTTTVACAEELIYSMEGNLLPHLQ

SEQ ID NO: 219668 - protein, 76 aa, Zea mays
  Clone ID: MRT4577_131926C.1.pep
LNCRDLLIHDFVPLCIAEFACPHAFNLPILFLLVMFPFRKLCLIKSRAEPMTCGHLIQNFVQTVDRDANRYWLGLG

SEQ ID NO: 219669 - protein, 39 aa, Zea mays
  Clone ID: MRT4577_131927C.1.pep
VQIMSCQCSCSSNSLNSLIICMRGVDKGSRDSLCLFGSC

SEQ ID NO: 219670 - protein, 61 aa, Zea mays
  Clone ID: MRT4577_131928C.1.pep
PTRSPTRTRTRGFFFFYTSAKHDTYKLFVVLPVGLNSLDSDYVYTLDPCATDRCTGFRCRR

SEQ ID NO: 219671 - protein, 121 aa, Zea mays
  Clone ID: MRT4577_131929C.1.pep
ARSGNHHRFDSFITLPNGTLICRPSALCLELHKHQDLTVGSQKSTVPKCCRSLKNGQLARVTPAVGESIVEGTVGGSLSSSLEQTHSSPSSSGRQPHRTHIDERSGIDPMTGSSPYNELSR

SEQ ID NO: 219672 - protein, 109 aa, Zea mays
  Clone ID: MRT4577_13192C.1.pep
IRVPPSPQLNAWVPHASLLAWSSFRRSPWFFFLVGGVPWCFCPRGGRDFCLIFFFQIMPSGWPRLPPFFFGRYVLFELLHVVDFKFFFWGELFFPCAGNTHQGFSSPPF

SEQ ID NO: 219673 - protein, 81 aa, Zea mays
  Clone ID: MRT4577_131930C.1.pep
TDATNTLYNKTAESAVDSPWARSYAQISPGSVNGNRWLARKGGLRNLGSEAYYQENNHEQAMLAGRIGHNPTMDPDHLKAP

SEQ ID NO: 219674 - protein, 66 aa, Zea mays
  Clone ID: MRT4577_131931C.1.pep
TIEMKRKKYCSKKKKKKKKKKKKKKKKKKKKKKKKKKKKKLKKKKKNQKKKKKKKKKKFFPSPGAL

SEQ ID NO: 219675 - protein, 45 aa, Zea mays
  unsure (1)..(45): unsure at all Xaa locations
  Clone ID: MRT4577_131932C.1.pep
QKCHSVTQVIKACMLYETLEILRGXPPHSLLFLTSTIKWDSIEKT

SEQ ID NO: 219676 - protein, 95 aa, Zea mays
  unsure (1)..(95): unsure at all Xaa locations
  Clone ID: MRT4577_131933C.1.pep
RRMLHAVYRGGYLDRTIQQYTECFGMRMLKKRXVNVXKYTNCFLGFWAKNTNFGGGLTYNYVVVKYDIGTRFGHFSIANDGVYKLPEKIKSRGAR

SEQ ID NO: 219677 - protein, 125 aa, Zea mays
  Clone ID: MRT4577_131934C.1.pep
IRLYYFETAHHELRCWPRRLLLKTPEWYYGLSWTTRGRTNSTLGEFSLTMTVKTPIPGSNRNALFERLGDLGRYPCHHFYYTSSCKILWLKDRKVLLSRFVFLLDILNPTSFYPYVAHGEYCSAR

SEQ ID NO: 219678 - protein, 318 aa, Zea mays
  unsure (1)..(318): unsure at all Xaa locations
  Clone ID: MRT4577_131935C.1.pep
DKSLIIELKAQLSHEFDRKDFRPAKKILMMEFXRDRHADIPFLSQKXYIEKVLEKYNLSSCKSVATPFAXHFKLSSRQYPLIEDEKEHMSHIPYSNAVGNLMYVVICTRPDLAHVVSVVSRFMHNPGKEHWNAVKWILRYLKGTSHFGLLFDKNSVNEIGVMGFVEGIIDFDFAGDLDKRRSISGYVFSLCGSVMSWRALLQSITALSTTEAKYVSTTKRVKEAIWMQGLISELGVTQDVINVYCDSHSAICLTKNDMYQFNTKHIDIKYHFIRDIVVEGKIKVDKIHTDANSADMLTKPLSNTKFKHCLDLVGVRGG

SEQ ID NO: 219679 - protein, 67 aa, Zea mays
  unsure (1)..(67): unsure at all Xaa locations
  Clone ID: MRT4577_131936C.1.pep
SFLVLYCLGLLPFFVTDILLYLIFFIELQESAFRVIADNYVTDHCVCLAVGIXEVWIYSSLIHLHPH

SEQ ID NO: 219680 - protein, 680 aa, Zea mays
  Clone ID: MRT4577_131937C.1.pep
MVFQKRSSSSEMESCGGGQVPEMPRVPKSARGKRSVRKKEAQSPAQMSAFDLLATVAGKLFDEGAGSLGNTSAGAPALAACAKDALVKQEQCDEQMKLFKHEATDQDSCNESAILPHIVLQRVVNNARNEDPKAKSEVQDKESSMISYTKAELGCNFGVIADRWSPESVESGACTGDAVARLMMTAPAGFHKNAPEMYSLLDSMDVDVKPPPLVSSDSTGEMPLHGDKIHRSTSLPRGPKGVGFFAVDRDDDDDKSSGCTHPSTATNKDFTSNCKAEYNRVRKLLTSKHRKVAPARIHKSDLSYSDVERKPSFRYKKMHTRQRTQRSTFKRRKLFDRHLALASEFGTANGKGNTKVAGRNSNAVSLEANKGTNSMPFQKSCGSNDCYVKLRIKSFNVPELLVEIPDSATVGSLKKTVLEAVTAILGGGLRVGVLHHGKKVRDDSKTLIQAGIGQDDMLDNLGFSLEPNCTQNPQVQAPEDVNFLENIDTTEPLARITPADSSSKLGEVDVSQELALTPLAMNYQGSDHDSVHSPGAVSSRDKDSRALFLVPAADPNAGAVVPANKTKRSPEQGHRRIRRPFSVAEVEALVLAVEKLGTGRWRDVKLRAFDNAKHRTYVDLKDKWKTLVHTASISPQQRRGEPVPQELLDRVLAAQAYWSQQQAKLQPKTPSLAEARLLTQ

SEQ ID NO: 219681 - protein, 40 aa, Zea mays
  Clone ID: MRT4577_131938C.1.pep
FGVVLTRGAVTLQSKKHTWNNPQGRAPHLRERPCGGTMGY

SEQ ID NO: 219682 - protein, 188 aa, Zea mays
  unsure (1)..(188): unsure at all Xaa locations
  Clone ID: MRT4577_131939C.1.pep
NFLFRVLKRGPPDMGFSSRAMSLMNPFFKGFFXKLPGGAVKLARVPKKPPLPSRGIQTPGGLVLPGGVAKPPVSGGTKAVPQFPPHLAACGGPGFVRAPPLPRVFCGGLYPPPPPPMVGLGNCLCSRGGAKGPGPAPPPPKSGRVVMGPFDFPPPFGKKKKKKKKKKKKKKKKKKKKKKKKKKKTPPP

SEQ ID NO: 219683 - protein, 145 aa, Zea mays
  unsure (1)..(145): unsure at all Xaa locations
  Clone ID: MRT4577_13193C.1.pep
MPPRSPPLAAAADVASVVTRCPHAEPSSELTASTIPAYRALIRELVSAGRLDDVDAALASARSHLAPDSLQPLYVASIQAYARAGRLRAAVDAFERMDLFACPPAAPAYNAIMDALVNAAYHDQAHKVYVRMLAXGVASDARTHT

SEQ ID NO: 219684 - protein, 685 aa, Zea mays
  unsure (1)..(685): unsure at all Xaa locations
  Clone ID: MRT4577_131940C.1.pep
MVFQKRSSSELEASGGGQVAEMPRVPKSARGKRSVRKKEAQNPPQMSAFDLLATVAGKLLDEGVGSLGNMSAGAPALTACAKDVRVKKEQCDEEMKQFKHEVTDQDSCNESAILPHIVFQRAVNNARNEDPKAKSEAQDKESSMISCTKAELGCNFGVIADRWSPESVESGAFTGDAVASLMPPAPAGFHKNAPEMYNLLDSMDVDVKPPPLVSSDSTGEMPLYGDKVHRSTSLPRVSKGVGFFXAVDRDDDDDKSSGCTHPSTTTNKDFRSNCTAEYSRVRKLLTSKYRKVAPARVYKSDLSYSDVDRKPSFRNKKMHYTRQRTQRSTFKRRKLFDRHSVLASEFGTAHGKGNTKKVTGRDSHAVSLEANKGTSSTPFQKSRGSNDCHVKLKIKSFKVPELLVEIPESATVGSLKKTVLEAVTAILGGGLRVGVLHHGKKVRDDNKTLIQAGIGQEDMLDNLGFSLEPNCTQNPQVQAPEDISFLETIDTAEPLARIAPADSSSKHGEVDLSQEFALTPLAMNYQGSDHDSVHSPGGVSSPDKVSTNSRALVPVPAADPNAGAIVPANKSKRSPEQGQRRIRRPFSVAEVEALVLAVEKLGTGRWRDVKLRAFDNAKHRTYVDLKDKWKTLVHTASISPQQRRGEPVPQELLDRVLAAQAYWSQQQAKLQPKTPPLLAEARLLT

SEQ ID NO: 219685 - protein, 121 aa, Zea mays
  Clone ID: MRT4577_131941C.1.pep
MDQHDHEMEQKGCLCRIKNCAIELLSMEEDLETDDEESWDLVGRDLRLKATFLCIDLSRLIAFCQGEEHKKALTVVANKFFYSMDELGDAVESRSLPLTQVRYGDTADALREVVAVLGPSL

SEQ ID NO: 219686 - protein, 59 aa, Zea mays
  Clone ID: MRT4577_131942C.1.pep
RESTPPSLERTVSDHAVVLLAVDAVGVRAQRAPHHALVLVGSALALLLPPLPITGPRAP

SEQ ID NO: 219687 - protein, 175 aa, Zea mays
  unsure (1)..(175): unsure at all Xaa locations
  Clone ID: MRT4577_131943C.1.pep
GRLRDELVHLPVVLAAGPLHKLSSSRGAGSSLLAPDHSCIEWLDAQRPRSVLYVSFGSLAAMDSSELREVAWGLAECGHPFLWVVRPXNMVRGCDVDSARQLPDGFEDAVKGRGVVVRWAPQQEVLAHRAVGGFWSHCGWNSTLEAVSEGVPMILRPDSVDQMMNTRYLHDVWGV

SEQ ID NO: 219688 - protein, 67 aa, Zea mays
  Clone ID: MRT4577_131944C.1.pep
DFFCRGGHTYYKVSLHKGDFPRKKGGGKQTPGATRGTKLKILQLSPYLQSPASYKIFLAGKWEPICL

SEQ ID NO: 219689 - protein, 446 aa, Zea mays
  unsure (1)..(446): unsure at all Xaa locations
  Clone ID: MRT4577_131945C.1.pep
MEQPQQHKGGAVPAPAAAAANGAGAGAEGAELIGYVDVLVRSARDIQNICIYHKQDVYARLSLPGDGAPAASTQVVNGGGRNPVFDQSLRLGVRAGDVDAAIRCEVWMLSRVKNYLQDQLLGFALVPLPEVVAADGGTLARDFPLTTSDLFQTPSGFLQLELSYIGVVPEVVPISPTPKPALADPEEEEEPGNNAADGVGNGKEYEKIEFPDLNLVEENQIMVSEYTRLPCAAVETQSCDSLLTSEHDDGATALSRDAAVRLVDSFSTDNSTADSVGAFQSDTPVSSVSTTEFPATPQSNSSSEPSGNAHSSADHKAKAASETADAEVDSSRTVQEXAGEXPCAASEAAVHKPVISVNIEQEVKVDGNQIMDMYMKSMQQFTDSLAKMKLPALDIDNGSSGKSSPAAATPSADSTGADSTAVKKPTAAGQQEKPSPKVFYGSRAFF

SEQ ID NO: 219690 - protein, 127 aa, Zea mays
  unsure (1)..(127): unsure at all Xaa locations
  Clone ID: MRT4577_131946C.1.pep
VHAARVLRPTHNRSVRAENRPTRERTPEHVPFGERDRTPATDAQALEKKNKQFHLSFPPHAQQKKGXXTHPFPAPPKNCVXRKKKNGWWWWWNPAAPLQKLADARRGLCFFLSRRQFDLKKKKPHPP

SEQ ID NO: 219691 - protein, 365 aa, Zea mays
  unsure (1)..(365): unsure at all Xaa locations
  Clone ID: MRT4577_131947C.1.pep
WDPRGRPGARAGDVDAAIRCEVWMLSRVKNYLQDQLLGFALVPLPEVVAADGGTLARDFPLTTSDLFQTPSGFLQLELSYIGVVPEVVPISPTPKXALADPEEPESNAAGNGKEYEKIEFPDLNLVEENQIMVSEYTRLPCAAVETQSSDSLLTSEHGDGATTLGHDAGVRLVESFSTDNSTADSVSTFRSDTPVSSVSTTESPAAAAFPATPQSNFSSEPSGNAHSSADRKEKPALETTDAEVASSRTVQEVPAANSPGAASEAAVDKPVISVNIEQEVKVDGNQIMDMYMKSMQQFTDSLAKMKLPALDLDIDNGSSGRSSPAAATTDADSTGADSIAVKKPAAAGKQDKPSPKVFYGSRAFF

SEQ ID NO: 219692 - protein, 121 aa, Zea mays
  unsure (1)..(121): unsure at all Xaa locations
  Clone ID: MRT4577_131948C.1.pep
RSTPRFLSHNSCPIELMWDLGIEVLEMVDKDMCDPSLAKGLLEKMEPFEFVFIMNLMXKLFAITNELLHILQRQDINIVHAIELTXDVKDQLATLGDIGWDHVFDEAKQYFEQKIGVKYGE

SEQ ID NO: 219693 - protein, 83 aa, Zea mays
  Clone ID: MRT4577_131949C.1.pep
GKITAPEKHSDTCLDRAHPFPQNYLLSKNRLRESQLKRLSLGEAPPSRNMGGALKTGGIALESCFLLALTAGVKRGCLRLGPN

SEQ ID NO: 219694 - protein, 228 aa, Zea mays
  unsure (1)..(228): unsure at all Xaa locations
  Clone ID: MRT4577_13194C.1.pep
MEVAEAPDEDGLDERGVALHLHLPRLLAGVVSGALTGLFALAGALTGAVTGAVAGRASDSGXVLRGAGLGAVAGAVLSIEVLEASRAYWCSDRLRLGSHGASSMANFIEQLLRARFVQEQFTTSGYASYRWQVSISDFGHDDLYDIFGDISSKGLPQESLKKLPHYVVTDQXRGLVRXQILSCPICLQDIVAGDTARRLPSCSHTFHQPCVDRWLVDRGSCPVCRQDV

SEQ ID NO: 219695 - protein, 104 aa, Zea mays
  Clone ID: MRT4577_131950C.1.pep
FMCLGGSDSFLVRSQAHIGLVVLFSRRYPLQAPIFSTELQCYGRTDGSPPPLGPSPLGAGQVHSLLASADTKQKALGMSVYARTHTTRSDLRRPVHHGNKCAGK

SEQ ID NO: 219696 - protein, 64 aa, Zea mays
  Clone ID: MRT4577_131951C.1.pep
IQANGTNVSGHLYHTHHLELVVQCLTSSKGLMRLLITLDFVVSIVMFIINHQIYNTCDNIVYSQ

SEQ ID NO: 219697 - protein, 74 aa, Zea mays
  Clone ID: MRT4577_131952C.1.pep
RRRTNQGINSRCCRKRSPSYDPLRKPAGLTEASQIITSCLDPSGFADPQQNAMTGIRDPLNHNKPVHKALAQTT

SEQ ID NO: 219698 - protein, 203 aa, Zea mays
  Clone ID: MRT4577_131953C.1.pep
MLARAPPPRPCSSGVCIARAHPRAAAVAARPGTTRTTTTVAAAAAEAASNGSAAAAVAGISSSSSALVTSTVGKSTNILWHECAIGQKERQGLLNQKGCVVWITGLSGSGKSTLACALSRELHGRGHLTYVLDGDNLRHGLNRDLSFGAEDRAENIRRVGEVAKLFADAGLVCIASLISPYRSDRSACRDLLRKHSFIDVFLD

SEQ ID NO: 219699 - protein, 301 aa, Zea mays
  unsure (1)..(301): unsure at all Xaa locations
  Clone ID: MRT4577_131954C.1.pep
ARRPPAKANHAGEGSSAAAGLQRRLHRPRTCKRRRRGQAGDDEDDDDGRGGGGRGRFARGSAAAAVAGISSSSSALVTSTVGKSTNILWHECAIGQKERQGLLNQKGCVVWITGLSGSGXLQELISSHLITNKGPSLYIYIRRNSARGISGLTXXKSTLACALSRELHGRGHLTYVLDGDNLRHGLNRDLSFGAEDRAENIRRVGEVAKLFADAGLVCIASLISPYRSDRSACRDLLPKHSFIEVFLDVPLQVCEARDPKGLYKLARAGKIKGAHSLDHSLTQDLRTGRPACICLLANREA

SEQ ID NO: 219700 - protein, 71 aa, Zea mays
  Clone ID: MRT4577_131955C.1.pep
YIYMYSFRLRMQSLLLRQGWTPLASSPSGHCPSLMATDRSRPLRARGALPQTSRPKQSAAEFFPLNTKTVP

SEQ ID NO: 219701 - protein, 81 aa, Zea mays
  Clone ID: MRT4577_131956C.1.pep
KNRAPWLGARLLEFAGAMGAAGEQGADWGKSQRELAASSSKGNGDLSGGDCWRARGREVSSAMGMTACCRDAGGRRGGRHG

SEQ ID NO: 219702 - protein, 95 aa, Zea mays
  Clone ID: MRT4577_131957C.1.pep
MGSWVRTITSPFRKMLSPQQRDGKKTPRRRHHHHQRRQQQSPSPSPSSSSAMEEEHSGEMEISRSQLYGEVMACTYEDVQVMWSMLDKARICSAS

SEQ ID NO: 219703 - protein, 87 aa, Zea mays
  Clone ID: MRT4577_131958C.1.pep
SSVFYGTAEKAVYVVISNGVVQRIHLRGVVNLEVVEALARCVDGGRPPISIDRRRTAVLLRRVRHAAPARILHSHRYAQTPAGLEGP

SEQ ID NO: 219704 - protein, 57 aa, Zea mays
  Clone ID: MRT4577_131959C.1.pep
KNTVKVQENLYHVAKKKKKKKKKKKKKKKKKKKKKKKKRWKKKKKKKYQTPSSRAGR

SEQ ID NO: 219705 - protein, 51 aa, Zea mays
  Clone ID: MRT4577_13195C.1.pep
CICIPINMHTYILRARILRERFYLIFYIELHTINNAIYSIKHRYCHLMCWP

SEQ ID NO: 219706 - protein, 45 aa, Zea mays
  Clone ID: MRT4577_131960C.1.pep
WVLKLHRGFYIGYQEMSKTCARIIHIVFPRSDKQKAFLSDHLLGI

SEQ ID NO: 219707 - protein, 56 aa, Zea mays
  Clone ID: MRT4577_131961C.1.pep
ERQCMSSLYKREGSVTVHQQKEYRFHSKTRKNIELIFYLQGFTDYPNGNYFGRVAP

SEQ ID NO: 219708 - protein, 75 aa, Zea mays
  Clone ID: MRT4577_131962C.1.pep
PRVRLRSLLCICACCCYIVLLYVYFILSLTPVLIVIICVRRERLQLMKIPHNQDTVRYKEELWYSSLIFGSLESG

SEQ ID NO: 219709 - protein, 79 aa, Zea mays
  unsure (1)..(79): unsure at all Xaa locations
  Clone ID: MRT4577_131963C.1.pep
MAPLLAAAMKHAGAHPGLRSHLVGPNNKSFSRHHLPSSSRXISKRRCNLSFTTRSARVGSXQHGLQMFRPSEIAQRDWF

SEQ ID NO: 219710 - protein, 104 aa, Zea mays
  Clone ID: MRT4577_131964C.1.pep
NKISGVYYWQKSPRGMARGVLNFGKKHGFFLNRNPNRLKSFWFDLRPQFPKLPMVRYSWGNTPTHIFGGASEINLIPQKKTPRYMTLGPTCPPGRRIHFRAPAS

SEQ ID NO: 219711 - protein, 58 aa, Zea mays
  Clone ID: MRT4577_131965C.1.pep
SPGMVHYHKSPFPTCLVQMSKIESLPKEKGAQGVAAGLPSSLAPTCPPPDPSMKLHNN

SEQ ID NO: 219712 - protein, 66 aa, Zea mays
  Clone ID: MRT4577_131966C.1.pep
RQIRLREPCPDLIPPSYAIQPRVHQLLRASTEQRALLPNGSSYYNCHPGGQTNPYHSRMLPHHPMP

SEQ ID NO: 219713 - protein, 419 aa, Zea mays
  unsure (1)..(419): unsure at all Xaa locations
  Clone ID: MRT4577_131967C.1.pep
MDPKGKGIVIDDKEKEIVNNNEPKGEPIDSSLNNKKKDGKKKRRIKKIVYHDGDASSFSPKDDDDDSSSKKKAVNQNYSFDYSRIPYNSNAHLLSIPLDKPXHFDGEDHSLWSHKMRSHLFSXHPSIWEVVENGVHFCSNDNVIFIHEQNHKNAQATTVLLASICRDEYNKVSGLDNAKEIWDTLKIAHEGNDATMITKMEFVYTKMTPEEILGKFVRGHIMVKEARYVNDIANGPLPQYELQCVALKATTNKEALLNKVAQVEAANLNEKEMTLVIKHFKTALKGCKDNPNKNKSMRKCSCFKCDMDDFKLLELVGLEMDLCVTKVQQFQGGKTNQTQQIQMLQVNTLTARSYNTFLLNPAQEFIRAKACQVISLGDLMRTFSKHVVLLAFHKAHQMVEHTLYPPPTLSHITRSILGV

SEQ ID NO: 219714 - protein, 75 aa, Zea mays
  Clone ID: MRT4577_131968C.1.pep
TPAGTGPEFPGRPTRPRNSSEQDKGYFIYTSLICFSFSSFPKLALEEFEERKCSLMMQPGPSVREKTEGFLPPIS

SEQ ID NO: 219715 - protein, 201 aa, Zea mays
  Clone ID: MRT4577_131969C.1.pep
MAVEQYRLLDDMSLDDQHVQEVFNITGQRVVKGMMYDARVKTYFVGHKGPDTDHPDVLCDKNAIQNLGRYIETMQKKHGPEVDWMTTDFDMAIAYAAGGEVRHGSDDIVEHRSYSRWSSSSVGTSRPRRPSAQNEELMEDQQKLREEMQQMRQKMQMMKSQHMYMWMHQQTYGSGVPQPGITSTPPVNPTSSHVDAPHILG

SEQ ID NO: 219716 - protein, 67 aa, Zea mays
  Clone ID: MRT4577_13196C.1.pep
KKGSKFLCRDAPGFFMKIGPKGVKEKKKSILILDYWSNFPKKETAASPTGGMAPWEKQGVGPPEGRG

SEQ ID NO: 219717 - protein, 72 aa, Zea mays
  Clone ID: MRT4577_131970C.1.pep
LDASGYQVPRGGFKNTGGTNKPLMELNWTAACGEGKMVAGLHPVSKPRANSGLMLGCAGLPFLRGDHGALLE

SEQ ID NO: 219718 - protein, 105 aa, Zea mays
  Clone ID: MRT4577_131971C.1.pep
MFLWNGFYGGGAPLGLGKKEAKILFFGLKNAGKTTLFQLLKKKGLGKNHPRKNPRWEELKIGKIKLKAFNLGGHQIARRGGKNYYQKVEAEKYREKAYEKEGFVE

SEQ ID NO: 219719 - protein, 167 aa, Zea mays
  unsure (1)..(167): unsure at all Xaa locations
  Clone ID: MRT4577_131972C.1.pep
IQQYAGHEPSEEAIEGAYEKIIMKSYQQRKKTKINLKTKLKKRVEESPSWVKALLGCFEVPSMDIISRRLFFFAFIAGWSIATSAENGPAFQLAISLFSCIYFLNEKMKNLLRASTTGFGILVGGWIIGSLLVPLVPTFIIPPSWSPDXTPSLVAYIFLFLGSTFLK

SEQ ID NO: 219720 - protein, 81 aa, Zea mays
  Clone ID: MRT4577_131973C.1.pep
TLWTFFSSSFSLTIRQIVFFSVTVPLCCATPFVVFSCIMGQDLGRGEAHTGWVFRVRMSRDNTPLAYLIGLTGAFFHGLEP

SEQ ID NO: 219721 - protein, 295 aa, Zea mays
  unsure (1)..(295): unsure at all Xaa locations
  Clone ID: MRT4577_131974C.1.pep
MQATAASFLARPLPRLRRIGSWGADAAVVREGVIALPLRLRGPRCSISLSIGAGAGAGAEADHEFSYEHVPVFPRYRIRDPYKLLGVDRDASEEEIRGARNFLIQQYAGHEPSEEAIEGAYEKIIMKSYQQRKKTKINLKTKLKKRVEESPSWVKALLGCFEVPSMDIISRRLFFFAFIAGWSIATSAENGPAFQLAISLFSCIYFLNEKMKNLLRASTTGFGILVAGRLXGSTRVPVIPLSISTRCSLLVLTWLIGFLPAPRAPALLNPPRWSQELVTGLDAPEMKLLGSSNRN

SEQ ID NO: 219722 - protein, 112 aa, Zea mays
  Clone ID: MRT4577_131975C.1.pep
FLSLISYLGIELFQRDCPPPSPFCRVLLPQGFFLSFGALPPRKKIFPSGWPKVLSGSKGFQSFFGFPSPTLQCFFQLFGPNKVKFPCQFIKPFLVSPRMPPFLMDQSMLWKA

SEQ ID NO: 219723 - protein, 139 aa, Zea mays
  Clone ID: MRT4577_131976C.1.pep
MAAPVAAYSPALRVQVKAAMDAASSFRVLASLSFPGQRASFPSIRMQKRSQVSCSLAKQETVEKVSEIVKNQLALPEDTGVTGETKFVDIGADSLDTVEIVMGLEEAFQISVDESSAQEIQTVEDAAALIDKLIAEKDA

SEQ ID NO: 219724 - protein, 139 aa, Zea mays
  Clone ID: MRT4577_131977C.1.pep
GRDLHFLPICVPPPRRLRPIDQPQPPSHLAVDRRACRPPAVSTQSNPPASRAVLRGGGVRLRTRADWQSRRGYTATCVRASGVQHTQDVQREVSGRVCGDGWPAGPLTHYAPCLILHQITRPDGTTTELPYPLYAIQNK

SEQ ID NO: 219725 - protein, 164 aa, Zea mays
  unsure (1)..(164): unsure at all Xaa locations
  Clone ID: MRT4577_131978C.1.pep
MAAPVAAYSPALRVQVKAAMDATSSFRVLASLSFPGQRASFPSIRMQKRSQVSCSLAKQETVEKVSEIVKNQLALPEDTGVTGETKFVDIGADSLDTVXTLSVCLMISNKQTNKQRIWCVVTXEIVMGLEEAFQISVDESSAQEIQTVEDAAALIDKLIAEKDA

SEQ ID NO: 219726 - protein, 111 aa, Zea mays
  Clone ID: MRT4577_131979C.1.pep
PTRYMTDMITYAENDVHIEVDSLRPECAEQRSSPKTPQRASAFRSKLRPRAALQWMVRHLFSAMSGALSTAPVPGLSCLWRTHPGQRTHLVIHDRTPLHVHVHDAASDVPQ

SEQ ID NO: 219727 - protein, 76 aa, Zea mays
  Clone ID: MRT4577_13197C.1.pep
DLLGFENGMVKPQVMPLPIGKQRNDWWSCTITDIFHRGQDPCFFCKRCTDGINTYLNKQQRRCLKRNCHSPCRGSL

SEQ ID NO: 219728 - protein, 60 aa, Zea mays
  unsure (1)..(60): unsure at all Xaa locations
  Clone ID: MRT4577_131980C.1.pep
QYLASIRLIFIGMAYSSGGVXKHTXYSLPHNILXYYYXSIXTXXXIIIIIXTIIXLXXHX

SEQ ID NO: 219729 - protein, 97 aa, Zea mays
  Clone ID: MRT4577_131981C.1.pep
LLRLCSAQKAFRFSARNEQRAARGRSGDREKEEGEMLLLGLATGCCVLAVAGEAEKQDGGGASSSGGGHGLGSKISPAVLFAVVIAAVVLFVSCLLH

SEQ ID NO: 219730 - protein, 240 aa, Zea mays
  unsure (1)..(240): unsure at all Xaa locations
  Clone ID: MRT4577_131982C.1.pep
PGWNHGTACFLATERRRCVFSPASSILRPRLPPPSWAPCPTASDSRAXCGRASPSNMPALACSAASSSSAATGAQKPWLFVGLGNPGRMYKGTRHNVGFEMIDAIAEAEGISFSSKQFKAVVGKGLIGDVPVMLAKPQTFMNASGESVGQLVSYFKIPLDQLVVIYDDLDLPFAKLRLLPKGGHGGHNGMRSIVDHLNQSRDFARLRIGIGRPPEELGAINFVLRSFTKATSQHVCALID

SEQ ID NO: 219731 - protein, 80 aa, Zea mays
  Clone ID: MRT4577_131983C.1.pep
PRVCPRILRFCCYTISIYYGCYTMRGVPVRERHGLSRISDLDRTADVGMHLIVIVHMFVLLRCQDIILARFSTQTLHSLV

SEQ ID NO: 219732 - protein, 141 aa, Zea mays
  Clone ID: MRT4577_131984C.1.pep
KKKTLGFNRGFTPGLNPPVPYFGKAHKSPGDHKPQPPILNKIFCPGQKRFHQIFPGESNQNPLFLPETPLEKSGGKRFLLSLCPAGGVGGPPPLAPQGFPPTGKREKNHLNSFPRVGPFRGGQKNFRGIRNQGAKRGNNFY

SEQ ID NO: 219733 - protein, 157 aa, Zea mays
  unsure (1)..(157): unsure at all Xaa locations
  Clone ID: MRT4577_131985C.1.pep
FGTSQLTTSPTPNPYLAFYCSGNDDGRVSAAAPNPSSPSVEKSLRRHKSADGRLELQIQPAXTNVQGRTRLTSHITRRDALSFMSSGVLAAFVLVVASPAEARPSRLENKRKALEKLEKLREKALGPKEKSGATGNGKEMPPPANLLIPPAAVEAFL

SEQ ID NO: 219734 - protein, 61 aa, Zea mays
  Clone ID: MRT4577_131986C.1.pep
FDAHAYLDLHEIMVLGWAFTRETLGDAGVSHSNLTQALFKNSRNPSIKEYSVDIHLKLFCL

SEQ ID NO: 219735 - protein, 72 aa, Zea mays
  Clone ID: MRT4577_131987C.1.pep
AGFFSTYFDIESKLTRSTPKGLKNTMMFVLSLPQFSERSEQDSSTTARTCSSVVGVFAMPAGFSEATLEAST

SEQ ID NO: 219736 - protein, 215 aa, Zea mays
  Clone ID: MRT4577_131988C.1.pep
MAHRVDNEYDYLFKIVLIGDSGVGKSNILSRFTRNEFCLESKSTIGVEFATRTLQIEGKTIKAQIWDTAGQERYRAITSAYYRGAVGALLVYDITKKQTFENIQRWLRELRDHADSNIVIMMVGNKSDLNHLRSVPEEDGQTLAEKEGLSFLETSALGALNVEKAFQTVLSDIHQIISKKALAAQEAAGSGPPGQGTTINVADSSANTKGGCCSS

SEQ ID NO: 219737 - protein, 384 aa, Zea mays
  unsure (1)..(384): unsure at all Xaa locations
  Clone ID: MRT4577_131989C.1.pep
MAGRRAEEEYDYLFKAVLIGDSGVGKSNLLSRFTRNEFCLESKSTIGVEFATRTLHVEGKIIKAQIWDTAGQERYRAITSAYYRGALGAVLVYDVSKPTTFENISRWLKELGGTPASPSVSMLFGYRTPLRLSSSAGRDDHLYRPPIPPRASGRIRGAGSAAAVGGRPVMVHRXDNEYDYLFKIVLIGDSGVGKSNILSRFTRNEFCLESKSTIGVEFATRTLQVEGKTIKAQIWDTAGQERYRAITSAYYRGAVGALLVYDITKKQTFENIQRWLRELRDHADSNIVIMMVGNKSDLNHLRSVAEEDGQALAEKEGLSFLETSALEALNVEKAFQTVLSDIHQIISKKALAAQEAAGSGPPGQGTTINIADPSANTKRGCCSS

SEQ ID NO: 219738 - protein, 174 aa, Zea mays
  Clone ID: MRT4577_13198C.1.pep
MTTIRRFCCDDLLRFASVNLDHLTETFNMSFYMTYLARWPDYFHAAVSPGGRVMGYIMGKVEGQGESWHGHVTAVSVASEFRRQKLAKKLMNLLEEISDKMDKAYFVDLFVRASNMPAIRMYEKLGYVVYRRVLRYYSGEEDGLDMRKALSQDVEKKSIIPLKRPITPDELEYD

SEQ ID NO: 219739 - protein, 215 aa, Zea mays
  Clone ID: MRT4577_131990C.1.pep
MAHRMDNEYDYLFKIVLIGDSGVGKSNILSRFTRNEFCLESKSTIGVEFATRTLQVEGKTIKAQIWDTAGQERYRAITSAYYRGAVGALLVYDITKKQTFENIQRWLRELRDHADSNIVIMMVGNKSDLNHLRSVAEEDGQALAEKEGLSFLETSALEALNVEKAFQTVLSDIHQIISKKALAAQEAAGSGPPGQGTTINIADPSANTKRGCCSS

SEQ ID NO: 219740 - protein, 106 aa, Zea mays
  unsure (1)..(106): unsure at all Xaa locations
  Clone ID: MRT4577_131991C.1.pep
CGWYQFKVGGADDRPGPGIIRLKAASCGYPGGPTLGKQLYSAIDQDSRIXPVGSNGMGAFTLQTGWEGALQPTCGTVFRCLEACTVALSHTHGARRDEAGKPVGHM

SEQ ID NO: 219741 - protein, 215 aa, Zea mays
  Clone ID: MRT4577_131992C.1.pep
MAHRVDNEYDYLFKIVLIGDSGVGKSNILSRFTRNEFCLESKSTIGVEFATRTLQIEGKTIKAQIWDTAGQERYRAITSAYYRGAVGALLVYDITKKQTFENIQRWLRELRDHADSNIVIMMVGNKSDLNHLRSVPEEDGQALAEKEGLSFLETSALEALNVEKAFQTVLSDIHQIISKKALAAQEAAGSGPPGQGTTINVADSSANMKGGCCSS

SEQ ID NO: 219742 - protein, 102 aa, Zea mays
  Clone ID: MRT4577_131993C.1.pep
VCKWLTYNEDRLYMAGLTLMSQDKVVMESCYYLKDAVLYCGIPYNKAYRMTAFEYHCTDSRFNRVFNERMKNHSLIITKKMLDFYTGLQGVSTLVDIGCGLG

SEQ ID NO: 219743 - protein, 129 aa, Zea mays
  unsure (1)..(129): unsure at all Xaa locations
  Clone ID: MRT4577_131994C.1.pep
AKVINYKFGIVXGVMTAVHAIFATQEAVXDGPSSKDXSGERSASFDVIPCSSGAVKAVGKVLPDLKGELAGIAFRVATVEVSVVDLTVRLEKXSATCHEXLGSIMVEAECSLNGIPGTVEEAVDLPVFQ

SEQ ID NO: 219744 - protein, 152 aa, Zea mays
  unsure (1)..(152): unsure at all Xaa locations
  Clone ID: MRT4577_131995C.1.pep
FGLPPVRYRVLDLTWEALRVVDLPTNPPSGSGSHPPEISRDIGSQSLTYGMAFGGPGGLWTFIYXNINLDQFVPSXWPXPISNKTHKKGLYKAFPTLYASMHDQATGPHKTQFTIDEDYVPSCWVTHNFQLYAAFYPLVVKTQAIFTCHRLC

SEQ ID NO: 219745 - protein, 62 aa, Zea mays
  Clone ID: MRT4577_131996C.1.pep
ICGGTLYRGQSFTGTLKPENLKVLFITNNSLNLESSIFFALITLELNDLDLLWVLIYRIFVS

SEQ ID NO: 219746 - protein, 274 aa, Zea mays
  Clone ID: MRT4577_131997C.1.pep
MKDDSVRHTPVRVYAIRYLDDILVVTSGSKMLTIEIRNRIIAVLERDLEVRVDRLGSSIHSAVSEKIEFLGIEFQAVPPSVLHPPMSEKAKRARKKYLKMKAEKAQELKNARETRRKKLGLKILNHLSKRMRRGEEFEFDFRIEKEVQQVFRDWAEETVAEYFESREHCRYWHRLLASGDFLSLNRVRDQLPPALVDSYDKFQETIDKFLMPMKGHDLTEEEEILAEEEEEEQYEKRIVEDLTELKMRANVPIDLVRKEVKLAGSANSMAGSRS

SEQ ID NO: 219747 - protein, 62 aa, Zea mays
  Clone ID: MRT4577_131998C.1.pep
AGLRRGLGIVSLIPIMLLITLTWVLAVGMIVADLIMEEELELTMERGLPLMVRASFHSAPVR

SEQ ID NO: 219748 - protein, 88 aa, Zea mays
  Clone ID: MRT4577_131999C.1.pep
ALKRIWFEKLCGLWDSSSVAKRLFFFSLSPKSYELGNLDCLEQKIVYKRTIPKGISKPCGGQQAHPSREKTPKVGESLQSFKEVLSTE

SEQ ID NO: 219749 - protein, 31 aa, Zea mays
  Clone ID: MRT4577_13199C.1.pep
LRWHCRCHERYSNSREQSQCPASSDHVILHG

SEQ ID NO: 219750 - protein, 142 aa, Zea mays
  unsure (1)..(142): unsure at all Xaa locations
  Clone ID: MRT4577_1319C.1.pep
IVRQRSCCRWGAHGLSWTLSAHPKLPKGKPRCVAVLDGWGEANLDQYSCGRGSHTPGMDSVKKGAPEKWRLVKAYGTGEGLPSXDDDMGNXEGGHKALGAGRIFXQRAKTCQXALASGKIYDGVGFNYIKKCLERGTLHRIG

SEQ ID NO: 219751 - protein, 65 aa, Zea mays
  Clone ID: MRT4577_131C.1.pep
PFCSPRERSLSLSTGDDSGTGAALRETPRSSPTTSIRYAHPISSLTYCYAETSAQTLNLVICNRI

SEQ ID NO: 219752 - protein, 41 aa, Zea mays
  Clone ID: MRT4577_132000C.1.pep
ISMVLTLPYITEVGLIAILSRLPISQRYDHTSCHHNPLSIS

SEQ ID NO: 219753 - protein, 64 aa, Zea mays
  Clone ID: MRT4577_132001C.1.pep
SYQASKDILPKKDHISCSCNVCKYGPRWFFLHYKSWNSLLNAVFCHQWCYGSPNFCVYEPTVKM

SEQ ID NO: 219754 - protein, 62 aa, Zea mays
  Clone ID: MRT4577_132002C.1.pep
THSTRGHGDLISVSTTGGAAGNSSKWCEELWTVAYADPRLTCTGFRGTPSVLHATRAPRHSP

SEQ ID NO: 219755 - protein, 233 aa, Zea mays
  unsure (1)..(233): unsure at all Xaa locations
  Clone ID: MRT4577_132003C.1.pep
MAGAYVRTAVALALGCALAIAADALEPSGWVRAHATFYGGSDASGTMGGACGYGNLYAQGYGTRTTALSTALFSDGGACGQCYKVVCDRKTDKTWCKPGVSVTVTATNFCPPNWDLPSDKGGWCNPPRPHFDMAQPAWEKIGVYRGGIIPIIYQRVPCVKKGGVRFTISGHDYFELVLPTNVAAAGSIGAMXDVRGSKSXDWMGRAHNWGANWHSLAYLNXQGXLSFRAXITD

SEQ ID NO: 219756 - protein, 62 aa, Zea mays
  Clone ID: MRT4577_132004C.1.pep
CRMPALGCSRACQSLAAFVLFFCFISPPNLSYFNAKGRPTPRLKKSRYRRYHTPNSEGQPPS

SEQ ID NO: 219757 - protein, 254 aa, Zea mays
  unsure (1)..(254): unsure at all Xaa locations
  Clone ID: MRT4577_132005C.1.pep
MRKTPAKRINPYPDKYSSPSKPKQILFDSPYQSADHKLFRLFESQNTGILTMTSLDFTGKVAIVSGCASGIGLATTRLLLSFGAKVFGLDVNNADLIHSAFTFHRCDVTTNEAVSEAIQNCLELYGARIDILANVAGVMDAFSSADTVTESEWHRVLSINLTACMYLTKAVLPHMLPYTSGAIVNIGSRASLGGGAAGIAYTASKHGLIGLTKNIAWRFHKQGIRCNAVXAPGNTQSNISQSMHMHELDQVAYE

SEQ ID NO: 219758 - protein, 88 aa, Zea mays
  Clone ID: MRT4577_132006C.1.pep
DRGPQIPCATRSAYTGQIHGCQVHCLLHVLPLQEHMPVDDTIIRPQDDFDTLLRDNGGGMHRPSSRGHGDVETTVIEEARTGTYRLLL

SEQ ID NO: 219759 - protein, 48 aa, Zea mays
  unsure (1)..(48): unsure at all Xaa locations
  Clone ID: MRT4577_132007C.1.pep
HRRKGGPQTDXGGXHDTGXKRTKSAGRTXXRMNTKGRKXRELRKXARK

SEQ ID NO: 219760 - protein, 362 aa, Zea mays
  Clone ID: MRT4577_132008C.1.pep
CSSAIDADHMMFPLAFGVVDSESDDNWNWFISELRKMLGVNTDKMPVLTILSERKRQVVKAVGSNFPTAFHGFCLRYVSESFLDEFKNTKLLNLFWSAVYALTASEFDAKVNEMMRVQDVMPWLQRFPPNLWAVSCFQGIRYGHFSLGITEILYNLSLDCHELPIVQAIEHIRHQLTCWFAERQNLAQSYNSVLVPSAEKLVSEAIHDSQCYQVLRANKVEFEIVSSERTNIVDTEARSCSCRRWQIYGIPCAHATAALLSCGEDPRFYADDCFSVMKYRETYSQPIYPIPDRSHWNDSSPGSQGAVSKADVVLGPPNIRRPPGRPKMKILKIESMKRPKRIVQCGRCHLLGHSQKKCSLRS

SEQ ID NO: 219761 - protein, 163 aa, Zea mays
  unsure (1)..(163): unsure at all Xaa locations
  Clone ID: MRT4577_132009C.1.pep
RGDSSPMAPSQRGPRWRPFCPPGGTQRKQGNPLAPSFPRDKGVIVIAHETPPWGRGPWAKPPTPKYCNRPAPADGAPPCLFFVSGQVMPGPPQQKKKKGFFFSPAGAPNQRGGGVYLNFRGGAKKGGVIFCWGRPPPKKKKKKKKKKKXKKKKKKKKGEGAPL

SEQ ID NO: 219762 - protein, 141 aa, Zea mays
  Clone ID: MRT4577_13200C.1.pep
AARTAPLARFICTAPVLRPHQPNHLHSNDSTRSRMTMTSTMHPAALRLRVRSPCTDIDGQLRCETTGLVAVLKMCVPFIEFARVCRIALFQDINGSGRGSPRSVRRRASIEGGCFILFWVGLSWYGRACMNGLARRKGRFP

SEQ ID NO: 219763 - protein, 540 aa, Zea mays
  unsure (1)..(540): unsure at all Xaa locations
  Clone ID: MRT4577_132010C.1.pep
MVLSHGVGGSDESVHSTFASRYVRTSLPRYRMPEQSIPKEAAYQIINDELMLDGNPRLNLASFVTTWMEPECDKLIQASVNKNYVDMDEYPVTTELQNRCVNMIAHLFNAPLGDAETAVGVGTVGSSEAIMLAGLAFKRRWQNKMKAAGKPCDKPNIVTGANVQVCWEKFARYFEVELKEVKLSDGYYVMDPQKAVDMVDENTICVAAILXGSTLNGEFEDVKLLNDLLTKKNAETGWDTPIHVDAASGGFIAPFLYPELEWDFRLPLVKSINVSGHKYGLVYAGIGWCIWRTKADLPEELIFHINYLGADQPTFTLNFSKGSSQVIAQYYQLIRLGFEVSYFSSLLICNIYFLNCLCTHLPTHTHTTEENEXFGLLRSQHGCDXGYKNIMENCQENATVLKQGLEKTGKFNIVSKDNGVPLVAFSLKDNSRHNEFEISDFLRRFGWIVPAYTMPPDAQHVTVLRVVIREDFSRTLAERLVLDIEKVLHELDALPARVPSGDLAALAAAESSEREMEKKRQVISLWKRAVLAKKKTNGVC

SEQ ID NO: 219764 - protein, 96 aa, Zea mays
  Clone ID: MRT4577_132011C.1.pep
EDFDVEVDARVQDEGSVAVDPQHRRAACGVSEPPGGGERGGGERPARSKHRRARAGAQDGYEILRSYHVPVPSLPLEIGLSVFSALLARPACLGIR

SEQ ID NO: 219765 - protein, 322 aa, Zea mays
  unsure (1)..(322): unsure at all Xaa locations
  Clone ID: MRT4577_132013C.1.pep
CRIEAIHAAEKKLADVDAXMYSEERRKLKEKYEXELKDTRARELMYAEEAAILDKELKKEKLKNAAALKELQEKAEQKLQDELQRKDEETSQQIEKAQEIAKAELAAAVAKEKASQIEQIAEANLNIDALCMAFYARSEETRQSHSVHKLALGTLALEHALSSGSPIRSEVELLRKSVEGIDKDSLLELALSSLPEDVLDYGSDTMMGLKQKFNSLKETIRHFSLLPAGGGGILAHTVARVASSIKIKGDNSGDGIESLINKVERLIVDGDLITAADALEQGLHGTEAEEIATEWVKQARKRAIAEQTLALLQACASSTTFS

SEQ ID NO: 219766 - protein, 224 aa, Zea mays
  unsure (1)..(224): unsure at all Xaa locations
  Clone ID: MRT4577_132014C.1.pep
VCEVHLINKIRMPLSLPVAITGNCTDNTRAKNLYIISVKSIKGRINRLPTAXASDMCMTTAEKTKPYLMKKVMPAAFARQRKTGXRKDCVYMYFEDNAGAIANPKGEIXTGSAITASYXNERADLWTTIDSDTQMPSSDTLVCNEYILDYDHTQFVTLQECVMTLLDLKAPLKSGHSTSAVNTNFWLPQRRSAGRTSGPSSKEVLDLLMPKFRGVYYYVYFMLS

SEQ ID NO: 219767 - protein, 252 aa, Zea mays
  Clone ID: MRT4577_132015C.1.pep
PRVRAEQTLQDELQRKGEETIQQIEKAQEIAKAELAAAVAKEKASQIEQIGEANLNIDALCMAFYARSEEARQSHSVHKLALGTLALEHALSSGSPIRSEVGLLRKSVEGIDKDSLLELAFSSLPEDVLDYGSDTRMGLKQQFNSLKETIRHLSLLPAGGGGILAHAVARVASSIKIKGDNSGDGIESLINKVESMIVNGDLSTAADALEQGLHGTEAEEIATEWVKQARKRALAEQTLALLRACASSTTFS

SEQ ID NO: 219768 - protein, 107 aa, Zea mays
  unsure (1)..(107): unsure at all Xaa locations
  Clone ID: MRT4577_132016C.1.pep
LYLPGKFPGFPSVXFPELNLHPDRWPGHLFATRSFLVCARDKNVFEETKKLSISFSRSPWANSPDYSSKSVFLVAQXSSPFRIFGRVNKVWFDVNCRFTVAVGVESY

SEQ ID NO: 219769 - protein, 84 aa, Zea mays
  Clone ID: MRT4577_132017C.1.pep
HAPPYLSLDSSKAGGPWFFFFFFFFFLLPPEKHFPSLPGPPPLVPDEGFLNNRLSRKPNPRFCTFHFIPGKTENHQGRRISSTQ

SEQ ID NO: 219770 - protein, 69 aa, Zea mays
  Clone ID: MRT4577_132018C.1.pep
KLKNNSLVNIELGKQEFVFSRDSDNSSAHGSQVDWVREDNGVDVANVVVDEDLGCAGLQLQVARRCCLW

SEQ ID NO: 219771 - protein, 139 aa, Zea mays
  Clone ID: MRT4577_132019C.1.pep
MAKISRGAPGGKLKMTLGLPVGAVMNCADNSGARNLYIIAVKGIGARLNRLPAGGVGDMVMATVKKGKPELRKKVHPAVIVRQSKPWKRFDGVFLYFEDNAGVIVNPKGEMKGSAITGPVGKEAAELWPRIASNSGVVM

SEQ ID NO: 219772 - protein, 62 aa, Zea mays
  Clone ID: MRT4577_13201C.1.pep
YQILPLRKKKRRAVKLRNKLNVSPPLMVTIKINRVLSLSMIYSRCYFLYGVLIRYFLFKIND

SEQ ID NO: 219773 - protein, 36 aa, Zea mays
  Clone ID: MRT4577_132020C.1.pep
FPLNLGNLFLPVFRPHFENFIRNVPLFYLCNRWPAL

SEQ ID NO: 219774 - protein, 79 aa, Zea mays
  Clone ID: MRT4577_132021C.1.pep
KTDISFPLRQQTTFTEAGMQDKLFGYPATEQLFFPKILKTSTRVPKCLCPQKGNQEKHKFYKRARSNNHPVWGERSLPC

SEQ ID NO: 219775 - protein, 59 aa, Zea mays
  Clone ID: MRT4577_132022C.1.pep
HLLLNVYSRVLDWASLASDPLLRLTLTEIFWSVAFESSIYCIGCIHQYARPLTNTVRTV

SEQ ID NO: 219776 - protein, 47 aa, Zea mays
  Clone ID: MRT4577_132023C.1.pep
SSTPRRWLAEWTDVWPGHLASAQTVCPAPVRNRRTPSADQSHASGQR

SEQ ID NO: 219777 - protein, 269 aa, Zea mays
  unsure (1)..(269): unsure at all Xaa locations
  Clone ID: MRT4577_132024C.1.pep
GGIFKKILPFIHTYHHFLPTPTPNPPNRNKLPLLKKKHPPKTSPKQTENPTPPXPPKPQGPRPPXISPPTXPPSQSSPPRNKQPXPNPSPRFKPFPNPPNGPRPKPQPNPPPQPKTKPRKXPPNPKSPGRPPPQSKPKNPFFPNPKPRXTKPQTPVWPKPKKTRPHPLPKTSPPXPKGPPPKNTNPPPKKKTPPPXTKLKQPPSRTQNSPXNNPPKPPNKTGPKKPXKAKSPPKRKNVPSPPKNPPQGPPKVYQPPPWTXNKKGPPPPP

SEQ ID NO: 219778 - protein, 84 aa, Zea mays
  Clone ID: MRT4577_132025C.1.pep
QPRMLLTVDEDLKPLSVPVRVGQAVDVVGQAGRPKTITGFQTHSTPVLLAAGERAELATEKYIPLTPVLEGFVILKKNPEYHEE

SEQ ID NO: 219779 - protein, 127 aa, Zea mays
  Clone ID: MRT4577_132026C.1.pep
GSNISISTNTVKPISQEVSLKVKIIKHLVFLPYQTRKTVRLKKLRLETGHVFTVKTRVNGLSNVRRRKPSRSQAPMPHKSRMCLSLEQATALKSAIIMKDLPHLEAHPAQEPPGIIVGMFPVDSHKL

SEQ ID NO: 219780 - protein, 111 aa, Zea mays
  Clone ID: MRT4577_132027C.1.pep
VKLCPPTQAGFFFPKILPLLQKPPLKGGPPPRISNAKVFFFKKCSPLPGPPPPVSPPPQKPNKKFLVLNSPCFKTPIPGRARFEYAPPPPGYAPKPFRANFPPIFSRFFLF

SEQ ID NO: 219781 - protein, 80 aa, Zea mays
  Clone ID: MRT4577_132028C.1.pep
VSVRLGVFFFRSVCSPLLAIVWSWSQSLPTQCFKGFNWLASKSVVAFFSFCASKASLYPDGKLFFLSTHKLSVLLLIMFG

SEQ ID NO: 219782 - protein, 91 aa, Zea mays
  Clone ID: MRT4577_132029C.1.pep
SAILRHSRSINVQVQNSHSSQYTYQRELKLDSIVFHSCMQCSVALPPTPTPNNRSATAPASSDPPHCEQAKMHPPVRSPGAHVNRSYLTGV

SEQ ID NO: 219783 - protein, 95 aa, Zea mays
  Clone ID: MRT4577_13202C.1.pep
WFLDHQILVPTSTASQATIIERETERERQAPTIWPRLRVAIIVIKWRNCCYLQFDVRDRGQGEFLIGNFSSLPFYIPLQTGHDVHRCRSRTGTAR

SEQ ID NO: 219784 - protein, 46 aa, Zea mays
  Clone ID: MRT4577_132030C.1.pep
NQDSCRSQLCECDKAAATCFARNKTTYNRKYQYYSNKHCRGSTPLC

SEQ ID NO: 219785 - protein, 82 aa, Zea mays
  Clone ID: MRT4577_132031C.1.pep
RNSPRGVEDRVSIVISNHIHDRRTKVRRWMKDREGSLGETFLATPVGRAQVLSTADSSFSSSNANLVSVCALKTGPAGSRYP

SEQ ID NO: 219786 - protein, 91 aa, Zea mays
  unsure (1)..(91): unsure at all Xaa locations
  Clone ID: MRT4577_132032C.1.pep
PFRRAFPSKNGKKVTKAPKIPRLVAPLPPPRKGAKIPSQKKGVSXKKSXAFWFPKLFSPRFKEQRAPRSKSSAQRRSKLFSPVKGFFAPSA

SEQ ID NO: 219787 - protein, 104 aa, Zea mays
  unsure (1)..(104): unsure at all Xaa locations
  Clone ID: MRT4577_132033C.1.pep
IRNATLECXVCTFSFTCVCAVVRXHGDYKPDXDYGLGRXVCNVSYHTYVCCSHSLTDCQGTFVVSRVGRPFSPTSENGTRTRHTHAAALHKDIPGXRDPCIPPS

SEQ ID NO: 219788 - protein, 50 aa, Zea mays
  Clone ID: MRT4577_132034C.1.pep
NQHQELRPNHTPQETTAHRSLVLTLQKNSQGPYTKSPKSDRAALQITGNK

SEQ ID NO: 219789 - protein, 193 aa, Zea mays
  unsure (1)..(193): unsure at all Xaa locations
  Clone ID: MRT4577_132035C.1.pep
MALIYCWYHIIDDPLKRNVKEFFEXTSSVFYGDDFVMNIRADVLEKFNQITITQAMRDYLDMTMTDEAKTGECVKSRTLKEVNFLKRAFHYNTLIQEYTAPLDLTVILDSTNWYKIGKCSAVIVARDTLKACLRELALHPEHIDSQYRSKITDLGLRVTNLIPGELFVPDTRYSTLLAIKNMECENLGLDCDA

SEQ ID NO: 219790 - protein, 33 aa, Zea mays
  Clone ID: MRT4577_132036C.1.pep
LEPAVTDTNLNCHFSFSYLKQGPMSQVHAPSFL

SEQ ID NO: 219791 - protein, 193 aa, Zea mays
  Clone ID: MRT4577_132037C.1.pep
MVNNRIPSVFSKTYVTPRRPYEKARLDQELKIIGEYGLRNKREVWRVKYTLAKIRKAARELLTLEEKDQRRLFEGNALLRRLVRIGVLDESRMKLDYVLGLKIEDFLERRLQTQVFKLGLAKSIHHARVLIRQRHIRVRKQVVNIPSFVVRLDSQKHIDFSLKSPFGGGRPGRVKRKNPRKAQGGGGGAGDEE

SEQ ID NO: 219792 - protein, 69 aa, Zea mays
  Clone ID: MRT4577_132038C.1.pep
RFRLLYQSPSTVSMELSSTGNISSSYLATIFVILVIDCQLGPVTSPLVFTLFVIASSHITSNVLARVYV

SEQ ID NO: 219793 - protein, 61 aa, Zea mays
  Clone ID: MRT4577_132039C.1.pep
IRSIGEYSDIKVLHMYINKSCATIITVVYIKSRHYSHECLYLVNMHVILSICLTIIYSLCL

SEQ ID NO: 219794 - protein, 172 aa, Zea mays
  unsure (1)..(172): unsure at all Xaa locations
  Clone ID: MRT4577_13203C.1.pep
MNGPCTCLVTIFLHYKGLVSNASMTPRAMTPMNTIXFEARGLMGLSCMDASGQTDIRLWXPFQAIPSIGGNATIAGLHLGEEKQFADEEISSMDLITMIEIAXAYLVLTINNVVVTDPVYFYDSXVRPQRHAGVIAGXLNVLRIINEPTAAAIAYGLDTKATSVGEKNVLIF

SEQ ID NO: 219795 - protein, 101 aa, Zea mays
  unsure (1)..(101): unsure at all Xaa locations
  Clone ID: MRT4577_132040C.1.pep
SSLLPYVPKYHRRILAAQACILREIEPXYPTDNRAXAMSXYIINYSXLPSGELXEYQMMVYLDANIILNKNIHKLFKIXEGXLYTLINCFCKKTELAPRRT

SEQ ID NO: 219796 - protein, 61 aa, Zea mays
  Clone ID: MRT4577_132041C.1.pep
SFSIFSMFPRKTCPALPSIARTDAYGEQSHQTTLLRLVRSSPTALPERPSIECVEGPEDDP

SEQ ID NO: 219797 - protein, 89 aa, Zea mays
  Clone ID: MRT4577_132042C.1.pep
ERPPGQVKKKKKKKNKQKKKKKIKKNKTLKLFTFCRNTPKGVFPPVSTTLGAIFACFFPSQFPFCLLLLGPIGPLFTPIPLGRPSFFPT

SEQ ID NO: 219798 - protein, 76 aa, Zea mays
  unsure (1)..(76): unsure at all Xaa locations
  Clone ID: MRT4577_132043C.1.pep
PADQFRRTDSTSPRKFPVEFPSMSIQSIMHFGMRSVGFTLPRLRPLSVVSWHSRTSVSIAFLKWAIFPVPNIDIXK

SEQ ID NO: 219799 - protein, 73 aa, Zea mays
  unsure (1)..(73): unsure at all Xaa locations
  Clone ID: MRT4577_132044C.1.pep
PVXPWRXLVLSRXCXCLPXPPFLXVLVCPXPVXPLCFVPSFRSGAFGWFXXLSLAPXXCCPSLPGPXPPPCFL

SEQ ID NO: 219800 - protein, 46 aa, Zea mays
  Clone ID: MRT4577_132045C.1.pep
LAYLSPINILQVEVLRRLRRDDDNRRLRDALLININGIAAGMRNTG

SEQ ID NO: 219801 - protein, 1052 aa, Zea mays
  unsure (1)..(1052): unsure at all Xaa locations
  Clone ID: MRT4577_132046C.1.pep
MSDGDGPPPVFYGDNFPYCKIRMEAYLEAIDIGVYKATTHGFPEPRDVTNLVSDEYNYEKWNAKTKNTLFRGLCKDVFNRVRNHKNAHDLWLDICALHEGTKSEREERYHIAMKKLNSFEMLVNENANYMYSRLNILVEEFNGLGXSNFTTXDVVRKILIVLPIEKYEHNVTVLHQMDLSITTPTQILEKINAHGMCMHINDKDESSTKKKDLALKASQEXKGKAKMQVVEEYSTQEKQVXARKMMKVMMRRKKRSSSRGKKANTKGFTKRRMKKHILLVIGSLTLXSSSESSSGLRKVQHKNDIVEDYDSDSDDEYASPTYDELADLLKEYTQIIRKSKAKCDKLKDENEFITAKYDIVVKASEEMKEENKTMLSTKNEIKTSLKDAKEKCEKLSEANRELKDRIVRIKEGYTKIKIDYVNFLIANELLSCDTHEAIKPVVKIDVATSCDDLSEVDQSSLHDELIEKVEVXTRESEIEEVLNKCXTKEKIAIESNDVNNELEVDNERLRDEVKKLNLEKEHLAISVQMFNKGQYLQNELLMNTVMKNNKGGIGYNSFVQKKATNQYKAKQTPKPIKCYECGKEGHFAHNYXKAHHQLPCQSIQGHLLSMLIXLKKVANGKVKVNYKTGGSHWVIDSGCTQHMTGNPRMFTSLNEDIDEQDKITFGDNSKGKVQGLGKVAISNDLSISNVLLVTPLSFNLLSMGQICDLGLQCLFTPTEVVMFKIDDESVIFKGFRYNNLYLVDFSSEDANLRTCLFTKASLGWLWHRRLAHVRMSTLKKILKKDMAGKQVANTHPTKAFMSTSRPLELFHMDLFGPKTYASAGVNLYCLVIVDDFSRYTWVFFLHDKFEVASIFKKFAKKAQNEFDCDEPLREAMKNMPIGAIKPKEYEEEVQNINNPSSSNVPQDGEKDERHANEDIFVSHEQARVQAEDVDAPRSSSQVVDKRNSSLLQAHPQVYVEQPHRFEDPRYPNHAYGLSKALYGLKQATSAWYECLREFLIKKGFKIRTVDTTIFTKKHNDDILICQVYVNDIIFGLTNDSHCNKFGELMLMI

SEQ ID NO: 219802 - protein, 93 aa, Zea mays
  unsure (1)..(93): unsure at all Xaa locations
  Clone ID: MRT4577_132047C.1.pep
MARLLVMILLALFLLAVAPAQAARFTSNXYRSRRGLESEDRRGSGARGXQVSAEENWRSNAVVEEMFGRMALQVTDYPGSGPNDRHTPKAPDP

SEQ ID NO: 219803 - protein, 130 aa, Zea mays
  Clone ID: MRT4577_132048C.1.pep
MARLLVMILLALFLLAVAPAQAARFTSNYLPVVVSCSCFHIYVFLPCMRTGYLNGGRVVRDFHVDDADHAGGLRARIGEAPALEAAQVSAEENWRSNAVVEEMFGRMALQVTDYPGSGPNDRHTPKAPDP

SEQ ID NO: 219804 - protein, 103 aa, Zea mays
  Clone ID: MRT4577_132049C.1.pep
SRARSGSQSARRQRTDRALERQLSRLRAQQGAPRKMQRSSSHVGVPSTAAYGYPAQPWAGVRLDRSSASLVGSECGSTSSVLTAATVGYCRSLVGFEVHRGHY

SEQ ID NO: 219805 - protein, 88 aa, Zea mays
  Clone ID: MRT4577_13204C.1.pep
LPRRSIGGRPSLWRADLPIWWPASSAIRRGPTRPARIWRCGRIRRGVAVKMVYVWVGGENESSQSVDSVDLQHVTSDLLHLKGLSNCA

SEQ ID NO: 219806 - protein, 57 aa, Zea mays
  Clone ID: MRT4577_132050C.1.pep
MKLKRRRAVEVPPSIKSFINSVTTVPLEDVELPLKDFAWEFDKGDFHHWLDLFNHFD

SEQ ID NO: 219807 - protein, 198 aa, Zea mays
  Clone ID: MRT4577_132051C.1.pep
AEPSWATERNPGAERGGSREAAKHVEAPAASAGTQRSDHGRAGAGARRAVRAAGRRRVGSELGRGTRKELQRRRHGRACRGSGAMENRELDQASTEGEENNQGAAQDEDWSKGDTRRGAGRSDQRRHRNKGVAGARHQRRKSRAGSREDGMANRAGRHGQQESEQSAAGKHQGTSRHAMEGSSTSRAQGAEGRPALGL

SEQ ID NO: 219808 - protein, 70 aa, Zea mays
  Clone ID: MRT4577_132052C.1.pep
MATQQKMAAVGKVTGRTWSRGHVTQVRVYSLADLHQIIIRNDKGPALEGDILTLLYSKREAMRLRRRPSV

SEQ ID NO: 219809 - protein, 55 aa, Zea mays
  Clone ID: MRT4577_132053C.1.pep
TTNGEATKTNEGASHHYFKGNTKPNKETVDNGTTRTAKDMLTLAHSARGGTSVPP

SEQ ID NO: 219810 - protein, 101 aa, Zea mays
  Clone ID: MRT4577_132054C.1.pep
LQDAGDDMRPNEKRRTPAWCDRILWYGRGLSQLCYVRGESRFSDHRPVYSVFTAEVRIPSQQQAAAQFGGGGGGITRSASLLGLALDELPYPRSYMDINFY

SEQ ID NO: 219811 - protein, 233 aa, Zea mays
  Clone ID: MRT4577_132055C.1.pep
SGYSAAEPAALRALSDIAGRYIASLGHAAAAFAEARGRTEPNVTDAVLALEDHALGGFPGAADPTRPLLCSGALAELAQFVAAVREVPFPKPLPRRDPGCGSVDGWESFAAAGRQPPLNHVPHWLPCFPEGWEERLRVRCQVAADDEKDTGQVVTVMDGNGKRGVPENREKLSFSLGQKRQRVKPSHKHGGAFERFTEQGENSLSIECIHKTKPAQFVSRGWLNLSEVLDMDQ

SEQ ID NO: 219812 - protein, 248 aa, Zea mays
  Clone ID: MRT4577_132056C.1.pep
SPLPLGQLRPAGQTRSLLCVIQFSAWCRAKSLDDLAEVFRAYSFGEIMSLEDLFARASPPICAEWFPRHSSLAFGHLLRLLERGPLDYQRVVLLMLKSLLQQTPVDPSQIPQVYNFVSQLVESTLCSEALNVLEALLRSCGGGGQGEEAGFGDNGGHGSGEKVLQSMLLPQSSFKARSGPLQYAAGSGLGSLMGQGGGGSSSAADSGLVARDVALQNTRLLLGRVLDTCALGRKRDHKRLVPFVANVG

SEQ ID NO: 219813 - protein, 133 aa, Zea mays
  Clone ID: MRT4577_132057C.1.pep
STGRPAAAAEERVPYVVHVSQHVLPQVALEFGYHELIAQPSCFGHCNKTGSRSVSSPQFTSSYAGHGGIFFSRWRSICWVLAVKVLHVGRAWHGWCSIYLIVGSSLSSRIIICVISIGVCKYVSIWPFVHISC

SEQ ID NO: 219814 - protein, 136 aa, Zea mays
  Clone ID: MRT4577_132058C.1.pep
LEAGRDCGLHSAVVASIHIQSNYIATIQAYTLSSTSTSAMCLPFSCCHRGDHDTKESEVESQPYYHPSPVKEAHDGHRASQRHASRRRGQQQERRRAHDGFQQPLRRRRCPRWRDDDNYREDRGAAHHYSSTASCF

SEQ ID NO: 219815 - protein, 191 aa, Zea mays
  Clone ID: MRT4577_132059C.1.pep
PAGSGTPACSVVVASIHIQSNYIATIQAYTLSSTSTSAMCLPFSCCHRGDHDTKESEVESQPYYHYPSPVKEAHDGHRASATNDMPPVVEDNSKNGGGHTTGFSSHSDDGVVRGGETTITTEKIVAPPTTTPAPQAASRDLAVQQAPQGTYVSASRPRHNHGRGSSAASPPSEAVVTKVVLPIARRGGEDY

SEQ ID NO: 219816 - protein, 90 aa, Zea mays
  Clone ID: MRT4577_13205C.1.pep
MATVSFSSPASFAGDNSGALTSATILRFPPNFVRQLSTKARRNCSNIGVAQIVAAAWSDRRAVTSHSGGGSSVRGTSSHAAAASAATSAA

SEQ ID NO: 219817 - protein, 47 aa, Zea mays
  Clone ID: MRT4577_132060C.1.pep
PKTRYGPELTGRQPTAKAKSPYPCTERAPKQAEGLDFWNGQLVYLYG

SEQ ID NO: 219818 - protein, 65 aa, Zea mays
  Clone ID: MRT4577_132061C.1.pep
FSPVCFCRPQCFNSFARFKGLCPYSVIYQCLPHAPPGFRSIKPLLDPFWIPVAWPMLDPPCQYRM

SEQ ID NO: 219819 - protein, 65 aa, Zea mays
  Clone ID: MRT4577_132062C.1.pep
LVQVLSDRSVSQVRIRSVRMQTSSVLCIMHEYVCGSVFASDFFPQAPCVYRQQYSSATFPCVSQS

SEQ ID NO: 219820 - protein, 341 aa, Zea mays
  unsure (1)..(341): unsure at all Xaa locations
  Clone ID: MRT4577_132063C.1.pep
STPGFFYPHTAVLPQPISSACGGKKSSRRRRPILIPFHARGSILNFLAALIFIYVQSFLLQSASTPVHLVPALLDISLRMPSHSPFFLPAVPIPLLVELLLRPAPCSPGRTAPWCRAQPISSLSSLVPCPATLLQSPGVSLWRVFFSASGSSSPRALCFQRVPWSSRAPLPFVGRELPPAPTRLQPWRLVGCGFSAASIPWSFLLCRVLFFCSAMGVAVFLLSHGGRCPWWSSSLLTPSSPVRTWPDFPAEHFPQPFLHPYLASMALLWISLLRSALMAARPRAWPVHLPAFARLDSSFSXISIAPCSRRPPCYPPPVLASSPSMLRRRHRTVLDPTRLYL

SEQ ID NO: 219821 - protein, 112 aa, Zea mays
  unsure (1)..(112): unsure at all Xaa locations
  Clone ID: MRT4577_132064C.1.pep
SSPTLNTSCKPPPXXXKGGRAKNQITPPKQDXXXPXGKPKAPSPPQXTRNTPTTSNKHTXPAKLTCXDKPPPTPVPKQTQARKPSTPPPPPIQNNKLKAPRPKPTDLPDRSH

SEQ ID NO: 219822 - protein, 108 aa, Zea mays
  Clone ID: MRT4577_132065C.1.pep
TLQLQRGPRVPSGPEHAHCCRRRTLQGCCSIQRPTFHVPGRYYVHPHVCQVKLVRETSKKTPCKYGGLFFFLLKRMKLRQTSKEHHANGCGVLRLVYAMCAQAALKRI

SEQ ID NO: 219823 - protein, 76 aa, Zea mays
  unsure (1)..(76): unsure at all Xaa locations
  Clone ID: MRT4577_132066C.1.pep
RLFYDQPVQFFGSNVKCCWLGIGHVKQAQILGFWLHCLKILLWISSFLVCXXNLYTLGNEKILGVGTNQKKKKQNK

SEQ ID NO: 219824 - protein, 78 aa, Zea mays
  Clone ID: MRT4577_132067C.1.pep
PSRPSPKFYLSASPCCLPDRRRRYAKTRTAGTVSRAPFCSSSPAPNTFICRGCTDDRETTIARDPETDLFLPRFTLIV

SEQ ID NO: 219825 - protein, 102 aa, Zea mays
  unsure (1)..(102): unsure at all Xaa locations
  Clone ID: MRT4577_132068C.1.pep
PDGGATGGAEGADSAPAAEEEXAPTRSXXXGPAXXGQNPAXNXAEKGXPTXAXNRTTGRGGETXQXAKAEGNPPXDGXHDPAXXXKPXHKPRXXTTPRKAGA

SEQ ID NO: 219826 - protein, 64 aa, Zea mays
  Clone ID: MRT4577_132069C.1.pep
CPSSSQGMTVLQNHTFKDCLSSYVMYTHDNTNDDQLRNHIMHSDVLSLYPGHRTSDLPPWEPDD

SEQ ID NO: 219827 - protein, 37 aa, Zea mays
  Clone ID: MRT4577_13206C.1.pep
SLLRMPFKMCIVHPGRMCCNGDHTHCGSHTPLWAHQA

SEQ ID NO: 219828 - protein, 149 aa, Zea mays
  unsure (1)..(149): unsure at all Xaa locations
  Clone ID: MRT4577_132070C.1.pep
PRLRIRTRACGGILGSLPPHDHAVDYSPRPTGAPGTAGSGKQRLRRTSDLDNRFKDAIAQIGGPDRATPKGVLTEMDVPRITINHEKSHLQKYRLAKYIPDTRDEGPKDEKINYSDSLSNTDSEREXQITEALKMQKEVKKLLHEQIEG

SEQ ID NO: 219829 - protein, 64 aa, Zea mays
  unsure (1)..(64): unsure at all Xaa locations
  Clone ID: MRT4577_132071C.1.pep
PLPRAPREEKGPQGGRGGRRQKKAPLFGLIDPPVWWSXPCATGGCESDIEPPPFCGGVRMYALV

SEQ ID NO: 219830 - protein, 345 aa, Zea mays
  unsure (1)..(345): unsure at all Xaa locations
  Clone ID: MRT4577_132072C.1.pep
IGWLVCLISRATPPHSFYEDLVDGKGSDEKPKNIPDKPLNKKIKFEDSDSSDDEDEDNHXGSXNGNVNDVEKGETAPSEKQQEVLDTSNTASKDNTALSEKKEEVLDTSDTVSKDNEEQAVTADEPREKKQRVEDPPVFEQAVQKETADEPKESTDKPKESSEKNIDDLIDEDLKEIGDRKKRLFASLETGCNGCIFIQMHKRAGDPGPVEIVQNMMSSAALTRKHMSRFILRVLPVEVACYASEEEITKAISPLIEKYFPKECSSGHKFAVLYEARSNTGIDRMKIINAAAKSVPQPHKVDLKNPDKTIVVQIAKTICMIGVVERYKELSKFNLRQLTSPESEK

SEQ ID NO: 219831 - protein, 53 aa, Zea mays
  Clone ID: MRT4577_132073C.1.pep
RANTITTTRSTCYYCLYVCAWFRLQSKYMVLLSVCYSFFLKKMSVCDTAARHI

SEQ ID NO: 219832 - protein, 85 aa, Zea mays
  Clone ID: MRT4577_132074C.1.pep
KERRLIIVYLQIETTLKEPLTTIQSHQRPPPSNYRPCRQPPPPLLKKKIHPQLQPVATKSSNSILSSLSSEKPLSTDCCLFSHTK

SEQ ID NO: 219833 - protein, 67 aa, Zea mays
  Clone ID: MRT4577_132075C.1.pep
SLTLLTPGLSLSFTLPSTSHLTSLARAIKLVSPSTPAPFFLFSSFSSFPFFFFFFFFFFFFSRVYNN

SEQ ID NO: 219834 - protein, 83 aa, Zea mays
  unsure (1)..(83): unsure at all Xaa locations
  Clone ID: MRT4577_132076C.1.pep
XXXXXRRKEXXREPXEXXXDQSEAXXNXXAKXKKPGXERXXXXRXXQTXDHNXATTXXXRXPKXXREEQGXEXXXXGXRXGAS

SEQ ID NO: 219835 - protein, 76 aa, Zea mays
  unsure (1)..(76): unsure at all Xaa locations
  Clone ID: MRT4577_132077C.1.pep
FTNPLSKLYDHLKLARYYTLXGLYNTSFFFFDGAIVHINKHLTTSDDALIRTKXMNCMKAIFEEVVIVKQLDAQLK

SEQ ID NO: 219836 - protein, 43 aa, Zea mays
  unsure (1)..(43): unsure at all Xaa locations
  Clone ID: MRT4577_132078C.1.pep
LVRRLPLXNTKFCYYNNYSTAQPRHFCRACRRYWTHGGTLRDV

SEQ ID NO: 219837 - protein, 96 aa, Zea mays
  unsure (1)..(96): unsure at all Xaa locations
  Clone ID: MRT4577_132079C.1.pep
IRLEGHLRSFFSAIGRFVSVLRIPXRILHASAALALLQSTIPGGRHAVHDACILQEAGAGHPLRAQVVXTTTPIEAKIYGSILLRNLEHHELGMSP

SEQ ID NO: 219838 - protein, 54 aa, Zea mays
  Clone ID: MRT4577_13207C.1.pep
FLVLLKRTTIFYFIFYYIFFFFYFFFFLFIFYFFFFFFTENSTTTYYTSKKISE

SEQ ID NO: 219839 - protein, 69 aa, Zea mays
  Clone ID: MRT4577_132080C.1.pep
RGLPRIWPSNWMVSILPSKKCCSVMSISNVKIPFLVWKHYFFRLKEYVFFCFHINGFLFIKYLFLLLSN

SEQ ID NO: 219840 - protein, 89 aa, Zea mays
  Clone ID: MRT4577_132081C.1.pep
MSATHHKTPLPQGVRLGTVMRIRGVVPDQAGRFHVNLLCGEEQEADAALHFNPRLDTSEVVFNTKQQGKWGREERGTGIPFQRGQPFEV

SEQ ID NO: 219841 - protein, 106 aa, Zea mays
  Clone ID: MRT4577_132082C.1.pep
FPPPPCWGGVFPPWPQVWPHVRPGGLFALVRPLGYGRKLVFLGPLGPGGAPKRIPGGWPLVLLGGGRPPGVPVLKKFFYYPASGPGGAPIPWFPRGWSRYRVKGVW

SEQ ID NO: 219842 - protein, 84 aa, Zea mays
  unsure (1)..(84): unsure at all Xaa locations
  Clone ID: MRT4577_132083C.1.pep
LGGMGCSADLMAFXLAEDGAEANTSLVPLGINNQNITLNWYLRNHRSMLLCNCIFRMVGAPSLISNRRAYSGCTKYLLLHTFRT

SEQ ID NO: 219843 - protein, 362 aa, Zea mays
  Clone ID: MRT4577_132085C.1.pep
MALQRQKGGQERGHIAHFSVIAVIDKFSMKAILNPGPRDGTLKCFIRRNRTTQTYYLYIGLTEALADDGKFLLAARKCRKPTCTDYLISLDKVDMSKGSSTYIGKLRSNFLGTKFTVYDAHPPYDGAAVSKSRSARVVGLKQVSPRVPAGNYPVSHISYELNVLGSRVTGVVRVVDLGSRVLGPGPRRLGAVGLLVEKVRNCSRDEKGPRRMNCVMDSIPASAVKEGGKTPTQTEFPLSSLDSFPSFPFFRSKSARIDSSTSQSSSQREDRLVLKNKSPRWHEQLQCWCLNFRGRVTVASVKNFQLVASEDNGPENQESDKVILQFGKIGKDLFTMDYGYPISAFQAFAICLSSFDTKIACE

SEQ ID NO: 219844 - protein, 108 aa, Zea mays
  Clone ID: MRT4577_132086C.1.pep
DSLADDGKFLLAARKCRKPTCTDYLISLDKVDMSKGSSTYIGKLRSNFLGTKFTVYDAHPPYDGAAVSKSRSARVVGLKQVSPRVPAGNYPVSHISYELNVLGSRYGH

SEQ ID NO: 219845 - protein, 346 aa, Zea mays
  Clone ID: MRT4577_132087C.1.pep
MADELDELIGFLSDRNPQVRGAAADIVRGLTGGEDGLRALTARADSALPALLRLLASAGGSGSGEAAADSLVNLSQDAALAARLVALGAVDAAMDVVAKRGGEQPALARRLVMLLVNLTHVESGVAALLQVGDEKVQGLYVAKLVRSFCRSSSDSEEEDIFEYVASTLVNISKVEAGRRILLEPKRGLLKQIIRQFDSTNQLRKKGVAGTIRNCCFEADTQLLSLLSLAEYLWPALLLPVAGKKIYSEEDRSKMPLELSSALSHEREVVEDSEIRQQALEAIYMIVLQDGGRRSFWSVNGPRILQVGYEDEKDPKVMEAYELIGSLLVGKGEDVQDNKKEQGEKPQ

SEQ ID NO: 219846 - protein, 88 aa, Zea mays
  Clone ID: MRT4577_132088C.1.pep
KNKSPRWHEQLQCWCLNFRGRVTVASVKNFQLVASEDNGPENQESDKVILQFGKIGKDLFTMDYGYPISAFQAFAICLSSFDTKIACE

SEQ ID NO: 219847 - protein, 72 aa, Zea mays
  unsure (1)..(72): unsure at all Xaa locations
  Clone ID: MRT4577_132089C.1.pep
MPIIMIALSSHLEVFHPXAPMAVFAEFIXTFIFDFGGHIFVLALSKLTGRGLTTPPGLIAEAVAHAPLLFVR

SEQ ID NO: 219848 - protein, 231 aa, Zea mays
  unsure (1)..(231): unsure at all Xaa locations
  Clone ID: MRT4577_13208C.1.pep
MSTQSISPASASAQFTYPAAAAPXPTSPCPSTSRTRNTPHGPQPXAVPVYNAIYPMPQVQQAQQLFQKDSKIITPEALATVKAAIANSEKDKKVDATKKAVPRKAAGQSWEDPTLADWPENDFRLFCGDLGNEVNDDVLAKAFSKYPSFNMARVIRDKWTGKTKGYGFVSFADASDLTSALKDMNGKYVGNRPIKLRKSTWKNRIDLEALEKGKTQPQKKIKLQKRSVLHK

SEQ ID NO: 219849 - protein, 94 aa, Zea mays
  Clone ID: MRT4577_132090C.1.pep
VERGAQGMSYAPRRKEALEREPMGAASIWSGVLEPRVPSPTGIARTEQIGSEQLWTGEKGSQQRSKPGSGHIGDSRKAQGQSWEVSTPLEGQPV

SEQ ID NO: 219850 - protein, 160 aa, Zea mays
  Clone ID: MRT4577_132091C.1.pep
MLTTSRLVGDSRCVHRHIPGAWRLELIWRGGQCRREMSFRSLIQDMKDEFGSISRHSLRSRSHRSAGNAARAAAAGPSEAMDQSCWSQLPPELLREVLVRIEASESWWPARKNVVSGAGVCRTWRGIMKEAVRVPEVSGKLTFPISLKQVCALRSSSLYK

SEQ ID NO: 219851 - protein, 57 aa, Zea mays
  unsure (1)..(57): unsure at all Xaa locations
  Clone ID: MRT4577_132092C.1.pep
GGPPLFFFTAAGVLFXFLLLFIEKNAIQEARPNRYLNTTTTSTTKGKTADLIIACVV

SEQ ID NO: 219852 - protein, 64 aa, Zea mays
  Clone ID: MRT4577_132093C.1.pep
MSYYGQQPPAGVPPQQGYPGKDGYPPAGYPPAGYPPPTQGYPTQGYPPKHARPPPPQQQQSSAN

SEQ ID NO: 219853 - protein, 71 aa, Zea mays
  Clone ID: MRT4577_132094C.1.pep
FGLVPERGGLFPSLKALLRNGETRGLVFPFRDAPSEGGFLSGFGGSLLPMGRVGVLPGAPGGIRKRGPFVP

SEQ ID NO: 219854 - protein, 104 aa, Zea mays
  unsure (1)..(104): unsure at all Xaa locations
  Clone ID: MRT4577_132095C.1.pep
ADARADARADARAPQAAQAQPQPRAQQPPPXTXPAGQSLCDSQRGRDRNTXRQFFFYHKPTLTLARXTGAHAXESLRYPDQLGKTKVHTEGCAHFGQPNPRSPA

SEQ ID NO: 219855 - protein, 421 aa, Zea mays
  Clone ID: MRT4577_132096C.1.pep
YTSPGSVPGEKAPLDFTLKTSLQFVSSSSVKWCHKLNTSFGRSSITGAIGQSCPRGCQNLECSKLESKKEFLFSKALQSWVYPQSLLPSSIISAMLSSTAGESDFLLKRHQDWEDSFQNLYYMLRKNMLNIFYVYTTQFVALFISGSCLEKKQSSNAYLSQSTRGLRSLLRKHGVCFSMPLCSTEVEQATEDDLIELSEIERRNVGQALHLDALSDVDNTTQSLLSFTGNENVHGLYDVLLNYKSLLNSLSAVDVPVLYSPQPFQNGCLHIPEVKCREMRRADMSSGGFDTEQGSAFASTAGNVCYSMEVKDAVLPPWVVSGPLQLLCAHLCAAMSLDATSFDLTIATEPSSMGLNVALDSMGTTTTDVQPEGSTPSSCSAPTTPLVGAVPDAALVPALHSASLRRLTYTDGGGYVAHTTV

SEQ ID NO: 219856 - protein, 141 aa, Zea mays
  Clone ID: MRT4577_132097C.1.pep
KYMACCLMYRGDVVPKDVNASVAPIKTKRPLQFVDWCPTGFKWGIKYQPPSVVPGGDLAKVQRSVCMISNSPSVVGGFFRIGPEFGLMFPKGAFVPWYVGEGMEEGEFFEAREDLAALEKDFEEVGSEFDEGEDGDEGDEF

SEQ ID NO: 219857 - protein, 89 aa, Zea mays
  Clone ID: MRT4577_132098C.1.pep
GMVKEPVPMGLGPWGAEGGRAWDDGVYTGVKQIYVMRGACIGSIQIEYDRSGHSIWSSRHGNSGHITHRVKLDFPHEVLTCVYGYYDTS

SEQ ID NO: 219858 - protein, 84 aa, Zea mays
  Clone ID: MRT4577_132099C.1.pep
SFFFFFFFFFFFFFFFFFFLTRKGYIRLAHFPKHLDFCFTKFNKFSTETKGKHRARNGKPNTRPGLIVFAFPIIFRPKLGELKR

SEQ ID NO: 219859 - protein, 246 aa, Zea mays
  unsure (1)..(246): unsure at all Xaa locations
  Clone ID: MRT4577_13209C.1.pep
MSTQSISPASASAQFTYPAAAAPSYFPVPFHLQNAQYTAWTAAAPAVPVYNAIYPMPQVQQAQQLFQKDSKIITPEALATVKAAIANSEKDKKVDATKKAVPRKAAGQSWEDPTLADWPESAQGCDEPNXATRDLDDFRLFCGDLGNEVNDDVLAKAFSKYPSFNMARVIRDKWTGKTKGYGFVSFADASDLTSALKDMNGKYVGNRPIKLRKSTWKNRIDLEALEKGKTQPQKKIKLQKRSVLHK

SEQ ID NO: 219860 - protein, 91 aa, Zea mays
  unsure (1)..(91): unsure at all Xaa locations
  Clone ID: MRT4577_1320C.1.pep
VATIKTKRTIQFVNWCPTGFKCGIXYQAXTVVPGXADLAKVQRXFVHWYVGEGMEEGEFSXAREDLAALEKDYEEVAAEGGSDAGHEAKEY

SEQ ID NO: 219861 - protein, 63 aa, Zea mays
  Clone ID: MRT4577_132100C.1.pep
RSEPSSFAPKGGGRSWWTANERRPSLINGSPPLWLIGAPQKALGQGLGMMLAPLNFQSPFVLA

SEQ ID NO: 219862 - protein, 81 aa, Zea mays
  Clone ID: MRT4577_132101C.1.pep
YAYSFVLLKCGSSFSLRANSLMNRASSLTNRARMLPQLVKKIKRANLSQTELTINQVSQQVTCISSSPTPDRFTVCPNQAA

SEQ ID NO: 219863 - protein, 51 aa, Zea mays
  Clone ID: MRT4577_132102C.1.pep
FPCGCQLVADSGKKSYRKFVLLSQLEDIGKNLRASLGSSFFKRIFHFLKEN

SEQ ID NO: 219864 - protein, 82 aa, Zea mays
  Clone ID: MRT4577_132103C.1.pep
VMLLQTRTKSECRVVILYKPRKAQTPPDKFNKQKILSGGPSPPALQSCFSSFGTTLEQKQQKFVASSPKNNKGINPEYGILN

SEQ ID NO: 219865 - protein, 664 aa, Zea mays
  Clone ID: MRT4577_132104C.1.pep
MGKDRKGRGSPRRTGDKQKREPSPPSEDFDDSEYSEEEFSSESEGSPFVFAPNAAGIFRNNRRAITDDTGVLEHFRGNRRVTDDDTGVSEHHLVGGASLELRRRRKIEYLDIPLKDSIKGWRLEWFIVENHCKSLPPRSGRQPDVRTPNWVESLTPSEIMEAKVLLAEVCLLKDRGLTAEAMVADFVFKNIQPLKKRAYPAYLYSGINDSTRAANKRIPTEDLPPASDGSLGLRVRPCPEDIEALIAPLRSLPNDERQTHFEMLASTNDAEIDDVLSMLAGESSDSTHTEPMAIMAGQELGKAVEIRKPEVRDEVSAEVLPEVDAKGCDHAQAAIYIFDEDEEEEEEEVPLIRKNSRHYRSSEGALEEVIHEDMLSEPTADDLMAVCSDVPDAGLEVSRAVSRSSSTLEGSLQCQDAGLSRPTPMEVTEEPSALEVAAAEDPAPRVVLKVTQPRGCCRAEITPDNALQIVPVDLPSSSHDIAPPALGLPSFLSNLQLDSERMAHEEEKRALVASRDNLDRLYHDASNSLTILERSHRFSMLDLDHHRHELHVSQDEVQRLGQLLSVKDLTIKDLRASKKLVAQGLETARLAVKASEDNCAVLKAQHDKAMDKAVHARWILMRRPGIVVPDDIVIDVNVAPDALSRPSSSIAPTKNIADKDVSMQ

SEQ ID NO: 219866 - protein, 108 aa, Zea mays
  Clone ID: MRT4577_132105C.1.pep
SSGRPGRYYLALATFPYLFLIVIIIIVTNTREYCEPTSELRHSGFARAQYTCCALHVAPTHSFFLTLVASTGRRSSTCRNTKEHKEAKYSGCHCWYTIVHSMLLAHAS

SEQ ID NO: 219867 - protein, 161 aa, Zea mays
  unsure (1)..(161): unsure at all Xaa locations
  Clone ID: MRT4577_132106C.1.pep
QRQHTSPRTRNLTGKQCHLPCSDCCATRQGEADXQPSLASGAIGSSASPDPRARTQPRPRKTVSASPDPRARPPPRPRKILSASPDPRAQTQSRPRKTVSASPDPRARTQPRPRKTVSASPDPRARTQPRPRKSHRLARPWAKAALVWRTGQCLVHQRDPL

SEQ ID NO: 219868 - protein, 110 aa, Zea mays
  Clone ID: MRT4577_132107C.1.pep
GSLVPSCPCRMRMPVALYTASLRRHAPTLVGGACAAGGEARADDLAAGADRGVLARPGPCTRVHTKREGKRTRGYGTVTWTPARRTGYYRDGRTGWSARRTLKMLIVSRE

SEQ ID NO: 219869 - protein, 176 aa, Zea mays
  Clone ID: MRT4577_132108C.1.pep
AFSKGKIAGYKLLEVIHQKPSIVNDHKDGKWLAEVHGNIEFKEVTFSYPSSPDVIIFREFSIFFPAGKTVAVVGGSGSGKSTVVALIKRFYDPNEGQVLLDNVDIKTLQLRWLREQIGLVNQEPALFATTILENILYGKPDATIAEVEAAATASNAHSFISLLPNGYNTMAGERGI

SEQ ID NO: 219870 - protein, 84 aa, Zea mays
  unsure (1)..(84): unsure at all Xaa locations
  Clone ID: MRT4577_132109C.1.pep
GALHYGDCASCASFCHVLVLPAPTACNQSLVGEILHSPADHVSLYLAVFDTRREPASVWGVLERRRQGRTDREDRLWKWMXVEY

SEQ ID NO: 219871 - protein, 86 aa, Zea mays
  Clone ID: MRT4577_13210C.1.pep
QTFFSPAFASVYTGIRPTPAGVSHERPGDSPHQIQLLDSTRFSSRVRSAAASIRTTSKTVDFPPKKKADQKNRSLNSIRTPALIAS

SEQ ID NO: 219872 - protein, 32 aa, Zea mays
  Clone ID: MRT4577_132110C.1.pep
SSISILIIQVQKGSILCLVSHKRQPKKVIIEV

SEQ ID NO: 219873 - protein, 186 aa, Zea mays
  Clone ID: MRT4577_132111C.1.pep
SRPAGPAKPRVVTLQVIEKVSTVVEVLRSTPHNGFPVLDWPRPGVSELHGLVLRSHLMAVLKKRWFLTEKRRTEEWEARERFSSTELAEKSGSIDEVAVQLTPEELDMYIDLHPFTNTTPYTVVETMSVAKAVVLFRTCALRHMLIIPKFQGPEIAPIVGILTRQDLRAHNILGAFPHLANKRKVH

SEQ ID NO: 219874 - protein, 57 aa, Zea mays
  Clone ID: MRT4577_132112C.1.pep
FFQKRWANEETLFILKKVFKRLECEKFGLSIKNEGGLNKGSFSCERLKVFLKKRVEF

SEQ ID NO: 219875 - protein, 83 aa, Zea mays
  unsure (1)..(83): unsure at all Xaa locations
  Clone ID: MRT4577_132113C.1.pep
XIHYASDTIXXFSXVTHICRDXXYGXLIRYLHASGXXYFSSDLFLXVGRGLXYGSXXFLETXNIGXIXLXAVIATXXMGYVLP

SEQ ID NO: 219876 - protein, 114 aa, Zea mays
  Clone ID: MRT4577_132114C.1.pep
GPLFHQARQAPGVPEGGAGTPPPRSPPVSALYRIIGGVGRRRPRPSNKVKWVPMLVCVRLRSVFFPPGRPLTPDNRCGNKKKHLWNSKVSPGPPPLSSEFFSAAAIKLNEHVLA

SEQ ID NO: 219877 - protein, 74 aa, Zea mays
  Clone ID: MRT4577_132115C.1.pep
MEYEDRCHKDQEPKYDCLIFDLDDTLYTLSAGNAGHAKKNIEDNKEEKLGIDETKIENLGKLLHKNNGTTMAGL

SEQ ID NO: 219878 - protein, 170 aa, Zea mays
  unsure (1)..(170): unsure at all Xaa locations
  Clone ID: MRT4577_132116C.1.pep
KKPPPPPPGGPLLXXXHTPPEEGGXKPPPPPPRGGAPXXPXREREAPPPPPPPPXPNPPSPPPKPPQKKPTPPPPPXPHKNPPPPPLPPPPPGASPPPRRPPPPPRGRPPPGPPKKGSPQXEPPRKPHPPPKSXPPXPPPPPAPPPPPPPRHPRGGMPGKKGKGNPIWGA

SEQ ID NO: 219879 - protein, 169 aa, Zea mays
  Clone ID: MRT4577_132117C.1.pep
MDGHVGQFFQSVSSIFRGSDTLPVCDRDIIAGCETEVAEAANEEQKNDSLMRLSWALVHSRQPEDVNRGIGMLEASFGKSNSPLQTREKLYLLAVGHYRNGDYTRSRELLERCLEVQPDWRQALTLERLLEEKTKRDGMIGMAIVTGAFGLVGLVAGGIIAAASSSRKK

SEQ ID NO: 219880 - protein, 83 aa, Zea mays
  Clone ID: MRT4577_132118C.1.pep
SEFGRRGQDGRLLLLLMSTRVDWSGEVCEELREGSLCDQLDPAGHRIHSSVPPQRRDLVSGRPVYGSGRRCSGAPCCTPGYYE

SEQ ID NO: 219881 - protein, 119 aa, Zea mays
  Clone ID: MRT4577_132119C.1.pep
QCLLRRDTPTGLAIAATTTTTTIFNCTAVSSLSSERAIARNYDYRGCLPAGVGVLPRAGQVLRRLARLTGGRWREPLGMHRPDTKDDSGLGWQTEGGRVLRQRALRKGLHPLVHVNEQG

SEQ ID NO: 219882 - protein, 127 aa, Zea mays
  Clone ID: MRT4577_13211C.1.pep
GYFKYPHSQLLDLSPTDDFRLFCGDLGNEVNDDVLAKAFSKYPSFNMARVIRDKWTGKTKGYGFVSFADASDLTSALKDMNGKYVGNRPIKLRKSTWKNRIDLEALEKGKTQPQKKIKLQKRSVLHK

SEQ ID NO: 219883 - protein, 832 aa, Zea mays
  Clone ID: MRT4577_132120C.1.pep
MDFSLLDFRPSLAFEDSLRDALASSVCPARPSLRSSFWLVVSFGRYIFKLNSVSVGHLLQVALGGFAAGFEVLQLADRVFRFSVSSMAMGFHIYNSGCIERKEFMAFFNLWNRGGPNWKHEFKLFSDEEAASWLKVRGRKNPSYADIVKLPLTGANVVPIRNIIKSPSGDQHSTRAGSSVFNRLNPPFHNHAQSLTLSLGVTSPKPQPAPSSSAGWRSSVPALMAYRRVDPEPFLPPGFSASMVLHREIMARSVTRRLPPLHEDWAIISIQPLPDHEITFPVVRDVVREYLVEHRRLGVRDIQRSHLGQVLVQFSSVLERDNLVLLGPQQYLDASFTTQWNNDAWNHRALFFNRECWLMLLGFPLDYRSSEYLQAAIGSFGRLILWEEDRRNVYRTLLRVRVTSLEEVPQFIVFSEADGFIGDSWTVQCEIIQQTLLGGQPQDEDPVPVVPEDGQQLPLEFFGLGQPVPAVGWDLNFPPEDNVQAQPADNIQGDWDQWIVNDPPVQQPHLDLPPDEQQIVLLVTFMVLRCRMGRFRMGRFLMIWWLWGRCPTLMPPPPALGDIPMIGPQEVDGPPIQGVLHVPGDIAIPVAQSVEPNVNGHNNVMLNFMFSQDWQPDPVLLSHLERKRNAQFYRIWANYFAPAGNSVTSVQVPKKWAPFFLSNLLHEDSFSWSKSFLSSDIPSALMEPETETHSFVIPRKCHDGKFLDSVLSGESADDASVPSDPASSPPKHDVVESDLRRSKRLRDARAGFRQGSCQKKNCLMCQHKFEGPPSLSAKTIRRLGESFCNLSEEELADKALKKKKNPPGCVGSNKSGKKDKGDKKQDSSDDDN

SEQ ID NO: 219884 - protein, 86 aa, Zea mays
  Clone ID: MRT4577_132121C.1.pep
DAYASFTMYHSESALFVTSMAGSYIVLSSYCAMMILPSCSHRRATLTTHSRHSLQNRSFACSMTIFIRIPPYIIREFPSTPLGRLH

SEQ ID NO: 219885 - protein, 76 aa, Zea mays
  Clone ID: MRT4577_132122C.1.pep
GRPNYPSLWAPACFKGSCPRYLGFWPKGFFFVVERLPLWPKKKKKKKKKKKKKKKKKKKRKKKKKKKKKYSALLAL

SEQ ID NO: 219886 - protein, 245 aa, Zea mays
  unsure (1)..(245): unsure at all Xaa locations
  Clone ID: MRT4577_132123C.1.pep
RRSARRRRRRCTATRPSPRPKSGTRRRGACAPSPAGTRRSPWRGTGTPCCRRLSPRGTXRCPSRPAPAGTCRSTTGTPRRGTPRRRRAGRGXRADAAAQAGGAAPAAPXPTPPAAPRAAGWTPSARAAAGPRPRAPPGXPEPHAXLRRRGGATHGATPTRGPAGSSATAGRRPSTGGSPACAPWSSPSPPCLAAGRGIRGEERRGGCRWLLLSGLVVQRPEEEERLEGQKRKCPAGLEVPKDQRK

SEQ ID NO: 219887 - protein, 79 aa, Zea mays
  Clone ID: MRT4577_132124C.1.pep
GALQTAILNTLNHHNSVMPNNHLINKLLSSNDKINFFTITRYSLRTILNLNGYDLIMLIPLSIELSISDPKLTQLCFYN

SEQ ID NO: 219888 - protein, 55 aa, Zea mays
  Clone ID: MRT4577_132125C.1.pep
IWWGLVWSGALVGKVCVLILEGGRGFCGLACVQSVWISGAMVRRSWIASGDCLRA

SEQ ID NO: 219889 - protein, 99 aa, Zea mays
  unsure (1)..(99): unsure at all Xaa locations
  Clone ID: MRT4577_132126C.1.pep
NSAGFLLTSYRIYISSSHVYYRCFINCLTSTTYYHSLHNTFSTYXDPLXSNIILYSYTHISLNFSFITFSTEDAILNAIXALTANNFTSXNITINYAQS

SEQ ID NO: 219890 - protein, 90 aa, Zea mays
  Clone ID: MRT4577_132127C.1.pep
GKECVAVKLNASHSINFDITIHIFGDSIHSEVKRQLLLPTQHMSTDCTGAVSSALMIQTGNSHERLLITCTCLEPCWLVGELSDIAATGT

SEQ ID NO: 219891 - protein, 255 aa, Zea mays
  Clone ID: MRT4577_132128C.1.pep
GGFFAPLPASGFNDAGMSWDDEDEIDQSVDASSMAISASMENAAGAVAGASGAGGGSGRGKKKGMPAKNLMAERRRRKKLNDRLYMLRSVVPKISKMDRASILGDAIEYLKELLQRISDLHNELESAPSSSLVGPTSASFNPSTPTLQTFPGQVKEELCPGSFPSPTGQQATVEVRMREGHAVNIHMFCARRPGILLSTMTALDSLGLDIEQAVISCFNGFAMDVFRAECADGPGMVPEEIKAVLMHTAGLHNAM

SEQ ID NO: 219892 - protein, 60 aa, Zea mays
  Clone ID: MRT4577_132129C.1.pep
SVDLLIHILEQVFHIDKFVQLGSIVVGIHEYVLAVNLNLMSEHIVLLVIHVPRKSANLAC

SEQ ID NO: 219893 - protein, 131 aa, Zea mays
  unsure (1)..(131): unsure at all Xaa locations
  Clone ID: MRT4577_13212C.1.pep
VLXGLPGVAPAVSFGVPXPPXGXXFVCAVVPRXGSALRAXGVLAPCRRXLASFXVPXGVFFPXXLPPXAAGPFXRRFVAQPFVQPPRACSLFLVLAQSLVVGLFRSPRLFAVVPAWGGGHSLSVPVCFACV

SEQ ID NO: 219894 - protein, 82 aa, Zea mays
  unsure (1)..(82): unsure at all Xaa locations
  Clone ID: MRT4577_132130C.1.pep
MLAVLTGQVVEVPAVLVAAGSRTPSPKTKASQLVGRFLVDSEPVVFVHLVDHGHLVYFHTYQALFRPRSFVAKAXCFCLFDG

SEQ ID NO: 219895 - protein, 46 aa, Zea mays
  Clone ID: MRT4577_132131C.1.pep
HCRFAMEEEYAAVLSNHTWDLVPFSSGTNVVTVKCLFIHMLTFDDS

SEQ ID NO: 219896 - protein, 355 aa, Zea mays
  unsure (1)..(355): unsure at all Xaa locations
  Clone ID: MRT4577_132132C.1.pep
MANATVPELQPQVQAAGGRKVVDEVSGWLRVLDDGSVDRTWTGPPEVLPMMQPVAPYDVPRDGHTLHDLPGEPNFRIYLPEVDDDRKGGRLPVIVHFHGGGFCFSHPSWLMYHQFYSRLACAVPAVVVSVELPLAPERRLPAHIDTAVAAVRRLRCIALSXGRSSWXKAAKLLREAADVSRVFLVGDSSGANVSHFTAARVGQDGAGVWAPLRVAGCVLIQPGFVRATRSRSELEVGESVFFTLDMLDKCQAMALPVGATKEHPFSCPMGPQAPPLESVPLPPMLVAVGEKDLVRDTNLEYCDALRAAGKEVEVLVSRGMSHAFYLNKFAVDMDPSTGERAQELIDAIVSFIASH

SEQ ID NO: 219897 - protein, 74 aa, Zea mays
  Clone ID: MRT4577_132133C.1.pep
FMSINPVILESPLRNRVYLPIIFAATKVRSPVIVRIPLLLTRAYFMSRCFIGSFKGYGALGTMFLSTSAFKHPL

SEQ ID NO: 219898 - protein, 160 aa, Zea mays
  Clone ID: MRT4577_132134C.1.pep
MLPLRVQQSHTGGNLSNGSKANVHTGAPPPWLKANEHDPKNLSLKSCGLSSRKGKLRKLNPNRVGAAWAERRRAEMEMEKQGEIVPATSDSSWLPNFGSVWQSGTRKESRKEFEKSHKIHDTKSDHDLSLEIKPYISKRMRVGAEKASDKAEELGSHLPQ

SEQ ID NO: 219899 - protein, 69 aa, Zea mays
  unsure (1)..(69): unsure at all Xaa locations
  Clone ID: MRT4577_132135C.1.pep
ELVEKFSXNGVKVAKLRANGEXEALPHAELQLQRFPTVLLFPGRTARPIKNPSDKRDDDSLLTCVNRLR

SEQ ID NO: 219900 - protein, 226 aa, Zea mays
  Clone ID: MRT4577_132136C.1.pep
PGYNVQSQQPHSIADHPGNMNSSVAPLPPPPFNNSGYGGQPNQIPPPPPSAPLNPPGPQGSFPALPAPYHGNNYHRPPTTSMPNEGYNLQPAPPPPPPNQFPSVPPEHQHRPHHWGNNCPPCPERYRYNGHDRGHHRHDRRHHAHDRQHHYDDRGYRYDDRGYHYDDRGHYFDDRRHQFDDRGHHFDERAIRGSMHNEAADRSRYPFPPGPSSIPDHFEASPGPMH

SEQ ID NO: 219901 - protein, 151 aa, Zea mays
  Clone ID: MRT4577_132137C.1.pep
EFGTRPSQEYWFKCIDLDGNGILTHIELQFFFEEQLHRMECMAQEPVLFEDILCQLIDMIGPENDSYLTLKDFRRCKLSGHFFNILFNLNKFMAFEARDPFLIRQMREEPSLTDWDRFARREYVRLAMEEDGEDASNASGDVWDESLESPF

SEQ ID NO: 219902 - protein, 70 aa, Zea mays
  Clone ID: MRT4577_132138C.1.pep
ASTLKKTTSNYHAAESQKYQPRGRKCRPTCMTHDPRPCFVINTLNSMTQNEDTCNHTGLLDDLDTVLDYY

SEQ ID NO: 219903 - protein, 37 aa, Zea mays
  Clone ID: MRT4577_132139C.1.pep
SVNPLLCELKYSPNMCCIFVLSLLDPLQQKKKGRSSR

SEQ ID NO: 219904 - protein, 241 aa, Zea mays
  unsure (1)..(241): unsure at all Xaa locations
  Clone ID: MRT4577_13213C.1.pep
MSVFSPQAWFEFGYEKVLGTPASSFHFVPGETPISTFREVFAFVVTYLVIIFGGQKLMKNQKPIKLSFLFQIHNFFLTVLSLGLFVLFVENVIPIVYRDGFFSAYCSPKNFTQPLELLYYINYLTKYYELLDTVFLVLRKKNLQFLHWYHHSMTALLCFTQINGRTTVSXVPVTLNLAVHVXMYYYYFLATFDIKVWWKKYITVTQIVQXVIDIAXILFCIFNWVAFKYXPSLPHFXNCSA

SEQ ID NO: 219905 - protein, 40 aa, Zea mays
  Clone ID: MRT4577_132140C.1.pep
AGGLDYMDLDRCTIESVRCPYTSVSWDLSSQTTNFFGPLG

SEQ ID NO: 219906 - protein, 68 aa, Zea mays
  Clone ID: MRT4577_132141C.1.pep
RPARAQSNTPTGETHPTMDHGRSQFNMARENLTTGASYKTHHIKLPSMIHEITNRTMKHLTFRPVSHG

SEQ ID NO: 219907 - protein, 127 aa, Zea mays
  unsure (1)..(127): unsure at all Xaa locations
  Clone ID: MRT4577_132142C.1.pep
ACRCRAGSYRGGTTMFSRRGAHFHWDTRYKIXVVATKALTYLHXECSPAILXRTXKAHNILLDNDDEAHVADSALPKCLQDYGASQXHTAIARSYGYIAPQHAYTLEVHKKSDXYSHREGLLELETR

SEQ ID NO: 219908 - protein, 48 aa, Zea mays
  unsure (1)..(48): unsure at all Xaa locations
  Clone ID: MRT4577_132143C.1.pep
CGAQNSFLNFSLLKNXTPPPLSSCDLMICRVTPMALTNFVDSYLFVWG

SEQ ID NO: 219909 - protein, 109 aa, Zea mays
  Clone ID: MRT4577_132144C.1.pep
VCQPKSLPRSCSTTPCHLRITAHSLSLRHRCQIQAIPVILRLRISLAQSPLLPQARWSTGSHVSALPISMCSCDGVETIQPHSTIFAHSPQDVLMRIDVFINIYTISVR

SEQ ID NO: 219910 - protein, 84 aa, Zea mays
  unsure (1)..(84): unsure at all Xaa locations
  Clone ID: MRT4577_132145C.1.pep
VGRSRWVWCPRPCSPCGGAWCSAFAVVLSPCRCRAAAWAVFPVACCVVLLALWCAALPLCAPPLXALLPSWXYNWVGPGCPARS

SEQ ID NO: 219911 - protein, 117 aa, Zea mays
  Clone ID: MRT4577_132146C.1.pep
HAWRRQRPDLHHRFFFLTCPHFSSLSYVITTSTHTTFGCCYHPPPPIHLPTPFHLPPPVHLPPPVHLPPSVHLTTPFHLPPPFHVPPPVNMTPSPFHYPTQPTQPQSHPQPHPCPYQ

SEQ ID NO: 219912 - protein, 163 aa, Zea mays
  Clone ID: MRT4577_132147C.1.pep
YMLRVLTRVVGYLTSLRLYGEIHGVLYCYIHFAQLLIATKGATTACIDKSAARQEVSRRNVDCTRTTPPVNQRQRSDENTYKINKIGATNIHTCIYITQTEVQPVAIFLYHILRLLYSLRRFVVLLISRERSALSSTLQASAAPCLQYDLELTMIGISEHGPV

SEQ ID NO: 219913 - protein, 67 aa, Zea mays
  Clone ID: MRT4577_132148C.1.pep
DPRGGKTKRVGRLKGFHPLGAGHQKAPPLGLIFKTPGVLIPPRDLKAHVTGRRFNFTKGAGFFRKEF

SEQ ID NO: 219914 - protein, 30 aa, Zea mays
  Clone ID: MRT4577_132149C.1.pep
NVVITVLTGYDVGLLFKVSHSINVRCHFSH

SEQ ID NO: 219915 - protein, 41 aa, Zea mays
  Clone ID: MRT4577_13214C.1.pep
GLHFCWLRIAYKIITVTQHNRYLLIASCMTVKAILSHALLF

SEQ ID NO: 219916 - protein, 197 aa, Zea mays
  unsure (1)..(197): unsure at all Xaa locations
  Clone ID: MRT4577_132150C.1.pep
AYIARTTFAWKAENVPTSSDFDEGRVTMRKRVQKANAAAALGSPXDRPERLLYLRPLSGEPPIYLTVEFPVDYMWDTEGMSEYPNTFIKNLELDVIHFIWAMLYWIGCIFPELIDRNGDXFGDAVWENVASQIFSEDDHGXLGNPMLIHGQSILAIWAXHVELMGADEGYRIVXNALGDVVDQLYPVVSFYTVGLAD

SEQ ID NO: 219917 - protein, 119 aa, Zea mays
  Clone ID: MRT4577_132151C.1.pep
MAQDMPPKGGYEPVQYKRNLPARGLRPGILLLGMGAVMGYGWYKLIGGMREMNELGREKMWARINLIPVLQAEEDRDQVRRYLADQKREKELLGDNAKVYNSNRFVRPTFAVTPPPTTN

SEQ ID NO: 219918 - protein, 118 aa, Zea mays
  Clone ID: MRT4577_132152C.1.pep
MSKQKIVIKLGVPNAKNRSKAMQLASKFVGVSKVGITGDGKDRLEVEGEGVDTVLLVNYLRKKVCRSADIVKVEVKDKKDEKKPEEPPYYCWPNYYYCPPPPPPLPMVERADDSCHVM

SEQ ID NO: 219919 - protein, 159 aa, Zea mays
  Clone ID: MRT4577_132153C.1.pep
IPEFEPSEQEDASATDRGLGPSLTEDQPGPYLAPGLLGSNIHQQGRAATNSHHGGAGAMETRSRHSSYPAGTEEDEGMEEELSPFRGRSRSAPPNLWAAQRYGRELRRMSDEFEGSFKGLPRPKSAGTATQMRQSAGWTRIIQSWWDRNLGKGGSTPSQ

SEQ ID NO: 219920 - protein, 394 aa, Zea mays
  Clone ID: MRT4577_132154C.1.pep
MKRPLRRSFAVLIFVGLVGAASFSTALRRAVAPAPAQEPPPLDPARLNATLLRLAAADPSEASLRRDVDGLLEGRLPASAARARAWRRDRLLHPLHLHRHRSFPLPRRGRYPDDDHDILLHPLPRHEQLHIDPALRRDLRSWHRLRRYDPAVLASLPSLLSIPGRIPSCAVVGNSGILLRASHGALIDSHAAVFRLNNARVSGYAAHVGSKTNFSFINSNVLHLCARRPGCFCHPYGHGVPILLYICQAAHFVDVAACNATSSSRHGSPISVTDARLDVLCARIVKYYSLRRFVAETGRAPEEWDRAHDAAMFHYSSGMQAIMVAVGVCDRVSVFGFGKSSDAKHHYHSNQKAELDLHDYDAEYAFYHDLSEQPQVVPFLKDSGFAVPPVVFYH

SEQ ID NO: 219921 - protein, 114 aa, Zea mays
  Clone ID: MRT4577_132155C.1.pep
KRWNSGFCAYCGRILKRSLDSGGGERNTADVNHVMSKSSALVLILLRGAKASAGASCYMERRRGRYPNVRSPSIFRPSVSFSTTKGEGESEKGMERPGGDPQRPIKIYKITLFR

SEQ ID NO: 219922 - protein, 77 aa, Zea mays
  Clone ID: MRT4577_132156C.1.pep
MGCVASKNTVSVTPAADSSGGLRDRSHPRAQESAAPVPLPVPVPSLRSSSSAARRSEKVKDDAADPGQGRPSRGGDV

SEQ ID NO: 219923 - protein, 181 aa, Zea mays
  unsure (1)..(181): unsure at all Xaa locations
  Clone ID: MRT4577_132157C.1.pep
MSIKYCDQHKDCERQRLYRRFCAALVGVIVLVLLIVLXRIFLNDVSIVCINVSSASYLTVTMQATLASRNTNDRVGIYYDRADVYAEYRAMQITVPTALPPFFQPPNDAAVWAPFLSASNVPLPPYLATALTQDXTAXYLLVTIRVDGWIRWKAXAFITSHYHLRVRCPALLTXHDGQGSY

SEQ ID NO: 219924 - protein, 90 aa, Zea mays
  Clone ID: MRT4577_132158C.1.pep
NISLLTPDLLLYDHGSATASAILTPAGMIRGLSRKLECLHVCGARRTTTLPSRELQRHRRLPPMYYAVPSLYDIWTNVSITSNITGLNLA

SEQ ID NO: 219925 - protein, 214 aa, Zea mays
  Clone ID: MRT4577_132159C.1.pep
MSIKYCDQHKDCERQRLYRRFCAALVGVIVLVLLIVLIVWLVLRPTKPRFFLNDVSIVCINVSSASYLTVTMQATLASRNTNDRVGIYYDRADVYAEYRAMQITVPTALPPFFQPPNDAAVWAPFLSASNVPLPPYLATALTQDETAGYLLVTIRVDGWIRWKAGAFITSHYHLRVRCPALLTVNDGQGSYGSNAGGGLGYFKFQRAAPCIVDV

SEQ ID NO: 219926 - protein, 60 aa, Zea mays
  unsure (1)..(60): unsure at all Xaa locations
  Clone ID: MRT4577_13215C.1.pep
YLWGPYGEDLMWGPTDWDTAIXPXCYMPSMSNPNGTDKTAPGAVCIHNTAYQGISAPSDS

SEQ ID NO: 219927 - protein, 214 aa, Zea mays
  Clone ID: MRT4577_132160C.1.pep
MSIKYCDQHKDCERQRLYRRFCAALVGVIVLVLLIVLIVWLVLRPTKPRFFLNDVSIVCINVSSASYLTVTMQATLASRNTNDRVGIYYDRADVYAEYRAMQITVPTALPPFFQPPNDAAVWAPFLSASNVPLPPYLATALTQDETAGYLLVTIRVDGWIRWKAGAFITSHYHLRVRCPALLTVNDGQGSYGSNAGGGLGYFKFQRAAPCIVNV

SEQ ID NO: 219928 - protein, 89 aa, Zea mays
  Clone ID: MRT4577_132161C.1.pep
SPFSSISFLSWKRSIDTLGHVVCTLEPMTELVPVWIWLTGILNSKVSAEGVLINGNYIHFLSFLRQETEKQKASTFLIEASNYPPPQRY

SEQ ID NO: 219929 - protein, 221 aa, Zea mays
  unsure (1)..(221): unsure at all Xaa locations
  Clone ID: MRT4577_132162C.1.pep
EIAKSDSPSKSRTITTSKTSLRVSLSPPNQTTKKRTDSSTQKMSYYDIDAILTDAEKVPCQFEIDVPYLGHLDNSPNGLKANTPLTLPLWLAEMLALASTPTSNSPLTLNLPPCLSTAVLSALKADPRAVPLRDHSLHFYGVGVRMLDLFDEKDVAEVLRKTFVVRAGDVGLHARKADEGMVGGNGEEFLRGLEDXXKXLFKRRHEGVKXAKEWTDKVKKT

SEQ ID NO: 219930 - protein, 61 aa, Zea mays
  Clone ID: MRT4577_132163C.1.pep
FVSVLLSLVLLVLPGQGVLFILGVALRRIIWCTGSCFDLLSSSSCEMDHLIIAHIYSCYLA

SEQ ID NO: 219931 - protein, 460 aa, Zea mays
  unsure (1)..(460): unsure at all Xaa locations
  Clone ID: MRT4577_132164C.1.pep
MASLPLCRSPSSLLPSWPHRPISASFNPKNPSSPVAAHVSVQETPPQPQDPSPPSDSNPNGTRPSSSSNTRFLWVNPNSPRAADVARARAGSGRRARLASAAAALGACETTESAVEAALQAAFPEPPSEQDAVIVLNTAAATRAETAVLALRWFLGNAKVRKKVILYNVVLKLLRKKRLWSETEALWAEMLRDGVQPDNATFSTVISCARACGLHSKAVEWFDKMPEFGCSPDMLTYSAVIDAYGHAGNSEAALRLYDRARAEKWQLDPVICSTVIKVHSTSGNFDGALNVFEEMKAIGVRPNLVVYNTMLDAMGRALRPWVVKTIHREMVDQQVQPSRATYCCLLHAYTRARYGEDAMAVYRLMKDEAMGIDVMLYNMLLSMCADIGYVDEAEEIFRDMKASMGAHSKPDSWSYSSMVTLYSSTANVLSAEGILNEMVEARFKPNIFGLTXLIRCYGKV

SEQ ID NO: 219932 - protein, 68 aa, Zea mays
  Clone ID: MRT4577_132165C.1.pep
ATSRRPPWALWRAWAKKGDIGLRKDSGLGAVHAGLGHSSRRTWACQATTDSTSVSPWCRMPAETSLLS

SEQ ID NO: 219933 - protein, 85 aa, Zea mays
  Clone ID: MRT4577_132166C.1.pep
LGQAGVGGGTQQLFQQAIFRPVTGLGGPRTHLAGLYFGSAAIHPGGGVHGGCGWLAANAALRDHRWWGRPVARAQRGLLGRIYGG

SEQ ID NO: 219934 - protein, 273 aa, Zea mays
  Clone ID: MRT4577_132167C.1.pep
MPSDKAKAPKKKGEEDPGIPPAPCEGEISHEPHRQRSLNGRTTGPTRRSTKGNWTPEEDAILSRAVQTYQGKNWKKIAESFPDRTDVQWLHRWQKVLNPELVKGPWSKEEDEIIVQMVNKYGPKKWSAIAQALPGRIGKQCRERWHNHLNPAINKEAWTQEEEITLIHAHRMYGNKWAELTKFLPGRTDNAIKNHWNSSVKKKVDSYISSGLLSQVPCLSLIECPAQCDSLSAMDQQNNGGTDCNDQNTSVGLSSDLQVNVDANKKEHMTLTR

SEQ ID NO: 219935 - protein, 340 aa, Zea mays
  Clone ID: MRT4577_132168C.1.pep
TVAVVLFFLLVIPPFWEQLQILIGSLPKVGDRLENFFEDWHDRMEVKFFSQAFSVDDLPDSISALGANALSSLINLFSNSVTAVLQIIFILAIAVMMLLSPQAYRQGTLKLFPSFYRRRADEILTQSESSLGNWLTGIVINSFFIASLSGIGLWILQIKLVLVHALMAGILNFIPNIGPAASVVFPLMIAVLDAPWKIIAVLILYFLIQNVESYWLTPIVMAKQVSLLPAVTLIAQLFFASIFGLLGLIMTNNEELGKKFDKSVFPGTQGGPLEHVITAKAVAFGEALKPEFKVYSGQVIANAQAMADQLQKRGFDLVSGGTDNHLMLVDLRSIAMTGKG

SEQ ID NO: 219936 - protein, 97 aa, Zea mays
  Clone ID: MRT4577_132169C.1.pep
GLRAISCAFPKLPRSTVVGGRDHPSLIRRVPGIVWPVAVGAWAARFAASRTRAAREGSKTGSSVYSAVLRFTIGRRLVSSRACHGFSRREVTSEREC

SEQ ID NO: 219937 - protein, 238 aa, Zea mays
  Clone ID: MRT4577_13216C.1.pep
MAATPLDSAWEWLITNFSEFQLATVVTFVLHESVFFLSGFPSLLFERLGLFAKYKIQKKSNTSAYQNRCVMRLILYHVCVNLPVMIFSYPAFKFMGLRSSLPLPHWTVIVSQVLFYFILEDFIFYWGHRALHTKWLYKHVHSVHHEYATPFGLTSEYAHPAEILFLGFATVVGPALTGPHLFTLWLWMVLRVLETVEAHSGYHFPWSPSNFLPLYGGSDFHDYHHRVLYTKSGNYAST

SEQ ID NO: 219938 - protein, 90 aa, Zea mays
  Clone ID: MRT4577_132170C.1.pep
PASGHPPKAKASASAAAPRSDERRRMRNSRHTGSRSSATGLTSSAAASVRVLTTQPEPIVSLKHVIRQDRQQQAVGRAALDRPAASSTRP

SEQ ID NO: 219939 - protein, 98 aa, Zea mays
  Clone ID: MRT4577_132171C.1.pep
QEEQHAANQSPSRWSQGPAVAGGGGGTNNGPRSDLDSKNTRGPRRQGANEENPAGHGAAARGQAAERGGAAAPSPAPPGGGGRVGPPGPHGTRRARGA

SEQ ID NO: 219940 - protein, 54 aa, Zea mays
  Clone ID: MRT4577_132173C.1.pep
QPHKRPQQRRLQARRLKLPREHSHTHQLPQPRLQHKHTLQECLSIHYTIISCTD

SEQ ID NO: 219941 - protein, 82 aa, Zea mays
  Clone ID: MRT4577_132174C.1.pep
FDSQTQHREKNFYPTTWTFSLLPSKILNPTNFPTQIKVLYSKQYPFFPKQKTTTPDHQLLGKMGFPNNMTHIPLHNLKKALP

SEQ ID NO: 219942 - protein, 103 aa, Zea mays
  unsure (1)..(103): unsure at all Xaa locations
  Clone ID: MRT4577_132175C.1.pep
SLLLLICLSLTAPPSLIHSALVSVSLLPHLXTVIASSXQNPHLPPYRLQQALAPRNIPLSTLIQQSPALSFEQSLVXSLYAHHLQQLVLPVINHISLAKLSYY

SEQ ID NO: 219943 - protein, 73 aa, Zea mays
  Clone ID: MRT4577_132176C.1.pep
SYVGPCTRAYASMHSRESTHAFAFNLTTIHHVGRRIHAVFLNYGHGCRRREDLARNARQDLRSLKCLLSPTSY

SEQ ID NO: 219944 - protein, 80 aa, Zea mays
  Clone ID: MRT4577_132177C.1.pep
SQEINVTYKTTLTCNDVTLKKINVSPETSLFELTKILQSVISRCLIGCHKSNNKYVKSHSNLNHYDSINVCDIINRTSGR

SEQ ID NO: 219945 - protein, 199 aa, Zea mays
  Clone ID: MRT4577_132178C.1.pep
AAKFFFFFFAGKINVHIIWAPCTPSVNTPSIDAGFGADPRAIVNKERRETTREKQTDRHRRLAVLHGQTSLFLTRRMVGRNGCRRHGHEPSSVLSVHGPVGGIVGRLCETPIRRGQPRTMGNLLPRCRNSDGDRASVRTTHGEKPSAKSSSTNSLQPSLGVAPIGSRNRSSGRVLGAAAMAPPWSAQVPGAAAQFSHER

SEQ ID NO: 219946 - protein, 119 aa, Zea mays
  unsure (1)..(119): unsure at all Xaa locations
  Clone ID: MRT4577_132179C.1.pep
TTLRHLQPLGGTQAAQAKKREAEDSFFXIGALFSEXRSDDICPNVASKLRQXCSAFDASDPRPAVHRQVLLAAGDWHECNFSLAALKRLIKTRPPFRHVTVWPLCAFFCVLTFSCCLPE

SEQ ID NO: 219947 - protein, 219 aa, Zea mays
  unsure (1)..(219): unsure at all Xaa locations
  Clone ID: MRT4577_13217C.1.pep
MSPAAGEQLSGAHREGRAVEARRVFIGAGCNRVVNNVSWGACGLVAFSTQNAVALFSPLRGEIVTTLPGHKAPVNCTLWLPTKKDVLHVRGRETHYLLSGSADGTIMAWKIGSGKGEWFHALQLPGMHKKGITCLAGRMVSDTIAIFASTSSDGIVVIWEMAIEPTTGGDCKVTCLHSLSVGLKPMVSLSLAVLPGQGGYLILAMGGXDHKITSIIRQA

SEQ ID NO: 219948 - protein, 66 aa, Zea mays
  Clone ID: MRT4577_132180C.1.pep
SLSHPFSRQESSSTFSYEILRRGVLTQEDDQHVRSPEALVAFLLGPATRPYSQVPLLLSRGKDCRK

SEQ ID NO: 219949 - protein, 116 aa, Zea mays
  Clone ID: MRT4577_132181C.1.pep
KKKKKKKKKKKKKKKKKKKKKKKNKKKKKKKKKVCPLGRDPPRGNFWKFPSPWGPFGLAFRGPISPFGGGFYNSLAGVFQRRDGENLGVPHFIRFAALPLLAGWGNPKRARPDRLS

SEQ ID NO: 219950 - protein, 115 aa, Zea mays
  Clone ID: MRT4577_132182C.1.pep
DDYDGNTNINWEEFIAVTVPLNKTEHKEHLMAALTYFDKDGGDYITVDELQKASVEHEMKNAFLEDTIYEVDQNNDGQTNYGEFVTMMQSDSSGLGWQTMESSMNVPLREAPEVY

SEQ ID NO: 219951 - protein, 44 aa, Zea mays
  Clone ID: MRT4577_132183C.1.pep
GSSNSSTRRTHAAEKYIEVVSGDNHEIWITGLVYYDSGAKNLGE

SEQ ID NO: 219952 - protein, 147 aa, Zea mays
  Clone ID: MRT4577_132184C.1.pep
CGSPLRPSRHFLRGTVVLLEGSSYFLAWIDACTSLIAVFLLGVPNGNARSVTVIEKAWLPPVQFTWMAYSGCTSILVMPSRFVCRVCPTAVLFRKCSYSFSPRAPIRFPSGPVRLYLPANAIRLFVGGISVCSKKTKNKKHPKITKG

SEQ ID NO: 219953 - protein, 56 aa, Zea mays
  Clone ID: MRT4577_132185C.1.pep
VCIYNLEVICNNIRRVGNVSVSVMVIRKVEKIVWNQNVIELSGMWFCRCSRYELLV

SEQ ID NO: 219954 - protein, 93 aa, Zea mays
  Clone ID: MRT4577_132186C.1.pep
ARGDSYPQRVHHRGGSIPAGVDTGCDGQEWLKSPEPNPNVATGALVGGPFKNDSFVDDRENVQQNEPTTYNSALVVGLLSGLLSTAPVAKSLS

SEQ ID NO: 219955 - protein, 54 aa, Zea mays
  Clone ID: MRT4577_132187C.1.pep
RNNWCHIILKKVRWKRKKKNLILRLNPCWGGGVDTWAHCSKSPGSYACGASAWQ

SEQ ID NO: 219956 - protein, 69 aa, Zea mays
  Clone ID: MRT4577_132188C.1.pep
IVLIFKKTITTHITILRTTTKIQQKKPYKHQKTKKFNKQNKKKNGLPFKRTHLHSPSYYKKNLFLPSPN

SEQ ID NO: 219957 - protein, 39 aa, Zea mays
  Clone ID: MRT4577_132189C.1.pep
LGTHPFLWPKCLISRPKACPPRKLQCLQATACALQGTLG

SEQ ID NO: 219958 - protein, 46 aa, Zea mays
  Clone ID: MRT4577_13218C.1.pep
LEYSLSPVSGPLLCAIHPWRRNQAAPCQSMSIGMLMIQLCRRIHCH

SEQ ID NO: 219959 - protein, 52 aa, Zea mays
  Clone ID: MRT4577_132190C.1.pep
RLSWVKPGFTQAQQFKTPATKIYLKGPKQKVRHWTLVKARPEPPKHPPFFII

SEQ ID NO: 219960 - protein, 94 aa, Zea mays
  Clone ID: MRT4577_132191C.1.pep
SSLFWSFIVSAKNVKRGHHPCTEAGLTSDDIAHAGCLYGHRRRCGIRKRDIGASGWSNGFIMCVARIRISALPSYLFVWSSVYEMLLNLTCPAG

SEQ ID NO: 219961 - protein, 91 aa, Zea mays
  unsure (1)..(91): unsure at all Xaa locations
  Clone ID: MRT4577_132192C.1.pep
YDSVMSCCLSLNPDATYRDLSACVARCRFRDIQGVRCLDPHATIDXSAGKIILPAWHYVCMFKCVRRTEHIQSCLCWDIRLPSLARTGRLR

SEQ ID NO: 219962 - protein, 63 aa, Zea mays
  Clone ID: MRT4577_132193C.1.pep
KNVVVNSLSGKVNSGPKNTFAYSGSRDFLWTPRLLPPQGFCTPPFQPPPFLFTPIFCFPPPPT

SEQ ID NO: 219963 - protein, 118 aa, Zea mays
  Clone ID: MRT4577_132194C.1.pep
AIEYAVCALKVEVIVVIGHSRCGGIKALLSLEDGAPDKFHFVEEWVRIGGPAKTKVKTDHASVPFEDQCSILEKEAVNVSLENLKTYPFVKEGVEKGTLKLVGGHYDFVNGKFETWEP

SEQ ID NO: 219964 - protein, 251 aa, Zea mays
  Clone ID: MRT4577_132195C.1.pep
DSLGRLGSSRPAGTERNNPQRLGSRKESLLFFVNPPEPALSSSTRLRPCKDMAVERLKTGFEQFKADVYDKKPELFEPLKAHQSPKYMVFACSDSRVCPSVTLGLHPGEAFAVRNIASMVPPYDKTKYAGVGSAIEYAVCALKVEVIVVIGHSRCGGIKALLSLEDGAPDKFHFVEEWVRVGAPAKSKVLADHASAPFEDQCSILEKEAVNVSLENLKSYPFVKEGLEKGTLKLVGGHYDFVNGKFETWEP

SEQ ID NO: 219965 - protein, 52 aa, Zea mays
  Clone ID: MRT4577_132196C.1.pep
RARSSMAHREWISYHLTDLGDRLRVRRQPGDVTAVVDRKLGRQDARWLAAHW

SEQ ID NO: 219966 - protein, 77 aa, Zea mays
  Clone ID: MRT4577_132197C.1.pep
MEETPPGQRPQPPPAHASPPFASAPFTPLPRVFSPGLAAARGTPSPPGSGPGHALPHLSTPPGPAVFSSPLRPAAVP

SEQ ID NO: 219967 - protein, 37 aa, Zea mays
  Clone ID: MRT4577_132198C.1.pep
ARNQLILRMPSDTQKIDMCGALISPSIITREPNTLDI

SEQ ID NO: 219968 - protein, 58 aa, Zea mays
  Clone ID: MRT4577_132199C.1.pep
GSRTAAKSSPRGSSFASYSKFSQLHDLYCNGCSISAPRTPTCSSSTRTPGIMTDWENP

SEQ ID NO: 219969 - protein, 91 aa, Zea mays
  Clone ID: MRT4577_13219C.1.pep
IRGELVDAGLFSLDEKGSPFVIYASHGQASMNQVLEGYPRQYWEDFNVLCCMCTAVYSHFGGEEKSKSISTSHHVVQQLVAIILKRDLEAP

SEQ ID NO: 219970 - protein, 61 aa, Zea mays
  Clone ID: MRT4577_1321C.1.pep
RINSKFDLMYAKRAFVHWYVGKGMKKGEFSKARKDLPPLEKDYKKVPPKGGSDHGDKKEEY

SEQ ID NO: 219971 - protein, 599 aa, Zea mays
  Clone ID: MRT4577_132200C.1.pep
SPPPSLSPNSHLPKFTPVSLSSYLSPKPVSLTQCRFPPRGGGGGARAPPLGGAGSWSWLWWRWRPVRRRRRRRWTWRRCGLWRRRLARTRRWDGTSRATPARAKRWDGVSCDSSGRVTAIQVGARGLTGTLPPEVGDLTELTRLEVFDNKLSGPLPSLPGLSSLQVLLAHNSSFASIPSDFFKGLTGLTAVAIDYNPFASWSLPASRASETYSQASNGPRDIHVVESGNMVISIQVLRNVTNNFSEENILGRGGFGTVYKGELHDGTKIAVKRMEAGVMGNKGLNEFKSEIAVLTKVRHRNLVSLLGYCLDGNERILVYEYMPQGALSQHLFEWSEKNLRPLEWKKRLSIALDVARGVEYLHSLAQQTFIHRDLKPSNILLGDDMKAKVADFGLVRLAPADGKCVSVETRLAGTFGYLAPEYAVTGRVTTKADVFSFGVILMELITGRKALDETQPEDSMHLVTWFRRMQLNKETFRKAIDPVIDLDEETYASVSTVSELAGHCCAREAHQRPDMGHAVNVLSTLSEVWKPADPDSDDSYGIDLNMSLPQALKRWQAFEDSSHFDGATSSFVASLDNTQTSIPTRPPGFADSFTSADGR

SEQ ID NO: 219972 - protein, 428 aa, Zea mays
  Clone ID: MRT4577_132201C.1.pep
VTSSINRHILGSKGRKFPIEIVKITVAGGNANGGARASETYSQASSGPRDIHVVESGNMVISIQVLRNVTNNFSEDNILGRGGFGTVYKGELHDGTKIAVKRMEAGVMGNKGLNEFKSEIAVLTKVRHRNLVSLLGYCLDGNERILVYEYMPQGTLSQHLFEWSENNLRPLEWKKRLSIALDVARGVEYLHSLAQQTFIHRDLKPSNILLGDDMKAKVADFGLVRLAPDDGKCVSIETRLAGTFGYLAPEYAVTGRVTTKADVFSFGVILMELITGRKALDETRPEDSMHLVTWFRRMQLNKETFRKAIDPVIDLDEETYASVSTVSELAGHCCAREAHQRPDMGHAVNVLSTLSEVWKPTDPDSDDSYGIDLNMTLPQALKRWQAFEDSSHFDGATSSFVASLDNTQTSIPTRPPGFAESFTSADGR

SEQ ID NO: 219973 - protein, 127 aa, Zea mays
  unsure (1)..(127): unsure at all Xaa locations
  Clone ID: MRT4577_132202C.1.pep
PSKTPTLLKFNKHTPPNHNITDNLTPTYPXTTYSSNPSLYXNYSILLYTQTLXPLYPVYTISTLRXILLNLKXLSNQYLYYNLTFKXIPXPMTHLESISSSTFLASLKINASDIIFFTFFYQLQFSL

SEQ ID NO: 219974 - protein, 272 aa, Zea mays
  Clone ID: MRT4577_132203C.1.pep
MLYIVGLGLGDERDITVRGLDAVRRCAKVYMEAYTSLLSLGLDPASLANLEKMYDKEITVADREMVEERADQMLSEAAEADVAFLVVGDPFGATTHTDLVVRAKNMGVEVKVIHNASVMNAIGVCGLQLYRYGETISIPFFTETWRPDSFYEKIQNSRRLGLHTLCLLDIRVKEPTLESLCRGKKVYEPARFMTVNTAISQLLEVEELHGGSAYGPDSLCMGVARLGSDDQKIVAGPMKKLLDVDFGPPLHCLIIGGETHSVEQEMLEFYLI

SEQ ID NO: 219975 - protein, 257 aa, Zea mays
  Clone ID: MRT4577_132204C.1.pep
MMPGSMAARQPLQGKQELQPYDGRDPSALGAGGSPVLLPRQQESAAPPAVRVAPPPDMSSSSGSGRSATEARALKVHSEAERRRRERINAHLATLRRMVPDTRQMDKATLLARVVEQVKLLKRKASEAATTTTQSTPLPPETDEVSIELHTGDAGADRSVYIRASISCADRPDLVAGLAQAFHGLRLKTVRANMTSLGGRARHVFVLCMEDGWGSAGASLRSLKEAVRQALARVASPETAYGSSPFQSKRQMILESH

SEQ ID NO: 219976 - protein, 154 aa, Zea mays
  unsure (1)..(154): unsure at all Xaa locations
  Clone ID: MRT4577_132205C.1.pep
SPWPRPSGPRPPRWPKLAATRPFFTRSSSRPPRPLAPPTTSSSPATIRRSRCTSSPTSRSASVPPPARSLPRSPPSPLPPRPPXPAPPPRPRHVPCSPLRRPAILTPPXMPPSIAPHXTPSPSSSPSRRPPTPPLALLLSTPEPAPRXRPPPVR

SEQ ID NO: 219977 - protein, 95 aa, Zea mays
  unsure (1)..(95): unsure at all Xaa locations
  Clone ID: MRT4577_132206C.1.pep
NDIDLFNPTAELEKLKHKKKRLVQSPNSFFMDVKCQRCGGITTVLSHSQTVVVCTGCQTVLCQPTGXKARFTEGCSFCMKGDYIRPPPSSLLIYA

SEQ ID NO: 219978 - protein, 124 aa, Zea mays
  Clone ID: MRT4577_132207C.1.pep
GPREMDMPVVDDAQQTGDGMSCQARPAQDVVHVEFQTRVRTAGAQYTADSASASWMRVCDGHGGVGSCRGRYLRMYGGGVESEDQKIGDRGARNWEVSLTSWALLGRTCRFMQLDRSAVYIMFV

SEQ ID NO: 219979 - protein, 121 aa, Zea mays
  Clone ID: MRT4577_132208C.1.pep
PWADAWRNSRTRIQRLLYALCAGFDSVTCKNLNRWATSQPNDIVRARSDRQTPRCEGCTRADRSSGNIAMTVPSHYAFRGISIYSPSRSILLTISYTVMALMALRMNCWNQLIPANCTLNP

SEQ ID NO: 219980 - protein, 93 aa, Zea mays
  Clone ID: MRT4577_132209C.1.pep
VQNYPGRPTRQPTRPPTWQVVSCQMHRDMSQTTHERRSVGDGESNSSRPTHVASSMHRNEGKRFQQQWGGAILLILIRPPTWLQKVVPRPLKR

SEQ ID NO: 219981 - protein, 928 aa, Zea mays
  unsure (1)..(928): unsure at all Xaa locations
  Clone ID: MRT4577_13220C.1.pep
MSPAAGEQLSGAHREGRAVEARRVFIGAGCNRVVNNVSWGACGLVAFSTQNAVALFSPXMPAFSCSFDYQMSISHLFVSPKSSXTCSCEQRGEIVTTLPGHKAPVNCTLWLPTKKDVLHVRGRETHYLLSGSADGTIMAWKIGSGKGEWFHALQLPGMHKKGITCLAGRMVSDTIAIFASTSSDGIVVIWEMAIEPTTGGKIASLWIANITARSLIFCHDGLNYSNSNSFLLYDFXFWVMCTTLLLKXCFLFAGDCKVTCLHSLSVGLKPMVSLSLAVLPGQGGYLILAMGGLDHKIHIYCGDKAGKFIKACELKGHSDWIRSLDFSLPVMMDGERHNLFLVSSSQDRTIRIWKMTSEAAASGSSLQLRKETIEMTSYIEGPLFVAGSTSYQVSLESLLVGHEDWVYSVEWQPPTLLTGDEAHQPMSILSASMDKMMMIWRPEKTTGLWIDSVTVGELSHSALGFYGGLWQPDGRSILAHGYGGSFHMWRDVGLDSENWQPQIVPSGHFAPVSDLTWARSGQYLLSVSHDQTTRIFAPWRNQVNPGDMICWREIARPQIHGHDLNCVTFIQGSGNHRFVSGADEKVSRVFEAPLSFLKTLQQATLLKPDISEDFDNVQVLGANMSALGLSQKPIYTHGVKESSISNSNDGPDSMETIPDAVPTVFTEPPVEDQLAWNTLWPESHKLYGHGNELFSICCDYEGKLVASSCKAQSAAVAEIWLWEVGTWKAVARLQSHSLTVTQMEFSRNNAFLLSVSRDRHLSIFSIRKTEGGAEHRLVAKLEAHKRIIWACSWNPFGYEFATGSRDKSVKIWCVEDASSVKLLATLPQFRDSVTALAWMGRDRASNAGIVAAGMDNGLIELWSVSGGRASSGTQLSVACVLRFDPLLCHVSTVHRLRWRCSTDEKSTLELASCGADHTVRVFEVCGSI

SEQ ID NO: 219982 - protein, 118 aa, Zea mays
  Clone ID: MRT4577_132210C.1.pep
VFVVFAILPRYNSTPLPESMAPPGPGPPGVTGFVPVTKSVAVLEVLDVQVRPPLHGWVAFPVWLSPWVVCICLAMFFFSFQFSVSCQFAVLSCLCLISRGYYGQLFIRFHLLARELGL

SEQ ID NO: 219983 - protein, 102 aa, Zea mays
  Clone ID: MRT4577_132211C.1.pep
QCREGYLQDRLPGQTPQSPCWAPMSPQPRRHSWRGGGRRRKRTWRRFRPSSPRLPPTALSRSFGKLVFLCRGALIDRVIDLSEWLYLPPFFPIWPKSKQHTR

SEQ ID NO: 219984 - protein, 188 aa, Zea mays
  unsure (1)..(188): unsure at all Xaa locations
  Clone ID: MRT4577_132212C.1.pep
HWVPRGRPGYTVNHRDRRLPTRLSPRLSAFPNSPPSPFSHHRRRSPRSTTPWRECIXSIHXLGQAGXIQHGNACWELNCLQHGIRADGQMPGDKTIGGRDDVFNTFFRETGAGXKRVPRAAFDELETTVIXEVRTGTYAQIFHPGHLMMVKEDAAHKFTRDHYSIAFEIDDLXLERIMKLAYKCTGLH

SEQ ID NO: 219985 - protein, 63 aa, Zea mays
  unsure (1)..(63): unsure at all Xaa locations
  Clone ID: MRT4577_132213C.1.pep
GTGINRARSLGPPLFYKKDNPWVAPWFFWVGPFLGVALGAFYHKXILRXGAIRVLGSFRSKGF

SEQ ID NO: 219986 - protein, 88 aa, Zea mays
  unsure (1)..(88): unsure at all Xaa locations
  Clone ID: MRT4577_132214C.1.pep
MLATRVFSLVGKRAMSTSVCVXRAHESVVKSEDFSLPAYMDRRDHPLPEVAHVKHLSASQKALKAKEKASWSSLSMDEKVELYRIKFK

SEQ ID NO: 219987 - protein, 96 aa, Zea mays
  Clone ID: MRT4577_132215C.1.pep
FQKRPGGELIFPYSSTARKRSPRVHTCNLRRKVGEDEPPTTRLGVCQPPTTSAAGDRRKDGAQRKRRLQAAQTSRGERGGAFGRRAARLRLPPLRS

SEQ ID NO: 219988 - protein, 89 aa, Zea mays
  Clone ID: MRT4577_132216C.1.pep
LSGLVHPELSRSGELAVRALEQFDTVAEAMLIIHKKGIVNEQFLLQRLADGAIDLYAMVVVLSRASRSLSEGHPTAQHEKMLCDTWCIE

SEQ ID NO: 219989 - protein, 102 aa, Zea mays
  Clone ID: MRT4577_132217C.1.pep
RKKIAEKIWAPRCKSLTAGPFFVNKKGPWDPPEGGPSPFFGHSKLLKRALKMISNNALGFKRPTLSSLVWPPKGLRGVTRTSPGGGAFFGRLSYGPGGGSLF

SEQ ID NO: 219990 - protein, 39 aa, Zea mays
  Clone ID: MRT4577_132218C.1.pep
SEGIVIASPSCRRESVTLDSPIILHSFCIGSIATISSPA

SEQ ID NO: 219991 - protein, 38 aa, Zea mays
  Clone ID: MRT4577_132219C.1.pep
GCMHMDPRKFRNLVVWINFHHIYTTYKLLLYTLKIYAQ

SEQ ID NO: 219992 - protein, 88 aa, Zea mays
  Clone ID: MRT4577_13221C.1.pep
WPKKTCVSRLHKASLLNTLHPNLDEGPKEISKDPSFLKRVHHQRRLWGCRDHQRARTSGCFSVTPYGHIRVHQSIRGLARFKGFSSHF

SEQ ID NO: 219993 - protein, 175 aa, Zea mays
  unsure (1)..(175): unsure at all Xaa locations
  Clone ID: MRT4577_132220C.1.pep
MAALAPXKILGTKLNFAXGSSRYGTAEATAWGEKIDSLFSKKPAHKXPQPSARPPASPHIIDEVGKXYGPDRRIYLPDGLLDRXSEVPRXYLTGEVXADLRYDPFGLSYKTEDFAKDQDYELIHVTWDMLGDAGAVMPKASNKXYGANCGPDVVWFKTGDLLLDGNTLRYVGSRI

SEQ ID NO: 219994 - protein, 74 aa, Zea mays
  unsure (1)..(74): unsure at all Xaa locations
  Clone ID: MRT4577_132221C.1.pep
KKVKAKSFQLGDLIWKTILPVATEXETEKFRKWPPNWKGPYKIXRRYMLQTLQGDDLPKALNMCFLKQYHPSMW

SEQ ID NO: 219995 - protein, 119 aa, Zea mays
  unsure (1)..(119): unsure at all Xaa locations
  Clone ID: MRT4577_132222C.1.pep
MIMCKKNRREDWKYIFHEGVVYAKKDYNLAKHPKLDLANLEGIKLIPRFKFKEDFKETLFLQDYTCNLTTIGFXHLRNFLKLAXKVGPTTLKNSSKPRSVPFAFGQPVDRPRVPLSFGE

SEQ ID NO: 219996 - protein, 99 aa, Zea mays
  Clone ID: MRT4577_132223C.1.pep
FFFFFFFFFYVFIFFFFWLGRNIPCISHKENKRGKVHAIASSLLHKALHFLVGAGVLTICPHSLRNNFFSLSLAYGFSLVIELASGALALGAQMAPGRM

SEQ ID NO: 219997 - protein, 157 aa, Zea mays
  unsure (1)..(157): unsure at all Xaa locations
  Clone ID: MRT4577_132224C.1.pep
MGAEVDALYEIGRHATGSHEIPCERDETARASGGSSGEGGGVLSYLSFQGVSKLRERWSRYXSWGEXRRKRENAASLFVSRNAEYVAVAVGNRIYILRKSDGYESPCGIYTNCYKFSEPDNSGDGSAWDSRIIRLRLLWYNDLLETFLGIIMRYNAN

SEQ ID NO: 219998 - protein, 87 aa, Zea mays
  Clone ID: MRT4577_132225C.1.pep
IHHLERYRSWTTIFRSDEVRQTVVHGMKNVHCAALVADVWAIGSLDSVASDEPCNALAGPAGILLGPSVSGYTVTLPPNDDSLWRCC

SEQ ID NO: 219999 - protein, 77 aa, Zea mays
  Clone ID: MRT4577_132226C.1.pep
LCALDNLAQVVRVVFPKKKKKKKKKSLYTCPGGRPGRYKPKFDAVIAELKEAEKEHQKESERIEKELAEMEEMRKKI

SEQ ID NO: 220000 - protein, 60 aa, Zea mays
  Clone ID: MRT4577_132227C.1.pep
SCIGLAGTDRDNGLLGCGSFSGLEPKVSVCHAVVCQLVLTLMSRYLHCLSWRPWFGARST

SEQ ID NO: 220001 - protein, 92 aa, Zea mays
  Clone ID: MRT4577_132228C.1.pep
LGTSRPAGISNQGSSSPAAATVEELTSPRHNTVSGFNVSSNYSLFDPFCSTLTQSYNIMDTYDLFFINKDDEEEELGIFFCHSSVPFVLFCK

SEQ ID NO: 220002 - protein, 40 aa, Zea mays
  Clone ID: MRT4577_132229C.1.pep
TTDLLARRIDVQQVSLVINYDRRTQPGEYVHRIGRRGRFG

SEQ ID NO: 220003 - protein, 96 aa, Zea mays
  Clone ID: MRT4577_13222C.1.pep
PIPVATHIMETSTTMVWSAPPPKVQNKEGSRWLNLAYACLVMAWQILNRHRWPLCPPINHHDLNKYDSKSVGANFCRPSFGPPLVFFFYIYIFFLF

SEQ ID NO: 220004 - protein, 69 aa, Zea mays
  Clone ID: MRT4577_132230C.1.pep
FLFFFSFFFVWFFFLFFFLKKAWEAGFIGIHGLSTRTNRARIGTRRPIYITNPKLRRGKQNLRGETFTF

SEQ ID NO: 220005 - protein, 59 aa, Zea mays
  Clone ID: MRT4577_132231C.1.pep
DCIRWWLVVLVEVSRPSSVAVAAAASSSVELWSPCSLHPFTKRGRHLTSLYTDDRAGRY

SEQ ID NO: 220006 - protein, 33 aa, Zea mays
  Clone ID: MRT4577_132232C.1.pep
KHKKLMYFIIKMTHLDKIELLLDYGSPYDIWSC

SEQ ID NO: 220007 - protein, 98 aa, Zea mays
  unsure (1)..(98): unsure at all Xaa locations
  Clone ID: MRT4577_132233C.1.pep
MATKILALLALLALLVSATNALIISQGSIATSANILQLLTPITLMGLEHPAXQVYMLQLALAVSVLQQPIAQLQQQYLAHLNLQTIPTQQQLQFLTSL

SEQ ID NO: 220008 - protein, 43 aa, Zea mays
  Clone ID: MRT4577_132234C.1.pep
QFGRYKARWKLQVANLLPNRCLGYEVEQAPRVKANCTGFTSVG

SEQ ID NO: 220009 - protein, 111 aa, Zea mays
  Clone ID: MRT4577_132235C.1.pep
VTFVDRPDVADYVAEQEDQQLVIHRDDKQDGSPEVTYHHGNGAGRATRLHNEVRRVRQLDTLGGALKVYHHLPETQHELMTGHRAPRGCRLSHHKASSQSCETAHLTAGGS

SEQ ID NO: 220010 - protein, 117 aa, Zea mays
  Clone ID: MRT4577_132236C.1.pep
EHGIVSWGMATTGICRQQGRARFSFMDRNKLAVCNLQPLACSFETAFACSPACSFTWPPPPLFTANNRRQKVLIILQVACVCATPSYFYLSWSCIVSVRYPHMLSVCRSMFIFKKKR

SEQ ID NO: 220011 - protein, 144 aa, Zea mays
  Clone ID: MRT4577_132237C.1.pep
RHDNPIGIPQPPAPPLPPQPPAEEQLPPPDEPEPKRQRTDDGSLIPAEQFLAQHQGPASISVSVPNLDEGNLRGQVLQIPVQSLSDTVGSLKEQIAGELQLPANKQKLSVRTSFLKDNLTLAYYNVGPGVVINLTLRERGGRKK

SEQ ID NO: 220012 - protein, 581 aa, Zea mays
  unsure (1)..(581): unsure at all Xaa locations
  Clone ID: MRT4577_132238C.1.pep
NMQFHFIRPTHSMFPFFTELTDAYSRVLRPAEGVPALLKELREGSKDLTTVLERCLNRLEWDRSQEQARQQAEDEVEQERMQMSMIDWHDFVVVETIEFADDEYEGLPAPLTLXIESSGNIGELARTRPDIFGTTEEEVSNAVKAEIEKKKDEXQRAARLEENDGASQVSLPGDDEAPMRIVKNYKRPEERIPAERDPTKFVVSPITGELIPISEMEEHMRISLIDPKYKEQKERMLAKIKETTLAPDDEISRNIVGLARTRPDIFGTTEEEVSNAVKAEIEKKKDEQPKQVIWDGHSGSIGRTATHALSQIQGGEEQFDASNVDGRPVPGPAPLVRPGMPLPRPPQPLPLVNVPRFIAPPAPYSVPPPGSHMPGVPQMMPHMHLHPQQIPGQPPMVRMPGQMVHMPTSIPPPPGQTQFMPGPPPHTFAMPPSSHMPHMINPIGIPQPPAPPLPPQPPAEEQPPPPDEPEPKRQRTDDGSLIPAEQFLAQHQGPASISVSVPNLDEGNLRGQVLQIPVQSLSDTVGSLKEQIAGELQLPANKQKLSVRTSFLKDNLTLAYYNVGPGVVINLTLRERGGRKK

SEQ ID NO: 220013 - protein, 162 aa, Zea mays
  unsure (1)..(162): unsure at all Xaa locations
  Clone ID: MRT4577_132239C.1.pep
MPGPPPHTFAMPPSSHMPHMINPIGIPQPPAPPLPPQPPXEEQPPPPDEPEPKRQRTDDASLIPAEQYLVQHPGPASISVSVPNLDEGNLRGQILQIPVQSLSDTVGSLKEQIAGELQLPANKQKLSVRTSFLKDNLTLAYYNVGPGVVINLTLRERGGRKK

SEQ ID NO: 220014 - protein, 36 aa, Zea mays
  Clone ID: MRT4577_13223C.1.pep
ILAETPERVGWFFQHTQRLKYQHVSTLHVTDANVRT

SEQ ID NO: 220015 - protein, 921 aa, Zea mays
  Clone ID: MRT4577_132240C.1.pep
MAGTLLQSVALGTPFGGRMRTHCWRSHGTRRPASMLAVSLSRPVKMSAFVGLRSVHSFSVTPTVSNSRSAVASYRSSRQTRRSRFVTRAMFERFTEKAIKVIMLAQEEARRLGHNFVGTEQILLGLIGEGTGIAAKVLKSMGINLKDARVEVEKIIGRGNGFVAVEIPFTPRAKRVLELSLEEARQLGHNYIGSEHLLLGLLREGEGVAARVLESLGADPSNIRTQVIRMIGETTEAVGAGVGGGSSGNKMPTLEEYGTNLTKLAEEGKLDPVVGRQPQIERVVQILGRRTKNNPCLIGEPGVGKTAIAEGLAQRISTGDVPETIEGKKVITLDMGLLVAGTKYRGEFEERLKKLMEEIKQSDEIILFIDEVHTLIGAGAAEGAIDAANILKPALARGELQCIGATTLDEYRKHIEKDPALERRFQPVKVPEPTVDETIEILRGLRERYEIHHKLRYTDEALIAAAKLSYQYISDRFLPDKAIDLIDEAGSRVRLQHAQVPEEARELDKELKQVTKQKNEAVRSQDFEKAGELRDREMELKAQITALIDKSKELSKAEEESGETGPMVNEEDIQHIVSSWTGIPVEKVSSDESDKLLKMEETLHKRVIGQDEAVVAISRSIRRARVGLKNPNRPIASFIFAGPTGVGKSELAKALAAYYFGSEEAMIRLDMSEFMERHTVSKLIGSPPGYVGYTEGGQLTEAVRRRPYTVVLFDEIEKAHPDVFNMMLQILEDGRLTDSKGRTVDFKNTLLIMTSNVGSSVIEKGGRKIGFDLDSDEKDSSYSRIKSLVIEEMKQYFRPEFLNRLDEMIVFRQLTKLEVKEIADIMLQEVFDRLKAKDINLQVTEKFKERVVDEGYNPSYGARPLRRAIMRLLEDSLAEKMLAGEVKEGDSAIVDVDSEGKVVVLNGQGGIPELSTPAITV

SEQ ID NO: 220016 - protein, 68 aa, Zea mays
  Clone ID: MRT4577_132241C.1.pep
PMVHLSCCCTWGFASFGALWWTSIWRSSSNKHLWFVCHKSWLGLRWFNGPVGSFVLDPKLFCTSMACL

SEQ ID NO: 220017 - protein, 89 aa, Zea mays
  Clone ID: MRT4577_132242C.1.pep
YIHTGGRRGINVNRGKGWKQHLRVLHAPRPPLQQKPKEQQLKDAGITRPGNTMQKERTNHGSCHQEKQHHDTPPGRPLWCNMRRRQLLR

SEQ ID NO: 220018 - protein, 167 aa, Zea mays
  Clone ID: MRT4577_132243C.1.pep
DGIHLQHQSLQIGSMESNSALGLEPIDLSSPSPCAAHKPQAAPEAPPLCMEAERRALWDISNLVEKEPSCCKHEPGTNVQVEESPLFRHGTGMAGEADSSRRGDAQSREVVEAAMIDLSSPSPVKVDNSRRNGKKDCEAGSSSQSPEHERKARELRLFLDSIRDELY

SEQ ID NO: 220019 - protein, 75 aa, Zea mays
  Clone ID: MRT4577_132244C.1.pep
PGRPRVRPRVRGRVSVRVVGHRLMRVVSQKRSNASKLLVLADPFADAYPDMHDNVFIMIHLLEFLISDYMQVWLC

SEQ ID NO: 220020 - protein, 162 aa, Zea mays
  Clone ID: MRT4577_132245C.1.pep
PTSSSVFQSLPFWLCKHQKLHITATRNQYQIQLPETATRNHCRFTLHISSSLQVHSYQKLHFTATRYTLQVHYTFLVHCKQETINTHTHYWFRNTHSYTFFFFGVNFFPTALFLCLGGVNCPTSTASAPSNSCCPTTTSSNSCCPATTSSNSCCKTSPACLN

SEQ ID NO: 220021 - protein, 117 aa, Zea mays
  Clone ID: MRT4577_132246C.1.pep
DSNMPSVTQVSGVSLLRHYPSGWVTGHSLCLFSFPSGQYSVRRAHRTCPLWLKSETIQWTLSPAGFSGSQMGTPLFPIFVRPALSALFSFGPEKLGQTSSTATKKHVLCQPDQEFPT

SEQ ID NO: 220022 - protein, 50 aa, Zea mays
  Clone ID: MRT4577_132247C.1.pep
FLLGCRFCWLRVLTCSCLICGGVYVVGGVFFCFIMGVCLGVGVPLVCWRH

SEQ ID NO: 220023 - protein, 170 aa, Zea mays
  unsure (1)..(170): unsure at all Xaa locations
  Clone ID: MRT4577_132248C.1.pep
MEQIARLLLLVSVNVIALFLFLSPDDPFXRDIKKRATQHFSAEPYNMTLLKCLRSGWNGLPVMPPNXILETNINAILSTINDIYKSYTYLFFARGPKRSNLNMVGLLGXIVAYIFTAELLDSLLALHDNARKAFCVLRGDIFSMXMHASPISIMRVSTNTNRARILSILL

SEQ ID NO: 220024 - protein, 63 aa, Zea mays
  Clone ID: MRT4577_132249C.1.pep
RRLPIDTGIYPAINKEVGSSGPLSYIFQHPPYLLIGSPGVSLSGIDFSCKPAKGCRRRGRRCG

SEQ ID NO: 220025 - protein, 35 aa, Zea mays
  Clone ID: MRT4577_13224C.1.pep
AAQSIACYCLMAVGLTRRAGPPMSSLVLRMAFRKL

SEQ ID NO: 220026 - protein, 72 aa, Zea mays
  Clone ID: MRT4577_132250C.1.pep
PVKLNWGRSLITLDPPSIPPLFFQIQRTRPRGSPLYRGGGGPPDPIREFWESCPQSAPLTPLEGDPLRAPTF

SEQ ID NO: 220027 - protein, 52 aa, Zea mays
  Clone ID: MRT4577_132251C.1.pep
KIVSVQPRIQIKTHGSSSPCSFGLINVVIDQSYNAVPVGVCLCKQRKKNTTT

SEQ ID NO: 220028 - protein, 112 aa, Zea mays
  unsure (1)..(112): unsure at all Xaa locations
  Clone ID: MRT4577_132252C.1.pep
FRLNYPTGNPGYGXSSERGXRKHRALMDEKSWARLMLRMERHHPRRFHLTTRTGRSFRRTKHHSEXAHRANSAMDIEVRMVKPIKDEFPSLFYAGVYQXIEGVAVVKVTEGP

SEQ ID NO: 220029 - protein, 143 aa, Zea mays
  Clone ID: MRT4577_132253C.1.pep
MMNCGASCSTTGGERTLQRSTRRRAPSLGRTSSPCRTGATDTDCKPPLAHLLQLHCFRLPSAAGVTAVDQQGVRIIREGKDYYLIYQGEIQRYLGSRQDTDGDCGEDAPRRDAGDEHRQISDRILFFLGDLEKACADAKRVKA

SEQ ID NO: 220030 - protein, 152 aa, Zea mays
  Clone ID: MRT4577_132254C.1.pep
MDGLPGELCLKIFHLLDHQSLASSPQVCRKWRALTSDDELWRKLFNDRWGADAAAFYSPEGSKSWKDVFAVQDRCDRYGLGVRIIREGKDYYLIYQGEIQRYLGSRQDTDGDCGEDAPRRDAGDEHRQISDRILFFLGDLEKACADAKRVKA

SEQ ID NO: 220031 - protein, 231 aa, Zea mays
  Clone ID: MRT4577_132255C.1.pep
MFLSPPLPFARRPALVLVSLFTSSSGSERPSSLSSFRVFSQSFSVSARIRAGELGKPRGDMDGLPGELCLKIFHLLDHQSLASSPQVCRKWRALTSDDELWRKLFNDRWGADAAAFYAPEGSKSWKDVFAVQDRCDRYGLGGRIITEGKDYYLIYQGEIQRYLGSRRDTDGGTWAPARTRMATAARTRRGGTLETSIGRYPTGSCSSSGIWRKPAPTPNVLKPEHALPLCP

SEQ ID NO: 220032 - protein, 79 aa, Zea mays
  Clone ID: MRT4577_132256C.1.pep
PRRVLSRGVRIIREGKDYYLIYQGEIQRYLGSRQDTDGDCGEDAPRRDAGDEHRQISDRILFFLGDLEKACADAKRVKA

SEQ ID NO: 220033 - protein, 42 aa, Zea mays
  Clone ID: MRT4577_132257C.1.pep
SIWWVFSFSATLICRRRPLFLRQRSQKRPAGKSDPSSRGQQE

SEQ ID NO: 220034 - protein, 83 aa, Zea mays
  Clone ID: MRT4577_132258C.1.pep
LDCSAVSLPAGLYWIFRWDAVHDQSRWVLLHANDIVHHSYTVLREEKLATKNNICILHLKQVRTHMSLQHKRAYSTWAVQIGL

SEQ ID NO: 220035 - protein, 66 aa, Zea mays
  unsure (1)..(66): unsure at all Xaa locations
  Clone ID: MRT4577_132259C.1.pep
HTXXNTGTLNFWAPTPTMHQYIPFTFQSLTNPFIIIMGEMIAIKRLSIDESEPLYKGRSYLRAFLW

SEQ ID NO: 220036 - protein, 100 aa, Zea mays
  Clone ID: MRT4577_13225C.1.pep
PRVPTFSLDSPDTEDPGDRTYTNIRHSDIRCTSSLQINLSAMPLIYLLLHRDSSDRLHHYYRRYMIKLLPFSLAYAALLCCHAHPDKLTLLSQIHHMPHS

SEQ ID NO: 220037 - protein, 102 aa, Zea mays
  Clone ID: MRT4577_132260C.1.pep
GCPSGYHSATPFRRMPGADHPGTVGRVVTSVHQVSACSRRWRGTGAYPQRPRRTRSERGEEGVQAAWRRSRALRDADDSLSEWKVLHLARIRNTVPAGSRYP

SEQ ID NO: 220038 - protein, 63 aa, Zea mays
  Clone ID: MRT4577_132261C.1.pep
LHHLNFFHYTTPIDLILLPHYRYAGHLHPSQIVVFSWCRHITKYDIRVASPPGPQSPTFLPHA

SEQ ID NO: 220039 - protein, 116 aa, Zea mays
  Clone ID: MRT4577_132262C.1.pep
VLQVMSRSSVVAIDNGCNSTTLPLHCSSSSVLAGARSSCWVAAADARYMASEVQKEHSRTSNRYSSRRGEPCCSCKSTVVHGCMDGRSRKEQRDKMPCPLRRATQGSTFGFAVGAI

SEQ ID NO: 220040 - protein, 54 aa, Zea mays
  unsure (1)..(54): unsure at all Xaa locations
  Clone ID: MRT4577_132263C.1.pep
PQGXVLSSAAVPDLELYEXTHASQIELLETSSTQEPLNASEAFCPIDCMVQVVF

SEQ ID NO: 220041 - protein, 117 aa, Zea mays
  Clone ID: MRT4577_132264C.1.pep
YSLFFARQSVHIGISSTPSGGGNSTVPSNTFFFQQQGRISVIICQTYMIHPCKMFHVAGRTNIALLESDISGVGINHPVRSLGYLSPIRCHAKEGGAPASASFNVPLACKCRQPRRF

SEQ ID NO: 220042 - protein, 144 aa, Zea mays
  Clone ID: MRT4577_132265C.1.pep
MEVRAGGEKADKMYKFYVHSITGLRLLSKQDVLLYINEAKVSGCDTNGQCDTTSEDNILSKVDFRPSGLPEGWVKELVYRKTKEGLIRRDPYYTDPASSYTFRTLKSALSFLATGKVSERAFIQRTSVHDLYSFEISADMAMGL

SEQ ID NO: 220043 - protein, 89 aa, Zea mays
  Clone ID: MRT4577_132266C.1.pep
RAPPPPAPPPPPPPPPPPPPPPPPPPPPPPPPPLNPRRGKTKRENPAENPRKKGAPAKNSPPQKKTQPKRGKTLKNSGAKGPDPPGKPK

SEQ ID NO: 220044 - protein, 149 aa, Zea mays
  unsure (1)..(149): unsure at all Xaa locations
  Clone ID: MRT4577_132267C.1.pep
IFAGSLXFFXLHKGNTIVRWYTIAICLLECLLMTYAFCYHSKCXDLLIQLKEDYKWIDVLDLHWRLGIEXMSLGSIIVTEFISTLATXAAGPVTRNWQLIYFLMQAMHSGPLGXFLHKYRSHFFVMWQLXLIXVDELLSLWGGIGSMYT

SEQ ID NO: 220045 - protein, 89 aa, Zea mays
  unsure (1)..(89): unsure at all Xaa locations
  Clone ID: MRT4577_132268C.1.pep
RVRPRVRSQLKKCLRXPEEQLPIEDLSVQDDLTYAEYPIKILDTLTPVTRNKVIKMCKVQLRHYGEEEDTWKREEELRIDFPHLFPRSS

SEQ ID NO: 220046 - protein, 34 aa, Zea mays
  Clone ID: MRT4577_132269C.1.pep
TQRQLYNHHNYRIDVNRLSQEWPRHKLQERIVNE

SEQ ID NO: 220047 - protein, 94 aa, Zea mays
  Clone ID: MRT4577_13226C.1.pep
ACTDSAHSCASARRPHLGRCRRLCARSRGPASGTVAERPRKRRSWLVVVMVARCSGDRRIRPLMERWATALGAAAAMARRADKGITANVRGALG

SEQ ID NO: 220048 - protein, 369 aa, Zea mays
  unsure (1)..(369): unsure at all Xaa locations
  Clone ID: MRT4577_132270C.1.pep
SPSSAHWLSLVGSVWLQTINGPNADFAVYSSQLKETKGISQVQLNFLAFASDAGKLFGWLAGVAALRLPLWVVALTGATFGLVGYGVQFLFLDRAGLAYWHMFALTSLAGNGICWVNTVCYLLCINNFPAHSRVAVSLATSYLGPCVKGCTTMADTIPRAARARYSTTEVYLLLNAVVPMAVALVAAPSLRVVEPKXAAAXTEAPFLAMFVITLATGACAVVGSVGAKSIGLSSRAHMVSLYVLLALPLLIPVWLRVREGTAKIRESMWENRVHDHDSDGPESETAVPAPVSVVEIEAEDKQEEAGAELQRQNNGQQEEVGGLRLLRLFDFWLYFLSYMFSGTLGLVFLNNLGQIADSRGLTDASTLVS

SEQ ID NO: 220049 - protein, 37 aa, Zea mays
  Clone ID: MRT4577_132271C.1.pep
PSAPYWILATDYENYALVYSCTCIIHLFHVDFAWILA

SEQ ID NO: 220050 - protein, 90 aa, Zea mays
  Clone ID: MRT4577_132272C.1.pep
MKDSFVSSPGGGFFFFFFFFFFFGGGCCFPIFLKKGWAQTMGWEIWHEKGPQGPGGFFLGTPKFPGNKILWMTWGFSMSSFKQISYGPFF

SEQ ID NO: 220051 - protein, 633 aa, Zea mays
  unsure (1)..(633): unsure at all Xaa locations
  Clone ID: MRT4577_132273C.1.pep
MGRETPAMAVALLAALVASAAMFMLAGTASASPAEGIQPLSKIAVHRATVEMXPSAYVRATPSLLGEQGEDTEWVTVKFGWKEPSEDDWIGVFSPSEFNSSATCPNPWPAEEPYLCTAPIKYQFANYSANYIYWGKGSIRLQLINQRSDFSFALFTGGLSNXYLWPTTRTEPKPKGLGLTTTHAYPCPRVQPRLIAVSEPISFKNPKAPVFPRLAQGTSHDEMTVTWTSGYAIDEAYPFVEWGALVAGGVRHTARAPAGTLTFNRGSMCGEPARTVGWRDPGFIHTAFLRDLWPNKEYHYRIGQPSLQRVIVFGDMGKAERDGSNEYAAYQPGSLNTTDALIADLDNYDIVFHIGDMPYANGYISQWDQFTAQVAPITARKPYMVGSGNHERDWPDTAAFWDVMDSGGECGVPAETYYYYPAENRANFWYKVDYGMFRFCVGDSEHDWRVGTPQYDFIEHCLSTVDRKHQPWLIFATHRVLGYSSNAWYAGEGSFEEPEGRENLQRLWQKYRVDIAFFGHVHNYERTCPMYQSQCMTSEKTHYSGTMNGTIFVVAGGGGCHLSSYTTAIPKWSIYRDYDFGFVKLTAFNHSSLLFEYKKSSDSKVYDSFTIDRDYRDVLRCVHDSCFPTTLAT

SEQ ID NO: 220052 - protein, 63 aa, Zea mays
  Clone ID: MRT4577_132274C.1.pep
TKWPAHPRGWGISPQESGSSSMHLVPLTKKRVSPPHEILRAARREPLQATPVAVLRTDRTAAC

SEQ ID NO: 220053 - protein, 626 aa, Zea mays
  Clone ID: MRT4577_132275C.1.pep
MGREAPAMAVALLAALVASAAMFMLAGTASASPAEGIQPLSKIAVHRATVEMQPSAYVRATPSLLGEQGEDTEWVTVKFGWKEPSEDDWIGVFSPSEFNSSATCPNPWPAEEPYLCTAPIKYQFANYSANYIYWGKGSIRLQLINQRSDFSFALFTGGLSNPRLIAVSEPISFKNPKAPVFPRLAQGTSHDEMTVTWTSGYAIDEAYPFVEWGALVAGGVRHTARAPAGTLTFNRGSMCGEPARTVGWRDPGFIHTAFLRDLWPNKEYHYRIGHELPDGSVVWGKPYSFRAPPSPGQPSLQRVIVFGDMGKAERDGSNEYAAYQPGSLNTTDALIADLDNYDIVFHIGDMPYANGYISQWDQFTAQVAPITARKPYMVGSGNHERDWPDTAAFWDVMDSGGECGVPAETYYYYPAENRANFWYKVDYGMFRFCVGDSEHDWRVGTPQYDFIEHCLSTVDRKHQPWLIFATHRVLGYSSNAWYAGEGSFEEPEGRENLQRLWQKYRVDIAFFGHVHNYERTCPMYQSQCMTSEKTHYSGTMNGTIFVVAGGGGCHLSSYTTAIPKWSIYRDYDFGFVKLTAFNHSSLLFEYKKSSDSKVYDSFTIDRDYRDVLRCVHDSCFPTTLAT

SEQ ID NO: 220054 - protein, 69 aa, Zea mays
  Clone ID: MRT4577_132276C.1.pep
MAVVELKVGMHCERCIKAIKKAIKTIDDMESYRLETEINKVTVTGSVTPEEVVKALHKIGKTATCWTQD

SEQ ID NO: 220055 - protein, 373 aa, Zea mays
  Clone ID: MRT4577_132277C.1.pep
MVKICCIGAGYVGGPTMAVIALKCPDIEVVVVDISKPRIEAWNSDTLPIYEPGLDDVVKQCRGRNLFFSTDVEKHVAEADIIFVSVNTPTKTRGLGAGKAADLTYWESAARMIADVSKSDKIVVEKSTVPVKTAEAIEKILTHNSKDTRIGPKFLNASVGFGGSCFQKDILNLVYICECNGLPEVANYWKQVIKINDYQKSRFVNRVVSSMFNTVAGKKIAVLGFAFKKDTGDTRETPAIDVCKGLLGDKAQISIYDPQVTEDQIQRDLAMNKFDWDHPMHLQPTSPAAVKQVSCVWDAYEATKGAHGLCILTEWDEFKTLDYQKIFDNMQKPAFVFDGRNIVDSEKLREIGFIVYSIGKPLDAWLKDMPAVA

SEQ ID NO: 220056 - protein, 58 aa, Zea mays
  Clone ID: MRT4577_132278C.1.pep
RSGLPDTRSFKIAYVPNGKVYAEIVCPDRQSQGGESEREPDKAMRSEQEEEESSEEQK

SEQ ID NO: 220057 - protein, 41 aa, Zea mays
  Clone ID: MRT4577_132279C.1.pep
PIMGAPIWIFVRRSSSGVMPGLRSSTGTRSPSSGSSRYIGK

SEQ ID NO: 220058 - protein, 72 aa, Zea mays
  unsure (1)..(72): unsure at all Xaa locations
  Clone ID: MRT4577_13227C.1.pep
XVLFFFFSFFFFFFFFFVPFSFLGGIEGVSLFFFKATGKPVLTIAQPQTPHSQQGINGALLIPFERVKKFGP

SEQ ID NO: 220059 - protein, 214 aa, Zea mays
  unsure (1)..(214): unsure at all Xaa locations
  Clone ID: MRT4577_132280C.1.pep
MVKICCIGAGYVGGPTMAVIALKCPDIEVVVVDISKPRIEAWNSDTLPIYEPGLDDVVKQCRGRNLFFSTDVEKHVAEADIIFVSVNTPTKTRGLGAGKAADLTYWESAARMIADVSKSDKIVVEKSTVPVKTAEAIEKILTHNSKGINYQILSNPEFXLAEGTAIEDLFKPSMSARLLDKAQISIYDPKGDGGPDPAGPSHETVRLGPPDAPA

SEQ ID NO: 220060 - protein, 154 aa, Zea mays
  unsure (1)..(154): unsure at all Xaa locations
  Clone ID: MRT4577_132281C.1.pep
MVNICXIRAGYVVXPTMPGIALKXPHIEAAVADISKPRIEGWNSDTLPIYEPGLDDVVKQRRRRNLFFSTDDDKHVAEADIIFVSVNTPTKTRGLGAGKAADLTYWESADRMIADVSKSDKIVVEKSTVPVKTAEAIEKILTHNSKGINXYQIL

SEQ ID NO: 220061 - protein, 115 aa, Zea mays
  unsure (1)..(115): unsure at all Xaa locations
  Clone ID: MRT4577_132282C.1.pep
MGNICCIGAGYAGGPTMDVIGLKCPDIEVVVVDISKPRIDAWNSDTLPIYEPGLDDVVKQCRCKNLFFTTDVEKHVTDADIIFDSVNTPTKTRVFVAGKADNLTYXESAARMIVD

SEQ ID NO: 220062 - protein, 38 aa, Zea mays
  Clone ID: MRT4577_132283C.1.pep
DSVVGEPNVFIPKCMMHCLRDPEIYGALLRLMSDCPIF

SEQ ID NO: 220063 - protein, 144 aa, Zea mays
  unsure (1)..(144): unsure at all Xaa locations
  Clone ID: MRT4577_132284C.1.pep
NTSRRRQRASLLSHASRQERERDRRSPSRRRWCGCPPSSSEICLVRDLSDKLVKICCIGAVYAGGPTMAAIALKCPDIELVVADISTPRIEGCNSDTLPIYEPDLDDVVKQCTGKNLFYTTAVANLGAEADFIXFASTNNHTQH

SEQ ID NO: 220064 - protein, 87 aa, Zea mays
  Clone ID: MRT4577_132285C.1.pep
PSCFPKMKTGKLILNEDPFFFFRSRFFIANLKIQIMCTKSSPTNSFPVLLLVQFFTYQAKTASPNQSSFQYPLGDHRLLVYLGTAFF

SEQ ID NO: 220065 - protein, 206 aa, Zea mays
  unsure (1)..(206): unsure at all Xaa locations
  Clone ID: MRT4577_132286C.1.pep
MVKICCIGAGYVGGPTMAVIALKCPDIEVVVVDISKPRIEAWNSDTLPIYEPGLDDVVKQCRGRNLFFSTDVEKHVAEADIIFVSVNTPTKTRGLGAGKAADLTYWESAARMIADVSKSDKIVVEKSTVPVKTAEAIEKILTHNSKGINYQILSNPEFXLAEGTAIEAQFRHEEFNLVREEPLIHNWSSRLVEKPVARSYRVPDYD

SEQ ID NO: 220066 - protein, 481 aa, Zea mays
  unsure (1)..(481): unsure at all Xaa locations
  Clone ID: MRT4577_132287C.1.pep
MVKICCIGAGYVGGPTMAVIALKCPDIEVVVVDISKPRIEAWNSDTLPIYEPGLDDVVKQCRGRNLFFSTDVEKHVAEADIIFVSVNTPTKTRGLGAGKAADLTYWESAARMIADVSKSDKIVVEKSTVPVKTAEAIEKILTHNSKGINYQILSNPEFLAEGTAIEDLFKPDRVLIGGRETPEGRKAVQALKDVYAHWXVPEDRILTTNLWSAELSKLAANAFLAQRISSVNAISALCEATGANVTEVAYAVGKDTRIGPKFLNASVGFGGSCFQKDILNLVYICECNGLPEVANYWKQVIKINDYQKSRFVNRVVSSMFNTVAGKKIAVLGFAFKKDTGDTRETPAIDVCKGLLGDKAQISIYDPQVTEDQIQRDLAMNKFDWDHPMHLQPTSPTAVKQVSCVWDAYEATKGAHGLCILTEWDEFKTLDYQKIFDNMQKPAFVFDGRNIVDSEKLREIGFIVYSIGKPLDAWLKDMPAVA

SEQ ID NO: 220067 - protein, 49 aa, Zea mays
  unsure (1)..(49): unsure at all Xaa locations
  Clone ID: MRT4577_132288C.1.pep
LKGTPLSLCLRGAGPGXGSASQPSPRVTLGLRVSWESREERYRAGISGR

SEQ ID NO: 220068 - protein, 127 aa, Zea mays
  Clone ID: MRT4577_132289C.1.pep
YGGLVSLFRPEWRRKVAAKKAALRMVAEILEKRIAHPQLTYFTYVEKFLPEDDSEDVIALEYNLIGSKQIYEACADGEMRSNDQVYYYAICIANEDKLFRTEAADYRVFLPTNLSVSSSIFDFYSMH

SEQ ID NO: 220069 - protein, 147 aa, Zea mays
  unsure (1)..(147): unsure at all Xaa locations
  Clone ID: MRT4577_13228C.1.pep
VSCPTRSAAAEGDGRWTPVRLWSKVSSWSIYYSDCSTPYRAASGGVCIXETLHVSLFEGSEVPGSHPPLLGKSRIXFPSRSCEHLDRHSSTCQPSGPQGXHGSSSSLGSIPHSAPVGASPSRFSQGISICCRQAGSLLRAXMIMFRL

SEQ ID NO: 220070 - protein, 158 aa, Zea mays
  Clone ID: MRT4577_132290C.1.pep
DPNGPGSSARPPRRRGCEDEVQAVSPSRVPLPRRNRRTRREPITVVDLEVEASREGSKRQRVEPVGRHPASDWGARSSLQSNAAQTSKEPAKEVPEEPSFTCPICWNKMEEPSTTTCGHVFCDTCIKQAIKVQKKCPTCRKGLKMNSVHRIYLPNGSS

SEQ ID NO: 220071 - protein, 34 aa, Zea mays
  Clone ID: MRT4577_132291C.1.pep
CDEQQCFAHSTFFCDPLRPLTRHHTMKAVLHELG

SEQ ID NO: 220072 - protein, 174 aa, Zea mays
  unsure (1)..(174): unsure at all Xaa locations
  Clone ID: MRT4577_132292C.1.pep
KKGKKPYNTHTLTHQNTIFTVHPKSHQGQKHNLNQTTKQPQEIQHPLEKVQRPLQYGDLLILNLEKMGWALCIRWFWLNKTDSYLSWEGLPIQVPHNAQALFAAAARQEXGEXTPTEFWTYRWLNGSSVAELAPNLNNXLPKSKIAAHGVIXALSSRRWVTDIQGALTTQVINI

SEQ ID NO: 220073 - protein, 164 aa, Zea mays
  unsure (1)..(164): unsure at all Xaa locations
  Clone ID: MRT4577_132293C.1.pep
VMLSNIYSNMEEGRAASLVGNXKKGIEKVPASSWVELDGKVHKFYVGDDSHPLSDKIYAKLDELGMEMKAMGYEPTTEVVMFDVENEXKENTLVHHSEKIAIAFSLITTEPGETIRVTKNLRVCTDCHSAIKLISRITCREIVVRDNNRFHCFRDGHCSCNDYW

SEQ ID NO: 220074 - protein, 75 aa, Zea mays
  unsure (1)..(75): unsure at all Xaa locations
  Clone ID: MRT4577_132294C.1.pep
YYHRRTSRAEKIRILGRTLTGKTXVILEVESSDTIDDVKAQIQDKEGIPPHQQRLIFAVKQLEDGRTLADYNLQK

SEQ ID NO: 220075 - protein, 64 aa, Zea mays
  unsure (1)..(64): unsure at all Xaa locations
  Clone ID: MRT4577_132295C.1.pep
MAFKDTGKTPVEPEVAIHRIRITLTSRNVKSLEKVCADLIRGAKEKNLXVQGPVRMPTKTLRIT

SEQ ID NO: 220076 - protein, 83 aa, Zea mays
  Clone ID: MRT4577_132296C.1.pep
MGCTASKVEQEDTVRRCKERRRHMKDAVAARQLLASAHADYLRSLRVTAAALSRFAKGHPSLAVSHHTTPVLLSAAAPPPTAT

SEQ ID NO: 220077 - protein, 35 aa, Zea mays
  Clone ID: MRT4577_132297C.1.pep
RPSSNNPPDEQVLTRGNFELLWVLIHNTEQHEHDH

SEQ ID NO: 220078 - protein, 56 aa, Zea mays
  Clone ID: MRT4577_132298C.1.pep
YFLPSLSTRSLRDDVSAYPCTSYKHGLMLETGGTIHRVFLCLVHAYGVGNASALMR

SEQ ID NO: 220079 - protein, 63 aa, Zea mays
  Clone ID: MRT4577_132299C.1.pep
PRFNRSACPLGPANRVTRASAFSVPLPHALADQLIFLRRDSHGHTDEHISPDQALACRQNPLV

SEQ ID NO: 220080 - protein, 47 aa, Zea mays
  unsure (1)..(47): unsure at all Xaa locations
  Clone ID: MRT4577_13229C.1.pep
VRKKKKKKKKKKKKKKKKKKKKKKKKKKKKNKKKKNKKHKKXKKKKI

SEQ ID NO: 220081 - protein, 64 aa, Zea mays
  Clone ID: MRT4577_1322C.1.pep
VFSRINSKFDFMYAKRAFVHWYVAEGMKEGKFSEARKDLAALEKDYEEVAAEGGSDDGDEEEEY

SEQ ID NO: 220082 - protein, 65 aa, Zea mays
  Clone ID: MRT4577_132300C.1.pep
MPCLNVSTNVNLEGVDTFVILEQISMSFINMICKPKDYVMVAIMGSAPMAFGGSEEPTSYCVAVS

SEQ ID NO: 220083 - protein, 60 aa, Zea mays
  unsure (1)..(60): unsure at all Xaa locations
  Clone ID: MRT4577_132301C.1.pep
XEERSFXRVPXXXXXXSRRXRRXRXXTXRXXSXNQERRRXRPKXXHLSIVSSVFSGKRVI

SEQ ID NO: 220084 - protein, 49 aa, Zea mays
  Clone ID: MRT4577_132302C.1.pep
GGYFCKGNTLKEPRSRTLCTTTRNETDQQKPFSTGFDGSATRAQNRKPT

SEQ ID NO: 220085 - protein, 120 aa, Zea mays
  Clone ID: MRT4577_132303C.1.pep
SSPGFDLRVALDPHSSVPVPTPELTSALLCPCVRPPPSISELARSRSPRQGPGHDVIPGESLAVHSPSSPLSARLQPLVTELLPTPCGSLAPCCLMLVVTLCYWMWRENPRMCGEVNNLV

SEQ ID NO: 220086 - protein, 110 aa, Zea mays
  Clone ID: MRT4577_132304C.1.pep
PEKKRSSPPGVSFLFGSPFWNGLLGPPFRKRRPVVLFKKPRRGNLGSKKPSAFLCRGKVNQQGRNCSALGLIRCFAALGYLFLGGGGDPFCHKPFRGKNKKGCIRGLPGG

SEQ ID NO: 220087 - protein, 50 aa, Zea mays
  Clone ID: MRT4577_132305C.1.pep
FGYVQFIQFTKYSRCNIMGEILYSEYSINLCVCVYVRVINRELLKKPTAF

SEQ ID NO: 220088 - protein, 43 aa, Zea mays
  Clone ID: MRT4577_132306C.1.pep
RALKPCVPSSYSQCQRAWRHRRLAFLLIQLLSHIVAVSCRYKF

SEQ ID NO: 220089 - protein, 139 aa, Zea mays
  Clone ID: MRT4577_132307C.1.pep
LGPPGFPLLVSGWLVVWIGNGIPFSPGTRFCPYFPQVGFQVGFPCYGPPWSGISPFGRPAGGGPFSFRFPFANDYFCYGSRGRSPRYFKFFWGFPPPGKILGVCFVPEKELGAREPLVFFLRGEGPVFGRIILTRMVLF

SEQ ID NO: 220090 - protein, 124 aa, Zea mays
  unsure (1)..(124): unsure at all Xaa locations
  Clone ID: MRT4577_132308C.1.pep
HLSFTSSSPNNVPPLAGFLGGTGESSPCPLFRLLPSPSSYPFPSSAEADTAIYNDLHYYTFHVRIYCDTCRAAFVTNVTKYIVFAKVRLECKHLFTGKLXRSIDCVTYSNCTYTIDLNDSHYED

SEQ ID NO: 220091 - protein, 66 aa, Zea mays
  Clone ID: MRT4577_132309C.1.pep
NWDNKTGRKRPVKKIKPHCPMHQLICVPCSFAHFSISNKYFHIATFSSLTLELCKNAETYWLVLIL

SEQ ID NO: 220092 - protein, 61 aa, Zea mays
  Clone ID: MRT4577_13230C.1.pep
LHRSTKAYSLSSIFPDSVVIKLLNLSNVAVSLHARQDLEDVQDGAVITTSSCRSCHSCTMS

SEQ ID NO: 220093 - protein, 122 aa, Zea mays
  unsure (1)..(122): unsure at all Xaa locations
  Clone ID: MRT4577_132310C.1.pep
ITHHSPRARGSQPPSPSASVPRTXPPPTPSPVAHHHSHSRRPPRRHTPTPPEPRPSPTPPRAPPXPPPAPPSXHAPPAHRAMVRRPASXPPAANHRSRDGLDPTSPPPHEPPFPTSLHHLSS

SEQ ID NO: 220094 - protein, 120 aa, Zea mays
  unsure (1)..(120): unsure at all Xaa locations
  Clone ID: MRT4577_132311C.1.pep
MSMANPRVFFDMSDGGAPAIRIVMELYANEAAKTAENFRALSTGEKVVDKPAKSLHYKGSAFHRGIPECMCHGANCARSNGTGDXTIKGDNVPDKKLMRKNTGRGELCMFDGVNHTPDGS

SEQ ID NO: 220095 - protein, 91 aa, Zea mays
  unsure (1)..(91): unsure at all Xaa locations
  Clone ID: MRT4577_132312C.1.pep
EAMXLLCVALADLAWXXLWXWDSSERMKSRXRXDWLGAESXTLLVIAHPDDEAMFFAPTVLGLAXLRHWVYLLCFSADGACSVASWSAVPN

SEQ ID NO: 220096 - protein, 86 aa, Zea mays
  unsure (1)..(86): unsure at all Xaa locations
  Clone ID: MRT4577_132313C.1.pep
GRGFRVFLWGGGKFFLKGVHLGGVVPFCICRVPLGFSFFFLNTWGFSGLFLTFPPFIGLVLFGENLKRXEPPVDGPFYLARCXLKK

SEQ ID NO: 220097 - protein, 129 aa, Zea mays
  Clone ID: MRT4577_132314C.1.pep
GFFPRWRGARRPREQRRRSFPPGQGGNQSPRPEMGHRPHQQRCPLPHLTYRVAVPAYPSTGRLVVQRVSQNHVVLFCFVPPDVAADKNNLVVRGRSSRGAKKGSLAPQRYASWRDVNAAQCPVRNLGKS

SEQ ID NO: 220098 - protein, 411 aa, Zea mays
  unsure (1)..(411): unsure at all Xaa locations
  Clone ID: MRT4577_132315C.1.pep
MYIYCVPRARPGTAASQPILIPSRRWEVTVTAPRRRGVTMAYRRKPQPHPQPQPTPSLEHHYPSSVGPASPDSLAAQAMRASAAHRDASSLTSAYSASASLAAXPEPPRALXSTPSLDSSGYEYTSMKNLNEAKYGFWGTLARKAKSFLDEDCSPEQYKSPRDDVHVGVQLPHSKQLPGETWKPETPPSQKRSESITSSLTYIGGTIKNALEEGRTIVENKTADIIQETRKLXKKKRSWSKYTRRSWPQNXQRHLPQNPLDHETQLKASRDVANAMAAKAKLLLRELKTVKADLAFAKERCAQLEEENKMLRESYDKGDNPEDDDLIRLQLGTLLAEKARLAHENSVYARENRFLREIVEYHQLTMQDVIYVDEGIEEVTEVYPTQVLPRTGSSVSRAATAATPKSAPTST

SEQ ID NO: 220099 - protein, 366 aa, Zea mays
  Clone ID: MRT4577_132316C.1.pep
MSPTTTPPPAPVAAPTSKGAKRSLMSSLMDATALLRSSSFKEDSYVAAALPASELRALADLKALLATHPDPISIWGVPLNPRSPPAAADDTAPAPTPVPVDERADVVLLKFLRARDFRVRDAHAMLLRCAAWRAEFGADAVLDEELGFKDLEGIVAYMHGWDRDGHPVCYNAYGVFKDRDMYERVFGDGDRLARFLRWRVQVMERGVRALTLRPGGVNAIIQVTDLRDMPKRELRAASNQILSLFQDNYPEMVARKVFINVPWYFSVLFSMISPFLTERTKSKFVIAREGNVAETLYKFIRPELVPVQYGGLSRTGDLENGPPKPASKFTIKGGKRVLLEVDGIDAGATITLDLVVGGCELGYGAE

SEQ ID NO: 220100 - protein, 45 aa, Zea mays
  Clone ID: MRT4577_132317C.1.pep
AWKYYIRKLNPHFLHNSSFIDHITRLINYLNQLITPYRPQVLAPM

SEQ ID NO: 220101 - protein, 74 aa, Zea mays
  unsure (1)..(74): unsure at all Xaa locations
  Clone ID: MRT4577_132318C.1.pep
KKKYLGSGDVTVCQXVYAXRKRINLSPXKGMFDCGKNTLPPTGSLMSDIYXDXNTAYDCWLYMTYSDENTFCYD

SEQ ID NO: 220102 - protein, 427 aa, Zea mays
  Clone ID: MRT4577_132319C.1.pep
MSPATTPSPAPASKGGKRSLMSSLMDATALLRSSSFKEDSYVAASLPASELRALADLKALVATHPDPISIWGVPLNPHSPPPGAADAAAVADDERADVVLLKFLRARDFRARDAHAMLLRCAAWRAEFGADAVVDEELGFKDLEGVVAYMHGWDRDGHPVCYNAYGVFKDRAMYERAFGDGDRLARFLRWRVQVMERGVRALTLRPRGVNAIIQVTDLRDMPKRELRAASNQILSLFQDNYPEMVARKVFINVPWYFSVLFSMVSPFLTERTKSKFVIAREGNVAETLYKFIRPELVPVQYGGLSRAGELENGPPKPASEFTIKGGEKVFLEIDGIEAGATITWDLVVGGWDLEYGAEYVPAADGSYTLCVEKARTVPATTADADAGPLHNAFTAREAGRMVLSIDNSGSRKRKVAAYRYFVRKPSA

SEQ ID NO: 220103 - protein, 149 aa, Zea mays
  unsure (1)..(149): unsure at all Xaa locations
  Clone ID: MRT4577_13231C.1.pep
HCNSHMVPCEQLPNENLRGDQRDQYGIIDIDKTRLCYLDEPYILGSQAEQVFYVNGXXXKDWCTVVRMKPRNLFAMLESENSEIDLDSIDVGLEGMSDSSSDEVLVKWRRSDMEGVTGDACVIEKALDEFIEEMYDIGLEDEEDEEDST

SEQ ID NO: 220104 - protein, 426 aa, Zea mays
  Clone ID: MRT4577_132320C.1.pep
MSPATTPSPAPVAAPSSKGAKRSLMSSLMDATALLRSSSFKEDSYVAAALPASELRALADLKALVATHPDPISIWGVPLNPHSPPPGAANDAADDEERADVVLLKFLRARDFRARDAHAMLLRCAAWRAEFGADAVVDEELGFKELEGVVAYMHGWDRDGHPVCYNAYGVFKDRAMYERAFGDGDRLARFLRWRVQVMERGVRALTLRPRGVNAIIQVTDLRDMPKRELRAASNQILSLFQDNYPEMVARKVFINVPWYFSVLFSMVSPFLTERTKSKFVIAREGNVAETLYKFIRPELVPVQYGGLSRAGELENGPPKPASEFTIKGGEKVFLEIDGIEAGATITWDLVVGGWDLEYGAEYVPAAEDSYTLCVEKTRMVSATAEEPVHNAFTAREAGKMVLSIDNSGSRKRKVAAYRYFVRKSSA

SEQ ID NO: 220105 - protein, 81 aa, Zea mays
  Clone ID: MRT4577_132321C.1.pep
RMDVHTPSALERPGLCTSLHGKTHCLPQRLHNLRLGPLVLEHSSIGILSTPSYPDKAPSPREMKPINIFRVSSATTCMGTN

SEQ ID NO: 220106 - protein, 163 aa, Zea mays
  unsure (1)..(163): unsure at all Xaa locations
  Clone ID: MRT4577_132322C.1.pep
VRXAACSELXXGGVLGGVKLEQQMGQPDQSVSAQMLRSSSGGVKLEPQLQALRSLGAIKMEHQSSDPSVLLQQQQHMLQLSKQNPQAAATQLSLLQQQQRFLQLQQQQQQQQILKNLPLQRNQLQQQQQQQQQQQQQQLLRQQSLNMRTGKSAAYEPGTCAKR

SEQ ID NO: 220107 - protein, 994 aa, Zea mays
  unsure (1)..(994): unsure at all Xaa locations
  Clone ID: MRT4577_132323C.1.pep
MACARAARVPQNPPRVLSLTHSARRHPTALSQIWRSSIADLHHIAVIADARALDPWRPICPGIDTINLKKFERSLVKPGSLCREIPISIGLPTWVLNFYTTLRQKYSYRTLWGDSPIAGSCCQPIVQFCSLAGSVSPNDNGDSQIKHIMLILSAVVQWIEPPEVITASIRNGGSESEFIDGCHALLSIASLTTGSLFDNLLKSIRPYGTVNLLSALTSEAVKSVLNNQSEEETWGIDSLDILLETWNVLLGDVDADKNPISTDGALASSSLFKMIVESHLKAAADSAFEDTDDTEYFHVSVSSMLKFPTVHLFXSLPLLDSSNNNEVLLPERDEQLALYALIARASANTTIPFLAQLFSERFARLNQRNGESDPTQTLEELYWLLLVTSHVLTDSGEGETLLIPEALQAGFPNVIEAAHHPVVTLSWSIINFSRQCLDPGIRAKYFSPRLMEAVIWFLARWVATYLVPLDVSRGKVSREIDNVGTNGSQHSRKLLNSFAWENNQGELVLDFVVLISMLALTTYQGENELQTLTCQKLLATVVRRKHTCTYLVQLDSWRDLTRAFASGRSLLSLSGRLQRSLAETLASGASCIKDPEASAQYLRDLMGPVAGCLVENASRSDLKSVAQQADVIYMVCCLLERLRGAARATQPRTQKVLFEMAHTVMNPLLTLLEVYKNHSTVVYMILKFVVDFVDGQAVFLDAKETSALVSFCLQLLQIYSSHNIGKVMLSLSSSLRNESQAEKYKDLRALLRLLTNICSKDLVGFLSDCGGEGSPDIAEVIYIGLDIVTPLISLDLLKYPKLSRDYFVLISHLLELYPEKVAHLNSDAFTRIIGSLDFGLRNQDSDVVERCLAAVNALASYNFKERLGGRGRLNSQLMESEGSNGKLQESISSHFLRLLLQILLFEDFRSELAGYAADALLPLLFCEQELYQRLVHELLDKQQNPTVKSRLATAFHNLTSSNNLSSSLDRPNRQRFRKNLLSFMADVSGFMQIK

SEQ ID NO: 220108 - protein, 69 aa, Zea mays
  Clone ID: MRT4577_132324C.1.pep
GSCPEHEACWIFWLTTTGGTPRATPEGRTKQFFRTCAYIKELAYGPGNWGTPARGLWHLGKRYSHQPIL

SEQ ID NO: 220109 - protein, 154 aa, Zea mays
  unsure (1)..(154): unsure at all Xaa locations
  Clone ID: MRT4577_132325C.1.pep
AFVNNEVLLPERDEQLALYALIARASANTTIPFLAQLFSERFARLNQVFLLSCNLPELLRKEKLLSYTASVALYILLFCGGVFLQLTFNRFFXQRNGESDPTQTLEELYWLLLVTSHVLTDSGEGETLLIPEALQAGFXNVIEAAHHPVVTLSW

SEQ ID NO: 220110 - protein, 227 aa, Zea mays
  unsure (1)..(227): unsure at all Xaa locations
  Clone ID: MRT4577_132326C.1.pep
QHKALASYNFKERXGGRGRLNSQLMESEGSNGKLQXESISSHFLRLLLQILLFEDFRSELAGYAADALLPLLFCEQELYQVPPPPFPRTRGRTLWYAYYNLSNMSIGSPLVFYRMFLIYRXKYHEDNVIPIRPFYSVMDXSHQIRRKRDTSCVLCYISSPCFCLQRLVHELLDKQQNPTVKSRLATAFHNLTSSNNLSSSLDRPNRQRFRKNLLSFMADVSGFMQIK

SEQ ID NO: 220111 - protein, 120 aa, Zea mays
  Clone ID: MRT4577_132327C.1.pep
MSLICCFDSCSQTLTCQKLLATVVRRKHTCTYLVQLDSWRDLTRAFASGRSLLSLSGRLQRSLAETLASGASCIKDPEASAQYLRDLMGPVAGCLVENASRSDLKSVAQQADGIYMVCCL

SEQ ID NO: 220112 - protein, 51 aa, Zea mays
  Clone ID: MRT4577_132328C.1.pep
LTRGANCATSRKIRENEGDTIRAPAVSSEAPSIARRQALLGTRKRFFTWGL

SEQ ID NO: 220113 - protein, 128 aa, Zea mays
  unsure (1)..(128): unsure at all Xaa locations
  Clone ID: MRT4577_132329C.1.pep
ASVWAPDGAEAWVKYLCLAAHXIDSDWKLQRKTIKFGVFWSLPTSLERMIQFKEACVLDSDIGPFNVIQEALRDWNLDQKHFSLTSGSEIRNDEGTSKLMDLLIQRKCLPIRGELYNIDCVNDVLNNI

SEQ ID NO: 220114 - protein, 272 aa, Zea mays
  unsure (1)..(272): unsure at all Xaa locations
  Clone ID: MRT4577_13232C.1.pep
MANASLQSFLLPHDHSFAGAGGSRDGSASAVHKLSTNTSGSISFRLYTKTSPSVTAASATNSSAPTPVAPASAPAAGDEEEEEGPSLDLLRRQLAAGDYRQADETTRALIIDLAGEPARRRGYVFFSEVQFIPAEDLAAIDGLWKEHSGGRFGYSVQRRLGXKSRRDFTXRFFIRVGWMRKLDTEVEQYNYRAFPDEFMWELTDDTPEGHLPLTNALRGTQLLANILTHPAFQEEDQGDGAAAAEESANTKDDNKGRERPRSMRDFKPDYSF

SEQ ID NO: 220115 - protein, 51 aa, Zea mays
  Clone ID: MRT4577_132330C.1.pep
CLHMTSLNKSRGLDKQVQLLRAIYLFWRIPDRYEVFLIHLLEPDPIISIYF

SEQ ID NO: 220116 - protein, 157 aa, Zea mays
  unsure (1)..(157): unsure at all Xaa locations
  Clone ID: MRT4577_132331C.1.pep
MMPTSSTTWTTAATRYLSYIMMNRLPLLPLHDLVGPMREKEKYLYLKSDDISEXWTTAXKMXIRLEXTTHXSSLSLAIQYVPHCGHREEHVHIHVTPXRQKGESEMNDDIYDGKDVRDKELKEKLDLPXERKDRSLEDIDNEVNEHRGLFIELLELS

SEQ ID NO: 220117 - protein, 61 aa, Zea mays
  Clone ID: MRT4577_132332C.1.pep
KNKIYNSKHSFSHINGITKKNCAWAHIGCAPLSYTQSYFLKPFDIIEFLIAYIKPIITHII

SEQ ID NO: 220118 - protein, 37 aa, Zea mays
  Clone ID: MRT4577_132333C.1.pep
VLSPSTLSCSSLVRPGNQACPSSLVKKLAALWGYDYG

SEQ ID NO: 220119 - protein, 164 aa, Zea mays
  Clone ID: MRT4577_132334C.1.pep
YFVYLLASARLLSHTLLLPVPSPTAPPLSTSTRRRCSAAARRSFLFSARRPPSSPSCPAAGLAEDPGRGVASSSLVADLPCPGRHSSTARFRAIVPLGPRRGSGRRCLLPRRSLTLLYQPRLDLRLLVGLHTRRRHFLQFRRAIPSDFLVLVGLNSVDVPCKQV

SEQ ID NO: 220120 - protein, 92 aa, Zea mays
  Clone ID: MRT4577_132335C.1.pep
GGYGGGVGDYGAAGGAGGNFAAGGSNSFASSNFGADSGFGGNPAGSFGGGSTGADEFSGGTFGGDLSGNKNDEIMEDMFKDDEPDSFADKRS

SEQ ID NO: 220121 - protein, 73 aa, Zea mays
  Clone ID: MRT4577_132336C.1.pep
RQSAWATALSPWYCMHAIVAAPLASWAPRVSPDPGSQVCSHLHLVHSPPLLVPESSTPTWSSPIAHKRVGTRD

SEQ ID NO: 220122 - protein, 320 aa, Zea mays
  Clone ID: MRT4577_132337C.1.pep
MTEVMTAARATTPTFQSSRSQRDGLLDPSLVTPLVGVTCLVRRPENSLQSVEVCSEHYSISERDSTKAAMQDVARRALSHYYSVLGWVADDLNLKYYPRRPFGSTGGVVVSPIDGQTERTNQILEDVLIACALQDQTGWDKRSCRTLLQWDQPGEKQVFGPDILLEAEENIKMVRANMKITQSRQRSYTDTRRRELSFEVRDFVYLKISLIRGVRRFGVKGKLAPRYVGPYQILAKRGEVAYHLSLPEEEQFPVEGLEVQEDLTYIEKPMQILETADRVTRRKTIRMCKVRWGHHSEEEATWEHEDDLMAKYPELFGGQS

SEQ ID NO: 220123 - protein, 70 aa, Zea mays
  Clone ID: MRT4577_132338C.1.pep
FLFGRPPFYPSGFSAFCFRAFLCGDSLPQNTFSPAIALPLLSARFRITHFGASWWSAISRSHLRWWTPVA

SEQ ID NO: 220124 - protein, 53 aa, Zea mays
  Clone ID: MRT4577_132339C.1.pep
LYISHPPVSPSFRASARNLKRRVTKEPAVWYSPSARHKSRTSRATQVRLVRII

SEQ ID NO: 220125 - protein, 121 aa, Zea mays
  Clone ID: MRT4577_13233C.1.pep
TATSPPSRTPCAPAVAAPAPPPCLRPRRRRPHLVDPFCFCWENECVDQPRRRFELEPSVNSSKRRAAGQRSEHAEMSTLQDKARLVPVERKSQKREYHFLWGVARQENPKWRIETEDDEGL

SEQ ID NO: 220126 - protein, 37 aa, Zea mays
  Clone ID: MRT4577_132340C.1.pep
AITSRPMKCTVRRIILKGNHTIMTLIRKHNLLLYLIL

SEQ ID NO: 220127 - protein, 186 aa, Zea mays
  Clone ID: MRT4577_132341C.1.pep
MSFTGSAPVVRIISLEFRRGRARRMVSKMRFRNALGSRPFQCCSRENHTYVRKLLDRVSERSKLLKKVSVLVGYSNPQDLVEKQRAPGESSAELISALKEIDFPEITAKFPCIKVGDASPVELYEDSTNMKFKEAALSEKLTNFIQGSARNLETAYEFHNDCHPLNQTPQLQVIFQSVKRSLSLNQ

SEQ ID NO: 220128 - protein, 166 aa, Zea mays
  unsure (1)..(166): unsure at all Xaa locations
  Clone ID: MRT4577_132342C.1.pep
MNSFRIARAALRARPAAVRVPLQRRTYAEAVPDKIKLSLALPHQSIYKSHDVVQVNIPAESGEMGVLANHVPSIEQLKPGLVEVVEESAGSKQFFLSGGFATVQPNSVLSIXXAVEGYPLEDFSAEAIRAQIAEAQKVANGSGSEQDIAEAKXXLEVLETLSAHVK

SEQ ID NO: 220129 - protein, 45 aa, Zea mays
  Clone ID: MRT4577_132343C.1.pep
CPAKHCLIKLLVHPPPAGLSTRQDFLSFHKVPTKQAQTQPNGSFF

SEQ ID NO: 220130 - protein, 95 aa, Zea mays
  unsure (1)..(95): unsure at all Xaa locations
  Clone ID: MRT4577_132344C.1.pep
AVVTTQSTRGYPWTYIYRPHACRARYKNRWDTKQLVGSDGMSSSHSVTVTELAVSVGLXEGFTSSLFASVVPLAAPSPSLSTQNELTIFGARWVW

SEQ ID NO: 220131 - protein, 245 aa, Zea mays
  Clone ID: MRT4577_132345C.1.pep
ARNSSRAKIDRLDEAYMLFEEAKSKGIELNVIVYSSLIDGFGKVGRIDEAYLILEEMMKKGLAPNVYTWNSLMDALVKAEEINEALICFQSMKEMKCSPNTYTYSILINGLCRVQKYNKAFVFWQEMQKQGLVPNVVTYTTMISGLAKVGNITDACSLFERFKANGGIPDAASFNALIEGMSHANRAIEAYHVFEETRLRGCRINVKACISLLDALNKAECIEQAAVVGAVLREIAKSHHASRSL

SEQ ID NO: 220132 - protein, 65 aa, Zea mays
  Clone ID: MRT4577_132346C.1.pep
NKATHNNRLLFKSKFCRFYAPLNTTCMFHSTGELISCNPPFIRRLDLLDGFSPGAPFGGAFNTGH

SEQ ID NO: 220133 - protein, 135 aa, Zea mays
  Clone ID: MRT4577_132347C.1.pep
MGIASRATKRALTTFAAFLLDRVRRGSASGMLATHNEESGQLAAARAQELGIPKGDRNLQFAQLMGMVDGLSLSLRNAGIQDSKYLPYGPVEQIIPYLIRRAEENRGLLSASSFDRKLLRKELMRRVKDMVEGRE

SEQ ID NO: 220134 - protein, 65 aa, Zea mays
  unsure (1)..(65): unsure at all Xaa locations
  Clone ID: MRT4577_132348C.1.pep
PTRPEKKKKKKQKKKKKKKERKGLKGPGGQTLRTQGQRPRDSGTKKKYIEQANKRGLXGKTQSLP

SEQ ID NO: 220135 - protein, 140 aa, Zea mays
  Clone ID: MRT4577_132349C.1.pep
PGPWLFHPFLLTSLNFQWSLPPIFFLAPPLTIGLVGGGPLAPGLALPILGPCPLSIFSRLFPTLRPGRVPPPCRAGAPPLPFPGFTGPWLGRVCFPSAPVALMPRPLLSSFGRPWVCDFFPGPLFCFPLGSNNKQKKTQG

SEQ ID NO: 220136 - protein, 134 aa, Zea mays
  Clone ID: MRT4577_13234C.1.pep
MGRVRTKTVKKTSRQVIEKYYSRMTLDFHTNKKVLEEVSILQSKRLRNKVAGFTTHLMRRIQRGPVRGISLKLQEEERERRMDFVPEKSALEVDEIRVDKETMDMLAFLGMADLPGVERAPEVTSSAAPYRQPF

SEQ ID NO: 220137 - protein, 50 aa, Zea mays
  Clone ID: MRT4577_132350C.1.pep
PGSTQRPPRVRVVLCLAAVRVSCRLVSVLSGCLVQSYLSCFVCIGTMLDE

SEQ ID NO: 220138 - protein, 126 aa, Zea mays
  Clone ID: MRT4577_132352C.1.pep
RLVPCAQVPDTEPGRELPSHAGLGAVAALPCLELLPHALDRPSVAAPSHTFQLAGLVPSSNSTLCHPPTSLVRADVVLQLPRRADARRAALLVVLAAVPHHAVSCNMLMVVVSSSATLNLAAPSRR

SEQ ID NO: 220139 - protein, 91 aa, Zea mays
  unsure (1)..(91): unsure at all Xaa locations
  Clone ID: MRT4577_132353C.1.pep
KLATCFEVASPEYQKLQDSSSCYECLALHLGMKRXEAEYTLGFWKTFPGKMTDSLRKPEFXLLCESNNRGLSLQHDWEFSVNGFIXFNDAL

SEQ ID NO: 220140 - protein, 56 aa, Zea mays
  unsure (1)..(56): unsure at all Xaa locations
  Clone ID: MRT4577_132354C.1.pep
RKSCLGGYCNNLPGEYECRCPRXMHGNAYAPGGCIDNKFPTXLVIGLSVASGPALF

SEQ ID NO: 220141 - protein, 94 aa, Zea mays
  Clone ID: MRT4577_132355C.1.pep
DFFFFFLGEQWWHGRHCHYPCFHHISENTHHSLVTAHYSTCSHTLTSYSSKWLPPKELKESNFVYISFIDIHIYIYPNILIPIYRYIGINCKYS

SEQ ID NO: 220142 - protein, 99 aa, Zea mays
  unsure (1)..(99): unsure at all Xaa locations
  Clone ID: MRT4577_132356C.1.pep
KKRKEREKKRKPAKQKKKKKNLKKEKKATKSRKQNTRCPKKTTXLKLKEAEERGKKEXHSRXRRKEHKKRARTSKEARRHRKEQRQQERRRQKARSGSS

SEQ ID NO: 220143 - protein, 229 aa, Zea mays
  unsure (1)..(229): unsure at all Xaa locations
  Clone ID: MRT4577_132357C.1.pep
MKSAMVAAVVLALLLYGTGNTNCATLRPTSRNSTDDMLSLVDFRKEISSDPRGFLTSWNTNNSSAADYCSWNGVTCSRTHPGRVTELNLSSQSLRGRISPSLGNLTFLRILDLSYNSFFGQLPLLSRLVRLQDLVLNNNQLQSFPIDALTNCSSLHTIALSSNMFTGPIPXSIGSLPNLTYLYLDGNLLSGGIPSSLLNISKLKELDLXFNMLDGPIPPXICSLMSLTL

SEQ ID NO: 220144 - protein, 41 aa, Zea mays
  Clone ID: MRT4577_132358C.1.pep
AHYPVEFSCSLLLHNHDSKRSLETIHSQGKIAYSLPRHKFS

SEQ ID NO: 220145 - protein, 318 aa, Zea mays
  Clone ID: MRT4577_132359C.1.pep
MIVVAVVLALLLLFYGAGHADCATATIPQNSSSTADMLSLLDLRKEISSDPGGFLTSWNTNYNSSAGAADYCGWNGVTCSRKHPGRVIELNLSSQSLQGLISPSLGNLTFLRILDLSSNMLAGPIPPNIGSLFHLKILDLDSNNFTGAIPSSLGNISKLELLLLQDNQLIGTIPQDLGKLSNLYELLLGHNSLSGSIPTTILKQRNLRILDLGENSLRMMLPSDIGHTLPQLVALSLYNNMFYGPIPASLGNASILVVLDFTSNSFTGNVPSSLGNLTYLNFLKLEQNNLEAKNNEGWEFIDALAKCTYLQYILLSDN

SEQ ID NO: 220146 - protein, 108 aa, Zea mays
  Clone ID: MRT4577_13235C.1.pep
TEVREAQFSACHKITHTNAVRTNNANNSSQDGYRLHINSVVPQTAKSDRAGKTRHVYLKQEHMVNEVSGRYCELTTKRFLNLTALPMRPRLYLWDRTKRREPVTLRQH

SEQ ID NO: 220147 - protein, 249 aa, Zea mays
  unsure (1)..(249): unsure at all Xaa locations
  Clone ID: MRT4577_132360C.1.pep
MKSAMVAAVVLALLLLYGTGNANCATLRPTSRNSTDDMLSLLDFRKEISSDPGGFLTSWNTNSSAADYCSWNGVTCSRTHPGRVIELKLSSQSLQGRISPSLGNLTFLRILDLSYNNFFGQLPLLSRLVRLQDLVLNNNQLQSFPIDAXNCSSLHTIALSSNMFTGPIPLPASIGSLSNLMYLYLDGNSFTGAIPSSLLNISKLQQLVLEXYQLNGTIPQDLKLSNLNRLLGHNRLSGHIPTTILNQPP

SEQ ID NO: 220148 - protein, 254 aa, Zea mays
  unsure (1)..(254): unsure at all Xaa locations
  Clone ID: MRT4577_132361C.1.pep
MIVAVVLALLLFYGAGHADSLPQNSTDDMLSLLDFRKEISSDPGGFLTSWNTNNSSAADYCGWNGVTCSRTHPGRVIELKLSSQSLQGRISPSLGNLTFLRTLDLSYNSFFGQLPLLSRLVRLQDLVLNNNQLQGLAPDALINCSSLYWVTLSSNMLAGPIPASIGSLSNLMYLYLDSNNFTGGFPSSLLNMSKLEELDLXFNILAGPIIPPNIGSLFNLKILYLDSNNFTGAIPSSLVNISNYSSSCSRIISS

SEQ ID NO: 220149 - protein, 59 aa, Zea mays
  Clone ID: MRT4577_132362C.1.pep
LQKKIDRAFPTPCMQPRVLCYHQSSQGTSCKIFKSILLLLMNAYDNLEPVFYTSILHFK

SEQ ID NO: 220150 - protein, 189 aa, Zea mays
  unsure (1)..(189): unsure at all Xaa locations
  Clone ID: MRT4577_132363C.1.pep
YWRYCCSTGLDTPDSLPQNSTDDMLSLLDFRKEISSDPGGFLTSWNTXNSSAADYCAWNGVTYSRTHPGRVIELKLSSQSLQGRISPSLGNLTFLRVLDLSSNMLAGPIPPNIGSLFHLKILYLDSNNFTGAIPSSLGNISKLEQLVLQDNQLIGTIPQDLGKLSNMYRLLLGHNRLSGSIPKKKKKKR

SEQ ID NO: 220151 - protein, 493 aa, Zea mays
  unsure (1)..(493): unsure at all Xaa locations
  Clone ID: MRT4577_132364C.1.pep
MKAAMIVVEVVLALLLSYGAGHADCTTTTTIPKNSTDDMLSLLDFRKEISSDPRGFLTSWNTNNSSAADYCAWNGVTCSRTHPGRVIELNLSSQSLQGRISPSLGNLTFLRILDLSSNSFFGQLPLLSRLXLGFRTXSEQQPAALTNCSSLHAIDLSSNMFTGPIPASIGSLPNLTYLYLYANSFTGAIPSSLLNISKLQELVLSKNMLAGPIPPNIGSLVNLTLLYLDYNNFTGAIPSSLLNISKLQQLVLSSNMLAGPIPPNIGSLMNLTVLYLYDNNFNGAIPSSLLNISKLQELVLFSNMLAGPIPPNIGSLVNLTLLYLDYNNFTGAIPSSLLNISKLQQLVLSSNMLAGPIPPNIDSLMNLTLLYLDSNNFTGAIPSSLGNISKLQHLVLQNNQLNGTIPQDLGNLSNLNRLLLGHNRLSGHIPTTILNQRSLEFLGLEANFLRMALPSNIGNTLPNIYALFLYNNMFHGPIPASLGNASHLTLLDF

SEQ ID NO: 220152 - protein, 400 aa, Zea mays
  unsure (1)..(400): unsure at all Xaa locations
  Clone ID: MRT4577_132365C.1.pep
MIVAVVVLALLLFHADSLPQNSTDDMLSLLDFRKEISSDPRGFLTSWNTNNSSAADYCGWNGVTCSRTHPGRVIELKLSSQSLQGRISPSLGNLTFLRILDLSSNMLAGPIPPNIGSLFHLKILYLDSNNFTGAIPSSLGNISKLEQLVLQDNQLIGTIPQDLGNLSNMYKLLLTHNMLSGSIPATILNQRNLTILDLEENFLRMMLPSNIGNTLPSLVALSLYSNMFYGPNPASLGNASILTILDFTANSFTGHVPSSLGNLTHLYRLKLEQNSLEANDNEGWEFIDALAKCTHLQYLLLSDNQLQGSIPNSIGKLSNHTLQYLRFGKNNSSGAVPESIXGNLIGLNHLVLEQNNLTGLIGSWVGKLNNLVKLSLSDNSFSGPIPSSIWFCMTKVKCHV

SEQ ID NO: 220153 - protein, 133 aa, Zea mays
  unsure (1)..(133): unsure at all Xaa locations
  Clone ID: MRT4577_132366C.1.pep
MASXLSPPLPXFHXLXXYPAPRSAVAALPSVRVGINRSGXGIXXXYIGYNTNXIXXTXXXXXXFXXXFXXXXSXNXXXXXXXNXXXLYSPXXTGDPXEFTLFFTLACGAXGHILGXGMVLGLKNTGTLDQIIG

SEQ ID NO: 220154 - protein, 267 aa, Zea mays
  unsure (1)..(267): unsure at all Xaa locations
  Clone ID: MRT4577_132367C.1.pep
MLIAGTMKSAMVAAVVLALLLFYGTGNANCATLRPTSRNSTDDMLSLLDFRKEISSDPGGFLRSWNTSGSSAADYCSWNGVTCSRTHPRRVIELKLSSQSLQGRISPSLGNLTFLRTLNLSYNSFFGQLPLLSRLVRLQDLVLNNNQLQGXAPDALINCSSLHSIKLSSNMFTGPIPASIGSLSNLMYLYLDDNSFTGAIPSSLLNISKLQELVLSSNMLAGPIPPNIGSLMNLTVLYLYYNNFNGAIPSSLLNISKLQELVLFSEC

SEQ ID NO: 220155 - protein, 135 aa, Zea mays
  unsure (1)..(135): unsure at all Xaa locations
  Clone ID: MRT4577_132368C.1.pep
MTFSITRKEIEGFWRRKEEERRLAAEKEAARAKAKTLKMEDYMLFEQMIREILEEGNEGDXHQXNRMMVAASSRVAELRIGIKHWWKKSTYAYLNEPAVTASMDDNGRSRRAVTYIPQDRCLKVRSAIPASFVIF

SEQ ID NO: 220156 - protein, 183 aa, Zea mays
  Clone ID: MRT4577_132369C.1.pep
MAAPASRALRRCICTAKQTAYVRPTIGATQQRIQRRWQSDAAAPTNPKIATIVDQISQLTLLETADLVSTLKTRLNIPDMPMGGFVAGPGSAGPAAAAAPAEEEEAAPAAQEKTLFNLKLEKFDPAAKPKVIKEVKAMLGLSLVDSKKFVESAPKVMKEGVPKEEAEKIVETLKALGATVVLE

SEQ ID NO: 220157 - protein, 95 aa, Zea mays
  Clone ID: MRT4577_13236C.1.pep
FLFSFFFYFLIWVFFLKLLGVQRKKTSCLVIAQGQPGPLTKRAGGLKRRGQAGEASRRGCPPPEGRDNGKSHGRKGGNEPDGGVFNAPGGGKRAP

SEQ ID NO: 220158 - protein, 91 aa, Zea mays
  Clone ID: MRT4577_132370C.1.pep
KAKGRVFTENKPSEKGTWGSQGPRFFFILGPALSICPPLLKPPGPIFFSKKPPFGRGFKIPPLLGSPLKGQGTCLPLPPFFCPGPGLAVFC

SEQ ID NO: 220159 - protein, 91 aa, Zea mays
  unsure (1)..(91): unsure at all Xaa locations
  Clone ID: MRT4577_132371C.1.pep
LPGVDVANVERLNLLDLAPGGHLGRFVIWTQSAFNKLEEVYGSYDAPSQKKKGFVLPRYTLDILGLGSTKPKMSNADXGRIINSDEVQSVV

SEQ ID NO: 220160 - protein, 144 aa, Zea mays
  Clone ID: MRT4577_132372C.1.pep
MKGLSGAKLLVVHPSSNKSPGGAGSPGAVLGARRRVCAAVFLACFACVSLATTLLSAARDPAGAGARSAAFAVPVAAAAREGQGLPGHVFDALVQYASAGGNSTASMPGADVRAIAAVLRRRAPCSLLVSELGAETPLWRALNH

SEQ ID NO: 220161 - protein, 80 aa, Zea mays
  unsure (1)..(80): unsure at all Xaa locations
  Clone ID: MRT4577_132373C.1.pep
MPGPLKRGRAWFPSKKGPGGGPPPGGGRFQKPAGFLGGGVIFPPKPQGPGFGKPGEGKNFXGPPQGGPRGPPPPAQKSFS

SEQ ID NO: 220162 - protein, 125 aa, Zea mays
  unsure (1)..(125): unsure at all Xaa locations
  Clone ID: MRT4577_132374C.1.pep
GXGXGXXXXGVRGRTGARWXGVKGRPPRRTESQGAANAYDDADRELGRSGGPEAISFHSGGGFLDLGRGFLDLAGLRDLRVGCARKGSQSRVAQPWREPALRRERDAAEGAGAAERARQNXVPGR

SEQ ID NO: 220163 - protein, 73 aa, Zea mays
  Clone ID: MRT4577_132375C.1.pep
APPGPCCPPMSPLVYSPTWAGGVQHGLHTPFMQFTDLKAIACKNIPISPVIPPPMSKIGWGRVKCQPFFRDFW

SEQ ID NO: 220164 - protein, 87 aa, Zea mays
  Clone ID: MRT4577_132376C.1.pep
LLLSGKRLYILLHRPTGGALWRSPGCRLAVRVALDCASCMLVLPPHLGTEARPGAACRVKGTLQPWGAPPCRTWWCQPPRAEFRAYV

SEQ ID NO: 220165 - protein, 67 aa, Zea mays
  unsure (1)..(67): unsure at all Xaa locations
  Clone ID: MRT4577_132377C.1.pep
GLVGASFXFLFDKPWSTRFTLAIAFATASATPFFSSRPDLLRCFRAATGVDPVCPRWVHPYTGAPQF

SEQ ID NO: 220166 - protein, 95 aa, Zea mays
  unsure (1)..(95): unsure at all Xaa locations
  Clone ID: MRT4577_132378C.1.pep
TVXPKGMIDQNCKSLSSFSTDSKRGKKNKIPDETKLVVKIKDQRINPGCCHTKLYQSLRRSVAPTWLAAAIANCRSLLHHLSLFIRLLWSRADSH

SEQ ID NO: 220167 - protein, 81 aa, Zea mays
  unsure (1)..(81): unsure at all Xaa locations
  Clone ID: MRT4577_132379C.1.pep
PRVLSRVRKVHTELAIEAVRKSLVVSKNCNSPDHQFLPLPKRARTILVTRIHASNLWYQCRXWSNQWIEYTCNITTAIQYP

SEQ ID NO: 220168 - protein, 135 aa, Zea mays
  Clone ID: MRT4577_13237C.1.pep
GPGGKPKTPRRDHRWAAQASKKGPLGNGWKKPLAGPPPPQGLVLEKIGIGAQQPDPPIGKGARVPLVKKGKKIPPFGPKAGGLSSLGENDGGLNAGLGRKGPPVGDIPGGRFRVAKVSGGSLLALFRGKKGKPGS

SEQ ID NO: 220169 - protein, 58 aa, Zea mays
  Clone ID: MRT4577_132380C.1.pep
IVWDYAKNNDLMIVSKDADMHDLSLVFGSPPKVIWLRLGNCSTSQVENLLRREFRMVA

SEQ ID NO: 220170 - protein, 68 aa, Zea mays
  unsure (1)..(68): unsure at all Xaa locations
  Clone ID: MRT4577_132381C.1.pep
PPCCCWRXPWPLPLAXXCLSXXXPFVAGAPXRXXAAXASPWXRLXFGXXXXGWWRRRPGXLXAAGGFV

SEQ ID NO: 220171 - protein, 206 aa, Zea mays
  Clone ID: MRT4577_132382C.1.pep
MESWRRRTLLKVIVLGDSGVGKTSLMNQYVSKKFSQQYKATIGADFLTKEVLIGDRLVTLQIWDTAGQERFQSLGVAFYRGADCCVLVYDVNVKRSFNTLDTWHDEFLNQAGPSDPQRFPFILVGNKIDLDGGNKRMVPEKKAREWCASKGDIPYFETSAKEDHNVDTAFLCIARLALEHEHDQDIYFKTVAEQVPDTEQTSGCAC

SEQ ID NO: 220172 - protein, 51 aa, Zea mays
  Clone ID: MRT4577_132383C.1.pep
CTICTETQVTKLSRKALKAEAELKATSYKRCKNRVVDSYVRSEWRDLMFQN

SEQ ID NO: 220173 - protein, 47 aa, Zea mays
  Clone ID: MRT4577_132384C.1.pep
NIGSLFHMKRNAYFNLERREDISALGMAHFNHLRVTFPLQGSQCQTL

SEQ ID NO: 220174 - protein, 120 aa, Zea mays
  unsure (1)..(120): unsure at all Xaa locations
  Clone ID: MRT4577_132385C.1.pep
MKSGATYLGRRILTLGTDAVTGDRKEELRSLGAQIAYRAPDPTNGCKLVRYVVNKDPYCLTAWNSYYMAVLRIEDRFPHNFKSLLRTRHASPDCVPSIIISGHQFTALTXHQSSARDYLE

SEQ ID NO: 220175 - protein, 133 aa, Zea mays
  unsure (1)..(133): unsure at all Xaa locations
  Clone ID: MRT4577_132386C.1.pep
MSCEPSDVDDSDAHALSFDLGQLNXELKSDLKDLYIDNAIHXDDTGSRKVVVIHVXYRLSKDFGKIHVTLDRELEKKFGVKDARIVATTRIVRTPXKKASAVRRHSDSTLTAVRDAIMEDVVYPAEIARNCVR

SEQ ID NO: 220176 - protein, 63 aa, Zea mays
  Clone ID: MRT4577_132387C.1.pep
VRMAATLASVYSFPLTSILLLFELKKDYMILLSFMVSVKCQCSLTIFLCSCYSCVVLVYVCIS

SEQ ID NO: 220177 - protein, 291 aa, Zea mays
  unsure (1)..(291): unsure at all Xaa locations
  Clone ID: MRT4577_132388C.1.pep
SARGKRYLDYLIMSLCSEEKGFREMEPLLLQILRIGFFEILKLDVPAYAAVDENVRLAKVALRPGAGNMVNAILRKLVLLKETDSLPLPKIEVGDRAQARALSIIYSHPVWMVRRWIRFHGKDEALRLMNWNNSDPHFSLRVNTSKGYTRADLVKRLESLQVHYEESIMDEFVRIREGMQQVLKAGLLKDGICAVQDESAGLVVSVVDPQPGETIVDCCAAPGGKTLFMASRLSGEGKIWALDINKGRLRILMDANKXHGLDDIITYIHGNRAIKAKKASNLDPTVLYGKG

SEQ ID NO: 220178 - protein, 49 aa, Zea mays
  Clone ID: MRT4577_132389C.1.pep
CPANCRASTIGSLLYDVHHFACCLIISVYVLVLRERVLYHQDRVFIASQ

SEQ ID NO: 220179 - protein, 204 aa, Zea mays
  Clone ID: MRT4577_13238C.1.pep
MGAYKYVSELWRRKQSDVMRFVQRVRCWEYRQQPAIVRLTTTRPVLWSRRLGFKAKQGYVVYRVRVRRGGRKRPVPKGIVYGKPKHQGITQLKFQRNKRSVAEERAGRKLGGLRVLNSYWVNEDSTYKYFEIILVDVAHTAIRNDPRINWLCNPVHKHRELRGLTSAGKKFRGLRGKGHTHHKNRPSRRATWKRNQTLSLRRYR

SEQ ID NO: 220180 - protein, 106 aa, Zea mays
  unsure (1)..(106): unsure at all Xaa locations
  Clone ID: MRT4577_132390C.1.pep
VRIHLLIWTSLITERVTVIVAGTVRWKRYLDYLIMSLCSEEKVFREMEPLLLQILRIGFFEILKLDVPAYAAVDENVRLAKVALRPGAXNMVNAILRKLVLLKETD

SEQ ID NO: 220181 - protein, 277 aa, Zea mays
  Clone ID: MRT4577_132391C.1.pep
PRVRANLSPDSNESTFADWWAKVIKQVHKSKRRGFNSIIILDAWCLWLHRNKQVLKAGFLKDGICAVQDESAGLVVSVVDPQPGETIVDCCAAPGGKTLFMASRLSGEGKIWALDINKGRLRILMDAAKLHGLDDMITDIHADLRLYAKETTVKYDKVLLDAPCSGLGVLSKRADLRWNRQFENLEELMCLQDELLDSASMLVKPGGILIYSTCSIDPEENEERITAFVQRHPEFALQSVCGYVPREFITDEGFYSSNPTKHSMDGAFAARLVRSTH

SEQ ID NO: 220182 - protein, 131 aa, Zea mays
  Clone ID: MRT4577_132392C.1.pep
QGTGTNLKEEGEKKKKLPPPQLGPPKKQEGRRLKRRPPPFMASTQGSGSALIKSPEQPRLLHGGPPWPTPCSPSSYKQGRAFAPPPNFLVAGQACRGGSPKSRPRRCTGARCRRKSPPRRQTRGCRGCPGA

SEQ ID NO: 220183 - protein, 550 aa, Zea mays
  unsure (1)..(550): unsure at all Xaa locations
  Clone ID: MRT4577_132393C.1.pep
MSLRTQCACSCMLQPYSASSSSITLSMRATPTHQRRARPPPPSCLATRHLRRRRAPAGINRVPNLGSAVSTKKAGMSKDTFINLDVSHHRAVAVVRLLRIEKGKAFVDLLNEKANDSGDKEIGYVQRTLGFSTRYLEDRDIRLVTVIVAGTVRWKRYLDYLIMSLCSEEKVFREMEPLLLQILRIGFFEILKLDVPAYAAVDENVRLAKVALRPGAGNMVNAILRKLVLLKETDSLPLPKIEGDDRAQARALSIIYSHPVWMVRRWIRFHGKDEALRLMNWNNSDPHFSLRVNTSKGYTRADLVKRLESLQVHYEESIMDEFVRIREGMQQVLKAGLLKDGICAVQDESAGLVVSVVDPQPGETIVDCCAAPGGKTLFMASRLSGEGKIWALDINKGRLRILMDAAKLHGLDDMITDIHADLRLYAKETTVKYDKVLLDAPCSGLGVLSKRADLRWNRQFENLEELMCLQDELLDSASMXGILIYSTCSIDPEENEERITAFVQRHPEFSEXVCGYVPREFITDEGFYSSNPTKHSMDGAFAARLVRSTH

SEQ ID NO: 220184 - protein, 79 aa, Zea mays
  Clone ID: MRT4577_132394C.1.pep
LTNVKSQNLLGVVLGVRFTGTEDESQMSLNLSRHSLWQGCPGFLLLNPWSVSIWIVSQITFLPFLSFFFFFSISVPTPY

SEQ ID NO: 220185 - protein, 56 aa, Zea mays
  Clone ID: MRT4577_132395C.1.pep
ERRSYGVCSTSSPSEGPVIIVLILEHLSEEPDCDHQFMTHRRPTTTPPPPPPPPPP

SEQ ID NO: 220186 - protein, 184 aa, Zea mays
  unsure (1)..(184): unsure at all Xaa locations
  Clone ID: MRT4577_132396C.1.pep
PPWTLPAATSSVAFASASAPVAVAEEPEYLTRYIVVKHSWRGRYRXVLCITSSCVVTLDPTTLNLTNSYDVGSKFDHAEALTATDEFTLAVRTDARGKFKPMRFSSPLRPGILTELHRLRPVHDSFDFPVLHLRRRTXHEWAPFMLMGGGSSAGGPRKGMNSRLYPNMTFHPISTDFCVLTNFQ

SEQ ID NO: 220187 - protein, 98 aa, Zea mays
  Clone ID: MRT4577_132397C.1.pep
ETRTLSMVSGDRSHSQLIIPMHMSRRVQFLVGFKSCEHFCAPVELETCFFSSNFTQICKECTFVTVTWRSMDATSCSSDGPFEVTTPPLPGRPPTRKL

SEQ ID NO: 220188 - protein, 156 aa, Zea mays
  unsure (1)..(156): unsure at all Xaa locations
  Clone ID: MRT4577_132398C.1.pep
PPWTLPAATSSVAFASASAPVAVAEEPEYLTRYIVVKHSWRGRYRXVLCITSSCVVTLDPTTLNLTNSYDVGSKFDHAEALTATDEFTLAVRTDARGKFKPMRFSSPLRPGILTELHRLRPVHDSFDFPVLHLRRRTXHEWAPFVAVQGDNAVATC

SEQ ID NO: 220189 - protein, 193 aa, Zea mays
  unsure (1)..(193): unsure at all Xaa locations
  Clone ID: MRT4577_132399C.1.pep
DTFHTLSHFFAWVSTQFGRLVCALQCDNGCEFNNSTSRSFFLSHGVQLWLSCPYTSPXNGRAKHMIHITTNMIRCLLFQTSLPANYWVEALNTITHLNRLPSKEVSHPTPFFALFGIARSYMHLRVFGCACYXNTYDIAPHKLSPXSTRCLFLRYSPDHKGYRLKGKCALGPFLSILVIECQLKCLNVNLCNG

SEQ ID NO: 220190 - protein, 102 aa, Zea mays
  unsure (1)..(102): unsure at all Xaa locations
  Clone ID: MRT4577_13239C.1.pep
MRECSAIHVIQRDIQRVNACWXLHCREHDIQXDEHMPVDKTNRKGKDAFNTFFIDNGGGKNVHRAVFVDLDFSVIHDVRTGTYRQLLHPDQLINXKENAVNN

SEQ ID NO: 220191 - protein, 110 aa, Zea mays
  Clone ID: MRT4577_1323C.1.pep
NQECLKRQTSITNANTRAVQQVMMEGNTQTLPRGARTQTKVFQHHNLARQANRFMQADQYFLLLVTGITAGLCGELLVVLFQGGQVLACLEKTPPSSCPRRSTKCTKRAL

SEQ ID NO: 220192 - protein, 40 aa, Zea mays
  Clone ID: MRT4577_132400C.1.pep
MESWATGVGTSVSCAFFASLERCSCINLFTDDYDYDEDHD

SEQ ID NO: 220193 - protein, 340 aa, Zea mays
  Clone ID: MRT4577_132401C.1.pep
RRFLNMFDPLKQSNNLGRSVSKGNFYRIRSAFDFGARKLGKILQVPSCLTVGEVNQFFRNTLKRNRTGLRPDVLVVSSDLVTNDPVSSDLDVERVNNVAPNNSCDVLSNQLSNINISDSNNHGSIKQKECNSMADHKEIKSVSLGLLDSDATNHATTDSVSIRGGGNFSEASPVPSETSTLQSETGKKVDVRNDTTPSYYGVSAKQFTGRSHHYIEDTKHNAYPYSTGLVDGLGTSNSVLTSDTQPGGNNNDTVPNLTGDFDTNLHNLLYARGFHQDNPMTQLYYPMPMPPPLQYQNMHPSNGHGRKNPYGYAGRNGVVPGHVYPPSYLCIGHCIKQMII

SEQ ID NO: 220194 - protein, 118 aa, Zea mays
  unsure (1)..(118): unsure at all Xaa locations
  Clone ID: MRT4577_132402C.1.pep
VNFQLTSFDNIQKRVINFALILIINTLLALLLIIITFXLPQLNGYIEKSTPYECGFDPISPARVPFSIKFFLVAITFLLFDLEIALLLPLPXALQTTNLPLIVMSSLLLIIILALSLA

SEQ ID NO: 220195 - protein, 218 aa, Zea mays
  Clone ID: MRT4577_132403C.1.pep
MACPAAALLLPLLLGFLAPARATDPYAFFDWDVSYVTRSPLGVPQKVIAINKEFPGPVVNVTTNYNVAVNVLNSLDEPLLITWDGIQQRKNCWQDGVLGTNCPIPPGWNWTYNFQVKDQIGSFFYFPPLSMQRAAGGFGGITVNNRAVISVPFDTPDGDIRLFIGDWYKKNHTDLRKMLDDGKELGMPDGVLMNGKGPYRYNDSLVPAGIEYETIDVE

SEQ ID NO: 220196 - protein, 81 aa, Zea mays
  Clone ID: MRT4577_132404C.1.pep
FERCTHDSGLHTLVAVGDEGTGGCHRSPMGMGYGDVIKEALRHAPCRGHHLHEELEHDEHDTAGDLDLLDQDRRNPVRGHL

SEQ ID NO: 220197 - protein, 207 aa, Zea mays
  unsure (1)..(207): unsure at all Xaa locations
  Clone ID: MRT4577_132405C.1.pep
MACPAAALLLPLLLGFLAAPSPARATDPYAAFDWDVSYVTRSPLGVPQKVIAINKEFPGPVVNVTTNYNVAVNVLNSLDEPLLITWDGIQQRKNCWQDGVLGTNCPVPPGWNWTYNFQVKDQIGSFFYFPPLSMQRAAGGFGGITVNNRAVISVPFDIPDGDVRLFIGDWYKKNHTDLRKMLDDXKELGMPDGVLMNGKGXYRYNDS

SEQ ID NO: 220198 - protein, 265 aa, Zea mays
  unsure (1)..(265): unsure at all Xaa locations
  Clone ID: MRT4577_132406C.1.pep
VDPVVALHRVLXHSKGIYGPKGVTVPDPVQSVCTRWGSDPFCSGSYSHIRVGSSGADYDILSESVNDRLFFAGEATNRAYPATMHGALLSGLREASKIYRASDSLVNYDQKKNSLPKSLKPPDGALLDLFLEPDLAFGRFSFVFSSLTPDDPAAPGLLRVSLDKRFLLQPNYNTELKGDQKDHSHSHASGAFHLYAAVSREQADRLQRSSEDDRTRLGVLCKDRTVKLMGYDSTCDVGSDLISSILGARKARKLLQHPKNSKIPR

SEQ ID NO: 220199 - protein, 57 aa, Zea mays
  Clone ID: MRT4577_132407C.1.pep
MGVCPCVDPRCRSFGKTLTGKTITLEGEGCDTIDNVKAKIQDKEGISPGQQRLIFAG

SEQ ID NO: 220200 - protein, 89 aa, Zea mays
  unsure (1)..(89): unsure at all Xaa locations
  Clone ID: MRT4577_132408C.1.pep
DATCHRDFIKNMITGTFHADCAVLIVAAXVGEFEAGIFKNGQTREHALLAYTLGVKQLIVGVNKMDFTEPGYSEKRYDEIVKEVSAYIK

SEQ ID NO: 220201 - protein, 41 aa, Zea mays
  Clone ID: MRT4577_132409C.1.pep
HVGNSQVSRRLTRRSHRAQCNNEDRVNSAIRVCFTGLVALF

SEQ ID NO: 220202 - protein, 45 aa, Zea mays
  Clone ID: MRT4577_13240C.1.pep
NNTTCLRFLPSECTLGVSHICNANAYDAMLNLDIFIPIFAYFLLI

SEQ ID NO: 220203 - protein, 114 aa, Zea mays
  Clone ID: MRT4577_132410C.1.pep
LFMAHFVVPLWLVFFSQWVFLEKKKPLVFPHLVQFVPRYTKFGPKSPLPFFLQPIFGVSHFKEKVLYFFPFHMARIPFNKPGPVPLLVAPRFFFELCPLIRFHFSAWWRGTLPK

SEQ ID NO: 220204 - protein, 152 aa, Zea mays
  Clone ID: MRT4577_132411C.1.pep
PPPRLEKQNKKKNGAPGFFLKPPPRSQRWGKKNGPFLWKILHRPQTKRLAPNPSPKGARALFWLPPPPKMAPPRPFLGGGRHPPPLFFLPPAAPWVLLASSRAPLCTLPLLCKTPSFGVFCPYSLPQPGAGPPPLLAFGFPPPVVKIPRFLP

SEQ ID NO: 220205 - protein, 96 aa, Zea mays
  Clone ID: MRT4577_132412C.1.pep
PKHPISRYLTLLVAPPTSASAMFGNFTSFAGIPAKSKVDPKDVPPPTPVTLPRFQPFAQDDDAIDESSALSTLLCNTGRSTAALRPSGFSAIGLNL

SEQ ID NO: 220206 - protein, 166 aa, Zea mays
  unsure (1)..(166): unsure at all Xaa locations
  Clone ID: MRT4577_132413C.1.pep
PSPGRADRRGQEPGSRGKRPAATSTHQDTHQKGETTQTKIAPSARTSLPAKTRRQNGKPGSPSRRRSPPARHTKSPGKARENQRQQAKRQPLGGQTQPPTXTDRDTQPPRHPRTQSQKRKPCAPSRKKERXPPRSRRTRKPEHAKSPTREQRSRTQGDKPPNQKPS

SEQ ID NO: 220207 - protein, 109 aa, Zea mays
  Clone ID: MRT4577_132414C.1.pep
KNGAALLFKNANTALLPKIGGGFYKTGLGQKAPKKGYPDKVNIHTCGTQNCFEASTGVSLGKVTTIMGSAGRGGIPTMPHALNGGGRVNSFFVQIAFKGGILITPAHFF

SEQ ID NO: 220208 - protein, 69 aa, Zea mays
  Clone ID: MRT4577_132415C.1.pep
ELSSRRPPFGFVSESTLSIRLDANELDGRRQMHRLYKLESAAGTRHDKKTTRSFETRILGPEDTMERTH

SEQ ID NO: 220209 - protein, 138 aa, Zea mays
  unsure (1)..(138): unsure at all Xaa locations
  Clone ID: MRT4577_132416C.1.pep
LTRAASALSVIASGGLSFPRGHHALLGPRRAAHLSPVPRQTTTSWPXFALLGPDLARRLVYLRTRRLLPLEAIRICDSALEPSVGGNNAGPDDLEKDTEVDAVXSGDNXGAGELVDDHSVEVSPAVKDXVEEEVGESC

SEQ ID NO: 220210 - protein, 818 aa, Zea mays
  unsure (1)..(818): unsure at all Xaa locations
  Clone ID: MRT4577_132417C.1.pep
AYRNLTLQCLTEVAALQFGDFYNVQYVKTYTIRHEAFFMIQLQAILPPEKIPDAYANGSTEEQAFIQNLALFFTSFFKNHMRILETTQENIAALLMGLEYLIGISYVDDTEVFKVSLDYWNVFVLELFEAHNQMEPAVTVSMMGLQAQMVPGMVDGGTAVKQRRQLYSGPLSKLRMLMICRMAKPEEVLIVEDENGNIVRETMKDNDVLVQYKIMRETLIYLSHLDHEDTEQQMLKKLSKQLNGEDWSWNNLNTLCWAIGSISGSMVEEQENRFLVMVIRDLLNLCEITKGKDNKAVIASNIMYVVGQYPRFLRAHWKFLKTVVNKLFEFMHEMHPGVQDMACDTFLKIVQKCKRKFVTQQVGENEPFVSELLSNLATTIADLEPHQIHTFYESVGHMIQAESDNTKRDEYLKRLMSLPNQKWAEIIGQASQSIDILKNQDVIRSVLNILQTNTSVASSLGPHFFPQISLIFLDMLTVYRMYSELVSSTIAEGGPFASRTSFVKLLRSVKRETLKLIETFVDKAEDLPHLGKQFVPPMMDPVLGDYARNVPDARESEVLSLFATIINKYXACSLFILYHGHMPIFFQTKLHLNFFKLIPLKKVTXMSRATIEFMYFHSWLFLINCIFASIITVKIFLHSWPFLINFIFCINSKGXLSCRYKGEMLEDVPRIFEAVFQCTLEMITKNFEDYPEHRLKFFSLLRAIGTHCFQALIQLSSQQLKLVIDSINWAFRHTERNIAETGLSLFFEFFSKFQASGFXSFKNHIRDFLVQSKEFSVQDNKDLYAEEAAAQRERERQRMLAIPGLIAPSELQDEMVDS

SEQ ID NO: 220211 - protein, 82 aa, Zea mays
  unsure (1)..(82): unsure at all Xaa locations
  Clone ID: MRT4577_132418C.1.pep
IRLEARVAIFESSEAAKHIMKELAEGSCSGSXSXRHFTNSMDGQVMLDDSEGDDADNDDDGXEKGLETTALSDMLKSNDAGC

SEQ ID NO: 220212 - protein, 485 aa, Zea mays
  Clone ID: MRT4577_132419C.1.pep
SSLDLCQVLIFTFAYFLQVGENEPFVSELLSNLATTIADLEPHQIHTFYESVGHMIQAESDNTKRDEYLKRLMSLPNQKWAEIIGQASQSIDILKNQDVIRSVLNILQTNTSVASSLGPHFFPQISLIFLDMLTVYRMYSELVSSTIAEGGPFASRTSFVKLLRSVKRETLKLIETFVDKAEDLPHLGKQFVPPMMDPVLGDYARNVPDARESEVLSLFATIINKYKGEMLEDVPRIFEAVFQCTLEMITKNFEDYPEHRLKFFSLLRAIGTHCFQALIQLSSQQLKLVIDSINWAFRHTERNIAETGLSLLLEILKKFEASGFQNQFYKTYFLTIEQEIFAVLTDTFHKPGFKLHVSVLQHLFCAVDGLTEPLWDASSVPYQYTDNAMFVRDYTIKLLGTSFPNMTVTEVTKFVDGLLSSKLDLPSFKNHIRDFLVQSKEFSVQDNKDLYAEEAAAQRERERQRMLAIPGLIAPSELQDEMVDS

SEQ ID NO: 220213 - protein, 62 aa, Zea mays
  Clone ID: MRT4577_13241C.1.pep
TPTWTGAEDQSRTVSIWTWSRLTRVHPDLIVKSLARVARSLSCGRIRGRRLAPLPRRWRRVT

SEQ ID NO: 220214 - protein, 56 aa, Zea mays
  Clone ID: MRT4577_132420C.1.pep
KPIRDFLVQSKEFSVQDNKDLYAEEAAAQRERERQRMLAIPGLIAPSELQDEMVDS

SEQ ID NO: 220215 - protein, 92 aa, Zea mays
  Clone ID: MRT4577_132421C.1.pep
PDQLAEIMSLLRPHRICSACSPDNAIYHPSSLKAPSLACSPGFAGLLQKTHGNGDQSQCGIPNNFQRDCTQLMNTCSKKNVRTQFMPFNASS

SEQ ID NO: 220216 - protein, 237 aa, Zea mays
  unsure (1)..(237): unsure at all Xaa locations
  Clone ID: MRT4577_132422C.1.pep
MASRERQHTRSYDYDYEHLVLDPASLGVPWADPAAVEIPPQLLAALGEYLSGSAARGDVEAEADDEFMMHEFKVRRCARARSHDWTACPYAHPGEAARRRDPRRVAYAGEPCPDFXPPGRRRRRAACPRGAACPLAHGTFELWLHPSRYRTRPCRAGAACRRRVCFFAHAAAELRAAXPPSPSPRTGALRSRSRSPSRPSPPCRRRSGSRRRCPPWRAAGGSTSRRRTATPTPRWRS

SEQ ID NO: 220217 - protein, 100 aa, Zea mays
  Clone ID: MRT4577_132423C.1.pep
GLKRKLVHITLQYTLYHLNPLQSKITQTNPKTEEQFHLGIWRVDQSSDQFHTPINRKFHTPKNKTKNYSVFECASTQLAEIPNSFSIHSLSMRQQIWIHL

SEQ ID NO: 220218 - protein, 91 aa, Zea mays
  Clone ID: MRT4577_132424C.1.pep
APGLEEEYAVLSPSLSARPVDPLSQGRLRQGQLRLQPRHEGVFLLLWSSSTASALVLGNFFFQALLYGVAWASWVCIQSNLLKSSTDLYFR

SEQ ID NO: 220219 - protein, 120 aa, Zea mays
  Clone ID: MRT4577_132425C.1.pep
VVDSLTEPLWDSSSVPYQYTDNATFVRDYTIKLLGTSFPNMTVAEVTKFVDGLLSSKLDLPSFKNHIRDFLVQSKEFSAQDNKDLYAEEAAAQRERERQRMLAIPGLIAPSELQDEMVDS

SEQ ID NO: 220220 - protein, 94 aa, Zea mays
  Clone ID: MRT4577_132426C.1.pep
ISHCLFTKLLCICDRSVKRETLKLIETFVDKAEDLPHLGKQFVPPMMDPVLGDYARNVPDARESEVLSLFATIINKYACSLFILCHGHMSIFFN

SEQ ID NO: 220221 - protein, 69 aa, Zea mays
  unsure (1)..(69): unsure at all Xaa locations
  Clone ID: MRT4577_132427C.1.pep
PFPFQQELKFLFPPQIYPKKCPPFVFNRRPLLCFVLPHKKHWFVGFNKHGLCCLLPLXKKKKKKKKETQ

SEQ ID NO: 220222 - protein, 158 aa, Zea mays
  unsure (1)..(158): unsure at all Xaa locations
  Clone ID: MRT4577_132428C.1.pep
TGXGLPGLLAPFRLWPRPRGWAGCLLSPVQLSRPSLPPGCLPSPTLWLGRVPFPVLPVPVGAATMSLWRSRSGSAVLTLSAPPVGDSGRGTLTVRAGAGNLLRNARLRGYSPRGAFLCVAGRAPWLLLGVLAGPVLLRGHXCWSGRRRGVRCPRALLF

SEQ ID NO: 220223 - protein, 142 aa, Zea mays
  Clone ID: MRT4577_132429C.1.pep
FLSGVAVGAGWQVRVAIINVGCYYLVGIPMGILLGFKLKHGTMGIWMGMLTGTFLQMSILLATIFTTKWDKQAALAEVRMAEWGGKNENLTLTETTHTDDLMAPVLEPDRRHTACPSGPSAHTRPHQLSGCDTRCPTYSSGL

SEQ ID NO: 220224 - protein, 41 aa, Zea mays
  Clone ID: MRT4577_13242C.1.pep
YGFMSTCCNPSDYKSLSVTLSSFALSSSSNPPSQKQAVPLV

SEQ ID NO: 220225 - protein, 230 aa, Zea mays
  unsure (1)..(230): unsure at all Xaa locations
  Clone ID: MRT4577_132430C.1.pep
YTVRLRMLQSYLARPTARSVLHKSVGFGGASYISLSLSTPIRIESKANSTMAAPDHPEGAQGGQQSMLASQRAKEQGEAQGRFSKWFPLSAKAGFEQWWAGLSPMATEHRVLSFVPHLQSPPTHTQTGAASGSAVPSSVDLNAPPKHPEDHTTTTAANDPYGPRRWNSQMVELSGKDRALNEFSVERLSEEVENNLVMLHGYGAGLGFFYRNFEGISPCXRVEVYALDLL

SEQ ID NO: 220226 - protein, 67 aa, Zea mays
  Clone ID: MRT4577_132431C.1.pep
DSPFQSSPQQRYSLPIAVSAGAEVIKLHDATLSFLGQTPEVAPIPVPVSWRDKDLLALDLPAFVAHP

SEQ ID NO: 220227 - protein, 75 aa, Zea mays
  Clone ID: MRT4577_132432C.1.pep
MLVSLSMCVCLFVCVSISVCKGRFGPPPPILIKKKKKKKKKKKAVPALTQLAVANPAAYLQQLLPFNQLTMSNSA

SEQ ID NO: 220228 - protein, 65 aa, Zea mays
  Clone ID: MRT4577_132433C.1.pep
QTQATWEYTIATNKTHPVHNGVPEKTTFGISDQPSGKANTKGTLITKTEEVALNAKTAHWKAIFI

SEQ ID NO: 220229 - protein, 34 aa, Zea mays
  Clone ID: MRT4577_132434C.1.pep
SLFIAVLISYNGMIVSSASYLSEIEKHAKDWILR

SEQ ID NO: 220230 - protein, 122 aa, Zea mays
  Clone ID: MRT4577_132435C.1.pep
MAIGGGGGGGSWSIHGRPDVTSRYDVLGRAGSGAYADVYRGRRRSDGAPVALKEVHDAVSAQREADALLAAASESSPHVITLLDHFPGGDHDDDVLVLEWLPLDLAAVVREGRRAGGLPAGQ

SEQ ID NO: 220231 - protein, 74 aa, Zea mays
  Clone ID: MRT4577_132436C.1.pep
NLRTNDKRKITTEGSITFHVALTGTVVQTKWFHIPLTFDVRDVDLHSAPHDFFLERAGAAHHLFKRRKNGPKWT

SEQ ID NO: 220232 - protein, 148 aa, Zea mays
  unsure (1)..(148): unsure at all Xaa locations
  Clone ID: MRT4577_132437C.1.pep
LAGLKKKKKKKKKKKKKKNPRPHPRFWIRLGFRNLVRGLEGSSEVDLILGFRFRRFCGRGGNWRPAGXGDTSANAAGGIGSAGKATWSIRERVEGRRLPQAHGEVPRQESSFTFASATPDVLLSGRAKGDRLPGVPFGSFGTRGLGGI

SEQ ID NO: 220233 - protein, 66 aa, Zea mays
  Clone ID: MRT4577_132438C.1.pep
NSQGLRVLACLSRHASAVWLLFTVCYAQYGGVSHIDIEAQFANSCTVLCYAMEPTNLGVQSQPCVT

SEQ ID NO: 220234 - protein, 30 aa, Zea mays
  Clone ID: MRT4577_132439C.1.pep
LKTSNTYNKKYYDHNIYSFRLLLSFNHSYN

SEQ ID NO: 220235 - protein, 80 aa, Zea mays
  Clone ID: MRT4577_13243C.1.pep
LSSACMFFSYFTQLANIRLCSKLATECTACYVVTWAICGLEIYSMIVPSVAIKKKKKKKKKKKKKKKKKKKKKIKKIKKK

SEQ ID NO: 220236 - protein, 132 aa, Zea mays
  Clone ID: MRT4577_132440C.1.pep
VGRYGKTQYLTPTAHWPGRQHEQPGNGKAIKGPPTNNRGHGHPQLGFNFLPTKARTEPIKPRGAKQKRTRWTRADKGKPTGQKQAPPKGSGRGRRGSPRLFPSNGLHRVKREALGFRHGRGHKRKGQPREPR

SEQ ID NO: 220237 - protein, 94 aa, Zea mays
  Clone ID: MRT4577_132441C.1.pep
VVLNLATHLWDPEKILRLNIATGEVLKEHAMRRRAGQRSQSCCECTWTCWQCVQRYDVRRAIDLTSTACRQVKCRTPQDQSWMDRGPHPVQHTT

SEQ ID NO: 220238 - protein, 38 aa, Zea mays
  Clone ID: MRT4577_132442C.1.pep
RYTLYYPSLLYLFNIRSSGPWTKYTYIFFLAQLQSPII

SEQ ID NO: 220239 - protein, 185 aa, Zea mays
  unsure (1)..(185): unsure at all Xaa locations
  Clone ID: MRT4577_132443C.1.pep
MVEVVPIYTAGSKYPSSTCSPEDNSDLFYAALGGLGQFGIITRARIALEXSDFESFTEDQEMLIMAENSFDYIEGFVIINRTGILNNWRASFKPQDPVQASHFQSDGRVLYCLELTKNFNXVATLEFLDRVHTSELKLRAQSLWEVPHPWLNLLIPRSSIRRFATEVFGRILVGFLSSAPSLSGH

SEQ ID NO: 220240 - protein, 57 aa, Zea mays
  Clone ID: MRT4577_132444C.1.pep
SKCESRNYLYNKLYHSKTVQALQNLIKANKIHRSTGLPSSSFITILQFYAFFGANRK

SEQ ID NO: 220241 - protein, 218 aa, Zea mays
  Clone ID: MRT4577_132445C.1.pep
MDTPSLVTSRPAGPSGVTDTMEQEVAVLLSRLRFIQSTLFHTDVTYLEFLDRVHTSELKLRAQSLWEVPHPWLNLLIPRSSIRRFATEVFGRILKDSNNGPILLYPVNKSKWDNKTSVVIPDEEIFYLVGFLSSAPSLSGHGSIAHAMSLNSQIVEFCEEADIGMKQYLAHYTTQEQWKTHFGARWETFERRKHRYDPLAILAPGQRIFPKASLPLSL

SEQ ID NO: 220242 - protein, 280 aa, Zea mays
  unsure (1)..(280): unsure at all Xaa locations
  Clone ID: MRT4577_132446C.1.pep
SSLVHYFKLLVLLALARLTMHVPDEDVLLSLGALRLDGHFSFHDVSAMARDFGNQCSFLPAAVLHPGSVSDIAAIVRHVFSLGEGSPLTVAARGHGHSLMGQSQAAQGIVVRMESLRGPRLQVNDAGVSPPSVDAPGGELWINVLRETLKHGLAPKSWTDYLHLTVGGTLSNAGVSGQAFRHGPQVSNVNQLEIVTGRGDVVTCSPDDNADLFYAALGGLGQFGIITRARIALEPAPXMVRXWIRVLYSDFESFTEDQEMLIMAETPLTTXEGFVIKNRT

SEQ ID NO: 220243 - protein, 91 aa, Zea mays
  Clone ID: MRT4577_132447C.1.pep
NQSKTRCVDPMSYSYAISVSDSARLYISGRSSVVSEKLSQVVTSAPGQRDALCAAVKIDLQLHRRCARSARGKNCPFCLRWDALPPPRGPN

SEQ ID NO: 220244 - protein, 262 aa, Zea mays
  unsure (1)..(262): unsure at all Xaa locations
  Clone ID: MRT4577_132448C.1.pep
MKPPSSLVHYFKLLVLLALARLTMHVPDEDVLLSLGALRLDGHFSFHDVSAMARDFGNQCSFLPAAVLHPGSVSDIAATVRHVFSLGEGSPLTVAARGHGHSLMGQSQAAQGIVVRMESLRGPRLQVNDAGVSPPSVDAPGGELWINVLRETLKHGLAPKSWTDYLHLTVGGTLSNAGVSGQAFRHGPXGRGDAVTCSPDDNADLFYAALGGLGQFGIITRARIALEPAPKMXXRWIRVLYSDFEXFTEDQRXLIMAENSFD

SEQ ID NO: 220245 - protein, 63 aa, Zea mays
  Clone ID: MRT4577_132449C.1.pep
GGGTPLGGCIYGNKLGGGLVGFTPGKTLFLGAYLYFYRFLNFSFHRPFFIKNGFFGNHIDELP

SEQ ID NO: 220246 - protein, 66 aa, Zea mays
  Clone ID: MRT4577_13244C.1.pep
PDSYSTSSGRLIVQRPGGDLKDVLRLNSLTSVATIMFRDHHCYLEVNIRHGKQKVHNDDEMGGATK

SEQ ID NO: 220247 - protein, 406 aa, Zea mays
  unsure (1)..(406): unsure at all Xaa locations
  Clone ID: MRT4577_132450C.1.pep
MKPPSLVHCFKLLVLLALARLTMHVPDEDMLSPLGALRLDGHFSFHDVSAMARDFGNQCSFLPAAVLHPGSVSDIAATVRHVFSLGEGSPLTVAARGHGHSLMGQSQAAQGIVVRMESLRGARLQVHDGFVDAPGGELWINVLRETLKHGLAPKSWTDYLHLTVGGTLSNAGVSGQAFRHGPQVSNVNQLEIVTGLKRTLKXQPEVTELLSRLRIINRTGVLNNWRASFKPQDPVEASHFQSDGRVLYCLELTKNFNSDDTDTMEQVNLEFLDRVHTSELKLRAQGLWEVPHPWLNLLIPRSSIRRFAKEVFGKILVGFLSSAPSLSGYGSIAHSMNLNKQIVEFCEEAGIGMKQYLAPYTTQQQWKAHFGARWETFERRKHRYDPLAILAPGQRIFPKASLPLPL

SEQ ID NO: 220248 - protein, 103 aa, Zea mays
  Clone ID: MRT4577_132451C.1.pep
GGLSAVLLVVLDVAPRRRRVEWCSFSSSCWTARTRIVIWMSLQVDRFGSWMGSKSLSPSIYALTRSIGRPFSSLRSRAVLVSAWATPVLWSRKPCHRAGAGSL

SEQ ID NO: 220249 - protein, 102 aa, Zea mays
  Clone ID: MRT4577_132452C.1.pep
KIGELLDLDVCMEILDILYETEDTSMCRDFASAELVFLEVAAYAISVPKQTWEFPILPWVRFATSYDEEEIMKIVLTILLHVLKLDGIEEKGKGRFDARCLS

SEQ ID NO: 220250 - protein, 47 aa, Zea mays
  Clone ID: MRT4577_132453C.1.pep
ISTINFLSTNNYSWTHGTVFRVMNSDTLDLGGERRGPARRGRCMGRL

SEQ ID NO: 220251 - protein, 47 aa, Zea mays
  unsure (1)..(47): unsure at all Xaa locations
  Clone ID: MRT4577_132454C.1.pep
MVKCSTVPTNPTKATKAMGRDLRVHFXNTRETGGRLRKPALTKATWV

SEQ ID NO: 220252 - protein, 67 aa, Zea mays
  Clone ID: MRT4577_132455C.1.pep
KLLTAWLGFGANKQGRPPRSLRYYSNNSSNVKYSSKSTGPFTLLLLYFYPITTPSLRLISPHAAVVA

SEQ ID NO: 220253 - protein, 31 aa, Zea mays
  unsure (1)..(31): unsure at all Xaa locations
  Clone ID: MRT4577_132456C.1.pep
TLPNNSIRRTXTHNNPAYLDTQLNTRKNQRP

SEQ ID NO: 220254 - protein, 78 aa, Zea mays
  unsure (1)..(78): unsure at all Xaa locations
  Clone ID: MRT4577_132457C.1.pep
ERGGKTDQMSLGGRXLTGATLCFSNGERGGLPPRVLVEELTHNQLLWVCCNEFVLKCANAPESVHSLKVQPQIFSIKD

SEQ ID NO: 220255 - protein, 75 aa, Zea mays
  Clone ID: MRT4577_132458C.1.pep
GPPPVPPKGLAGCKVLPLSTHVFGSPSVAAMYCSSPLAPWIRVCCGLLSLSPPGGARPPLSIIASPLVFHVHPSE

SEQ ID NO: 220256 - protein, 189 aa, Zea mays
  unsure (1)..(189): unsure at all Xaa locations
  Clone ID: MRT4577_132459C.1.pep
KPNYGKLXTLRRYIPXIEQELEDLHAQMKLAGEHQDKMQGKHVASISHNTNSMPARKEPCGSIRNKTVSDLLSETVEGSKRLEDESSAIEDDSASESLSFTESEDLSDIFETESEEQEEDNKDRPLYLDRLDKFPSGKNDNEPDDFEEHLRRIASLSDKTDSPSKELKVSELDEIDKIFLRASSLLKKR

SEQ ID NO: 220257 - protein, 58 aa, Zea mays
  Clone ID: MRT4577_13245C.1.pep
QSVNACFPCYILSRSCMVLPSWLNNENNAEHIRLNANQNIGRAVFRTQSCVHVHATSY

SEQ ID NO: 220258 - protein, 88 aa, Zea mays
  Clone ID: MRT4577_132460C.1.pep
SFPPASVFGVDIFSQGNGKPQVVLTILGWVWCLLNPRVFGHNLCPSLLTLLLPFRIFHMIVNFPPFCRFDPNFGVPSFGPCLFWLKIP

SEQ ID NO: 220259 - protein, 102 aa, Zea mays
  Clone ID: MRT4577_132461C.1.pep
GVFPLHFPLVFCVEFCPGFIFAPGCSFALFKPIFYTSPLRETWSPLRGRVRIFGVPPGSAVVSLGRPLFLFPIPCFGLRGPRFGGVGGAFPPPNNNNPQAPK

SEQ ID NO: 220260 - protein, 39 aa, Zea mays
  Clone ID: MRT4577_132462C.1.pep
ISLKKTFIKVPPQKARTAHIFHPPTPILFFPPPPVPGRL

SEQ ID NO: 220261 - protein, 39 aa, Zea mays
  Clone ID: MRT4577_132463C.1.pep
VSLSSSMRFSSTGPCSWPDIVTCQVCFQRHSLTDINIGI

SEQ ID NO: 220262 - protein, 349 aa, Zea mays
  Clone ID: MRT4577_132464C.1.pep
MADSPSFRRYPLASSVDLVRWLPSSSISPSGRLLAAAVHDPTSGSFASSIRLLPLSDPVSRLASVPLPSRATALRCSHAALAAATSSGSLHFVPSSFDSDAAVSVPGGAGFHVGPVRGLDCGGEEWVTAGEDGRVHVVGGVADGRVVTRRVWDGKGMSGYEAARWASPVEFATGGAGCGVQWWDRRKGDAIVAQCNGIWGRGIVTGMVHSIDIHPSRKHICVVGGSSGTVFAWDLRQPQEPIPISVLGLNETAEPVCESEVWEVLFDTYTKSSDIISSASARILPVMMCSEDGILAVVEQDKRPLELLAESCAINSFDIDPQNPSDVVCALEWESVGVLTRGRDAMSEE

SEQ ID NO: 220263 - protein, 103 aa, Zea mays
  Clone ID: MRT4577_132465C.1.pep
KNWGCICFGGVISVLLHFYYFVGAFNICQRFLRGPAPKQMNVAQKKRTGNKKNFRHSWGARPLSILCKRLAQEFKTGNLIGSPLSPPYRRPPHLQPQDRFREG

SEQ ID NO: 220264 - protein, 115 aa, Zea mays
  Clone ID: MRT4577_132466C.1.pep
MCLVVSNDGFRCLKKFSFVGWVNMMFKEGAVPALETLEFQIIAHEMHTARRFGPPDFGNSHLSTLRNLVVNVHCEGSRVKEVEAVEAAIQESASTLPNHPTLGLHRFLESELVKK

SEQ ID NO: 220265 - protein, 60 aa, Zea mays
  unsure (1)..(60): unsure at all Xaa locations
  Clone ID: MRT4577_132467C.1.pep
FISYARLPIQFGIGAAGTTTTERVAGDGDEPALGGVASXVEXGKKAARALGSAIIWVGGS

SEQ ID NO: 220266 - protein, 164 aa, Zea mays
  unsure (1)..(164): unsure at all Xaa locations
  Clone ID: MRT4577_132468C.1.pep
GTATVDLVVERIEMARVDVXYRCSXAGLAWARDDHSLNKDFSNYGEDLXSKSILERXTQRSHGXEFXTFSTEEAXRTAIQGMNGMDVDGRNITENEAQCQCGREGGGXGYCGGYRAVRSTAACRHQGQGPLHAGPFIWKRYALMSGALYSTVSQNIGATMGSLT

SEQ ID NO: 220267 - protein, 84 aa, Zea mays
  Clone ID: MRT4577_132469C.1.pep
SIHASKLSHIMRGRIIICFFTLVVLLSLSRLALCLFKIKQLGQVYNMHQIVAHRYSCSPVSMRSRYRGPVCRGNCGSGCSRALG

SEQ ID NO: 220268 - protein, 61 aa, Zea mays
  Clone ID: MRT4577_13246C.1.pep
RFIQLAHPQNPKQRPMYISFRCEFETSLRARSKSLLKGSTEAPKTGYPPDAPTCALASLSS

SEQ ID NO: 220269 - protein, 86 aa, Zea mays
  unsure (1)..(86): unsure at all Xaa locations
  Clone ID: MRT4577_132470C.1.pep
LGALQRENLFSDKHVQPXCQIYINTRNCNFXALFRAHHPREPIISTTNCALSPLRLPLRPGHPICNFYNRYCMCKIRPDCTLHHPM

SEQ ID NO: 220270 - protein, 80 aa, Zea mays
  Clone ID: MRT4577_132471C.1.pep
CIISSSTIAMCNAHDFEDRRRHSKHISRISRLHDSQSYQSPACSHSNALHPCALPPCCISQHPARRPSAPRSAHASADAW

SEQ ID NO: 220271 - protein, 128 aa, Zea mays
  unsure (1)..(128): unsure at all Xaa locations
  Clone ID: MRT4577_132472C.1.pep
MSWEAYIDDHLLCYIKGQHLXAAPSIEHNGSVWAQNENFPXLSLTRMPAMIKXFDEPXGTLAQSALFVERTNYMVIQGEPGGAFRSKKGTGCITIKKTVLTLIIRIYDAPLTPGQCDMVTDMLCDYLI

SEQ ID NO: 220272 - protein, 61 aa, Zea mays
  Clone ID: MRT4577_132473C.1.pep
GYKHSVANKVQTKRKSDRIEYLKNNDKVDRVVFKIQCQGKPRLRILFEKNIFLCPKDGRAR

SEQ ID NO: 220273 - protein, 60 aa, Zea mays
  Clone ID: MRT4577_132474C.1.pep
TRLSEASLFFAPPWPFFFFSAPFFFFKKKKKKKKKKKKKKKKKKKKKKKKKNKKKKKKAA

SEQ ID NO: 220274 - protein, 81 aa, Zea mays
  Clone ID: MRT4577_132475C.1.pep
WRSIFMAMRVYSVFPPSFICRQVDTGSLITLCHLLYHRPCGLLCADGLYLPLFCMPSSYISDILFSCAYKENWTKKKKKNK

SEQ ID NO: 220275 - protein, 79 aa, Zea mays
  Clone ID: MRT4577_132476C.1.pep
CPRATDHCDGRARKPNNPQSSPRLLPDLFKLFHPHGFNRLKRVEKGAVKSSEINPTYCAPKASQVYLRYASVCVSWGGL

SEQ ID NO: 220276 - protein, 122 aa, Zea mays
  Clone ID: MRT4577_132477C.1.pep
PRPSSPAFVPMAAFPWRAPGPCSSFTWPHPGSPSAMVLTPQRFSCSPYHDFRVHRQPQSRRAAPRARSPLSSFPRAAGRAPLQLPVRQNEWTSARRVLGRSAPMFLPDIDCLIWGERHTHGV

SEQ ID NO: 220277 - protein, 195 aa, Zea mays
  Clone ID: MRT4577_132478C.1.pep
MGSYHYTSQFVDSNPKPSHKPKTTVQIPIKSPREGSPDAVAAAKIQAALRGYLVRRHAAAVRGADAEATRLERLLRRQETVDAVRGDERERARFSEALMAVLLRLDAVPGRYPAVRDARRAVSRRVVGLQEVFDAVVAAPAAQTCGVPASLEQVLEGIWGVGEAPVPVPPSPAMAAAEEEVRRGGSYWARFFGGV

SEQ ID NO: 220278 - protein, 49 aa, Zea mays
  Clone ID: MRT4577_132479C.1.pep
YELESYEMLSWKKTNHKKGLEETSVDIVQDLHKARITNKVLSSSHSNPR

SEQ ID NO: 220279 - protein, 96 aa, Zea mays
  unsure (1)..(96): unsure at all Xaa locations
  Clone ID: MRT4577_13247C.1.pep
HPNVSSEFGSSDQPQPRTRTGWSPINRHYCSCNQLFFHVFASYAQGVHTRTPXVAHSDLNPLPHNTQGTSTRGGTRQQQRLGSPRWWRSSPPPPFV

SEQ ID NO: 220280 - protein, 557 aa, Zea mays
  Clone ID: MRT4577_132480C.1.pep
MAAPPTEDCGWLLYLSLAAKCGDPSRLLGLAAVFVGACVVTSLLHWACPGGPAWGRYWWTRRGGLGIVRAAIPGPRGLPVVGSMGLMTGLAHRKLAAAAAAAGGQGSSRRRRLMALSLGETRAVVTGDPDVARELLGSAAFADRPVKESAYGLLFHRAIGFAPHGAYWRALRRVASAHLFSPRQVAASSAQRAVIARQMVDAVTTAAPAPAPAVVVARRFLKRASLHNVMWSVFGRRYDLLLLAADGEELKALVDEGYDLLGQLNWSDHLPWLARFDLQRTRARCSALVPRVNRFVGNIIDEHRARLGLGDTGGVTDFTDVLLSLQGVDKLSDADMVAVLWEMIFRGTDTVAVLMEWVLARLVLHQDVQSKVQEELDRVVGPPGQAASVTESDTASLVYLQAVIKEVLRLHPPGPLLSWARLATSDARVGGYHVPAGTTAMVNMWAITHDPSVWAEPTEFRPERFVGASAGAGAGAGAEDVPMIMGSDLRLAPFGSGRRSCPGKSLALATVGFWVATLLHEFKWLPPCRGVDLSEVLRLSCEMAAPLEARVVPRHAV

SEQ ID NO: 220281 - protein, 364 aa, Zea mays
  unsure (1)..(364): unsure at all Xaa locations
  Clone ID: MRT4577_132481C.1.pep
PKFIGWLAISFAKEXSFLYMGRLLEGFGVGIISYTVPVYIAEISPQNMRGALGSVNQLSVTFGIFLAYLLGMFIPWRLLAVIGALPCTMLIPGLFFIPESPRWLAKMNLMEDCETSLQVLRGFGTDITTEVNDIKRAVASSSXRTTISFQELNQKKYRTPLLLGIGLLVLQNLSGINGVLFYASSIFKAAGVTNSDLATCSLGAIQVLATGVTTWLLDRAGRRILLIISTSGMTLCLLAVSVVFFLKDNISQDSNSYYILTMISLVGIVSFVITFSFGMGAIPWLMMSEILPVSIKSLGGSIATLANWLTSFAITMTTNLMLTWSVGGTFLSYMVVSAFTIVFVVLWVPETKGRTLEEIQFSFR

SEQ ID NO: 220282 - protein, 44 aa, Zea mays
  Clone ID: MRT4577_132482C.1.pep
PSSWRVQMKPWNVYRKMPAECLHAYLDFPLKLALNYSLYLTLKF

SEQ ID NO: 220283 - protein, 103 aa, Zea mays
  unsure (1)..(103): unsure at all Xaa locations
  Clone ID: MRT4577_132483C.1.pep
IIPLLVLSLYHIIHNHXNQGVLYLTFNVNKMLSDMHYHLFSSCLSNYNDXNNKXSSLETNHTLTXESLXSSSSFQPFTSHTSLLICHPSSTNLIANIILLIHL

SEQ ID NO: 220284 - protein, 127 aa, Zea mays
  Clone ID: MRT4577_132484C.1.pep
MAAAARAGFRRLFSVSAFAAPPPPAARPAADPCNNLFVSGLNKRTTSEGLKEAFSKFGQVIEARVITDRISGYSRGFGFVKYATVQEAGEAIEGMDGKFLDGWVIFAEYAKQREATQPSQQGAPAYD

SEQ ID NO: 220285 - protein, 51 aa, Zea mays
  Clone ID: MRT4577_132485C.1.pep
KKKKKKKKKKKKKKKKKKKKKKKKKKKKKKKKKKKKKKKKKKFCTLGPEPL

SEQ ID NO: 220286 - protein, 129 aa, Zea mays
  Clone ID: MRT4577_132486C.1.pep
MAAAARAGFRRLFSVSAFAAPPPPAARPAANPCNNLFVSGLNKRTTSEGLKEAFSKFGQVIEARVITDRISGYSRGFGFVKYATVQEAGEAIKGMDGKFLDSWVIFAETPHNHHNKEHQLMIEVAIHGR

SEQ ID NO: 220287 - protein, 114 aa, Zea mays
  Clone ID: MRT4577_132487C.1.pep
IVDKKYQIPVSVPQQDQKNTFLLDPFAESSGFIINHHQKWSSFLHWESQRCACYQSHGHHVLGRHTYHHVGTPNLPSHMPAPRCFNKCTSTKNATRTDTKCTNTTVTEMYHHHA

SEQ ID NO: 220288 - protein, 206 aa, Zea mays
  Clone ID: MRT4577_132488C.1.pep
ITDTAYVGFSSASSIVLVKHYVLGWSFALDGAAPALDYDKLPKLPRIGPKPRSKALTVALPIATTVSVLAAVALGFVLLRRRRRYAELREDWEVEFGPHRFAYKDLYDGTGGFRDKRLLGAGGFGRVYKGVLPGSGTYVAVKKVSHESRQGMKEFVAEVASIGRLRHRNLVPLLGYCRREGELLLVYDYMLNGSLDKHLHCHGDKP

SEQ ID NO: 220289 - protein, 138 aa, Zea mays
  unsure (1)..(138): unsure at all Xaa locations
  Clone ID: MRT4577_132489C.1.pep
AQAMATQASAATRHLLAAAWAPAAKPRQLSSQLALPSXSSRGPGGGGGVSLXAXEAPKGCGGPQFDPTPPSPIFGGSTGGLLRXAQGEEFYDITGTSPKGQVCEMPTGGAAVMRGGPXLLQLXARTEQGLPPGVRLRS

SEQ ID NO: 220290 - protein, 131 aa, Zea mays
  Clone ID: MRT4577_13248C.1.pep
QCWQVCRAWSLIWCYLQQFLAGWPDFVKNRLRTMAASSLHSCHAFFSLMLSACFKLGSRTHGPGSCGGHSFSSHTLISERRTPFFPWMVGWFQCVATCDLPTMRRSQKTAHTRVSPGKRERDGVCHQGVKP

SEQ ID NO: 220291 - protein, 75 aa, Zea mays
  unsure (1)..(75): unsure at all Xaa locations
  Clone ID: MRT4577_132490C.1.pep
SNIYIVGDRFRWRKYSQKLLXGDPDXRIYHKCVSAWCSVRKHVYARFLCARAVISTHKGKHQPLRARGPRTKHNR

SEQ ID NO: 220292 - protein, 79 aa, Zea mays
  Clone ID: MRT4577_132491C.1.pep
PPYLKARVCFQAKAPPLFGPKNVVPLSPPVILTMIIRGDFPASPFFKLPEMFLPFGWIKFWFKFILYARAAIGSGGNHK

SEQ ID NO: 220293 - protein, 111 aa, Zea mays
  Clone ID: MRT4577_132492C.1.pep
RGQQCWGWVSCFAPSPPCPGGEVPSPGCCGGSAPFWAPFPAPPGRGLSCGPLLDAGGVVCKGGGPPGAMNHFVVSPVCPNPPLKDSLALCCGACPALCYFLCEWPFFLRGP

SEQ ID NO: 220294 - protein, 75 aa, Zea mays
  Clone ID: MRT4577_132493C.1.pep
MVILHRRIVRQVMHHMCQRSFQPVYVQVEYVQHTVKSYKLCISVEHQRRYRPVMVRPLQIHHSVFIKRGLASAFF

SEQ ID NO: 220295 - protein, 33 aa, Zea mays
  Clone ID: MRT4577_132494C.1.pep
LIAKLGLTNKNVHRFYLSGQAFQLKCGEHFYFI

SEQ ID NO: 220296 - protein, 228 aa, Zea mays
  Clone ID: MRT4577_132495C.1.pep
MAGSAPATAMDKTSFATTCSLLSQYVKEKKGGLLQGLGALAMAPAAGGEGAFRPPTTMNLLSALDDAPAEERSEKATAGEPKHQDKCTGGNPREEAAGEEEEEAQQLTIFYGGRVVVFDMFPSAKVEDLLQIMSPGGDGVDRAGGATVPTRSLHRPSHDSLSDLPIARRNSLHRFLEKRKDRITAKAPYQQVNSSVVGVEASKQAAGAGVEKPWLGLGQEATTAKLEM

SEQ ID NO: 220297 - protein, 82 aa, Zea mays
  Clone ID: MRT4577_132496C.1.pep
ILIDCFGVSVIGKVKDFLGEIARANQKLQLDAQNKPPVEYDIEALTGNEEEYIEMDLLLGVADLHSEQAVEAAEATINGRQT

SEQ ID NO: 220298 - protein, 98 aa, Zea mays
  Clone ID: MRT4577_132497C.1.pep
TIPFCLSHIDRALPIVAGEGAFRPPTTMNLLSALDDAPAEERIEKATAGEPKHQDKCTGGNSREEASGEEEEEAHQLTILYGGRVVVFTCSPRQVEDC

SEQ ID NO: 220299 - protein, 120 aa, Zea mays
  unsure (1)..(120): unsure at all Xaa locations
  Clone ID: MRT4577_132498C.1.pep
VEYVPNATSPPLTQVMQLNKSLLSLSIKVVFITGRXVQQKVAXTIKNLWSIGXHTWDKLVLNPWSLGSSVVPSSQESGTKLVHARCRIVGNIGXDQWSDLIGATEGVRTSKVTDPMYYVG

SEQ ID NO: 220300 - protein, 193 aa, Zea mays
  Clone ID: MRT4577_132499C.1.pep
MAGSAPATAMDKTSFATTCSLLSQYVKEKKGGLLQGLGGLAMAPAAGEEGAFRPPTTMNLLSALDDAPAEERSEKATAGEPKHQDKCTGGNPREEAAGEEEEEAQQLTIFYGGRVVVFDMFPSAKVKDLLQIMSPGGDGVDTAAGATVPTRPGNGNTSTCRLHKCLFFLCCATDLPIARRNSLHRFLEKRKDR

SEQ ID NO: 220301 - protein, 129 aa, Zea mays
  Clone ID: MRT4577_13249C.1.pep
PAVMAYLAPETAASSLRKPIYVSASSRRRSFLPDDVKAIDSSEHPILSSLRMAASDAARIAATSPKRRCTHTVPHAPLTPLEITMPTRQSDPTHLTNHQETKNLYCLSLAYGSGERTGIATCTDADVYQ

SEQ ID NO: 220302 - protein, 48 aa, Zea mays
  Clone ID: MRT4577_1324C.1.pep
DLAQESTPDISSSSSAGDVVFVIRASQMQVGNRIRSRICQIRGQREIL

SEQ ID NO: 220303 - protein, 52 aa, Zea mays
  unsure (1)..(52): unsure at all Xaa locations
  Clone ID: MRT4577_132500C.1.pep
QPRXPVLXDRPDPAIPLSLXSLXLTLRSLVPTRQXXAGLXXLSLPQDAXQGP

SEQ ID NO: 220304 - protein, 262 aa, Zea mays
  Clone ID: MRT4577_132501C.1.pep
MTKETQQEARSQKRKATIPTPQEEELDQEIRDLEAIHQQVQRKREKMLRLADLQKRINKATEKMCHLTQNDQDRRPQHRELRQESPFNDDEWYGDFHQGNFAFDNASPLAAELQATLWPPSYKAPQLPMYDGHSDPKQFLMRFLRLRAQAPTVPNEIVIEAMIKGLRPEPTAQYFASKALQTLEKLLQKMDEYIRADNDFRQRREEAYRYSKLARGFGWRFHPMHVSQQLEGHHHAQQQRDFQEESKARTVNGIVPESKHIY

SEQ ID NO: 220305 - protein, 61 aa, Zea mays
  Clone ID: MRT4577_132502C.1.pep
TLCNACGVRYKSGRLLPEYRPACSPTFVSSIHSNSHRKVLEMRRKKEGDMVATAAPAVASF

SEQ ID NO: 220306 - protein, 85 aa, Zea mays
  Clone ID: MRT4577_132503C.1.pep
KLPPPPLNKKVFNNPVGVPPLNQIPLSHALLLGWGVGKKTDPPKINLAGPGALLLEPRAFVCVLDAKKVPFFPKKKNFQALFFPP

SEQ ID NO: 220307 - protein, 110 aa, Zea mays
  Clone ID: MRT4577_132504C.1.pep
FGAPPGKIFLPPSRFSGSFPPSWVFGPWPPPKGFFWEGFQNRCFQTLCARYLSSRENFGLAPAPVFLIKIPPPPFFGFKLTPFFPPVSPFQKTFFFLIFPNLFGALPFFF

SEQ ID NO: 220308 - protein, 291 aa, Zea mays
  unsure (1)..(291): unsure at all Xaa locations
  Clone ID: MRT4577_132505C.1.pep
VPRSRPGRDSRRRQCSRNERSAATAAASRERRDDADKAAAVSLPFALARDTRAPPPPASRCLQNLLLPSSSRSPXSRPRPRLVSPSTDLRRLTARIVDLTRRRQLAQIMEEVEAARRRVRGGGLLNTIVMNAVLEACVRCGDVDRALRLFEEMRGPMGCGVDDVSYGILLKGLGIARRIDEAFEILESIEKDSSIGGPRLSPHLICGFLNALIEAGDMRRANALVARFRMVLYEDHSVLLYNLLMKGYIKSNFPLGALTVKDEILRQGLKPDRWTYXTIISACGKSAEIIK

SEQ ID NO: 220309 - protein, 117 aa, Zea mays
  Clone ID: MRT4577_132506C.1.pep
IIIICMVVDRCASAVAGVALAVGSPPAVEGGLLGMSRRPRITQASSFFFGPSVRTSVASATVVMSYRSGYLFALSQLDSQSQFYPQLQDMLDIVVQKKLALFKHHFNKSSKLLGSRP

SEQ ID NO: 220310 - protein, 90 aa, Zea mays
  Clone ID: MRT4577_132507C.1.pep
KHGGMHAKGRDKDAVENQGKAAGSGTECRVTQHPPFLFLPFTQSIPIPPIHADASVHLPGQQRPSQGQQQQQQRIRRCPCKLRSFCSLPP

SEQ ID NO: 220311 - protein, 359 aa, Zea mays
  Clone ID: MRT4577_132508C.1.pep
MALTTSTNNQALLDAQLELWHTSFAFIKSMALKSAVDLGIADAIHSHGGNATLPQIVSRAALHPSKIPCLRRLMRVLTAAGIFSAAHRSPDDGGGELVYGLTPASQLLVGGSSSLAPFMSLVLHQVYVSPFLGLGTWLQHERSDPTLFEMTHGLTAWDLNDHKPAFGELFNQGMVCDSSFVMDIVVKECGDVFRGLSSLVDVAGGLGAAAVAISTAFPHVQCSVLDLPHVAANAPANTSVKYIAGDMFESIPPADAVFLKWVLHDWGDADCIKILKNCKKAIPSRDAGGKVIIVDMVVGGQSSNIKHKETQVLFDLFIMTINGAERDEHEWKKIISEAGFSDYKIIPVLGVRSIIEVYP

SEQ ID NO: 220312 - protein, 74 aa, Zea mays
  Clone ID: MRT4577_132509C.1.pep
HRAADQVLSPPIKTKASTMPQDSLSKMTVIPLSGLSWLGIKSNLSTGHVSVVCYNTSIRGNGVVSHTAIGIGAQ

SEQ ID NO: 220313 - protein, 96 aa, Zea mays
  Clone ID: MRT4577_13250C.1.pep
LPVSTGRSRGARGCQTGACRPSPARGRLLAASGRPLLGGTGRTVGTSQPGPGPAGSSVFDKNPPRWVTRCRKEHCNSTLLVGASCRGGPYLVEGDS

SEQ ID NO: 220314 - protein, 46 aa, Zea mays
  Clone ID: MRT4577_132510C.1.pep
ARGQHPSSDVGRLRARVGRIFQRQRCGELHERAGPGEERADDADGG

SEQ ID NO: 220315 - protein, 37 aa, Zea mays
  Clone ID: MRT4577_132511C.1.pep
CLSCNTSYNLISRSPLQPVMLRKQENIDVSVFGRRRR

SEQ ID NO: 220316 - protein, 43 aa, Zea mays
  Clone ID: MRT4577_132512C.1.pep
SRNSPTRFTKENSANKMHGDVMGSALSYKESRHLDEWHDSSQI

SEQ ID NO: 220317 - protein, 61 aa, Zea mays
  Clone ID: MRT4577_132513C.1.pep
KLIFRKMPKKKTDQRGGRFKGSKYTSPGSQAWRLFFGELIINMGGRGFSTLGQGKPFRSPI

SEQ ID NO: 220318 - protein, 92 aa, Zea mays
  Clone ID: MRT4577_132514C.1.pep
LIDNTLLACLNNVTDGCVCRSLGKLEYIEPCYTVKDKIGYSMITDSEEKGLITPLWSVIIELSISNTGIGLAYMAADYGYKLTLTMPLSMSM

SEQ ID NO: 220319 - protein, 67 aa, Zea mays
  unsure (1)..(67): unsure at all Xaa locations
  Clone ID: MRT4577_132515C.1.pep
RLKNASKSISAETRKMVNYXLSRVKSREIXWRLEGILTCKSIFKLGHRGERLIEPSSSWFPPKFLSG

SEQ ID NO: 220320 - protein, 77 aa, Zea mays
  unsure (1)..(77): unsure at all Xaa locations
  Clone ID: MRT4577_132516C.1.pep
GQCGLVVALGPGPLYGSGLPRPRLFPGDRVDTAWYVTDPLFEWAREAHWAMGGISLKRVRXQGRIEGSRDKLRTRAH

SEQ ID NO: 220321 - protein, 60 aa, Zea mays
  Clone ID: MRT4577_132517C.1.pep
QHREHSSVPTLAAKIFSLHVLTWASACAATAAILRQCSAAPMASFFRPYLSPAVSSVREN

SEQ ID NO: 220322 - protein, 342 aa, Zea mays
  Clone ID: MRT4577_132518C.1.pep
MEKMLHSAPAHGRLPECFIFPADKLPQAKATSATVSLPIVDLSLGRDEVRRAILEAGKEIGFFQVVNHGVSLEAMQDMETVCQEFFRLPAEDKAGLYSEDTGRATRIYSSTMFDTGGEKYWRDCLRLACSFPAVGDSAAAWPDKPRRLREVVERFTVQTRGLGMEILRLLCEGLGLRPDYLEGDISGGDVVLHVNHYPPCPDPNATLGLPPHCDRNLLTLLLPSMVPGLEVAYRGDWIRVEPVPGAFVVNFGCQLEVVTNGILKSIEHRVMTNLGVARTTVATFIMPTTDCLIGPAAEFLSDDNPPCYRTLTFGDFKRIYSVVKLGSSLNLTTNLKTVQKEL

SEQ ID NO: 220323 - protein, 342 aa, Zea mays
  Clone ID: MRT4577_132519C.1.pep
MEKMLHSAPAHGRLPECFIFPADKLPQAKATSATVSLPIVDLSLGRDEVRRAILEAGKEIGFFQVVNHGVSLEAMQDMETVCQEFFRLPAEDKAGLYSEDTGRATRIYSSTMFDTGAEKYWRDCLRLACSFPAVGDSAAAWPDKPRRLREVVERFTVQTRGLGMEILRLLCEGLGLRPDYLEGDISGGDVVLHVNHYPPCPDPNATLGLPPHCDRNLLTLLLPSMVPGLEVAYRGDWIRVEPVPGAFVVNFGCQLEVVTNGILKSIEHRVMTNLGVARTTVATFIMPTTDCLIGPAAEFLSDDNPPCYRTLTFADFKRIYSVVKLGSSLNLTTNLKNVQKEL

SEQ ID NO: 220324 - protein, 66 aa, Zea mays
  Clone ID: MRT4577_13251C.1.pep
YNNHSTIITGLGSPTMFKPYNSYCSIGSGSGSHIQVFLSRIIHLHVPKPLFFFVGFFYFLQLSTFT

SEQ ID NO: 220325 - protein, 249 aa, Zea mays
  Clone ID: MRT4577_132520C.1.pep
MAAAGRNAGVLALFDVDGTLTAPRKGVTPEMLEFMKQLRQHVTVGVVGGSDLVKITEQLGSTVITDYDYVFSENGLVAHKNGQLIGTQSLKSFIGEDKLKEFINFTLHYIADLDIPIKRGTFIEFRSGMINVSPIGRNCSQEERDEFEKYDKVHNIRPKMVSVLREKFAHMNLTFSIGGQISFDVFPQGWDKTYCLRYLEEFQEIHFFGDKTYKGGNDYEIFESERTVGHTVTSPSDTAQQCRSLFLSK

SEQ ID NO: 220326 - protein, 249 aa, Zea mays; identical to SEQ ID NO: 220325
  Clone ID: MRT4577_132521C.1.pep

SEQ ID NO: 220327 - protein, 270 aa, Zea mays
  unsure (1)..(270): unsure at all Xaa locations
  Clone ID: MRT4577_132522C.1.pep
IRHEAEGRSRWLPPAAESFLRPLPASNSRFTVGAVGGTLQVAAPGSGKFPAAPALFHHRGFSGRETLPVHHGDCRAPPGACFMVTSPMLGPIRVSLVCSASPNHHRPRISDISQLQKEGSSRGKGRSYQDKDDSENIDXYDSDIMFSSNGPPISLASTSRPQDTSAPGEREMEIVELFKRVQALLRARVKGREKKPEPAKVHGERGSVDSLIKLLRKHSVDQRRKSGDEKEQNFDVMRRSNDSGNRRGSTIFXKSDIQEEQKKAPPAPFQ

SEQ ID NO: 220328 - protein, 50 aa, Zea mays
  unsure (1)..(50): unsure at all Xaa locations
  Clone ID: MRT4577_132523C.1.pep
TIRRVENLNXFRNEEGDCPTLVCTDLAARGLDLDVDHVIMFDFPSNSVCV

SEQ ID NO: 220329 - protein, 57 aa, Zea mays
  Clone ID: MRT4577_132524C.1.pep
YRLDPLSDSAEPRAVHESVHSPHRGPQELHLLLAYALLQDPCYFLLLILIHFFISFF

SEQ ID NO: 220330 - protein, 69 aa, Zea mays
  Clone ID: MRT4577_132525C.1.pep
EGHNNDGPFFFNVFCENPRPIYQGACASPVRLDGRRVDLEFDHFTVIFTNHNTGGFDLRWLGSQYLEIN

SEQ ID NO: 220331 - protein, 54 aa, Zea mays
  Clone ID: MRT4577_132526C.1.pep
MCALPDCHKRLETALADLKATLAELKESNEQGAEIGEAESTIAEVEAVVKPAED

SEQ ID NO: 220332 - protein, 143 aa, Zea mays
  unsure (1)..(143): unsure at all Xaa locations
  Clone ID: MRT4577_132527C.1.pep
FGSRPFASSLVFITLHVAALGYYIKGLMTPRLYKVAMTLVISVGSPVCSAVLTILVASVASNPTKGSSGHSLSLLDPSYACKYIPIIASVREHQPATWPSYLMDXLNELAFLSPAGMISCLLPMADASIIMGLYLDTGLYFFG

SEQ ID NO: 220333 - protein, 67 aa, Zea mays
  Clone ID: MRT4577_132528C.1.pep
GALSKLKPVYFFFKKKHCFFPCKKWAGPILHRLKWVIAFPRSFTAWAPILHGFCSQKKKPGSLFLSI

SEQ ID NO: 220334 - protein, 261 aa, Zea mays
  Clone ID: MRT4577_132529C.1.pep
MASPSSTSNNSAFSPVAASAGTTMPGAGAPCAACKFLRRKCLPGCVFAPYFPPEEPQKFANVHKVFGASNVTKLLNELLPHQREDAVSSLAYEAEARVKDPVYGCVGAISVLQRQVHRLQKELDAAHAELLRYACGDVAAGIPTALPVVSAAPRLSTAPMTTTSPGQFAAGMYGSGRRLGVVDGLAAPPLPPSGGGGGCYFMRNHHNNVVISSSPGADVAPVLPYASVANWAVNAISASTTTTSGSESIGLDHKEGGDSSM

SEQ ID NO: 220335 - protein, 183 aa, Zea mays
  unsure (1)..(183): unsure at all Xaa locations
  Clone ID: MRT4577_13252C.1.pep
PTRPKKKKKKSGSEENVQVEDKQVAGKDPKPDDENKTAMDIENGEDGKASADDAVVSKKRKLQEVEGSEPPAKEDITATEDDVKXPSTASKSNKRQKLSEPKIAFQRVKTEGIKFADERLQDNSYWAKGGADSGYGAKAQEILGQVRGRDFRHEKTKKKRGTYKGGFIDLQTHSIKFNNSDDE

SEQ ID NO: 220336 - protein, 73 aa, Zea mays
  Clone ID: MRT4577_132530C.1.pep
HHRVSTDIPSLCLLLPWRAQRMLTLCRNDHLLLVPLIDSFSFQLLKSSSIVQLCQLILYQTWTLSSRSNNILP

SEQ ID NO: 220337 - protein, 39 aa, Zea mays
  Clone ID: MRT4577_132531C.1.pep
SGVSPVRYRVVSSADIVCDHLSLGKRGCAGGMQAHELHS

SEQ ID NO: 220338 - protein, 72 aa, Zea mays
  Clone ID: MRT4577_132532C.1.pep
FLGTLETIYNGGISTIPNTGHIGLKRTGKFFTQKNWLKEFYLGPDTFEARGGADMTTILGALKLGGFVTTKL

SEQ ID NO: 220339 - protein, 132 aa, Zea mays
  unsure (1)..(132): unsure at all Xaa locations
  Clone ID: MRT4577_132533C.1.pep
MSTVLQRPTPGTVQCFGRKKXGVPIELIRPEMLRLKAFEPILLAGRSRFKDIDMRIRVRGGGKTSQIYAIRQAVAKGLVAYYQKYVDEAAKKEVKDIFTRYDRTLLVADPRRCEPKKFGGRGARARFQKSYR

SEQ ID NO: 220340 - protein, 150 aa, Zea mays
  unsure (1)..(150): unsure at all Xaa locations
  Clone ID: MRT4577_132534C.1.pep
MTVLSRPTPGTARCFGRKKTAVAVAYTKPGRGLIKVNGVPIELIRPEMLRLKAFEPILLAGRSRFKDIDMRIRVRGGGKTSQIYAIRQAVAKGLVVYYQKYVDEAAKKEIKDIFTRYDRTLLVADPRRXCEPKKFGGRGARARXFQKSYR

SEQ ID NO: 220341 - protein, 66 aa, Zea mays
  unsure (1)..(66): unsure at all Xaa locations
  Clone ID: MRT4577_132535C.1.pep
MARTQSAVAVAVVAAVLLLAXAATXSEAXITCXQVSXAIAXXXXXXXGTGSGXSXXCCXGXXXXRX

SEQ ID NO: 220342 - protein, 523 aa, Zea mays
  Clone ID: MRT4577_132536C.1.pep
MRNFGANSLEPGENVWVDIDVLMTHDVCGPGTIGIFKKEFGEDAKVWDREKVVIIPDHYIFTSDERANRNVDILRDFCLEQNIKYFYDIKDLSDFRANPDYKGVCHIALAQEGHCRPGEVLLGTDSHTCNAGAFGQFATGIGTLDAGFVMGTGKALLKVPPTIRFVLDGEMPPYLLAKDLILQIIGEISVSGATYKSMEFVGSTVESLTMEERMTLCNMVVEAGGKNGVVPADETTFKYLEGRTSVDYQHVYRDAEARFFSDYRFDVSKLEPVVAKPHSPDNRALARECKDTPPYSQATATEARLRRRPRPRRLCDPRKVANMSTVLQRPTPGTVQCFGRKKTAVAVAYTKRGRGLIKVNGVPIELIRPEMLRLKAFEPILLAGRSRFKDIDMRIRVRGGGKTSQIYAIRQAVAKGLVAYYQKYVDEAAKKEVKDIFTRYDRTLLVAAPGSRSPTVERSAARSCRTVACVVPTCQIDACTRGLIFYHRSYLCGSITRCCFTFNLCCCTFIFGLFKPCVGRLWH

SEQ ID NO: 220343 - protein, 83 aa, Zea mays
  Clone ID: MRT4577_132537C.1.pep
GITLLCFTISPSSLPSYINTPGTPPIIQSCAPHSLLLTNQSRTPTFAQQDTRVHRLVIQKKRAPHPPTERCGGRRRRRECSKL

SEQ ID NO: 220344 - protein, 48 aa, Zea mays
  Clone ID: MRT4577_132538C.1.pep
VISTIFLIVPISALVIAIPTTIPTMIIIATISVLIIIAIISTLIVTRA

SEQ ID NO: 220345 - protein, 62 aa, Zea mays
  Clone ID: MRT4577_132539C.1.pep
CATPTCAPNREPISWTEAGEKAPLDTAVNGTLTLKVDAEDDDEVDADGPGENATSASFFDAS

SEQ ID NO: 220346 - protein, 97 aa, Zea mays
  unsure (1)..(97): unsure at all Xaa locations
  Clone ID: MRT4577_13253C.1.pep
LGVDRDAVXNTTGAVQMLRSNRMLYTXATIASPRAADLPPSPVALGVDADAKTSMVVAHRGGSMVVVLKVLSAFSSRNINLTKLEVINNEGAGSGSD

SEQ ID NO: 220347 - protein, 105 aa, Zea mays
  Clone ID: MRT4577_132540C.1.pep
MKAMGMGGHQETVQMVGRDPRYGYILFPSIQECASERIEGDVSWCHKSEGLRLGEMERDCLIAYGASMLIFERLLLSSDPYQVQVCRKCGLLGYYNHQLKTSYFS

SEQ ID NO: 220348 - protein, 92 aa, Zea mays
  Clone ID: MRT4577_132541C.1.pep
PPPTPPLRPRRRVPRRRRMRRQKPCPRRRRARRRRRISSASRQRPPRPRQRQRAAGAPRGAPRCRPPSATRPGPRRTASAATPRTPPRLVPN

SEQ ID NO: 220349 - protein, 97 aa, Zea mays
  Clone ID: MRT4577_132542C.1.pep
NLQLQLKNKSIYRNIGFLRKNLRKYRGRRFQELPKRRIISLFCATKLDCWNNNGNMLGGLMILFWCSGCHLLGWAHACRGHIVVSSLGITPITVLRF

SEQ ID NO: 220350 - protein, 58 aa, Zea mays
  Clone ID: MRT4577_132543C.1.pep
GLPTYNGFKWRFWYSHSSCRSSLLFTEPWEKCSSVNILSWDSLLKPFDYRQRIIVMDP

SEQ ID NO: 220351 - protein, 79 aa, Zea mays
  unsure (1)..(79): unsure at all Xaa locations
  Clone ID: MRT4577_132544C.1.pep
EASTPAPTARSSRCAARRRRHGRYRSAGRGVVLSLCLTCQQMSRNECGGMGGXHAAVAVHFFRPGRNSIXYVLNYPHFS

SEQ ID NO: 220352 - protein, 42 aa, Zea mays
  Clone ID: MRT4577_132545C.1.pep
FHEQVNYFPFDVFSRSCFFFKKEDLFFLKKKRNCYQLLLMRP

SEQ ID NO: 220353 - protein, 198 aa, Zea mays
  unsure (1)..(198): unsure at all Xaa locations
  Clone ID: MRT4577_132546C.1.pep
LPLQPLHFVREKETREPVLAAGXEXQCRWYXERATPGGAQNKAGGNRNKLTEHTDDRVTERHIHMSRPHMKITERNSTRXTADXYQHEQIFENNSETSQTTRKNTRAKRRKKTNXTXLKRXGNDNMERRANEHGNNXNXFTIGKXGEQARNXLNEEEXXKMEAGIAGREQNRRPGKMEKGELXLQEEGQKTGAKEXEQ

SEQ ID NO: 220354 - protein, 98 aa, Zea mays
  Clone ID: MRT4577_132547C.1.pep
PRPDMQKIYGSPTSYIAKLLMTTSPSMVMGMDKVIMMRKRRQDSKMLCNIKFPCILYRRHPDLHRLHDRVATRTTSYPGMSPATPAEITPSMPSATVN

SEQ ID NO: 220355 - protein, 57 aa, Zea mays
  Clone ID: MRT4577_132548C.1.pep
GCLRSNMTVGRYFILNMSLHKTKSFLHYRELSFVLCSLVTFVHLVIVKQKTFLESLA

SEQ ID NO: 220356 - protein, 66 aa, Zea mays
  Clone ID: MRT4577_132549C.1.pep
ASDCLCFPLKERLLGHFHCAPLPVPEYRPVPKPRKRFPEHHPVPEHSDPAPEALPPTPEIHPPITV

SEQ ID NO: 220357 - protein, 345 aa, Zea mays
  unsure (1)..(345): unsure at all Xaa locations
  Clone ID: MRT4577_13254C.1.pep
MKCRTSSSVSLSPTRARAMGASLSLVPVLDYFARRECLRAGLHQNAVTLPYPDGGAGATCTVQYWAPQGEPELPPLLLVHGFGPRADWQWRCQVGPLSRHFHVIIPDLLGFGGSAYPSETAPPPTEATQAAVLAALLGALPGMERRRVAVAGTSYGGFVAYWLAREAGPARVGXVVIASSDLLKTAADDRAFLKRAGEGWGGVDEILLPAEPAALRKLLELASCRPPPRLVTPDFLLRDFIQKLFTQNRERLVHLLKGITVGTEKFQVTPISQEVLIVWGDHDQLFPVEKAFAVQRALNGTARLEVIPKTGHAPQLEDPARFNKVMLDFLLASHKPDPSVSGSAQ

SEQ ID NO: 220358 - protein, 56 aa, Zea mays
  Clone ID: MRT4577_132550C.1.pep
KLTDGLDKYTSRSCFELSLLEFITTSDPALYNSQGWRSIISPQRQQRLPPTVQLNS

SEQ ID NO: 220359 - protein, 59 aa, Zea mays
  Clone ID: MRT4577_132551C.1.pep
FCLVIKCGVDSHLSVNIQLDSGGKSLLSLRRYDWAPSLIRLESVVVFRGAETVLTGPET

SEQ ID NO: 220360 - protein, 56 aa, Zea mays
  Clone ID: MRT4577_132552C.1.pep
NEFNEISHLALTCNAFATAVINFYIFLIYFEILRIALLRRHISIISCILFNVKRLK

SEQ ID NO: 220361 - protein, 300 aa, Zea mays
  Clone ID: MRT4577_132553C.1.pep
KFTRIKKILKDLTGDFETYFHNLQYAQGFQQDNPVNPFSSGRPAPPSLQCQNTCPSNGRGRKNPYSYASMNGAVPCPPYPSGYLVWSPFIQPDDPMAMRTRGTGTYFSDRKLRKNRPPTGRVERGRNQFASNNYQRLHHHVRTDMPADMGSGLELRHELPQIHIPGATDHGMPSPMSKPMSSSSLNSPRDQLKVPAHSPSSQVRRNNFHGNGFMLLQDSKLESRTFNSKLESGILGPLPLEVTSKDHASRSESASSNQVSGPVSTVSAPRNTTTTDSNLMRDGAQSYRLKDSRDFPPLSS

SEQ ID NO: 220362 - protein, 78 aa, Zea mays
  Clone ID: MRT4577_132554C.1.pep
SATWSTQNLKTTNFNDESMQMCTEANQHKSIKPSTNVEFTNCIATSLTRKFCIRADFAWVVFFAFGVILKKLKICLMC

SEQ ID NO: 220363 - protein, 181 aa, Zea mays
  unsure (1)..(181): unsure at all Xaa locations
  Clone ID: MRT4577_132555C.1.pep
PKYEKLGVGDPFSDPSADQGPQVXKAQYERVLSYIDHGKREGATLLTGGRPCGPEGKGYYIEPTVFTNVKEDMIIAKEEIFGPVMCLMKFKPVEEAIARANDTRYGLGAGVVTRDLDVANRVVRSVRAGVVWVNCYFAMGSDCPFGGRKMSGFGKDEGMHALDKYLAVKSVVTPLRASPWI

SEQ ID NO: 220364 - protein, 114 aa, Zea mays
  Clone ID: MRT4577_132556C.1.pep
NNQAILGETKTSAVSESGFCDPEKSCRHSNAESENMEVFCKPQEKIIKDHRNKIIERGIWKSLAVANALELLKLVFLNTSLGSNVQASLAATLQLYSESEIFTAVSYQKEKNSW

SEQ ID NO: 220365 - protein, 116 aa, Zea mays
  unsure (1)..(116): unsure at all Xaa locations
  Clone ID: MRT4577_132557C.1.pep
MCASQGYYNVLALLALCASATNACVIAHCSLARSCILSHTLLPAADLAXEHPAXVQAYMLHHAIAASALQQPVAQSQLQSLAHLTIRTIATQQQQQILPALSHLAMGNRVVYWQQE

SEQ ID NO: 220366 - protein, 434 aa, Zea mays
  unsure (1)..(434): unsure at all Xaa locations
  Clone ID: MRT4577_132558C.1.pep
MDQYEVLEQIGKGAFGSALLVRHKAEKKKYVLKKIRLARQTDRTRRSAHQEMQLIATVRNPFIVEYKDSWVEKGCYVCIVIGYCEGGDMAEAIKKVNGNHFSEEKLCKWLVQLLMALDYLHANHILHRDVKCSNIFIARDQSIRLGDFGLAKILTSDDLASSVVGTPSYMCPELLADIPYGTKSDIWSLGCCIYEMAALRPAFKAFDMQALISKITKSIVSPLPTRYSGSFRGLIKSMLRKSPEHRPSAAELLKHPHLQPYVLQVQLKSSPSRTTSPIYQALTDKVKKMTFVSDTADSARRRAARRSSLGSERTVTFCKPSPERNSVSSTXHQGVHDXTPRVPGSSLSXSSLQVDDEVTSKAVVTKTAGVLRTPSKSRAPASKTLVAARSRLDPPKTSYARTNRAELDSRTPLSKSSARTARRASLPLAAYRAP

SEQ ID NO: 220367 - protein, 602 aa, Zea mays
  unsure (1)..(602): unsure at all Xaa locations
  Clone ID: MRT4577_132559C.1.pep
MDQYEVLEQIGKGAFGSALLVRHKAEKKKYVLKKIRLARQTDRTRRSAHQEMQLIATVRNSNIVXYTDSWVEKGCYVCIVIGYCEGGDMAEAIKKVNGNHFSEEKLCKWLVQLLMALDYLHANHILHRDVKCSNIFIARDQSIRLGDFGLAKILTSDDLASSVGGTPSYMCPELLADIPYGTKSDIWSLGCCIYEMAALRPAFKAFDMQALISKITKSIVSPLPTRYSGSFRGLIKSMLRKSPEHRPSAAELLKHPHLQPYVLQVQLKSSPSRTTSPIYQALTDKVKKMTFVSDTADSARRRAARRSSLGSERTVTFCKPSPERNSVSSTXHQGVHDXTPRVPGSSLSXSSLQVDDEVTSKAVVTKTAGVLRTPSKSRAPASKTLVAARSRLDPPKTSYARTNRAELDSRTPLSKSSARTARRASLPLAAYRAPSGRAASVLNQLDSPDVSVNAPRIDRIAEFPLASSEDPLAPMNKNLSSAPGHDVSCSTPPFINRSITKDKYTVQVLHRGDGDNASDSSGRNATAASSGGSNDSRQQRFDTSSYQQRAEALEGLLEFSAQLLQQERYEELGILLKPFGPEKASPRETAIWLTKSFKETAS

SEQ ID NO: 220368 - protein, 45 aa, Zea mays
  Clone ID: MRT4577_13255C.1.pep
AKKMMDEIYYSAEKRHSQSERKHGSPIFYIQYFFFTSLDFKKIVF

SEQ ID NO: 220369 - protein, 125 aa, Zea mays
  Clone ID: MRT4577_132560C.1.pep
LTLTHTLHSATRLARSRQLVRQQTAWVRPGRLSEAAAQLGEQLFVLCAALLASSDLDAVNFKVCAGVKNLQLCLGQKAEPRARNARALLLNSEGISGPLPTALGAFYNLSYLALANIMLTGPIPP

SEQ ID NO: 220370 - protein, 52 aa, Zea mays
  Clone ID: MRT4577_132561C.1.pep
FHTEPTGHVKYLGIRPLKMNRPTNSEPAPIQRVAWTGPELRLGNQAWFRASL

SEQ ID NO: 220371 - protein, 93 aa, Zea mays
  Clone ID: MRT4577_132562C.1.pep
PPPCPICGKPLGDIPGYFGPLEGLRAPNPLPGETRARGRDILGNAREKKGGSRFLWLPPRGGFCGSSPPRVFQPDPAGGSPPPFFFLPPPWDI

SEQ ID NO: 220372 - protein, 56 aa, Zea mays
  Clone ID: MRT4577_132563C.1.pep
LPLRGTRFPRADIISSLGFSQGTTCLGPFDRPGGQCALGLFVTLQVLARSYPFGVL

SEQ ID NO: 220373 - protein, 44 aa, Zea mays
  Clone ID: MRT4577_132564C.1.pep
SWSWDRCCRDKVLQKGLLVKLELCRTVNKGWASRAAEPIPQGTF

SEQ ID NO: 220374 - protein, 69 aa, Zea mays
  Clone ID: MRT4577_132565C.1.pep
SGGMFPGPPQKVWEIFENIFSKPFFQNWWGTPVGLSFHGPQPPPIVFAWVSIQLTLIWFFCSPMPSIPC

SEQ ID NO: 220375 - protein, 70 aa, Zea mays
  Clone ID: MRT4577_132566C.1.pep
LAPPIFQSLCWKAFTAKQRSAFFHLWVQGPPFPPFLKNQGSSNPGGPFVSPSQAPSFRGPLFSYEGKPNL

SEQ ID NO: 220376 - protein, 32 aa, Zea mays
  unsure (1)..(32): unsure at all Xaa locations
  Clone ID: MRT4577_132567C.1.pep
FLTKGLLDLVSPAALPXPAXTRFHXRQXKTPP

SEQ ID NO: 220377 - protein, 60 aa, Zea mays
  Clone ID: MRT4577_132568C.1.pep
PVVVQRSNDRGTLFLFGRQMHTVPRNKIKAHMEELPHIGTSANTHDPQHREGPQAPDYTM

SEQ ID NO: 220378 - protein, 117 aa, Zea mays
  unsure (1)..(117): unsure at all Xaa locations
  Clone ID: MRT4577_132569C.1.pep
KTGRGFLQIKHKGWGWPRTPIYPFGAEERATXAPLPGNNNHKRPTLITCXPRTPKERXNPNNHGGKFNSTTNATLNXNIHKNHPGDSSWDKNRGELLKAGAXCFIGKRDPPILXSRA

SEQ ID NO: 220379 - protein, 84 aa, Zea mays
  unsure (1)..(84): unsure at all Xaa locations
  Clone ID: MRT4577_13256C.1.pep
PLLSARLXFSLRETQVILVFVSAAQHGQYLFFCTPTPXDLCGGGAGLERGYSLWTLVALNLGCRQNVLKNHMKTMAPYKLGSID

SEQ ID NO: 220380 - protein, 63 aa, Zea mays
  Clone ID: MRT4577_132570C.1.pep
AAPPPPVIPPIQKLGFQDKNQPPGVVAPVKNQKTAPAATSASADNDDAGACSIHRPPMFCCGP

SEQ ID NO: 220381 - protein, 228 aa, Zea mays
  Clone ID: MRT4577_132571C.1.pep
LLFCRWIQQLPSLLIYINRLDSWVCTVFSISHQKKSRQLVVSISSPVRPPASISASAARMASLVHQASMPAAARGGGSSSSSSWGPSATTPGATRSTSTRAPTSSSSVLSSLAAGGGPAPACGRLTLRAVRIGARNSGGCTCVRCDPKEQPRVTAQRGNNGDLIYYPRKKHGFYCVKIYCSVVEIKSGHYCSFLFFSFFHSDGTIMFGRFVLECSSGAIRAASSEQFT

SEQ ID NO: 220382 - protein, 80 aa, Zea mays
  Clone ID: MRT4577_132572C.1.pep
IVFYYRRCPVPLIRGKCICACGCCKTLPVAFPSFKVRPLFFTTTLAFEFACLHACMPNSWPDSRLYPVIMVRNLEAYHLS

SEQ ID NO: 220383 - protein, 102 aa, Zea mays
  Clone ID: MRT4577_132573C.1.pep
KKGVKGKTTPRKNPFCPGPAPFYFIGRLMPTQTNLGFFPERSKFYVGVMYLFKLLKPGFFFPNYQFFWSPPPPQIPVGGVRFPPPPLVFCPPKISPPAGGRA

SEQ ID NO: 220384 - protein, 92 aa, Zea mays
  Clone ID: MRT4577_132574C.1.pep
LRSLMLFGCPGRLKYGCNPFFFKKLKLLVYVLALCMATGLWVKMHVWPFPVIGQTFWGVSNRRSMLPRKPIFLKLLTTKKKKKKAGRPLCWR

SEQ ID NO: 220385 - protein, 85 aa, Zea mays
  Clone ID: MRT4577_132575C.1.pep
CHPCRLEGQHRLHLRIIISSAGNTISRPMLGMLELVGSQAMHYTCMQCAVISICYHHRITSVMLAPDNDGVILVSHRLLLHIELE

SEQ ID NO: 220386 - protein, 164 aa, Zea mays
  Clone ID: MRT4577_132576C.1.pep
KKDKKKKGRPPFFFFFFFNRSHQYKYISHTHSTSLESTFYNIHILSHTHLHIHIQLHVSIPFNNNVSLQSMKLFVYDSNLMKSLYWPVKNGAISNQHNMFWKLNRKPERDDDGPYHSTNTLCSVILDDLITTCLDENSLCTRSCTQRTDSTPDFENRTPVCVWV

SEQ ID NO: 220387 - protein, 123 aa, Zea mays
  unsure (1)..(123): unsure at all Xaa locations
  Clone ID: MRT4577_132577C.1.pep
ESPQDDXEVVAKNHALPPQVVQAPSSGPTNGTPQKGGLPEFAGAAADILVFRQPLAKNDPRDETEKIQKVGTDWKGCPTLVLGSRLLMVKKQIFFFSPPVSFMAKVKKMGALLSLGKQIILIF

SEQ ID NO: 220388 - protein, 64 aa, Zea mays
  Clone ID: MRT4577_132578C.1.pep
KYQGYETKQILLRPKISVRHLFSDGGSKQECPNHPAGGRSVLVVLDMEALRGALGKGGVALVGC

SEQ ID NO: 220389 - protein, 63 aa, Zea mays
  Clone ID: MRT4577_132579C.1.pep
VGGVCVFFFFFFFFFFFFFFFFFFFFFFFFFIQTERQQTLHPKGRYTEPSQRGGGPFFSFPSL

SEQ ID NO: 220390 - protein, 68 aa, Zea mays
  Clone ID: MRT4577_13257C.1.pep
SHIKGHFLGGIRFRIPPFGYPAFPKLVYRIQSPMGGNSCFSRGARLLGGLLLSFGVFFFFFFFFFFFF

SEQ ID NO: 220391 - protein, 118 aa, Zea mays
  Clone ID: MRT4577_132580C.1.pep
MDRGIKRSVAAAGGGPPPPKVYRVEPRDFRELVQRLTGAGTPAAAAAPGPAHRRATLKPAMAAESRRAQAAAAVPVAAGAEQFDYAASWFSAPLLSPGYGAPGFGGGHQHQGNTGSLF

SEQ ID NO: 220392 - protein, 89 aa, Zea mays
  Clone ID: MRT4577_132581C.1.pep
LASCMFFTSGEDVAHCSLGSLNSKSPLPPLTLWCRLVSRSPAPSPICVLFDVSSGLPLRDGGDDGGLSSPQHRSSTRRPPLAHACSCVP

SEQ ID NO: 220393 - protein, 75 aa, Zea mays
  unsure (1)..(75): unsure at all Xaa locations
  Clone ID: MRT4577_132582C.1.pep
CFIGINTGXREGDLTLDSRSIKGIKFKKLSLKKKKKKKKKKKKKKKKKKKKKKKKVRPIFNIACAPPLLISYPSK

SEQ ID NO: 220394 - protein, 126 aa, Zea mays
  Clone ID: MRT4577_132583C.1.pep
PYILRHGIIKHEGFLGEKGRSIINKHMNINNYPFLSDHPQIENKETPTLQMLTRIMETTTDQKITNYCPPTPSVRLFLLNNLPLGASTLHNDGNVIEYTSQNKARHPGGRALHAGPVNNITCPDQK

SEQ ID NO: 220395 - protein, 648 aa, Zea mays
  Clone ID: MRT4577_132584C.1.pep
MNSMDEINLLRQAQRQHQHHLMVRGIGEEIDLEIGPVDDPSFSGASLVAVTSTHDTVVHADDHKSLLIPCSQPGAADGLAPQQHLSQGEEHDGMLRSPSGHTKKKKKVVKKWREEWADTYKWAYVAVHDTTTRIFCSVCKEYGRKHRRNPYGNEGSRNMQMSALEEHNNSLLHKEALRLQMASKEKLQPPEIEGPVYVKALSKTAASILECVLRRDPHEAEYIQSIQEVVHSLEPVLVKNAQYIQILERLLEPERCFIFRVPWIDDRGEAHVNRGFRVQFSQALGPCRGGLRFHPSMSLSVAKFLAFEHTLKNALSLYKLGGAAGGSDFDPKGKSDNEIMRFCQSFMDELYRYLGPDQDFPAEDIGVGPREMGYLFGQYRRLSGHFQGNFTGPKIFWSGSSFRTEATGYGLVFFARLLLAEMNKELKGLRCVISGSGKIAMHVLEKLLPCGAIPITVSDSKGYLLDEDGFDYMKYSLLRDIKAQQKSLKEYLKTYPHAKYIDDAKPWSQQCDVAFPCASHNEIDQGEAVAISNSGCRVLVECSNMSCTVQAVDILRKAKVIVAPAKATAAGGVALGEIELNPEFNLMQLSVEDFENRIQDAIKQTYERSVKAAQDYGIMKESPEFLVHGANICAFLNIAQAMTDQGCV

SEQ ID NO: 220396 - protein, 57 aa, Zea mays
  unsure (1)..(57): unsure at all Xaa locations
  Clone ID: MRT4577_132585C.1.pep
VACTAFPSRRLSSYLIPDSXRAQPXRRMGRRRSLSSWAPRCRPWGSASGGWTPPPSA

SEQ ID NO: 220397 - protein, 146 aa, Zea mays
  Clone ID: MRT4577_132586C.1.pep
DDSWSPEPSRGVAIARPAGWPSRGVARVWPSHVQLAGRHQAWPAHQRSGCSKPARARDCLHLRRHRTRADLQRRSHALRSIFGLLPQVATACPSNATVGHSSAPTACPPRRCSAAWPSISGRSAGGSLPGATLRPPLLPRVVPTRP

SEQ ID NO: 220398 - protein, 80 aa, Zea mays
  Clone ID: MRT4577_132587C.1.pep
MRKYWFKAKPAASSCSPWYGPDRVLYLGPLSGAPPSYLTGEFPGDYRWDNAELSADPETFGKNQELEVIHYRWGMLGALG

SEQ ID NO: 220399 - protein, 142 aa, Zea mays
  unsure (1)..(142): unsure at all Xaa locations
  Clone ID: MRT4577_132588C.1.pep
DARWLQLGNMFCTPKHREECGSNKXSAEHFGYQQKTGTRRSIGHIHAGKQVXFGDAAPSGTDLFKECRCTKRTGLAGPVKEAIDTLEALAAVPDXQGKNLLSHTEAVAEVLSSSKLSLLCGSMCLPQRMAWMVVILHAVENL

SEQ ID NO: 220400 - protein, 170 aa, Zea mays
  unsure (1)..(170): unsure at all Xaa locations
  Clone ID: MRT4577_132589C.1.pep
MSPLPRIVLLAVAAAAAAAVTASATSLSGAANDLLPKYGLPKGLIPDSVASYSFDEATGAFEIHLAGTCYVHFGSHLVYYERTITGKLSKGAISDLSGVQAKKLFLWVYVTGMVAHPDQGTIEFQXGFISESLSASMFDEVPTCGSSVGAQLRGAAGVIGELGLLPVAQA

SEQ ID NO: 220401 - protein, 201 aa, Zea mays
  Clone ID: MRT4577_13258C.1.pep
KRSRMAGESQLSYDHGRWPARPPRTLRVAQRIRICLPSSSHPSTTRHRFTRPDSRPQSSSRRERCWSALVCWRFQAVTSSRETNPPCGASRRRGEAAGSRGRCRRRCHRRQGAEMEERVGEVERRTSSWEMPSRERPGSGAQGQAEEDHSGEQEATRVNQGGHDEMAEKEKSERHGKERRSKEGARPWGEEPGGCAVDQAA

SEQ ID NO: 220402 - protein, 203 aa, Zea mays
  unsure (1)..(203): unsure at all Xaa locations
  Clone ID: MRT4577_132590C.1.pep
MASTTESSCTTQTVQGTHRFQICQFSYGNVGDEDYIRSGTFRVGGFDWVIVYCPDADGDDGEEYISVYLESMSKYAEALAFVDMRLINQVTGDACTICAENRVPNQFKSSSFEDASWGREKFISKRALKDSGYIRDNRLVIECVVTVVHELRVSENKASCEIEVPPPNALEHFGKMLKDKSRADVTFKXRGEMFPAHRPVLSA

SEQ ID NO: 220403 - protein, 129 aa, Zea mays
  unsure (1)..(129): unsure at all Xaa locations
  Clone ID: MRT4577_132591C.1.pep
HESHLYVFLDPELGPLPSSLSFQSLLLLIHQFLHQVHFFLFSYYXFSIVFLDPSQFILFMYLYIIYLLLFYSFIFYYHFFIFLLYFLFIFFLSXFFYLFIIFFTFFLSLFLFFXFNLFFLSFLLYFILF

SEQ ID NO: 220404 - protein, 88 aa, Zea mays
  Clone ID: MRT4577_132592C.1.pep
TRCVPTSLSLCVEILLRASHLLQLCALVQCKLEHRDRLLHVRKVPGPTLNRCQRVRLAACCSISNNERGGCQWPHRRDEKNICLIRLT

SEQ ID NO: 220405 - protein, 671 aa, Zea mays
  Clone ID: MRT4577_132593C.1.pep
MRGGDVTAAEAGSPRSPDLYDLSDDSDYAAAASDQTAMRTDPADRASEETARVDVVYEKERVTIHPSQYGSSRISGKLRLFLQQGSLFLSWEPNEGAGSLSTSSVGVEVEKYRNLYTIKALPLSDVRFIRKYTPTFGLDYVIIVLSSGLAFPPFYFYNGGIRELFATLKQHVFIIRSDDDPNVFLVNDFQDPLQKSLSSLELPGVASVANAMSRQNSLSFTGSIDESRHGDNVRHGATSSMSQYSSKQNHKSNDPGRDLSIQVLEKFSLVTKFARDTTSSLFRDNSGAHAYGRQQHQYILDNKSTNKHKNQYVTPEKASAPSATLESDPLPLVWGKQRDHPLSVEEWTSFLDREGRIMDSKALRKKVFYGGVDHALRKEVWKFLLGYHEYDSTYAEREYLAVMKRAEYEVIKSQWKSISATQAKRFTKFRERKGLIDKDVVRTDRSIPYYEGDDNQNVVVLRDILLTYSFYNFDLGYCQGMSDFLAPILYVMEDESESFWCFASLMERLGANFNRDQNGMHAQLLALSKLVELLDPSLHNYFRQNDCLNYFFCFRWVLIQFKREFSFDQIMLLWEVLWSHYLSEHFHLYLCVAILKKYRQRIIGEQMDFDTLLKFINELSGQINLDRAIQDAEALCTIAGENGASCIPPGTPPSMPVETDGGMYVQEDEVL

SEQ ID NO: 220406 - protein, 101 aa, Zea mays
  Clone ID: MRT4577_132594C.1.pep
TRSSKASRSADLQGEPTNRQHMRGLGFYCWEQACVAVHWFSNEEERRLRLLAVADDVVVRLGRVGRRLPHYPRSPGRCCHTRRIGDDTLRRRRWYTTEWGN

SEQ ID NO: 220407 - protein, 59 aa, Zea mays
  Clone ID: MRT4577_132595C.1.pep
KIASTVNLLSVSSNRFFYILIISRRQCSITLFHSFIAWLISLLLAGWCPFGYLGYAWGP

SEQ ID NO: 220408 - protein, 47 aa, Zea mays
  Clone ID: MRT4577_132596C.1.pep
IKLRTSTLVNRQLASNPPSVHTLCTPHLHNHTGLFSSTRGQDDGVTV

SEQ ID NO: 220409 - protein, 85 aa, Zea mays
  Clone ID: MRT4577_132597C.1.pep
PLRPCASGPNHPHKHLNDAEGYEEEDPHLRCHESRMEAREATERTVRRRRIHGARAAIAPMGTREAACRPLTLRVLGLQMRGGSR

SEQ ID NO: 220410 - protein, 107 aa, Zea mays
  Clone ID: MRT4577_132598C.1.pep
LGERTGHTGSLALYAMPPATSTRPPFSLPVPLLTEVVSVALLSLVCFLVAADASRSLYYHYHLRKHRKHHWHHRAENYRHISLPPAAPSTGADSDSSAGPVGLAPDI

SEQ ID NO: 220411 - protein, 94 aa, Zea mays
  unsure (1)..(94): unsure at all Xaa locations
  Clone ID: MRT4577_132599C.1.pep
AGRAGXRSHHSPPPTTAHRARGRRRSPFSGGPAYAGLSKGWLSTSKPQLAPPTRVSHAAKFGSSAIRTSAARVLDLWIRSGATWAGSSSXEXPP

SEQ ID NO: 220412 - protein, 77 aa, Zea mays
  Clone ID: MRT4577_1325C.1.pep
MALLLLCRGAEARVLLTLYDFRGVGDGIANDTQALLDAWAAASRSTQEAVLAVPDAKAYHIWTVQVSGPCKKRLKLH

SEQ ID NO: 220413 - protein, 90 aa, Zea mays
  unsure (1)..(90): unsure at all Xaa locations
  Clone ID: MRT4577_132600C.1.pep
VXNHXXXPPGEXXQAGXRGEDRXPXXXVLXAWEXPKTVLPICLVAPRIRTESXWXTXIAXXXNHVCAIVVVPLMMXFHGAISWACCAYVL

SEQ ID NO: 220414 - protein, 81 aa, Zea mays
  unsure (1)..(81): unsure at all Xaa locations
  Clone ID: MRT4577_132601C.1.pep
QCRTRRSRLISTPSRVTVVTIARERSICPWKLRVGRIALGSHQDVXHPGALKAAFSEFISTLIFVFAGRVSGMGFSKLTGV

SEQ ID NO: 220415 - protein, 88 aa, Zea mays
  unsure (1)..(88): unsure at all Xaa locations
  Clone ID: MRT4577_132602C.1.pep
KTAVTQHIILVAQPPFFGWRHNKXRRXERCSFXQLVSLKNEXYTPPYSALTTTGVVVTRNRTVSIFSILXPAPFTVFPSXFFVTFSGF

SEQ ID NO: 220416 - protein, 78 aa, Zea mays
  unsure (1)..(78): unsure at all Xaa locations
  Clone ID: MRT4577_132603C.1.pep
SPNTTISNHTVHCPFGTRLVIEXLAIISSKLTLSIHGFHIHSGFYKLLHSQAVLLIHHHTIISTDRYHIHSYYLLNIP

SEQ ID NO: 220417 - protein, 71 aa, Zea mays
  Clone ID: MRT4577_132604C.1.pep
RELAFKHWYHRRQKLVLVVLEWIIHDNMALVMILSSPSGPLSLINVYSAKNMSPRKASSRSRTPQHSGFSV

SEQ ID NO: 220418 - protein, 99 aa, Zea mays
  Clone ID: MRT4577_132605C.1.pep
HWNHRYIISLEHACRTLLTYRTLLTVYTLGSRQVYVTPCTLTLRVQGRHRYCILGAAQLASWSFIFSSATKSRKMHRALANRGHWGTKCGPQVTNLVPE

SEQ ID NO: 220419 - protein, 91 aa, Zea mays
  Clone ID: MRT4577_132606C.1.pep
AGPSCTSSHENRCQNEMLLIKCNCMCCTLGGPPPHVKKRSSTVHFNPFLMSWLGCPPDELQKFNFKTFMCLRAFMQLLKYLCFFLVDRHVI

SEQ ID NO: 220420 - protein, 43 aa, Zea mays
  Clone ID: MRT4577_132607C.1.pep
KPNHIINIYSHIFHVLILLYFSLIPTYLLLLYLYYFLLYIKSN

SEQ ID NO: 220421 - protein, 99 aa, Zea mays
  Clone ID: MRT4577_132608C.1.pep
TNKWFSIECIFQLGQGGPGPPMQGINQPKGVPQTMENINKRFFSGNGTGGPRGFFKNTVWAMVPGPHPGGGAFPGIKQLGGGVFTHPTSRALRVGGEPG

SEQ ID NO: 220422 - protein, 39 aa, Zea mays
  Clone ID: MRT4577_132609C.1.pep
LYACNWRCKQKPGELGLLPRILMVSIEMLSAVEYIKLMV

SEQ ID NO: 220423 - protein, 62 aa, Zea mays
  Clone ID: MRT4577_13260C.1.pep
PVSTVVPRPGRLEGIPRIERFTCSQTCPCSIRYIVCCDVPSVSNGSVACSKEYLCVLRLLPA

SEQ ID NO: 220424 - protein, 107 aa, Zea mays
  Clone ID: MRT4577_132610C.1.pep
ISPSMAYFYIYIYRPLFINKIIYINQNPRRVCRKKQFPLTPPFLFLFRENVVFPPFGPFFGGFEYHFAFFLKIPRLVFCFDSGGGWVPPPKKHLPLINRPTGVLFFF

SEQ ID NO: 220425 - protein, 43 aa, Zea mays
  Clone ID: MRT4577_132611C.1.pep
PVIQLDELSVITLRWNDKRTSHHSVGSMYIWPEGVLSHRIVDS

SEQ ID NO: 220426 - protein, 777 aa, Zea mays
  Clone ID: MRT4577_132615C.1.pep
MGSGGVRWKALPLCLALVALQACLPARGAAPKTYIVQMAASEMPSSFDFHHEWYASTVKSVSSVQLEGDADDHYAARIVYNYETAFHGFAAKLDEDEAERMAEADGVVTVLPETVLQLHTTRSPDFLGISPEISDSIWSAGLADHDVVVGVLDTGIWPESPSFSDKGLGPVPARWKGLCQTGRGFTVASCNRKIIGARIFYNGYEASSGPINETAELKSPRDQDGHGTHTAATAAGAPVPDASLFGYASGVARGMAPRARVAAYKVCWTGGCFSSDILAAVDRAVADGVDVLSISLGGGSSPYFRDSLAIASFGAMQMGVFVACSGGNGGPDPISLTNLSPWITTVGASTMDRDFPATVTLGNGANLTGVSLYKGRRGLSSKEQYPLVYMGGNSSIPDPRSLCLEGTLQPHEVAGKIVICDRGISPRVQKGQVVKNAGAAGMILANTPANGEELVADSHLLPAVAVGQSEGIAAKKYSKTAPKPTATLSFDGTKLGIRPSPVVAAFSSRGPNFLTLEILKPDVIAPGVNILAAWSGDASPSSLSSDRRRVGFNILSGTSMSCPHVAGVAALIKASHPDWSPAKIKSALMTTAYVHDNTYRSLKDAATGKASTPFDHGAGHIHPLRALNPGLVYDIGQDDYLEFLCVENLTPLQLRSFTKNSSKTCKHTFSSPGDLNYPAISAVFAEQPSAALTVRRTVTNVGPPSSTYHVKVTEFKGADIVVEPSTLHFTSSNQKLTYKVTMTTKAAQKTPEFGALSWSDGVHIVRSPLVLTWLPPM

SEQ ID NO: 220427 - protein, 57 aa, Zea mays
  unsure (1)..(57): unsure at all Xaa locations
  Clone ID: MRT4577_132617C.1.pep
DPDALYFSLVSVHFKLLAAASLSVRRAPPQKWRAESEVVDTHLXACXSDGNNWKXMD

SEQ ID NO: 220428 - protein, 80 aa, Zea mays
  unsure (1)..(80): unsure at all Xaa locations
  Clone ID: MRT4577_132618C.1.pep
VCENPTLEPYMIQQAMPAGISPXQPXVTQQSXCLLDHIPLVHLLEQKITAHQLRQLVLAKLCWYYQEQKVVTLNQLAALN

SEQ ID NO: 220429 - protein, 82 aa, Zea mays
  unsure (1)..(82): unsure at all Xaa locations
  Clone ID: MRT4577_132619C.1.pep
GETGKIGRKRRKAKKSRQKKAGGEHGTPTQAGXTGRGXXREKKXAPPPPTKERREQHRRARASQARARKRGPARAAARRTRG

SEQ ID NO: 220430 - protein, 238 aa, Zea mays
  Clone ID: MRT4577_13261C.1.pep
MAAQPPSSGAPAAAGNTKRTPKRKPKTKPAAPSALNPNWAQLQSKLPASTFLGKRKRPAPSPPPAPSPNPDAAELSFKLEPTSDDTSLTKALALDCEMVGVGAGGSKSALARATLVNSFGNVVYDEYVRPMERIVDYRTHISGIRPKHMNKAKDFSIVQKDIAELITGRVLVGHALHHDLKVLLLGHPKKDIRDTSEYEVFRREGKRRSLKDLAAQELCVKIQQQEHCPIEDARAAMF

SEQ ID NO: 220431 - protein, 75 aa, Zea mays
  Clone ID: MRT4577_132620C.1.pep
PTRPITATIYTFLYHLTTNANHRVFCVFTEGGRAIKSPYLRTNSQLDPTQLIPNIQADTNIFFTRSPYSTQTSSN

SEQ ID NO: 220432 - protein, 35 aa, Zea mays
  Clone ID: MRT4577_132621C.1.pep
MIKETGYYDVLGVIPTVSENEIKKAYYITVRYVLS

SEQ ID NO: 220433 - protein, 155 aa, Zea mays
  Clone ID: MRT4577_132622C.1.pep
MVKETGYYDVLGVIPTASESEIKKAYYIKARQVHPDKNPNDPQAAGKFQELGEAYQVLSDPAHGQAYDAHGKSGISTDGIIDPAAIFAMLFGSELFEDYIGQLAMASMAFLDNFDEDERSTQKSLQDKMQAVQKEREEKLAEILKKRAAPLCSGK

SEQ ID NO: 220434 - protein, 77 aa, Zea mays
  unsure (1)..(77): unsure at all Xaa locations
  Clone ID: MRT4577_132623C.1.pep
XGRVRGVLLTTDDNIDVYESAYRYLFPNLMITRVPSGRLALQRTRVDAIDHFIFLTTLPLTSCVPMFLCLTFSHLNQ

SEQ ID NO: 220435 - protein, 46 aa, Zea mays
  Clone ID: MRT4577_132624C.1.pep
LLLHGSGSPLTAGAMEFIDGASTLSHDDDDYSCRTPTDAVSQVRPT

SEQ ID NO: 220436 - protein, 109 aa, Zea mays
  unsure (1)..(109): unsure at all Xaa locations
  Clone ID: MRT4577_132625C.1.pep
NNGSQNNLRPYSPGKSHKGGPYKTQPAISXSILPLSPLLLQQIISLITEIXLLHLLAQNIMAQQLQQLELPNQAVYXRNNTFLDSTNXAVSYSASFLQQQTTIYSKQLF

SEQ ID NO: 220437 - protein, 111 aa, Zea mays
  Clone ID: MRT4577_132626C.1.pep
ELSVIPAHVDAGSAASSCEIDAGRRVRFEEPSGAAGSEEEVKTLLEERESGVSYMIGHTCVQAHESSPAVKKFAINVVYGFLRRNSRRPAVELGIPNTSLIEVGMTYKIVC

SEQ ID NO: 220438 - protein, 107 aa, Zea mays
  Clone ID: MRT4577_132627C.1.pep
KGIQDQKHVAHLPVRFLCWCQPFLHELRAIIEFSSAGSRLGGGKEKGDKNVLLCLGLRCHISSGRRHLSRSSSSPLPMPDLHQPSSPLSSAMACSLLDLESFLFVAR

SEQ ID NO: 220439 - protein, 84 aa, Zea mays
  Clone ID: MRT4577_132628C.1.pep
QAWWGRSADVTNDIRNDTGQRKYYAAPRRVSNLIAHSLQKALGSAVLSVNGNNEEQEAEADKLSLQQEIKKSYVLMSTMCNISM

SEQ ID NO: 220440 - protein, 220 aa, Zea mays
  unsure (1)..(220): unsure at all Xaa locations
  Clone ID: MRT4577_132629C.1.pep
MWSGAPRMAERLELERQATLDGHVPQDLEAGVNSGGAQGLHPVRVRRLPPTTGRFGGMDNIWQQYGDTNQAYGNVTYTPGIDLTLSPGNDLTRFQDSAVVHGPGPIIQENQSFSSTSQVPQPVNDRRKKGVAKREKNYSNLEDETLCSAYLNVSKDPVVGVNQPMKSYWARITDYFNEMRTTDVERSSSSLXHRWGDISRDTALVCSYYAEIERKHXSGK

SEQ ID NO: 220441 - protein, 50 aa, Zea mays
  Clone ID: MRT4577_13262C.1.pep
LIIKMTHVTRREFVVMSYRKRWCLTNLVKLAVFTLWRLMLKRSLKKREFK

SEQ ID NO: 220442 - protein, 54 aa, Zea mays
  Clone ID: MRT4577_132630C.1.pep
AFEGKCPDDYWGFNHGVMGFFVKKMLGILRMWNFCQLYCRQIPGDVILTGQLVF

SEQ ID NO: 220443 - protein, 143 aa, Zea mays
  unsure (1)..(143): unsure at all Xaa locations
  Clone ID: MRT4577_132631C.1.pep
ETPSTHSEXRRKKKINWXTKGQASVASARPFDPLEDDGKGSGPGQANNSYMCHGFGLTLVHTXTIRDHXDXLLAASKALARSATQESSHWALILRNFTSIRKIYERIDARGDAKAYEVRLVRPALPPXRELGKYAQSCVYTPV

SEQ ID NO: 220444 - protein, 117 aa, Zea mays
  unsure (1)..(117): unsure at all Xaa locations
  Clone ID: MRT4577_132632C.1.pep
TETADAYSKSYGAFPFLHAANAGALVGHTHRTEVSTAKYFTPDNIFNANYSNINETLMTXTLTYSLDVAQCISDSCHRETGHTXXSINTHRIRSSGILTNSDXLAIELLSRPRTHII

SEQ ID NO: 220445 - protein, 52 aa, Zea mays
  Clone ID: MRT4577_132633C.1.pep
GELYTHSLWEAAPLRPGRIPGRPRVGSHPRHPSLAHYDACLCSPLHISGPGR

SEQ ID NO: 220446 - protein, 83 aa, Zea mays
  Clone ID: MRT4577_132634C.1.pep
PRVRFNGNSEYADHLEPVNGVEPMKAAGLLHHLETTDEGQKDLTKSQIPAHGAIGAYRTAYYQSHAPAGCRALLCRDNLHTYR

SEQ ID NO: 220447 - protein, 58 aa, Zea mays
  Clone ID: MRT4577_132635C.1.pep
ALIKKCVTQNGSPQGGPKIMFRKASKKEEKIFFWGGEMGGKNEKPGPLLFKKIGKFLV

SEQ ID NO: 220448 - protein, 97 aa, Zea mays
  Clone ID: MRT4577_132636C.1.pep
IRHEDFLLQGKVEVFDSSFFFCVLGCYVLCVSHLIDCLKPLQTCYFSKYYYVCVSYLIDCLKPLQTCYFSKYYYVILKLLVGCPQQFRCRLVQILVT

SEQ ID NO: 220449 - protein, 102 aa, Zea mays
  Clone ID: MRT4577_132637C.1.pep
APRRHLKEWGNQGPPPLGDRIGIPPVRIRGGRPGEQAPLVAGPLLAGGPSFSERSGPLVGAYQSLLKLNPPGGPRVPPGSINARNILCPLGMCISPILAGFF

SEQ ID NO: 220450 - protein, 103 aa, Zea mays
  unsure (1)..(103): unsure at all Xaa locations
  Clone ID: MRT4577_132638C.1.pep
GKYGWPPPLERFFKAPALRDLSMGGSLLGKKTMGVPPKNPFMDXPPKGAEGSKKYKSAKDFLMLLFKNVFLTPGFSLDDPNPFGNRIPRMVKIGFSINKDNPF

SEQ ID NO: 220451 - protein, 96 aa, Zea mays
  Clone ID: MRT4577_132639C.1.pep
LLLRLSLLWHHQLHVRTVFCCGMSVFYPGCDNHFCSCQAERRLPHLLQSLPSYDGLLAVISCFHDDDASEHDGRLYLFTQHGPDGPSPPHGWLLHS

SEQ ID NO: 220452 - protein, 95 aa, Zea mays
  Clone ID: MRT4577_13263C.1.pep
SRPAGPGYLKIAIIYTFSLLQTAPAAVLRLPHEADDPSCHNTLLSRLSTKTRPSIKAVMTDTADADFTLPYLYELLMLSPKNLHILISDPIIHHD

SEQ ID NO: 220453 - protein, 179 aa, Zea mays
  unsure (1)..(179): unsure at all Xaa locations
  Clone ID: MRT4577_132640C.1.pep
MGKPARPGSAATPPSLTRSGSPSGTREGHVVPRNSSLHVVDRGKLELLHASSSCGLPMWNTSVKLGPRSWFRIAPVNMNLILYNCTKAAGAAALAQDRELVQTRMRCGDESEVFARAGGRYYETTDYGGGHEGCDAAVMPVLXTXXSEVNASDYERLISDGFLLTWQSPPTXARKMARV

SEQ ID NO: 220454 - protein, 47 aa, Zea mays
  Clone ID: MRT4577_132641C.1.pep
VTSSSTFSTIMLAEGVLYVYLSWKESLELALLGPSKPVSLYSWGRVR

SEQ ID NO: 220455 - protein, 108 aa, Zea mays
  unsure (1)..(108): unsure at all Xaa locations
  Clone ID: MRT4577_132642C.1.pep
AVLHFTSPRPYCYXLXAHCKFGVGGTXHPSFQXTSAYTCVSLPSRLVACEAPLHHLGALTCDAQPDRRLLPLRRGTFIGRQRCEAHPDHLRLLNPPRPLXALLVPHLA

SEQ ID NO: 220456 - protein, 43 aa, Zea mays
  Clone ID: MRT4577_132643C.1.pep
TLVPIPSSIPLRRRGFSAYFLSANLYPLSSVSQYIAPLCTLHM

SEQ ID NO: 220457 - protein, 68 aa, Zea mays
  Clone ID: MRT4577_132644C.1.pep
HSSWRLTDSCSKLKKLNRKFAKSNCLFPSGCLIQTIIAMRAVAPNSTSIARRAPMANSLESYLYSGVR

SEQ ID NO: 220458 - protein, 164 aa, Zea mays
  Clone ID: MRT4577_132645C.1.pep
FTHCNQSFVKDCVGPAKESYERRMSKMLAKSRALFIKEYNNKLFNWLVTFSLVMVVIGRFVIKFFLLEIVAWVMFIFLETYTRMFWSAESLYYNPAWHIIVSSWEMIVYSPILDLDRWAIPIVIMLSLGVLYWRCFGRRRKRVKGSLLPLYKNSYKNSSRPRSD

SEQ ID NO: 220459 - protein, 60 aa, Zea mays
  Clone ID: MRT4577_132646C.1.pep
FRGPKWMWRGFFGLALLSVGFKLFSFYMFGKAPNQLGMTLVGHFLFGPTGSSMYKTPLPF

SEQ ID NO: 220460 - protein, 70 aa, Zea mays
  Clone ID: MRT4577_132647C.1.pep
SLFSIKRPGNGAGSLVSLKWEQPLPLKINCFVKSRNTARFNIVSHVPGQSVRQVVGGWTLQVCLKWYSPI

SEQ ID NO: 220461 - protein, 141 aa, Zea mays
  unsure (1)..(141): unsure at all Xaa locations
  Clone ID: MRT4577_132648C.1.pep
RIPIAPGCLSRAQGQLFSFPSAQVPCPSVSHLLPKLPGRRHSAQPLYRRVLHLALVLTLLLTALAPCCVPPMAASLQSPPSPARCPALDVHGAGAPHLLCHNFRPPSRCPNHGALDTIHLPXGRAWPLCPAHAQGYGAAIA

SEQ ID NO: 220462 - protein, 55 aa, Zea mays
  Clone ID: MRT4577_132649C.1.pep
NGTMNRVGQVTLQLGNWSDYAVGNVDIMWLVIRSGLILLFNENGVTQSMFVCENG

SEQ ID NO: 220463 - protein, 83 aa, Zea mays
  Clone ID: MRT4577_132650C.1.pep
MVKFSKRFEGQLVPEWKDAFVDYWQLKKDVKKLQAAAGEAAVAAPARAPAHWAMRLPFFHPLGQPPAAIQVHRKLAPDRSADG

SEQ ID NO: 220464 - protein, 75 aa, Zea mays
  unsure (1)..(75): unsure at all Xaa locations
  Clone ID: MRT4577_132651C.1.pep
AHGLAPKIPEGLFFLLKKGVGIRKPLXRNRKGKTFXFRVLFLESRIPPLARFFKGPKKFPPPWKFWSPPAGPLGA

SEQ ID NO: 220465 - protein, 94 aa, Zea mays
  unsure (1)..(94): unsure at all Xaa locations
  Clone ID: MRT4577_132652C.1.pep
PGIPLXKRVPGSKILRILKAHGLAPKIPEDLYFLFKKGVGIRKPLXRDRKGKAFXFRVIFVESRIPPLARFFKGPKKLPPPWKFGSPPASPLVA

SEQ ID NO: 220466 - protein, 43 aa, Zea mays
  Clone ID: MRT4577_132653C.1.pep
MAVATANAATALALALDLSLADTNSEGDALSTLLHILRYPIYI

SEQ ID NO: 220467 - protein, 66 aa, Zea mays
  Clone ID: MRT4577_132654C.1.pep
TLISYAGVTLCAVIQCHGLFFTSKAVCFKIKSRSDGLFNLKCQTDKKDIRQFLNRLYDERLRPHFS

SEQ ID NO: 220468 - protein, 62 aa, Zea mays
  Clone ID: MRT4577_132655C.1.pep
SMLNQSSSGMDVCSVHQESDHGQGTGWCCTGQSIGLIEGKHLGLGAYDNVAGRGQSALSMRI

SEQ ID NO: 220469 - protein, 108 aa, Zea mays
  unsure (1)..(108): unsure at all Xaa locations
  Clone ID: MRT4577_132656C.1.pep
MISKCLQFVPCLSCILTVPNFVLVYEAVLADNGRLKYIERIAERFVDLTMEHKGEMKVVVRTVISLTKEEEKELKETLQDILGENKTIXVEQKIDYSIMGGIXVLEFG

SEQ ID NO: 220470 - protein, 121 aa, Zea mays
  Clone ID: MRT4577_132657C.1.pep
WTTGLPCQKGTPLATILRVFARTILALLLRGNLPFLAGIIVSFISVSVHHAVLCISSKWRSPRHYSLQRPQYEGICAQKGEIVGTRRIYTSPRCVKTASNVISCASLLKTDTVVPKRKKAR

SEQ ID NO: 220471 - protein, 134 aa, Zea mays
  unsure (1)..(134): unsure at all Xaa locations
  Clone ID: MRT4577_132658C.1.pep
LHRTNQHQPWQNEADVVCCERSLANAPRILDLDLLVLLCAAAGPVVAQNCGCQPNLCCSKYGYCRTTDAYCCDRCQSGPCHSVRNCGYGGCRSGGCIYGSNVANVVTDALFNGINNQDGSGCXGKNFYTRSAFL

SEQ ID NO: 220472 - protein, 97 aa, Zea mays
  Clone ID: MRT4577_132659C.1.pep
CVGLFWLTPFLGFNGWGDTIFQLPTPGRGLLLPGLFWGFGWAKPHIGGGFCAAFKIAPRLWVAWWVPHYSHGCCCCSSWVLGWTLLAFGWGLFWGPI

SEQ ID NO: 220473 - protein, 81 aa, Zea mays
  Clone ID: MRT4577_13265C.1.pep
KTQTQTPGGLFPPGTNKKKPPQRTVLTFGPGPLGGEGKKHPLSGWGGSPILFSQYPGRGFKGAEGPAPLFFKTPDFKAVPF

SEQ ID NO: 220474 - protein, 99 aa, Zea mays
  Clone ID: MRT4577_132660C.1.pep
DSRYQDDLQVTRDLTRIKLPGVPSTAHGGNPRWGKRRRAIPVSSTLLGHGHPIVYAPRATPKPQAHTPRMIRHRGRRSPAADGDAGRKHGPEERDVPAG

SEQ ID NO: 220475 - protein, 44 aa, Zea mays
  Clone ID: MRT4577_132661C.1.pep
FLVGVSHGEQQRSYLSDRGVLRCCINGASQRMGYWMDNAKSVLK

SEQ ID NO: 220476 - protein, 133 aa, Zea mays
  Clone ID: MRT4577_132662C.1.pep
MSRSCCVAVSVLLAVAATASATAPAWLHEEAMATGPLVAEGARVAPSASTWAADKASPARPSGGMATQGDDQSSSGGSGSSGEHGKEEGEKQGKSCLTKEECHKKKMICGKGCTLSAHSKCAAKCTKSCVPTC

SEQ ID NO: 220477 - protein, 92 aa, Zea mays
  Clone ID: MRT4577_132663C.1.pep
THSMFAPLLSAKTETKPTNDEITPSEENTDKPAHSSNEAPSKEVIHLAIVQKILKFRPFSAGVSAAWSISSQGQGAPDKKKPFSCSIPPVYI

SEQ ID NO: 220478 - protein, 100 aa, Zea mays
  Clone ID: MRT4577_132664C.1.pep
NATPLGAFSAFFANSGGLSPLLVGAPMPLLGALVSHFLWPFFYNWPTGKTVESPNLLPLTPFPLFPFWPICERARTARPSQLCHILNGLWPPLVPGFYPL

SEQ ID NO: 220479 - protein, 109 aa, Zea mays
  Clone ID: MRT4577_132665C.1.pep
SRWALTPPPSRISSKYRSHAPFAGYRCRSPHLRGPLTYVFSSGGQMSVIGFCLLVLPHLLLFSGPLVLHAWHGFNGSLFFFGVLKCSHRFLSPCVKCFLVLWYQKVEYS

SEQ ID NO: 220480 - protein, 108 aa, Zea mays
  Clone ID: MRT4577_132666C.1.pep
FFLTKLNPGFGALFYFLRGAFFFFFLGRPSPLTQKKACPRAWGFFFQTGVKPRGCPPKNGNKKIKKGPILFCLKKKKKKKKKKKKKKKKKKKKKKKKKKKKKKKKKKK

SEQ ID NO: 220481 - protein, 68 aa, Zea mays
  Clone ID: MRT4577_132667C.1.pep
NSRIVWILTGKTHTPGSRPRTGRCQRSPGVYISSCVYVHGIMKNLGGFGSYTCIYPSLWIEPIRCKED

SEQ ID NO: 220482 - protein, 39 aa, Zea mays
  Clone ID: MRT4577_132668C.1.pep
LYLYLAFYLPRSYLTLATASTRAELGELDWFLNEHGDGA

SEQ ID NO: 220483 - protein, 64 aa, Zea mays
  unsure (1)..(64): unsure at all Xaa locations
  Clone ID: MRT4577_132669C.1.pep
MDRDLFRTVKQGTRNQARLLYHRLVCRLPHLLAVTLLLVVAPRLVSTLSLAXFWSEARANALVL

SEQ ID NO: 220484 - protein, 73 aa, Zea mays
  Clone ID: MRT4577_13266C.1.pep
DEPIVTMMLCNSTLSLQIRRRSILRQQTNLRCKVVSSQQKTRSNNQSSKRPTMTLHRVKGATQAHKSAQRFQA

SEQ ID NO: 220485 - protein, 110 aa, Zea mays
  unsure (1)..(110): unsure at all Xaa locations
  Clone ID: MRT4577_132670C.1.pep
MEAQKGKQEQIGILKCTVYEVEGVDVNADRQDERSKRTSVVLRNEEEKGPKRSKKSSNIEVLMXRYLDITTKLAEDETTQLTTEREARRCDDFSINNCIPVRHALPHPKI

SEQ ID NO: 220486 - protein, 103 aa, Zea mays
  Clone ID: MRT4577_132671C.1.pep
GRVGGQKMTSLSPRDLFLYAAERGALEVFSGVYYDPKLSLELDPKILQLAFMKASQRGHAPVVQVLLTDSRVDPSFDNNSALRAAARNGHCEVIKQLMADSRC

SEQ ID NO: 220487 - protein, 53 aa, Zea mays
  Clone ID: MRT4577_132672C.1.pep
MICLQMTYVSNFFSRHDTQNTKIIVTCMNSKGHIWGFASGLAKNLRPRQQRYQ

SEQ ID NO: 220488 - protein, 98 aa, Zea mays
  Clone ID: MRT4577_132673C.1.pep
MAYIRRPRPCVVTGPLSGALGKDQVRDRVAIQYPRTLLEWGSRTCLKGSRPQRNGLDTWRQRTSLGLSSSLDGTRGVRDHSLSPPDPLFMDTVSLKGA

SEQ ID NO: 220489 - protein, 943 aa, Zea mays
  unsure (1)..(943): unsure at all Xaa locations
  Clone ID: MRT4577_132674C.1.pep
MAGRPPLPSSGELFPPLPPLPLSYRATLVAPPPPARGATPRMVPMAGHPVSPPPFTESGGPVSAVPPPAVLALMAESPTSLPPSGASGPAGTPLAPLLGPADSDFAAVCPTSISLPHASQTTVLGHDDALLLPLVFPDGAIGTTIYSQSSATTSTLCAPSPSDDASAILAATHAAVAVARQRTQDTARALKKEQAVVDTIERQYAETYRHLASKGMSDGSPMSARHSADTFEPAPVPASTLRASLHAQAAALTSIWATFTDILAPDSTQYPRWRDQVLQTIRRYTVVDHVLTAVAAPMEDWLLMDEVGDLSVEEYCRQMKMMADTLLTLGAPMTDESLVLNLLCGLSPRFDHVAPIVTHMKMFPTFAEAKNNLLLVELCLSAAATTAPAMALYSVPRAAPSDSVGVPAHRTPTLLPSRAPRQTAGFRGSRNRGRGRKGGRIGGGPSGGCGGSSGGSQWLSFYNPWTGTIHMWPGSSTGASAPHPTTSQQPQQGLLSLPGSPTQPMWGPWINGWDAQSLANSFSTMMMAPPISVSDWVADSGASYHTTADAGDTVLPGTFRLTNVRVAPHIIQNLLSVRQFTTDNSCSMEFDPFGLSVKDLATRTLLARSRTLPTLSHFFAWVSTQFGRTIRSIQCDNGREFYNNASCDFFLSRGIHLRMSCPYTATRLLKTAGLNAEALTTATYLLNRLPTKAVAHPTPYFTLFDIHPSYNHLRVFGCACYPNLASTAPHKLAPHSTRCVFLGYSPDHKGYRCLDLTSQRVLISHHVVFDKSDFPFXPPLPLPLSPSSTCSSTPTXCVPTVVPPFFAAEYAALQANHTWDLVPXSPGANVVTGKWIFKMKLNGDGSLERYKARYVLRGFTQRPGVDYDETFSLVVKPATVRTVLALALSRDWLVHQLDVMNAFLHDTLTETVYCTQPVGFVDPAHPDMVCKLNKSLYGLKQPH

SEQ ID NO: 220490 - protein, 65 aa, Zea mays
  Clone ID: MRT4577_132675C.1.pep
GLVVDVLGTGVAFCCTVACLLCVVASFDCYRIIINWCHEVENAMRWWLLSAAAPVVPKKKKKKAP

SEQ ID NO: 220491 - protein, 191 aa, Zea mays
  unsure (1)..(191): unsure at all Xaa locations
  Clone ID: MRT4577_132676C.1.pep
MEEQHMAGPPYRYRLRHRRLMDIAPASASNDDSGHHGSNGMAIMVSILVVVIVCTLFYCVYCWRWRKRNAVRRAQIERLRPMSSSDLPLMDLSSIHEATNSFSKENKLGEGGFGPVYRGVMGGGAEIAVKRLSARSRQGAXEFRNEVELIAKLQHRNLVRLLGCCVERDEKMLVYEYLPNRSLDFFLFDGR

SEQ ID NO: 220492 - protein, 324 aa, Zea mays
  Clone ID: MRT4577_132677C.1.pep
MIAGQLPGVTAPIPGVGVLPNLYNLAAGQPQAMTQQATRHARRVYVGGLPPTANEQTVAIFFNGVMAAIGGNTAGPGDAVLNVYINHDKKFAFVEMRSVEEASNAMVLDGIMFEGAPVKIRRPTDYNPSLAAALGPSQPNPNLNLSAVGLTPGSAGGLEGPDRIFVGGLQYYFTEAQVRELLESFGPLRGFDLVKDRETGNSKGYAFCVYQDLNVTDIACAALNGIKMGDKTLTVRRANQGASQPRPEQESILLQAQQQVQMQKFVYQVGGALPTKVVCLTQVVTEDELRDDEEYDDIVEDMREEGHKYGKPHETHRLLLPSLF

SEQ ID NO: 220493 - protein, 187 aa, Zea mays
  unsure (1)..(187): unsure at all Xaa locations
  Clone ID: MRT4577_132678C.1.pep
MDRPPHLVIDLNEAPPPPSSDTPPAQAPSPPQELAPPVQAPPPPPPPPPPPQFPPLLPPQLPLGAPNQQVRLQQEALDVVLRVHRPLELRNTPFGPIGNVPAGLLPGLGLPLLPLQPPAPHPGEAXGXGNPPAPCSXCXRQEILGGTLVCDACDRGFHPNCVRVWPALFPPPPPPNEGLDLPCVGKA

SEQ ID NO: 220494 - protein, 88 aa, Zea mays
  Clone ID: MRT4577_132679C.1.pep
RMEEHRRITSLEIAKISIPICEVFLTQNRQWGRGSSLSLEGQVRLAPRSPAVCIDRSRFSSDLIPARRWSQRSKGSAGQRGLEPCMCP

SEQ ID NO: 220495 - protein, 78 aa, Zea mays
  Clone ID: MRT4577_13267C.1.pep
MEKATRLALAAAVVLCLLLATGPQEAAGAEGMLSYDKLLSCKVLGNCDKNRGPGATRPGKPVNKYTRGCSPLTRCRGG

SEQ ID NO: 220496 - protein, 167 aa, Zea mays
  Clone ID: MRT4577_132680C.1.pep
KFGIWLWALLKYRLPLKEIIVDFYNELKGITSGYATFDYEDSEYQQADLVKMDILLNGQPVDAMATIVHNQKAQRVGKDLVEKLKKFIERQMFEITIQAAIGSKVIARETLSAMRKNVLAKCYGGDITRKKKLLEKQKEGKKRMKRVGSVDIPQEAFHELLKVSNSK

SEQ ID NO: 220497 - protein, 176 aa, Zea mays
  Clone ID: MRT4577_132681C.1.pep
AIGFLEAGREADRARHLRASSPCRRRHECTRLLCVTTHIAMDVLLSSRGNGPVAGGPGGQEAVRRSPAREGDELLPSTPGVEKGELAQIVKDRRMLLRKVVLALTPALRKRTAPQVGDQMNNTAEIIGIAATMEEHPGRLLLHPVRGDQGEGPGRGQGVMCVLPAAEPGGVRPDPV

SEQ ID NO: 220498 - protein, 54 aa, Zea mays
  Clone ID: MRT4577_132682C.1.pep
PRYHERCALLAWRGTACHDDGSQRKCPPGPLARVIPRKCKMCFFIIYMAVLYRT

SEQ ID NO: 220499 - protein, 58 aa, Zea mays
  unsure (1)..(58): unsure at all Xaa locations
  Clone ID: MRT4577_132683C.1.pep
IIFXRXVIWIGEHLKCISLIGHTGPQGTADPEHYMIGATQVPRRGQPESGTKTLPPYF

SEQ ID NO: 220500 - protein, 570 aa, Zea mays
  unsure (1)..(570): unsure at all Xaa locations
  Clone ID: MRT4577_132684C.1.pep
MRRPSTACRHRSMLVQEPAGREEALRDSGGVLRPPGAAAGSTAXASPNHRVSLENDVRQLQLHLRQERSVRVMLDRAIGRASSALSPGHRHFRDFPAQTKELIAEIELLEEEIANREQHVLTLYRSIFDQCMSGPPSGQSSGISSPAHAKTITARTRRQPSIISSAFCSSKKLPLQPFHITESLSESGRTKNTLKAKIKHPSFSSETLDSSHSTSFPPDPKKLPYSGSXSLARTLKXHLYQCPSKISEEMVRCMASIYYLLRTEAPAGKPEKARSPFLSRSSTNVILPRRVNGEENSTPNNKCTVEIASISVDKNQMPDVSYAITHYRLLVEQLERVDLSVSENSVKLAFWINVYNSLIMHAYLAYGIPNSSLKRMALFHKAAYNIGGHAITANAIEHALLCFRSPRIGRWFESILSTAMRKKCPDEKQLVQLKFGLQECQPLALFALCTGASSDPMLRVYTAKNVMEELERAKREFLQATVVVRKSTKKLFLPRLVERYAREACVGPDSVLPWAQREGAVAVVDDRPQQEAAQRGVGSRRKAVQAVEWLPYATRFRYAFARSMVDKPHC

SEQ ID NO: 220501 - protein, 202 aa, Zea mays
  unsure (1)..(202): unsure at all Xaa locations
  Clone ID: MRT4577_132685C.1.pep
TENPTNIIHLQWFESILSTAMRKKCPDEKQLVQLKFGLQECQPLALFALCTGASSDPMXSHPTMPVLSLSDTHTMIXSNRWWASSNTFXLRVYTAKNVMEELERAKREFLQATVVVRKSTKKLFLPRLVERYAREACVGPDSVLPWAQREGAVAVVDDRPQQEAAQRGVGSRRKAVQAVEWLPYATRFRYAFARSMVDKPHC

SEQ ID NO: 220502 - protein, 60 aa, Zea mays
  Clone ID: MRT4577_132686C.1.pep
TEMAIPANALYCGQLHKYQKEQTPHHKMGASAAAPRSLVSLARWLLATALLLAGSFVFAP

SEQ ID NO: 220503 - protein, 59 aa, Zea mays
  Clone ID: MRT4577_132687C.1.pep
GSPVGISTAPKEGILEQAFVSQVARVRIAGAIVRALCFLRIVRAGKIYCKDTCRGTCKL

SEQ ID NO: 220504 - protein, 68 aa, Zea mays
  Clone ID: MRT4577_132688C.1.pep
IYNFKHVFIPIKSNISPIFSILIQSLHIGNNQTIPIPYRLYLLTYIPFTYIPHFLFFFNHPIFLSTKV

SEQ ID NO: 220505 - protein, 103 aa, Zea mays
  unsure (1)..(103): unsure at all Xaa locations
  Clone ID: MRT4577_132689C.1.pep
MAMMVDPPDGMASQGKDYYTMWXQTVLTCDTKYVPMKPIERRAYXRVCSPCSXETNVRVALKKINDVFDDREHALETQREVKLLRHLKDVDDIDLWVIKMPEH

SEQ ID NO: 220506 - protein, 54 aa, Zea mays
  Clone ID: MRT4577_13268C.1.pep
RFETNLCWSSVILIIKSRNTHCKNSYAVILMCTRNWGPPDYKASGPASRVPIAL

SEQ ID NO: 220507 - protein, 97 aa, Zea mays
  Clone ID: MRT4577_132690C.1.pep
CVHNLNGFLFLPPQIKTRWRSPLYLTAPLYLFPLGAREKPGVGSTLAPGLTPEDAATVDHTLDAHTWYFTVSNEDFFIDPEAPEERRTLLLPSPYCS

SEQ ID NO: 220508 - protein, 86 aa, Zea mays
  unsure (1)..(86): unsure at all Xaa locations
  Clone ID: MRT4577_132691C.1.pep
NGKEGNLRALLSPLQYIFGPNSGWQPVPLTDFITPVFFKKAYRKAPLCVHPNKLHQRGAPFSQKYIFXKVFFFFKNAWNKFPSKKP

SEQ ID NO: 220509 - protein, 183 aa, Zea mays
  unsure (1)..(183): unsure at all Xaa locations
  Clone ID: MRT4577_132692C.1.pep
GDWVPRGXAGSIIWRRSYGWGGSGDQPPRPLRHHASGSATIATCRQNIWPRRTSPLRFRASRPISMNLRIKSLTENPIHYAHSGARTHGCDVGEMCEGCLKDARTGSRSLRRGTDGSRGLEELTGYLTNMGLPTRELLMTILWTIQSEERLLEGENGRIPDPQTRIFITQTPTHQEICIASDC

SEQ ID NO: 220510 - protein, 88 aa, Zea mays
  unsure (1)..(88): unsure at all Xaa locations
  Clone ID: MRT4577_132693C.1.pep
PGLNKACQFXLGSVTFFVALSLHAWWKSILVKGFLRGGTGVVFREMIVLQDAAFSICNKRMCLVRWRRSVTYLPQQSGVRDVGASFGT

SEQ ID NO: 220511 - protein, 37 aa, Zea mays
  Clone ID: MRT4577_132694C.1.pep
VVFDLYFMVMPVPSVMLVPCPRVLLWCCWFRKKKWVR

SEQ ID NO: 220512 - protein, 142 aa, Zea mays
  Clone ID: MRT4577_132695C.1.pep
KKQNTNRFSWETPPPLNFFNPTTPPKGIRTKIRLYHKKKTKGPPKPFDSGKGHQKKKKPFEKKGKKKNPIRPPPKNPWATNQPSEGGPIPADNRTKQRIPPPENENHPPNLGGASPPKGQLGKQPGGPGTPLGPAPAEESPP

SEQ ID NO: 220513 - protein, 105 aa, Zea mays
  Clone ID: MRT4577_132696C.1.pep
MARRTGLSGASTGLSGVPQSSIFSPMARIELGPINTSPNRSFEEPSKSLGPPIVVLVQRTTDNPAGGPDHLTSSVSDFLTLPKSVSPVTQTLQYIGGTKMRKQLQ

SEQ ID NO: 220514 - protein, 51 aa, Zea mays
  Clone ID: MRT4577_132697C.1.pep
MHKLSGLINIHKSCLHLTTNYCIPDSMRILINNGPKHLRIQVYVKLHNTWY

SEQ ID NO: 220515 - protein, 240 aa, Zea mays
  unsure (1)..(240): unsure at all Xaa locations
  Clone ID: MRT4577_132698C.1.pep
MALLAPSPRALRVRETAAAALPHSSATAACSTVGGGAARRALWLWDNGGGTGTGRRKEHRERVRPEAYCWDVSRPVEMEEIDSMEKLDDALRWSVENNQPVVIDWMAGWCRKCIYLMPRMEKMAGEYXVSVTSPQQNXFRHSLEFCPIDTLASKLNXVLNTYTSEIMKCVDLFKSRFCCRVRFYFIDVNKVPQAVVKRGNVTRMPTIQLWKDGEWKAEVIGGHKACLVMDEVREMIENNK

SEQ ID NO: 220516 - protein, 108 aa, Zea mays
  Clone ID: MRT4577_132699C.1.pep
KPEKGGDLLQPEQFMTKKNQREIKGRRQDSERGRGGGRAGHNPCKKISAQGTYVNANRVEEHPMLQRGTRLQPLPGYTGYQEWSVPSGPSCWERPAGFFCYQRTLHRM

SEQ ID NO: 220517 - protein, 62 aa, Zea mays
  Clone ID: MRT4577_13269C.1.pep
DKSYSALIYGTSALVAIWISSIVVSALDSVPLVPQVMEVVGLGFTIWFTSRYLIFKVLLGEA

SEQ ID NO: 220518 - protein, 164 aa, Zea mays
  Clone ID: MRT4577_1326C.1.pep
SVAEITSSAFEPASMMVKCDPRHGKYMACCLMYRGDVVPKDVNAAVATIKTKRTIQFVDWCPTGFKCGINYQAPTVVPGADLAKVQRAVCMISNSTSVVEVFSRINSKFDLMYAKRAFVHWYVGEGMEEGEFSEAREDLAALEKDYEEVAAEGGSDDGDEEEEY

SEQ ID NO: 220519 - protein, 66 aa, Zea mays
  Clone ID: MRT4577_132700C.1.pep
QLSSLFITISKLRNPAITHPPLPKAIPEGYELCWPCNVEASSSQQLVYTNHSDKGNVIAALKKINK

SEQ ID NO: 220520 - protein, 111 aa, Zea mays
  unsure (1)..(111): unsure at all Xaa locations
  Clone ID: MRT4577_132701C.1.pep
RRGGGGGKKKNLPAAGXPPGGRPGGPGAGPWPAPPRPSGGRRRPPGRSRAPSWRASPPPPPPPPRRPSWRSSWLSARGPSRAVGFSGLRESSGRVLAACLLAGGWFVGIAL

SEQ ID NO: 220521 - protein, 194 aa, Zea mays
  Clone ID: MRT4577_132702C.1.pep
MENHRNFRDFLSQGCSSSTSRNRTDHEAPEDDDFGTFSQSLFALPPRINVPAPRSRIEALDLNSQSQGTDFPYLSSDQDVLRTGDGGSDLGLSPLGRGRSARTLFQSTRSISAPISHARGAIRGCRVVRGRCTSSRGGGRSAISAPIDPVLIEDFGDEPTNEIDSRAPVFTGVCISSRGKREGILVFVYCFNCV

SEQ ID NO: 220522 - protein, 107 aa, Zea mays
  unsure (1)..(107): unsure at all Xaa locations
  Clone ID: MRT4577_132704C.1.pep
HPRDPRPPPRPRGPGARPLCRGPGFPPRAXRAGSFWSRGGRPPSGPPRTLGGRHKNYPKPPVLSAPPLALRIPPFLLIRKYPPLRFPVGVVPTNSLAFCLPLYIPPV

SEQ ID NO: 220523 - protein, 126 aa, Zea mays
  unsure (1)..(126): unsure at all Xaa locations
  Clone ID: MRT4577_132705C.1.pep
HLKGGAGKDERGGQPWGGGLQGGGGGGRGNKPVNGLNSSSRSNPAKPAPPPRARGTRPPXHHGRPPXRTPREPPWGQRAPDSPGTKAKNWPPGEEEKPAPPQNPPFWTTHPLTTTTILAPNNPHTS

SEQ ID NO: 220524 - protein, 227 aa, Zea mays
  unsure (1)..(227): unsure at all Xaa locations
  Clone ID: MRT4577_132706C.1.pep
PRVRRGPWWRNPTRARPPAALSQAAIDKGGRPGRARAPAREPGGPWPGRAARPGAAARRTRPPAAGTAPSPCSPAGGPDRXARAWPAAPASTRRARPPAPTRRRAARPGAVAXGQARPXAAPCGARARAARPAGAPAQARRPVGSAVQRPLDGVRAQPLAGRTGAVASAPTSPVPARPAHERGRASTCGSAGVWRTAVQAQPWPCGHGGQPPATARGCYLLATVREQ

SEQ ID NO: 220525 - protein, 91 aa, Zea mays
  unsure (1)..(91): unsure at all Xaa locations
  Clone ID: MRT4577_132707C.1.pep
MHVWPAYGIKKFETLSYLPPLSTEDLLKHVDXLLRNCWIPCLEFSMVSFVLRVNSTSPCYYDGRYWTMWKLPMFWCNDATQVYRVLHEAIK

SEQ ID NO: 220526 - protein, 303 aa, Zea mays
  Clone ID: MRT4577_132708C.1.pep
MDLDLWISKVKEGQHLAEHELQSLCEYVKEILIEESNVQPVNSPVTVCGDIHGQFHDLMKLFATGGHVPETNYIFMGDFVDRGFNSLEVFTILLLLKARYPAHITLLRGNHESRQLTQVYGFYDECQRKYGNANAWRYCTDVFDYLTLSAIINGQVLCVHGGLSPDVRTIDQIRTIDRNCEIPHEGPFCDLMWSDPEEIETWAVSPRGAGWLFGSRVTAEFNFVNGIELVCRAHQLVQEGLKYMFQEKGLVTVWSAPNYCYRCGNVASILSFDEKMERDVKFFTETEENNQMRGPRTAVPYFL

SEQ ID NO: 220527 - protein, 63 aa, Zea mays
  Clone ID: MRT4577_132709C.1.pep
RALVLDRELPPSSAALPRAGSTAPPPLYFLPFFFILFDYTFGDHSYFILSRLIVVHMPLKWEV

SEQ ID NO: 220528 - protein, 99 aa, Zea mays
  Clone ID: MRT4577_13270C.1.pep
LGRQRQAGLSEFEDSMVHRASSRKAKVIQRNLVSKKQNTKKKLLHLARLPASKVSNHGYKIHFLKTSSPNKLCLTLVLPSKQPKVEIPAKRIHTPVFIL

SEQ ID NO: 220529 - protein, 334 aa, Zea mays
  unsure (1)..(334): unsure at all Xaa locations
  Clone ID: MRT4577_132710C.1.pep
MDVDLWISKVKEGQHLAEHELQSLCEYVKEILIEESNVQPVNSPVTVCGDIHGQFHDLMKLFATGGHVPETNYIFMGDFVDRGFNSLEVFTILLLLKARYPAHITLLRGNHESRQLTQVYGFYDECQRKYGNANAWRYCTDVFDYLTLSAIINGQVLCVHGGLSPDVRTIDQXLIINELALLTHFLKNTEHMILGLXIRTIDRNCEIPHEGPFCDLMWSDPEEIETWAVSPRGAGWLFGSRVTAEFNFVNGIELVCRAHQLVQEGLKYMFQEKGLVTVWSAPNYCYRCGNVASILSFDEKMERDVKFFTETEENNQMRGPRTAVPFPMTSIVQF

SEQ ID NO: 220530 - protein, 54 aa, Zea mays
  unsure (1)..(54): unsure at all Xaa locations
  Clone ID: MRT4577_132711C.1.pep
GFIEAGRDYCYXRCGNVASILSFDEKMERDVKFFTETEENNQMRGPRTAVPYFL

SEQ ID NO: 220531 - protein, 476 aa, Zea mays
  Clone ID: MRT4577_132712C.1.pep
EGKLSTSCSEPNIANAFWRRSQRRVAEEPRGASSSPEHPLMRARGRSILGGEKQSFQEYTESGAASRSDGLGGTSTSNARRIRRRSISITPEIGDDIVRAVRAMNETLKQNRLQRDHVEGSCSYVTEDQSNANDCPNKDDASRIIGATDSDSRNRTGPTQKAMSLPSSPHEYRGQDTQKGDDFISKEKMALAWNKVFQSSPFLNKPLLPFEEWNIDFSEITIGTRVGIGFFGEVFRGIWNGTDVAIKVFLEQDLTTENMEDFCNEIYILSRLRHPNVILFLGACITPPHLSMVTEYMEMGSLYYLIHMSGQKKKLSWRRRLKIIRDICRGLMCIHRMKIVHRDLKSANCLVNKHWTVKICDFGLSRVMIDSPMTDNSSAGTPEWMAPELIRNEPFTEKCDIFSLGVIMWELCTLSRPWEGISPVQVVYAVANEGSRLEIPEGPLGRLIADCWAEPENRPSCQEILTRLLDCEYTVS

SEQ ID NO: 220532 - protein, 88 aa, Zea mays
  Clone ID: MRT4577_132713C.1.pep
GKHFSAYSSLIYHQRFHTGEKPYKCNDCGKAFSDGSILIRHRRTHTGEKPFECKECGKGFTQSSNLIQHQRIHTGEKPYKCNECEKAF

SEQ ID NO: 220533 - protein, 71 aa, Zea mays
  Clone ID: MRT4577_132714C.1.pep
KELHGRSITVNQAQSPGGSGDGVGNGGGHVGADGYSGRRRHNGYDGGGGYNGRRQGDGGGNQGGAGSPGRH

SEQ ID NO: 220534 - protein, 408 aa, Zea mays
  unsure (1)..(408): unsure at all Xaa locations
  Clone ID: MRT4577_132715C.1.pep
DDASRIIGATDSDSRNRTGPTQKAMSLPSSPHEYRGQDTQKGDDFISKEKMALAWNKVFQSSPFLNKPLLPFEEWNIDFSEITIGTRVGIGFFGEVFRGIWNGTDVAIKVFLEQDLTTENMEDFCNEIYILXPEFLLIFYSIFFYXHYILTLIVATYSFLSAGCDIQTVTIPFNCCETVLKLLHTRCLNXLFLVRLFXPCVCVCFCSVVILFLGACITPPHLSMVTEYMEMGSLYYLIHMSGQKKKLSWRRRLKIIRDICRGLMCIHRMKIVHRDLKSANCLVNKHWTVKICDFGLSRVMIDSPMTDNSSAGTPEWMAPELIRNEPFTEKCDIFSLGVIMWELCTLSRPWEGISPVQVVYAVANEGSRLEIPEGPLGRLIADCWAEPENRPSCQEILTRLLDCEYTVS

SEQ ID NO: 220535 - protein, 247 aa, Zea mays
  Clone ID: MRT4577_132716C.1.pep
MGSMAAEMTAVEEEACIYAMQLSSTAVLPLTLKNAIELGMLEVLMGAGGKMLSPSEVAARLPPTTTNPDAPAMVDRMLHLLASYKVVSCEVEEGTHARRYGPTPVCKWFTPNQDGISMAPLLLLTNDKVPMESLYHLKDAVLDGGLPFHKAHGMTMYEYTKTDARLNHVFNEAMKSYTTIVTGKLVELYTGFHDVATLVDVGGGVGATIRAVTSKYPHIKGINFDLPHVIAEAPQSPGVEHVAGDMF

SEQ ID NO: 220536 - protein, 78 aa, Zea mays
  Clone ID: MRT4577_132717C.1.pep
CDIFSLGVIMWELCTLSRPWEGISPVQVVYAVANEGSRLEIPEGPLGRLIADCWAEPENRPSCQEILTRLLDCEYTVS

SEQ ID NO: 220537 - protein, 123 aa, Zea mays
  Clone ID: MRT4577_132718C.1.pep
PLFFFCGFFLFFFFFSPFFCSYFFLLFLLFPLCLPSFNKKGGIPSWTTPRERRGPRLYPPGGRGVTRGGGHKPVLWTLLPGAGRRTPPNSALGLGAHGPCTISPPWTQRRAPGKPPTAHLGFN

SEQ ID NO: 220538 - protein, 57 aa, Zea mays
  Clone ID: MRT4577_132719C.1.pep
RVNMLDNDITVRKPIAKLRNFSLRIGHEDVNMMYRRKISNESIQSKKGLIIIQGLKT

SEQ ID NO: 220539 - protein, 155 aa, Zea mays
  unsure (1)..(155): unsure at all Xaa locations
  Clone ID: MRT4577_13271C.1.pep
SARYLLGRKKQSFSILIGGILPFGAVFIELFFILTSIWLHQFYYIFGFLFLVFLILIVTCAEISIXVLCYFQLCSEEYLWWWRSYLTFGSSALYRFLYATFYFFTKLEITKFVSAVMYFGYMLIASYAFFALTGTIGFYACFLFTRLIYSSVKIE

SEQ ID NO: 220540 - protein, 60 aa, Zea mays
  Clone ID: MRT4577_132720C.1.pep
HNSIGNMEAERASAPSHMIQLRGQSRHQRHQRKTTVQGVSYRLARQYQSYTVALKVKRLE

SEQ ID NO: 220541 - protein, 134 aa, Zea mays
  Clone ID: MRT4577_132721C.1.pep
GLMIYYIFFFFWRGTPAFLWPPFALIPTTRPLFPTPLDGTNSPHSFNPRSLNIFWIFRPGSTAGLGVATAVYGTKVESTPSIRFEQVGATPSCLCQGGCHDTNLRIYERGLQAKGEPGGEWLPKNPAFPKRETS

SEQ ID NO: 220542 - protein, 815 aa, Zea mays
  unsure (1)..(815): unsure at all Xaa locations
  Clone ID: MRT4577_132722C.1.pep
DKSETQGTLKRFLRRAQNEFELKVKKIRSDNESEFKNLQVEEFLEEEGIKHEFSAPYTPQQNGVVERKNRTLIDMARTMLGEFKTPECFWTEAVNTACHAINRXVYLHXRLLKKXTSYELLTRKCYILVKKGRNSKFAPKAVEGFLLGYDSNTKAYRVFNKSSGLVEVSSDVVFDETNGSPREQVVDCDDVDEEDVPTAAIRTMAIGEVRPQEQDERDQPSSSTTVHPPTQDDEQVHQKEACDQGGAQDDQVIEEETQPAPPTQVRAVIQRDHLIDQILGDISKGVTTRSRLVNFCEHYSFVSSIEPFRVEEALLDPDWILAMQEELNNFKRNEVWTLVPRPKQNVVGTKWVFRNKQDEHGVVTRNKARLVAKGYAQVAGLDFEETFAPVARLESIRILLAYAAHHSFRLFQMDVKSAFLNGPIKEEVYVEQPPGFEDERYPDHVCKLSKALYGLKQAPRAWYECLRDFLLANAFKVGKADPTLFTKTCDGDLFVCQIYVDDIIFGSTNQKSCEEFSRVMTQKFEMSMMGELNYFLGFQVKQLKDGTFISQTKYTQDLLKRFGMKDAKPAKTPMGTDGHTDLNKGGKSVDQKAYRSMIGSLLYLCASRPDIMLSVCMCARFQSDPKECHLVAVKRILRYLVATPCFGLWYPKGSTFDLVGYSDSDYAGCKVDRKSTSGTCQFLGRSLVSWNSKKQTSVALSTAEAEYVAVGQCCAQLLWMRQTLRDFGYNLSKVPLLCDNESAIRMAENPVEHSRTKHIDIRHHFLRDHQQKGDIEVFHVSTENQLADIFTKPLDEKTFCRLRSELNVLDSRNLD

SEQ ID NO: 220543 - protein, 1009 aa, Zea mays
  Clone ID: MRT4577_132723C.1.pep
MDPKGKGIVINDKEKESFVNEPRDDKSNDSGSGHRRKDGKKKKTRRIKEIVYYDSDESSSSQKDDDHDKQKTEKGNKREKKKHYKKAKGEAHIGKEWDSDCSSSDSDNEGLAATAFNKSSLFPNERHTCLMAREKKVYASGGSSWIIDSGCTNHMTGEKKMFTSYVKNKDSQDSIIFGDGNQGKEKSETQGTLKRFLRRAQNEFELKVKKIRSDNGSEFKNLQVEEFLEEEGIKHEFSAPYTPQQNGVVERKNRTLIDMARTMLGEFKTPEYFWTEAVNTACHAINRVYLHRLLKKTSYELLTGNKPNVSYFRVFGSKCYILVKKGRNSKFVPKAVEGFLLGYDSNTKAYRVFNKSSGLVEVSSDVVFDETNGSPREQVVDCDDVDEEDVPTAAIRTMAIGEVRPQEQDERDQPSSSTMVHPPTEGDVQVPLVEAIDQGGAQGDQVMEEEAQPAPPTQVRAMIQRDHPVDQILGDISKGVTTRSRLVNFCEHYSFVSSIEPFRVEEALLDPDWVLAMQEELNNFKRNEVWTLVPRPKQNVVGTKWVFRNKQDEHGVVTRNKARLVAKGYAQVAGLDFEETFAPVARLESIRILLAYAAHHSFRLYQMDVKSAFLNGPIKEEVYVEQPPGFEDERYPDHVCKLSKALYGLKQAPRAWYECLRDFLIANAFKVGKADPTLFTKTCDGDLFVCQIYVDDIIFGSTNQKSCEEFSRVMTQKFEMSMMGELNYFLGFQVKQLKDGTFISQTKYTQDLLKRFGMKDAKPAKTPMGTDGHTDLNKGGKSVDQKAYRSMIGSLLYLCASRPDIMLSVCMCARFQSDPKECHLVAVKRILRYLVATPCFGLWYPKGSTFDLVGYSDSDYAGCKVDRKSTSGTCQFLGRSLVSWNSKKQTSVALSTAEAEYVAAGQCCAQLLWMRQTLRDFGYNLSKVPLLCDNESAIRMAENPVEHSRTKHIDIRHHFLRDHQQKGDIEVFHVSTENQLADIFTKPLDEKTFCRLRSELNVIDSRNLD

SEQ ID NO: 220544 - protein, 54 aa, Zea mays
  unsure (1)..(54): unsure at all Xaa locations
  Clone ID: MRT4577_132724C.1.pep
SLPPSCHDEIGFPILMTCPGRMVHSTLXXVYXCPGAARSKKGRISADIPITTGG

SEQ ID NO: 220545 - protein, 1252 aa, Zea mays
  unsure (1)..(1252): unsure at all Xaa locations
  Clone ID: MRT4577_132725C.1.pep
MELVEGELGRFVMIRGEEPTQTYNRLKTLINKIRSYGSTRWMDHDVVRLMLRSFTVLDPHLVNNIRENPRYTKMLPEEVLGKFVSGRMMIKEARYVDDALNVPINEPQPVALKATRSKEALPSKVAQVEAAGLNDEEMALIIKRFKTALKGRKGQPSKTKTKGKRSCFKCGKIGQFIANCPDNDSDQEQGNKREKKKAYKKAKGEAHLGKEWDSDCSSSDSDNEGLTATAFNKSSLFPNERHTCLMAKEKKGLDRTKVNKINELIDALNDKNRLLEKQEDLLYEEHDKFVEAQKSLALEIKRNEMLSCELSTCHETISSLKDVNNDLNAKLEVANRSNSCVEHVVICTRCKDFNVDACSEHLVSIAKLNDELASLNAQLKTSKSEFDKLKFARDAYTIGRHPSIKDGLGFKREAKNLTSHKAPISAKEKGKAPMASSAKKNHAFMYHDRRHSRNAYRSYDAFDSHAMFASSSSYMHGGDMSRRNVVHHMPRRNVVNVPRKINEPSTIYHACNASFAICRKDKKVIARKLGARCKGDKTCIWVPKTIVTNLVGPNKSWVYASGGSSWIIDSGCTNHMTGEKKMFTSYVKNKDSQDSIIFGDGNQGKDKSETQGTLKRFLRRAQNEFELKVKKIRSDNGSEFKNLQVYLHRLLKKTSYELLTVKKGRNSKFAPKAVEGFLLGYDSNTKAYRVFNKSSGLVEVSSDVVFDETNGSPREQVVDLDDVDEEDVPSAAIRTMAIGDVRPQEQKEQDQPSSSTMVNPPTPDDEQVPQVEARDQGGAQDVQVEEEEAPQAPPTQVRATIQRNHPVDQILGDISKGVTTRSRLVNFCEHYSFVSSIEPFRVEEALLDPDWVLAMQEELNNFKRNEVWTLVPRPKQNVVGTKWVFHNKHDEHGVVTRNKARLVAKGYAQVAGLDFEETFAPVARLESIRILLAYAAHHSFRLFQMDVKSAFLNGPIKEEVYVEQPPGFEDERYPDHVCKLSKALYGLKQSPRAWYECLRDFLIANAFKVGKADPTLFTKTCDGDLFVCQIYVDDIIFGSTNQKSCEEFSRVMTQKFEMSMMGELNYFLGFQVKQLKDGTFISQTKYTQDLLKRFGMKDAKPAKTPMGTDGHTDLNKGGKSVDQKAYRSMIGSLLYLCASRPDIMLSVCMCARFQSDPREFHLVAVKRILRYLVATPCFGIWYPKGSNFDLIGYSDSDYAGCKVDRKSTSGTCQFLGRSLVSWNSKKQTSVALXTAEAEYVAAGQCCAQLLWM

SEQ ID NO: 220546 - protein, 1696 aa, Zea mays
  Clone ID: MRT4577_132726C.1.pep
MDPKGKGIVINDKEKESFVNELKDDKPTDSGSGHRRKEGKKKKTRRIKEIVYYDDSDESTSSQKDDDHNDYEQRKPVNSNFSFDYSRIPQSSNSHLLSIPLGKPPHFDGEDYGFWSHKMRSHLFSLHPSIWEIVDSGMHFNSSDSPIFINEQIHKNAQATTVLLASLCRDEYNKVSGLDNAKQIWDTLKISHEGNDATLLTKMELVEGELGRFAMIRGEEPTQTYNRLKTLINKIRSYGSTRWTDHDVVRLMLRSFTVLDPHLVNNIRENPRYTKMSPEEILGKFVSGRMMIKEARYVDDALNGPIHEPQPIALKASRSKEALPSKVAQIEAAGLNDEEMALIIKRFKTALRGRKEHPNKTKTKGKRSCFKCGKIGHFIANCPDNDSDQEKKSGKWEKKKNYKKTKGEAHIGKEWDSDCSSSDSDNEGLAATAFNKSTLFPNERHTCLMAKEKKVCTRNSTYASSSEDESSDEDEVDYSCLFKGLDRSKIDKINELIDALNEKNILLEKQEDLLYEEHDKFVEAQKSLALEIKRNEMLACEVSTCHDSISNLKSINDDLNAKLVEANKSNSCVKHVEICTRCKDVDINACSEHLVYISKLSDEVASLNAQLKTSKSDFEKLKFARDAYTVGRHPSIKDGLGFKREAKNLTSHKAPIPAKEKGKAPMATSAKRNHAFLYHDKRQTRSYDAFDSYVYDSHAMFAPSSSYVYDRNVTRRNVVPKRNVANVHRKVVNEPSTIYCALNASFAICRKDRKVIARKLGAKCKGDKTCIWVPKEIVTNLVGPNKSWVYASGGSSWIIDSGCTNHMTGEKKMFTSYVKNKDSQDSIIFGDGNQGKVKGLDVSVFRRSDGSLAFKGVLDGKLYLVDFAKEEEKSETQGTLKRFLRRAQNEFELKVKKIRSDNGSEFKNLQVEEFLEEEGIKHEFSAPYTPQQNGVVERKNRTLIDMARTMLGEFKTPECFWTEAVNTACHAINRVYLHRLLKKTSYELLTGNKPNVSYFRVFGSKCYILVKKGRNSKFAPKAVEGFLLGYDSNTKAYRVFNKSSGLVEVSSDVVFDETNGSPREQVVDCDDVDEEDVPTAAIRTMAIGEVRPQEQDKRDQPSSSTMVHPPTKDDEQVPQVEALDQGGAQDDQVMEEEAQPAPPTQVRAMIQRDHPVDQILGDISKGVTTRSRLVNFCEHYSFVSSIEPFRVEEALLDPDWVLAMQEELNNFKRNEVWTLVPRPKQNVVGTKWVFRNKQDEHGVVTRNKARLVAKGYAQVAGLDFEETFAPVARLESIRILLAYAAHHSFRLYQMDVKSAFLNGPIKEEVYVEQPPGFEDERYPDHVCKLSKALYGLKQAPRAWYECLRDFLLANAFKVGKADPTLFTKTCDGDLFVCQIYVDDIIFGSTNQKSCEEFSRVMTQKFEMSMMGELNYFLGFQVKQLKDGTFISQTKYTQDLLKRFGMKDAKPAKTPMGTDGHTDLNKGGKSVDQKAYRSMIGSLLYLCASRPDIMLSVCMCARFQSDPKECHLVAVKRILRYLVATPCFGLWYPKGSTFDLVGYSDSDYAGCKVDRKSTSGTCQFLGRSLVSWNSKKQTSVALSTAEAEYVAAGQCCAQLLWMRQTLRDFGYNLSKVPLLCDNESAIRMAENPVEHSRTKHIDIRHHFLRDHQQKGDLEVFHVSTENQLADIFTKPLDEKTFCRLRSELNVIDSRNLD

SEQ ID NO: 220547 - protein, 142 aa, Zea mays
  Clone ID: MRT4577_132727C.1.pep
MQEELNNFKRNEVWTLVPRPKQNIMGTKWVFRNKQDEHGVVTRNKARLVAKGYAQVAEFSRVMTQKFEMSMMGELNYFLGFQVKQLKDGTFISQTKYTQDLLKRFGMKDAKPAKTPMGTDGHTDLNKGVVKTLPGPHKSVAK

SEQ ID NO: 220548 - protein, 560 aa, Zea mays
  Clone ID: MRT4577_132728C.1.pep
MSWVYASGGSSWIIDSGCTNHMTGEKKMFTSYVKNKDSQDSIIFGDGNQGKPFRVEEALLDPDWVLAMQEELNNFKRNEVWTLVPHPKQNVVGTKWVFRNKQDEHGVVTRNKARLVAKGYAQVAGLDFEETFAPVARLESIRILLAYAAHHSFRLFQMDVKSAFLNGPIKEEVYVEQPPGFEDERYPDHVCKLSKALYGLKQAPRAWYECLRDFLIANAFKVGKADPTLFTKTCNGDLFVCQIYVDDIIFGSTNQKSCEEFSRVMTQKFEMSMMGELNYFLGFQVKQLKDGTFISQTKYTQDLLKRFGMKDAKPAKTPMGTDGHTDLNKGGKSVDQKAYRSMIGSLLYLCASRPDIMLSVCMCARFQSDPKECHLVAVKRILRYLVATPCFGLWYPKGSTFDLVGYSDSDYAGCKVDRKSTSGTCQFLGRSLVSWNSKKQTSVALSTAEAEYVAAGQCCAQLLWMRQTLRDFGYNLSKVPLLCDNESAIRMAENPVEHSRTKHIDIRHHFLRDHQQKGDIEVFHVSTENQLADIFTKPLDEKTFCRLRSELNVLDSRNLD

SEQ ID NO: 220549 - protein, 816 aa, Zea mays
  Clone ID: MRT4577_132729C.1.pep
MTTSRPLELLHMDLFGPVTYLSIGGSKYGLVIVDDFSRFTWVFFLQDKSETQGTLKRFLRRAQNEFELKVKKIRSDNGSEFKNLQVEEYLEEEGIKHEFSAPYTPQQNGVVERKNRTLIDMVRTMLGEFKTPERFWSEAVNTACHAINRVYLHCLLKKTSYELLTGNKPNVSYFRVFGSKCYILVKKGRNSKFAPKAVEGFLLGYDSNTKAYRVFNKSSGLVEVSSDVIFDETNGSPREQVVDLDDVDEEDVPTAAIRTMAIGDVWPQEQNEQDQPSSSTMVHPPTQDDEQVHQEEASDQGGAQDDHPFRVEEALLDPDWVLAMQEELNNFKRNEVWTLVPHPKQNVVGTKWVFRNKQDDHGVVTRNKARLVAKGYAQVVGLDFEETFASMARLESIRILLAYAAHHSFRLFQMDVKSAFLNGPIKEEVYVEQPPGFEDERYPDHVCKLSKALYGLKQAPRAWYECLRDFLIANAFKVGKADPTLFTKTCDGDLFVCQIYVDDIIFGSTNQKSCEEFSRVMTQKFEMSMMGELNYFLGFQVKQLKDGTFISQTKYTQDLLKRFGMKDAKPAKTPMGTDRHTDLNKGGKSVDQKAYRSMIGSLLYLCASRPDIMLSVCMCARFQSDPKECHLVAVKRIFRYLVATPCFGIWYPKGSTFDLIGYSDSDYAGCKVDRKSTSGTCQFLGRSLVSWNSKKQTSVALSTTEAEYVAAGQCCAQLLWMRQTLRDFGYNLSKVPLLCDNESAIRMAENPVEHSRTKHIDIRHHFLRDHQQKGDIDVFHVSTENQLADIFTKPLDEKTFCRLRSELNVLDSRNLD

SEQ ID NO: 220550 - protein, 50 aa, Zea mays
  Clone ID: MRT4577_13272C.1.pep
AQDALLLDCRSRDPVATHCSLVLELVLISRIASRLFHCLSRLRSVPTAPA

SEQ ID NO: 220551 - protein, 82 aa, Zea mays
  unsure (1)..(82): unsure at all Xaa locations
  Clone ID: MRT4577_132730C.1.pep
KFKFLARQKIIENKRGGFARFNGAEAEEYNTRVNFVPKGAHLNLVVNQAPLXKCARGKAVLNAVAKVRMRILTICVRESASP

SEQ ID NO: 220552 - protein, 211 aa, Zea mays
  Clone ID: MRT4577_132731C.1.pep
MKDAKPAKTLMGTDGHTDLNKGECHLVAVKRILRYLVATPCFGIWYPKGSTFDLIGYSDSDYAGCKVDRKSTSGTCQFLGRSLVSWNSKKQTSVALSTAEAEYVAAGQCCAQLLWMRQTLRDFGYNLSKVPLLCDNESAIRMAENPVEHSRTKHIDIRHHFLRDHQQKGDIEVFHVSTENQLADIFTKPLDEKTFCRLRSELNVLDSRNLD

SEQ ID NO: 220553 - protein, 100 aa, Zea mays
  Clone ID: MRT4577_132732C.1.pep
KGAVNPMRQRDRSAVVFTVNDKSRPEPKSTALERDIILAKMMMAIHMALSLGTTRIDCLISTTIHGTTILVVTPYSQWTPRLRPEILSASWGNRHTHVCT

SEQ ID NO: 220554 - protein, 225 aa, Zea mays
  Clone ID: MRT4577_132733C.1.pep
METPPRGRWPPGFRFSPTDEELVLYFLKRRIASGRPCPYVADVEVYKSHPSHLPERSALQTGDRQWFFFSRMDRKYPNGSRASRTTGDGYWKATGKDRFICGGGRAVGNKKTLVYHHGRAPRGERTDWVMHEYTLLADALPPAAQGREFYALYKLFQKSGAGPKNGEQYGAPFREEDWLDDDDERVIAGAAANPVPNTNSPPSTMEEHAITDRELPIEGLDQPLS

SEQ ID NO: 220555 - protein, 256 aa, Zea mays
  Clone ID: MRT4577_132734C.1.pep
MAATSLSSSLPRATAKLTGVPRSSSYYTQLIFCSRHPFQKAAAAAAFQKLPPELLRLSYPARNNKHARTSWRRATDNDQAAPAAAQGTTSTPPLPGSPVPSAERSPVTPGNGQPQQPVADANGSAPSEPPKRAPLTARERLRAARVLGKYAEPSAKGSSSKPAKPEFGSGVLDALREADAKKAGGGGGRRGSRLPEAPGNLFDDSKRGMPKDGWTFELPFGVDVFLVLVSFTLITTIMFGTAFLVWKLGAIHFNEY

SEQ ID NO: 220556 - protein, 462 aa, Zea mays
  Clone ID: MRT4577_132735C.1.pep
MQEELNNFKRNEVWTLVPRPKQNVVGTKWVFRNKQDEHGVVTRNKARLVAKGYAQVAGLDFEETFAPVARLESIRVLLAYAAHHSFRLFQMDVKSAFLNGPIKEEVYVEQPPSFEDERYPDHVCKLSKALYGLKQAPRAWYECLRDFLIANAFKVGKADPTLFTKTCDGDLFVCQIYVDDIIFGSTDQKSCQEFSRVMTQKFEMSMMGKLNYFLGFQVKQLKDGTFISQTKYTQDLLKRFGMKDAKPAKTSMGTDGHVDLNKGGKSVDQKAYRSMIGSLLYLCASRPDIMLSVCMCARFQSDLRECQLVAVKRILRYLVATPCFGISYPKGSTFNLIGYSDSDYAGCKVDRKSTSGTCQFLGRSLVSWSSKKQTSVALSTAEAEYVAAGQCCAQLLWMRQTLRDFGYNLSKVPLLCDNESAIRIADNPVEHSRTKHIDIRHHFLRDHQQKGDIEVFYVSTEN

SEQ ID NO: 220557 - protein, 231 aa, Zea mays
  Clone ID: MRT4577_132736C.1.pep
KEPGRTHRQSVCRVLSGCCRGLGSLADAERVLETMSAVGVSPDVESFGCLAFLYAWRGVPSRVDELDTLFDALGFSKKGFFKNLVSGYLKSGDFESVSPIILRAVKERRVGDDNGLDEETYTEVAQCFVDRARIRELAQLIIQAHEIELAQQSISVEDSVGFGIVNACVELGLLNKAHSILDEMTAQGASVGLGVYSSILKAYCKEQKTAEAAQLVAEISAAGLQLDAGRL

SEQ ID NO: 220558 - protein, 70 aa, Zea mays
  Clone ID: MRT4577_132737C.1.pep
AGTLSCLQKCMFTCQLHMCAVSSPGSLRSRFTKVRELDSSCLPNRAFVNAGSSLDRVVLSGQEYEPWSAL

SEQ ID NO: 220559 - protein, 92 aa, Zea mays
  unsure (1)..(92): unsure at all Xaa locations
  Clone ID: MRT4577_132738C.1.pep
SSHSAAPPWRCTLHAWISLLLALAVALSARAEEEPAAAAEGEAVLTLDVDSFDEAVAKHPFMVVQFYAPXCGHXNKLAPXYYNEAKTPSKYD

SEQ ID NO: 220560 - protein, 70 aa, Zea mays
  Clone ID: MRT4577_132739C.1.pep
RAKAVTNIYPQQISGHFTTQQHGGVVVFMTMHVHPSSGLKAPDHRRYQGRIHLPLHGAFQGRAPALSQPH

SEQ ID NO: 220561 - protein, 350 aa, Zea mays
  Clone ID: MRT4577_13273C.1.pep
LSGMVVGIMLRTLYRDISKYNQLETQEEAQEETGWKLVHGDVFRPPSNSDWLCVYVGTGVQFFGMLLVTMVFAVLGFLSPSNRGGLMTAMLLLWVFMGLLAGYSSSRLYKLFKGSEWKNIALRTAFTFPGSVFAIFFFLNALIWGQKSSGAVPFTTMFALVLLWFGISVPLVFVGSFLGFKKPTIEDPVKTNKIPRQIPEQAWYMNPIFSILIGGILPFGAVFIELFFILTSIWLHQFYYIFGFLFLVFLILIVTCAEISIVLCYFQLCSEDYLWWWRSYLTSGSSALYLFLYATFYFFTKLEITKFVSAVMYFGYMLIASYAFFALTGTIGFYACFLFTRLIYSSVKIE

SEQ ID NO: 220562 - protein, 91 aa, Zea mays
  Clone ID: MRT4577_132740C.1.pep
MGLEDEQKMLTESGDPEEEEEEEEELVDPLTTVREQCEQLEKCVKARERLELCDERVSSRSHTEEDCTEELFDFLHARDHCVAHKLFNNLK

SEQ ID NO: 220563 - protein, 90 aa, Zea mays
  Clone ID: MRT4577_132741C.1.pep
APKDLRVYGGPNFLQNFLALVFPVPSVSPCCPLGIIVYLEVLRFNQGPAFSPLFFLGGGPGSKNSPVVGPFFPSFGLGESWAFLARGFSR

SEQ ID NO: 220564 - protein, 109 aa, Zea mays
  Clone ID: MRT4577_132742C.1.pep
VSFGLHLFLTHLCCFYQFYHGQTVSGVVISRTGRGSPLAAAAAAHSRRRRRHWPLRAAGSGRRRMTRSGSMCLWTAGCSALPPRSSARALVAPVTGLAVTEQAAAAASA

SEQ ID NO: 220565 - protein, 91 aa, Zea mays
  unsure (1)..(91): unsure at all Xaa locations
  Clone ID: MRT4577_132743C.1.pep
MRPTSKPWQVKYFSPTXSYSWPREYETAILAAGTRSTSKERVVTIAKDPLERGYKTATYYIDDWEPSKLYRKMQSTWSANHKSEGIFFFSS

SEQ ID NO: 220566 - protein, 113 aa, Zea mays
  unsure (1)..(113): unsure at all Xaa locations
  Clone ID: MRT4577_132744C.1.pep
PVELXRARFIPRVDDILAKRARDKLCKQIXEXSGIVYAVVVNLTNWECVCLGPLARMPVVVGPPSFICVDIPHKMGRNKISSVXKGIIAPPDLSDSGLARTMXAYQSDTDHNK

SEQ ID NO: 220567 - protein, 97 aa, Zea mays
  unsure (1)..(97): unsure at all Xaa locations
  Clone ID: MRT4577_132745C.1.pep
GVPSKPGPTAEREGPLANKPKGLXNPPPFGPKKGPKLKILRRKSYCSNGIGTFLTFNKDLKTLYPLLFRLTKLNYPGLFTNNYALNKIFKVNLLRPF

SEQ ID NO: 220568 - protein, 45 aa, Zea mays
  Clone ID: MRT4577_132746C.1.pep
VFRCKVARRALARAVVIVGFILPLRQPMCTADRSVLLLLLGLVLR

SEQ ID NO: 220569 - protein, 65 aa, Zea mays
  Clone ID: MRT4577_132747C.1.pep
IRHEARCCLLRRRDRASATHTVGLARPWSCGLVRRRSLLVTVTSRRRPGRWICTVGFPRPLYECL

SEQ ID NO: 220570 - protein, 112 aa, Zea mays
  Clone ID: MRT4577_132748C.1.pep
KKSVVPLAMDAQTVPGALVERVRPLQARVRGAAVDPEVHQPVGEDEEDGHADVDVQDQVRAQELPQLQQPLGPQAAVGEAGVHGVREPWPCSELQSRHSRSWHSRPALRLAS

SEQ ID NO: 220571 - protein, 73 aa, Zea mays
  Clone ID: MRT4577_132749C.1.pep
LDSPGVQSVADRLQAGACLLSHQPDVHNDLLQIAAGALFCVCSPRQILEQACEQSSRRMLMGNSAPRSVRAIE

SEQ ID NO: 220572 - protein, 588 aa, Zea mays
  Clone ID: MRT4577_13274C.1.pep
MVAAGAGSGKAPSHSSSSILSLLAPRRGAASVAPLPSPAHNSGMEPSAWAVAFAALCIVALAPPASGFYLPGVAPNDFEKKDPLPVKVNKLTSIKTQLPYSYYSLPFCKPDTIVDSAENLGEVLRGDRIENSPYTFEMREPQMCQVVCKISVGEKEAKLLKEKIEDEYRVNMILDNLPLVVPIQRVDQEGAYFYQHGFHVGAKGKYSGSKDEKYFIHNHLSFTVKYHRDEQRDVSRIVAFEVKPYSVKHEYEGQWNDKKTRLTTCDPHAQRIITSSESPQEVEVGKDIIFTYDVDFKESDIKWASRWDSYLLMTDDQIHWFSIVNSLMIVLFLSGMVAMIMLRTLYRDISKYNQLETQEEAQEETGWKLVHGDVFRPPANSDWLCVYVGTGVQFFGMLLVTMVFAVLGFLSPSNRGGLMTAMLLLWVFMGLLAGYSSSRLYKLFKGSEWKNIALRTAFTFPGSVFTVFFFLNILIWGQKSSGAVPFTTMFALVLLWFGISVPLVFVGSYLGFKKPAIEDPVKTNKIPRQVPEQAWYMNSIFSILIGGILPFGAVFIELFFILTSIWLHQFYYIFGFLFLVFLILIVTC

SEQ ID NO: 220573 - protein, 53 aa, Zea mays
  Clone ID: MRT4577_132750C.1.pep
SHISSRLVIIFGKRRTCIRGLYKMGTCFVCIWRVSNDHEQPFVSAACEGLTCF

SEQ ID NO: 220574 - protein, 96 aa, Zea mays
  Clone ID: MRT4577_132751C.1.pep
GKRGLPAWNPTFLLKARSLKGTAMAKKKKNQGQLFKKKRREFQTKGPNHNRETGFWAGEGVLINPAGPRHQWKPNPIPIRTEEIKTHGGAGFPTAP

SEQ ID NO: 220575 - protein, 120 aa, Zea mays
  Clone ID: MRT4577_132752C.1.pep
VMYGYPPRHFGITTQTAISVPDLASWIQERELMQKLIKQHLLRAQDRMKKQADKNRSERVFAVNDWVFLKLQPYVQTSVATRAHHKLSFKFFGPYKIIEKISPVAYKLQLPADSAIHPVF

SEQ ID NO: 220576 - protein, 133 aa, Zea mays
  unsure (1)..(133): unsure at all Xaa locations
  Clone ID: MRT4577_132753C.1.pep
RPAPGPPVLGGVLAMAKTMGAPAPCFPASVPGPRFPLLLCPPASPXPGSXLGPGGLGGAPCCGGRCPPRVPGVWQKKKNVPPARAGGIASKNPADRRRWALGLCVLDRPRSKREGSRATEAQKSIGDVCLPPP

SEQ ID NO: 220577 - protein, 97 aa, Zea mays
  Clone ID: MRT4577_132754C.1.pep
MRYESLTYIFQTEPTTMSGATTELWTGMLISSGDTKFYLHKFTLLQRGHMKRRCILLTSNDYKNNQGDISDIPGGPSTFKIRAKFCYRMIATLNAYN

SEQ ID NO: 220578 - protein, 248 aa, Zea mays
  Clone ID: MRT4577_132755C.1.pep
VSGLHCTWQVRWPTIFPSGRVDVIICGRGGTRPRGPYNRNITRLTCIAAVRASAAQSAQMERRQEAKVVKLRAVEATPESFASFGQVIGASPDGDEFGPHDAQLDLSRGIPRFYIMRLQNRPLKFSTITHHASVTQCLGSVGGQDWYLGVAKPSIVDGASEQSGPEGRKFLQSAAGHYYLPPDPAEVCVFRVSGPKFLKLNKGTWHAGPLFKADAVDFYNLELSNTNVVDHTTHHFKKHDGITFVVED

SEQ ID NO: 220579 - protein, 186 aa, Zea mays
  unsure (1)..(186): unsure at all Xaa locations
  Clone ID: MRT4577_132756C.1.pep
AHASAXRVXTKQVVVDDNVTLCLVKEIDDIATAARQPRDEQKQQQWWCLGQLLLEATQRRQELANDFVRLVSWLHACTETLLCQAADAAAANKEISIATGTAGAAASADVCRKLSRYMMYLVAANPGGAASSLLQEGNPEAEFRRCDGYRSCRTVDEQRDACMRLLCDXGGPAASEAMSTTLWPCS

SEQ ID NO: 220580 - protein, 121 aa, Zea mays
  unsure (1)..(121): unsure at all Xaa locations
  Clone ID: MRT4577_132757C.1.pep
GKAGRLPEPGLHYSVDPCVRVATEEAAYLTEYSIHVDGLMRKDQIRAYKAMHNRMIXECDKELNNRNITVHCTTKAMDVVSXTNGXMSGVHLKRRDTRDESGLTVKGIFYGIGHTPNRKLL

SEQ ID NO: 220581 - protein, 520 aa, Zea mays
  unsure (1)..(520): unsure at all Xaa locations
  Clone ID: MRT4577_132758C.1.pep
MGEDLVTTLSMENGGGGGGGHHGPCTLLSMDPSGHLSAPDDRAVGVMVQTLIGGGVGAGARAHAVSPSGAPPPDINQPWQTDLCDMLDVGLGPQVYSAEAVLSCAPKXGSWISAELVYSICGDWFXFTFYFTPLLSDKCKDKVVRDNSGGVSGFDKSDLRLDMFLVQHDMENMYMWVFKERPENALGKMQLRSYMNGHSRPGEPQFPFSVDRGFVRSHRMQRKHYRGLSNPQCIHGIEVVRSPNLVGLTEADLRRWADLTGRELNFIIPQEASDFGTWRTIPNSELELEKPHPVMKSNGTQNPKKTGLNLSSPSNHSGEDGMDLSPVSSKRRKELSPQAMDEEVFFPLNSCPQKTQQDVEMHSPTQPAAWLHEFTGVMRNACGPVTAAKSIYEDDQGYLIMVSLPFVDQQRVKVSWRNTLTHGIVKIVCVSTARMQHIRRHGRMFALADPSPEHCPPGDFIREIPLATRIPEDAKLEACFDEAASVLEIMVPKRGNEPEEHEVRVSLRPPHYGANDLLLT

SEQ ID NO: 220582 - protein, 541 aa, Zea mays
  Clone ID: MRT4577_132759C.1.pep
HPPPPRAASKQPWGKTSSPPCPWRTAAAAAAATTAPARSSPWTRPATSPRRTTAPSASWCRPSGAGARAHAVSPSGAPPDINQPWQTDLCDMLDVVGPQVYSAEPCSAAPPKSTGSGNGSATATVKFGTRKCAKRGDSIWGAWFFFNHYFKPALVEKPKGKVTRDASGSISGFDKSDLRLDVFLVQHDMENMYMWVFKERPDNALGKMQLRSFMNGHSKHGEPSFPFSADKGFSRSHRMQRKQYRGLSNPQCLHGIEIVGSPNLSAVPDADLKRWAELTGRELNFSIPSEASDFEAWRNLPSTDFELDRPHPPAAKSATHGSHSHKKGLNGSGLNLSTPPSSDDGMDLSPKCAKRRKDFFGHGVEEDCVMANNSCSDREQEAEAHTGEPSWMHEFTGVAKHASGPVTAAKTIYEDEEGYLIVVSMLFSDPHSVKVSWRNTLTHGIVKITCVSTARMPYIKRHDRTFKLTDPSPEHCPPGEFVREIPLATRIPEDAKIEAYYDETGTGLEIMVPKHRVGPEEHEVRVCMRPPHLGDSDLVLS

SEQ ID NO: 220583 - protein, 62 aa, Zea mays
  Clone ID: MRT4577_13275C.1.pep
HKLRWVYGKKATTWGGPKINIFFGKKKGDHLRLKTFLGPRAETRGALPPILSGGGKNGALSG

SEQ ID NO: 220584 - protein, 62 aa, Zea mays
  Clone ID: MRT4577_132760C.1.pep
MDCVTLIEDYHNKIEFELNKIYDGILKLFASHLPPSLTVPKSKVFYLKMKGDYYRYLAEFET

SEQ ID NO: 220585 - protein, 191 aa, Zea mays
  Clone ID: MRT4577_132761C.1.pep
MPPRAHSKTSRVPRRPFESARLDSELKLVGEYGLRNKREVWRVGLTLSKIRRAARQLLTLDEKDPKRLFEGNALIRRLVRVGVLDESRMKLDYVLALKIEDFLERRLQTCVWKLGLAKSIHHARVLIRQRHIRVGKQIVNVPSFIVRLDSQKHIDFALTSPFGGGRPGRVRRKKAKAAEGGEGGEDEEDEE

SEQ ID NO: 220586 - protein, 61 aa, Zea mays
  Clone ID: MRT4577_132762C.1.pep
YGSSRPSDVLNQGSITTLSKLMTPTCLTRYKTSTGFLQRMDTRHECSLAKRRRILSLCTTQ

SEQ ID NO: 220587 - protein, 96 aa, Zea mays
  unsure (1)..(96): unsure at all Xaa locations
  Clone ID: MRT4577_132763C.1.pep
SSQSFSRPTKIPILSRNLVLLLLKNALPTCAFSLDDPITFGPAIPPMIKLGVSLFXHKPDEPGAHMPQLKGDAGQTKIVQVNPVSHRIPPVYLSPR

SEQ ID NO: 220588 - protein, 117 aa, Zea mays
  Clone ID: MRT4577_132764C.1.pep
MERVPGVEEQKSADQVNQAGLADESTTVPWLKLGLDAPKSEEVKPQEVKPVGTPHRTFSCNYCMRKFFSSQALGGHQNAHKRGVEEPGGLVWPGSFTASSDESKKQMEKNLDLTLRL

SEQ ID NO: 220589 - protein, 51 aa, Zea mays
  Clone ID: MRT4577_132765C.1.pep
LACVLRHDSCLATCSISVAVPSHHARHDGSLVTGYSLQVKKKRKKKKKKRP

SEQ ID NO: 220590 - protein, 178 aa, Zea mays
  Clone ID: MRT4577_132766C.1.pep
MERVPGVEEQKSADQVNQAGLADESTTVPWLKLGLDAPKSEEVKPQEVKPVATPHRTFSCNYCMRKFFSSQALGGHQNAHKRERCAARKTYKLQMIMGLPPSASFLQPLRVNSHSTILKGHGERAAVAVARFDGGQMSGWMPFAVEEPGGLVWPGSFTASSDESKKQMEKNLDLTLRL

SEQ ID NO: 220591 - protein, 43 aa, Zea mays
  Clone ID: MRT4577_132767C.1.pep
RTRGRYSSRLYIAYAPLVVVGTLLAASVPVVGFNAIMTSEHFG

SEQ ID NO: 220592 - protein, 65 aa, Zea mays
  Clone ID: MRT4577_132768C.1.pep
LDWEMRIRCNAQAGTNIPSTVGRQPKPTTEFIVHCALGFMGIQELSHKVAILHNLEMTASTSKGV

SEQ ID NO: 220593 - protein, 238 aa, Zea mays
  Clone ID: MRT4577_132769C.1.pep
SGPTRLGIAIDAARGLSYMHDECAQPIVHRDVKSSNILLDPGFRAKIADFGLARILLKSGEPESVSAVSGTFGYMAPEYGRGAKVNQKVDVYSFGVVLLELATGRVANDSSKDAADCCLVEWAWRRYKAGDPLHDVVDETIQDRAVYIDDAVAMFKLGVMCTGDDAPSRPSMKQVLQQLARYDRTASVAGACQDDRGVELGHLPKGKQGRHQVAKRSLDAGSFLGGDEESGNFVAHPV

SEQ ID NO: 220594 - protein, 83 aa, Zea mays
  Clone ID: MRT4577_13276C.1.pep
TLRTNPHHRALCSHEIPRYRVSQVTTTMCSSGSSTFSLIAGVRRYTGGARALNLHQRIALLSYRREIMLRFRCGIEKVRILTT

SEQ ID NO: 220595 - protein, 97 aa, Zea mays
  Clone ID: MRT4577_132770C.1.pep
MQRLLALGEALLGLLASRPGLATDPYAFFYWDVSYVTGGPLGVKQKGIGINGKFPGPVGNVSPNWKVVVNVVNDLEEPLLITWKGIQNRKNCWKEGG

SEQ ID NO: 220596 - protein, 471 aa, Zea mays
  Clone ID: MRT4577_132771C.1.pep
MESKPHAPASGLATPRFRLGKQSSLAPERGGEGGGAGSADGSAEANGVMSFQLMYLAHEGSAEGIRELLDGGVDPNFRDSDGRTALHIAACEGHAEVVELLLQSGAEAAVEDQWGSTPLADAMHYQNHDVIKIFEKHGSKHKIAPMHVNNVREVPEYEIDPAELDFSNGNDLSKGTFRKATWRGIPVAVKKLDDDLIADGSKVQAFRDELDVLQLIRHPNVVQFLGAVTQSNPMMIVMEFMRKGDLRTHLSKKGALPPSYAVKLALDIARGMNYLHEHKPQAIIHRDLEPSNILRDDTGHLKVADFDLCKMLKWRRKVREDKAVTSPGNACKYVAPEVLRNEEYDTKVDVFSFALILQEMIEGCLPYYDKKNDEIEKAHNSKERPPFRAPPKHYAHGLRELIEQCWSENSADRPDFRVIINRLSAIQNEIAHRNRWKARPLKCFLSIEGMWKKDRNEGSTTRSSRSSRSYF

SEQ ID NO: 220597 - protein, 155 aa, Zea mays
  unsure (1)..(155): unsure at all Xaa locations
  Clone ID: MRT4577_132772C.1.pep
CDHAAAPWRSQPIRKPHFDRIVRALASDHPPPPRAELHAFLVRSHAAATAPALVRSLLNGAISRLSKRRPRAALALLLIMPRLPVRPDHFTLPFALNAAASLRLLPLGASLHAVALRLALLPLRLPVANALVDLYAKCEEFPAAHAAXLADIPAP

SEQ ID NO: 220598 - protein, 87 aa, Zea mays
  Clone ID: MRT4577_132773C.1.pep
CRLIEQCWSENSADRPDFRVIINRLSAIQNEIAHRNRWKARPLKCFLSIEGMWKKRSHEGSTTRSSRSSRSYFYHQHKLLISIARHI

SEQ ID NO: 220599 - protein, 111 aa, Zea mays
  Clone ID: MRT4577_132774C.1.pep
FRSHFLWLQDRPNNASNSSNSYMNSFASLFLENVELDFPEEFRSHFLWLQDRPNKHPNNSNSYMNIFASLFLENVNLEFPQQLRSHFLWLQDRPHKITNKSHLIYVHFLPH

SEQ ID NO: 220600 - protein, 80 aa, Zea mays
  Clone ID: MRT4577_132775C.1.pep
SMEQFIDHRPLVTKLGPAGLQKKGSQFADFEKWDFVAPQHTYALSLPKNLCFLRVVSERLLPNLDHGANNLYLISSNTSR

SEQ ID NO: 220601 - protein, 47 aa, Zea mays
  Clone ID: MRT4577_132776C.1.pep
QRKTTTLDVESSDTIDNVKANIQSREWIPPDQQPLDLGRKQVQDRRT

SEQ ID NO: 220602 - protein, 84 aa, Zea mays
  unsure (1)..(84): unsure at all Xaa locations
  Clone ID: MRT4577_132777C.1.pep
MSLSMIHRIQRGSPASLXPWVSSFSMPEVRSFPSVEPPSGSRFVWAVAGIVEATRSTARRAAHDDVTLDHDSASGLALIRSPXX

SEQ ID NO: 220603 - protein, 118 aa, Zea mays
  unsure (1)..(118): unsure at all Xaa locations
  Clone ID: MRT4577_132778C.1.pep
LSPXHPXLASXPTPPNPRPDLGFTAXTRPIPQGIPXTSSPXXXPWXEWXRKVPSLTFSTMILRCLSCCTLVRLVISSSPFLHFFAHLCLFVLSLXSLLLRFFLLGSPIFLLVFCLFFF

SEQ ID NO: 220604 - protein, 47 aa, Zea mays
  Clone ID: MRT4577_132779C.1.pep
PTRSTTRAKKFAINVVYSLVSKNCREPDVVLNVPHTSLLEVGMIYHV

SEQ ID NO: 220605 - protein, 57 aa, Zea mays
  Clone ID: MRT4577_13277C.1.pep
GDIYLYLLVLSHTLSDPCCCRKVLIIVCMFYRMVSGEMSCLNVYVFSVYNILFCKIV

SEQ ID NO: 220606 - protein, 73 aa, Zea mays
  Clone ID: MRT4577_132780C.1.pep
EVLSFLITSLTRRFEFQADAFAKSLGKAEELKSSLMKLNKANLSFPLNDALYSAFNHTHPPLLERLEALNKTE

SEQ ID NO: 220607 - protein, 37 aa, Zea mays
  Clone ID: MRT4577_132781C.1.pep
TSMFLTLPYPTKVCLIDNLNRLHISQRNDHTYAITIL

SEQ ID NO: 220608 - protein, 38 aa, Zea mays
  unsure (1)..(38): unsure at all Xaa locations
  Clone ID: MRT4577_132782C.1.pep
MFCVCKKKKKKKKKKKKKKXKKKKKXKKKKKKKKKNTP

SEQ ID NO: 220609 - protein, 152 aa, Zea mays
  Clone ID: MRT4577_132783C.1.pep
MNPHQKNKVDVKSLTPEEQRLFRLYGKLPSRSDHFAKHLKDRKYFDSGDYAMSKAGKGDGVDAGAVGSQHPLPENIPHLSSPVNGSGTNVPKHHGSVPGIQAGSPIKESSFLKSETSVDETQGDNVDKPQGADAAAAPEPVAAGGEGIPIRR

SEQ ID NO: 220610 - protein, 62 aa, Zea mays
  Clone ID: MRT4577_132784C.1.pep
MRRSLFVRIWKVVEQHDQYFVQKRNAAGTLALSSLQKITAAFRMLSYGVVADATIDSPLEVF

SEQ ID NO: 220611 - protein, 139 aa, Zea mays
  unsure (1)..(139): unsure at all Xaa locations
  Clone ID: MRT4577_132785C.1.pep
NPFKRGGGFFFLGGGEGSPQKRGGGIFFLGGGGPPXXKNLFFFVFFPPSEKNLFFLKKXYFFFIKQTIFFFFFFFPPPPPLFFGGGGEKKKKTPPPPFFFFFFFXGGCFFKKKKTTPSPPPTTPFFFFFFFFCLWVGAQ

SEQ ID NO: 220612 - protein, 90 aa, Zea mays
  Clone ID: MRT4577_132786C.1.pep
SSVRGNLLIYGLTTGFSERVFLNKTRFKQTVPVRLSIGPMFLTLAFLEIYLGEKHLLMQIVRTFKHYDLRQRFEYTTHFIGYSFSYARLK

SEQ ID NO: 220613 - protein, 40 aa, Zea mays
  Clone ID: MRT4577_132787C.1.pep
VHLSGPYKKATPLNGGAPNPVSKRRARPFFFFFFKFFLIK

SEQ ID NO: 220614 - protein, 98 aa, Zea mays
  unsure (1)..(98): unsure at all Xaa locations
  Clone ID: MRT4577_132788C.1.pep
KEKKGGLAFEKKTPRNPPFYNPFHTTNPAEINTTFTSPAGGSTGANLWGGARFMGQPGPFSXGPPCFFSFGPWPGSTPRKSRTPGPKRGGPAPPPFGW

SEQ ID NO: 220615 - protein, 73 aa, Zea mays
  unsure (1)..(73): unsure at all Xaa locations
  Clone ID: MRT4577_132789C.1.pep
MTTRFKKNRKKRGXVFAGHGRSAXHRKHPXGRXNAGXMHHHRILFDKYHPXYFGKDACVLHKLRXQVYCPRQH

SEQ ID NO: 220616 - protein, 144 aa, Zea mays
  Clone ID: MRT4577_13278C.1.pep
PVETPIGGHRHTASSQHLIMCRSDSRTVTQDKTDKIYGSPHAKNYLLSVPVYFRGAHCYVSGCILILTERLLTMRSSCRDTNQMLSEFLQVTSLLNGAKILSSRMIIYTNGSRLMDYGCQHCSNSSLKPGGLPLRLPLSDGLLP

SEQ ID NO: 220617 - protein, 41 aa, Zea mays
  Clone ID: MRT4577_132790C.1.pep
LGTGGGGAHHSRARGSHESCTNGGQRLAGTSRSRAPARDLD

SEQ ID NO: 220618 - protein, 89 aa, Zea mays
  unsure (1)..(89): unsure at all Xaa locations
  Clone ID: MRT4577_132791C.1.pep
APPHASKPAPAARGXXNSHPXIQRXANPKXATPTQGPAAEEHRTRAVSGRPRGPKIRRTETVHARSTQTAQVSKVTAPPKQQVGKEESA

SEQ ID NO: 220619 - protein, 276 aa, Zea mays
  unsure (1)..(276): unsure at all Xaa locations
  Clone ID: MRT4577_132792C.1.pep
MTATSRAKYRTIGRRQRRCAVRRGRGDHGGGRGTRKLRSSDQPPWEMSSRPARAGREREGAAKGTSRVXTGWGKGTWLRXHGRAGADAQGAKXQGETAGRARNQGXRGRRPSWASSGVQGARSGWAEGSSFTRAEQRSPXRQGRARGXEEMGRLGXRCAGGRTARRAXRKMKRKPQRTGADWARARRSSTTRCLGEQGERRSLSQGRETRHREKGEEXARQGAAGCSHGDELGEYATQGRHEITGKKRCGHGSSKPARHWRSGRTPWRWGREGGAV

SEQ ID NO: 220620 - protein, 51 aa, Zea mays
  Clone ID: MRT4577_132793C.1.pep
SLAQWILEQENKELNSIKFHHHAYAKCEQGGWVLIRDKREVSLGKHAKRYM

SEQ ID NO: 220621 - protein, 155 aa, Zea mays
  unsure (1)..(155): unsure at all Xaa locations
  Clone ID: MRT4577_132794C.1.pep
MAQNSSRLHRLLTLLDTGSTQTTRFAAARQIGEIAKSHPQELNSLLKKVSQYIRSKNWDTRVAAAHAIGAIAENVKHTSLKDLYASVQAEKHASGFSDGSDDAGSALPRTDSAATSDLAFGSXXIGRVLEFGSPLLASGGQEYDIADSGKIQQSV

SEQ ID NO: 220622 - protein, 416 aa, Zea mays
  unsure (1)..(416): unsure at all Xaa locations
  Clone ID: MRT4577_132795C.1.pep
MAAAFDAYTDKNAVFRRLKAKPENKMCFDCNAKNPTWASVTYGIFLCLDCSAAHRSLGVHITFVRSTNLDSWTPDQLKMMAFGGNNRAHAFFKQHGWTDGGKVEAKYTSRAAELYRQMLTKEVAKSATTDNALPSSPVASEASKPPSDDFPEFKLPDVPAPPAEDLNGKHEPKSPKAAPRSPKAATHPTFATSVKKPIGAKKVGXKTEGLGVRKLTTKPNESLYEQKPDEPKPAVTALAASTKKGGQALHSRFEYVENEPSSDSRTGGSVSRVSGHVAPPKSSDFFQEYGMGNGFQKNSSNASKTQVEETYEARKKFSNAKAISSSQFFGTQNREEKEAQLSPQKFAGSSSISSADLFGRNDADNSNLDLSAADLINRISFQASQDLSSLKDIAGETGKKLTSLASNFISDLDRIL

SEQ ID NO: 220623 - protein, 81 aa, Zea mays
  Clone ID: MRT4577_132796C.1.pep
GGKKNPTGVKKQGARIQRNFPAKGGDYNPLKPFGKKTGGFKYKRRAVIPAKKKILTDWPEQYQHMLGKKPTGGENHQKGNV

SEQ ID NO: 220624 - protein, 133 aa, Zea mays
  Clone ID: MRT4577_132797C.1.pep
DLKRPPSEEAPQGGAPKPPDRKGRNEGAARAPLGKGNRWEGTSVLGQPAKRGSAERGISWETTRVGQARGFQAPARETNGRDTKEGGPDRKEGAATRRRSKSGGPPKPAALFPFFFFFFFFIFFFFFFLFFFI

SEQ ID NO: 220625 - protein, 166 aa, Zea mays
  unsure (1)..(166): unsure at all Xaa locations
  Clone ID: MRT4577_132798C.1.pep
HWVPRGPAGNXXXXKKKKKKKKKKKKKKKKKKKKKKKKKKKKTFLGPQIREGSKGGRIFVGLAHPARGKNKFCPLKVLAPKNFLGFGKGTPLVSHLNPKKKGSPKGWFPKLPPGWGGFLLNGEGVCGGPTHPDLSFWGVTFGPRIFQGFRAPQFPKINNKKVGWKG

SEQ ID NO: 220626 - protein, 434 aa, Zea mays
  unsure (1)..(434): unsure at all Xaa locations
  Clone ID: MRT4577_132799C.1.pep
GXEAGVRYMVANNLGKFITIGNFSMLEDGGTSLSFGKTCERCQLKCVIRVHNPQFYWKIATEGDPGFAYSYINGYISFVDKKEGIQNIVEIIIANRGERKRLSSSRASNKSGYIKKGWWTPLFKKNGAAMAKYVLHEVLRRNTISKARKNISAHYDLSNDFFALFLDPTMTYSCGIFKAEDESLEAAQLRKLDNLINKAKVDPGHHVLDIGCGWGSLAIRLVKRTGCKCTGITLSEEQLKYGKRKVKEFGLEDRITLLLCDYRQIPNGQKFDRIISCGMLEHVGHEFYEDFFASCEYHLAEHGLLVLQSIAVPEELYDKMRTKPDFLKEYIFPGGCIPSLARIASAMSNASRLCIQHVENIGYHYYPTLIHWRENFEANEEKVLALGFDEKFIRTWEYYLNYCAAMFKSHMGLDYQIVFARAGDAKLPSYVAIA

SEQ ID NO: 220627 - protein, 80 aa, Zea mays
  unsure (1)..(80): unsure at all Xaa locations
  Clone ID: MRT4577_13279C.1.pep
PPTSVLHRSRLSLRSATRRRRNSNQDAAEEVYHVDDVNEGNGDGRGHGGAGQGELNARGNXHTAEDAKLKELIAQFGPQN

SEQ ID NO: 220628 - protein, 73 aa, Zea mays
  Clone ID: MRT4577_1327C.1.pep
LRERYVNIKIQFANSLCIYTLRLCTHVHLSTCSFINTTSLSTTIITLIYYNHISYNIYLLKHELLLLKYTITY

SEQ ID NO: 220629 - protein, 126 aa, Zea mays
  unsure (1)..(126): unsure at all Xaa locations
  Clone ID: MRT4577_132800C.1.pep
PALPASVSSDPPPRPHSSELRCSRSPPRWTPPSTPPPPPRRLTPTPAPPSPXPDPSPPQPAPEAETVDPPPPGGGPAPKTVTWSEKLTSESSTHVHAVAAGVSSPVVSRVPASSSSGALLSVSGRL

SEQ ID NO: 220630 - protein, 75 aa, Zea mays
  unsure (1)..(75): unsure at all Xaa locations
  Clone ID: MRT4577_132801C.1.pep
MSXPGSELRTGGXHPPSPQPGLGLPHLIPLSPPTHPPGGSGGSRGTRVRATTTTPRRRGQHGXISFFGRTRHLPL

SEQ ID NO: 220631 - protein, 134 aa, Zea mays
  Clone ID: MRT4577_132802C.1.pep
MPLYLTVKTGPSFTEAAMGRLAQGTKVLAEGGYEKIFKQTFEVLPDEELKICYACYLSTSAGPVMGVLYISTAKIAFCSDNPLSYKAGNKTEWSYYKTRVTPFLASSYPYQNQSSFCTSVYHIWTELISIVHHC

SEQ ID NO: 220632 - protein, 115 aa, Zea mays
  Clone ID: MRT4577_132803C.1.pep
QTRSGKNVYVCNLSTSAPPVPGVLYISTAKIAFCSDNPLSYKAGNKTEWSYYKVVIPLHQLRAANPSVSKLSPAEKYIQVVSIEGHEFWFMGFLMYDKAATTLQEALASARELQP

SEQ ID NO: 220633 - protein, 131 aa, Zea mays
  Clone ID: MRT4577_132804C.1.pep
LTITLLICNQRSKLGTCFSKAHPLVLNSPKTPIVEAIIKKHKHYPAWVICSGGGLLLDLFKTLTENTDFLDIGPILVKRKNHRRVILNGLTNKIPTAYILLKRNLTAPFTLFLNKAFFFGSHTEVKNIDVF

SEQ ID NO: 220634 - protein, 50 aa, Zea mays
  Clone ID: MRT4577_132805C.1.pep
KIKRGLRGTTKRGGGVLTGFSKWFEKFPWWAGFLKDYGAGPSKFRVAGEV

SEQ ID NO: 220635 - protein, 243 aa, Zea mays
  Clone ID: MRT4577_132806C.1.pep
MQPQPAEMDPASTAQADSNASAAVPAADPSPPLPAPEADTVDPPPPPPAPAPKTVTWSEKLTSESPTHVHAAAAAESSQYVSRGPASSSSKGAVEAMRETLSRWGKSWGETTKMVESLSRDTWQHFKTGPSFTEAAMGRLAQGTKVLAEGGYEKIFKQTFEVLPDEQLKICFACYLSTSAGPVMGVLYISTAKIAFCSDNPLSYKAGNKTEWSYYKVVIPLHQLRAANPSVSKLSPPEKYIQA

SEQ ID NO: 220636 - protein, 105 aa, Zea mays
  Clone ID: MRT4577_132807C.1.pep
ELVFISFVQLPVAWIDLDVALRVIGRTRAWVHFIEYLVSIANNAFFVAGKGGSIQFEFFLVLGCYVLCVSHLIDCLKPLQTCCFSKYYYVILKLLVGCPQQFTFL

SEQ ID NO: 220637 - protein, 182 aa, Zea mays
  unsure (1)..(182): unsure at all Xaa locations
  Clone ID: MRT4577_132808C.1.pep
MSASAAPTPAAGGRFFTGFTRLCKGLAVVLLLAHILVHLFPSAATYLTLIPARTIPFAWNLVTAGYIEQTIPGVIVSIVGLLLFGKVLEPLWGAKELLKFIFIVNLSISACVFVTMIVLYYITQEESYLYTPVSGFYGVLSVLLVGIKQILSDQELNLXVLVXAKWIPSIGAFISVAVSFFM

SEQ ID NO: 220638 - protein, 555 aa, Zea mays
  Clone ID: MRT4577_132809C.1.pep
MDSVRSWFQKFQPRDKSKRPVVAARHGKDPGKPPMDDAPSSATKQRVAAAKQYIENHYKTQMKSLQDRKERRWMLERKLQDAEVPVEEQNNILKHLEKKETEYMRLQRHKMGVEDFELLTIIGRGAFGEVRLCREKASKNVYAMKKLKKSEMLRRGQVEHVKAERNLLAEVDSAYIVKLYYSFQDEEFLYLIMEYLPGGDMMTLLMRKDTLTEDEARFYIAETVLAIESIHKHNYVHRDIKPDNLLLDRSGHLKLSDFGLCKPLDSSNFPNLNEPDYTSGKVTKPLPDTTWLSNPSAPRRTQQEQLSHWQKNRRMLAYSTVGTPDYIAPEVLLKKGYGTECDWWSLGAIMYEMLVGYPPFYSEDPMSTCRKIVNWRSHLKFPEEAKLPPEAKALISKLLCNVEHRLGTKGAHEIKAHPWFGGVQWEKLYQMKAAFIPEVNGELDTQNFENFEEIGTQIQSSSKSGPWRKMLPSKDANFVGYTYKNFEIVNDDEVAGIAELKKKSSKPKRPTIKTMFERMDEEEPVQGSFLSMLPPEGQPSSHSSVPQEKYQPRRK

SEQ ID NO: 220639 - protein, 186 aa, Zea mays
  Clone ID: MRT4577_13280C.1.pep
HSRSRSLPSPPPTPPLPTSDCLPSPHSQIQLARDGGRRGHGRHHRPRVGVLVLSLVVLSGGIWLSYRAATTDCEWFLERPVIALEALRLVLFLTGLAGSLFRVFIIFSFVVTNCSHDVTAVRHPPSDPSAHSCPCSLLPAGLRPSCCSPTTRVGARACPSVGRPVVVVQASLRGGRRSHLPGHRLL

SEQ ID NO: 220640 - protein, 117 aa, Zea mays
  Clone ID: MRT4577_132810C.1.pep
VHRIFHVSLLRVHSDRGIEEPMSCVESQVHIFEWARCNIVHAMDRIISYLIWATIDTNGHEIGIPWGDLRPHVECESYDPRKDEVHTRCACLNADPESTRHKILIDDRNTVRGPNDE

SEQ ID NO: 220641 - protein, 169 aa, Zea mays
  Clone ID: MRT4577_132811C.1.pep
MDSARSWFQKFQPRDKSKSPAVSASHGKDPGKPPTDDAPSSATKQRVAAAKQYIENHYKTQMKSLQDRKERRWMLERKLQDAEVPVEEQNNILKHLEKKETEYMRLQRHKMGVEDFELLTIIGRGAFGEVRLCREKTSKNVYAMKKLKKSEMLRRGQVEHVKAERNLFC

SEQ ID NO: 220642 - protein, 73 aa, Zea mays
  Clone ID: MRT4577_132812C.1.pep
HASADAWASRSRRRVAPGPAGTGRSDEEAMDTCVCLLRLRVLSARAVRMLCVHRSVFGSCRIHTSSICVRSDR

SEQ ID NO: 220643 - protein, 556 aa, Zea mays
  Clone ID: MRT4577_132813C.1.pep
MDSVRSWFQKFQPRDKSKRPVVAARHGKDPGKPPMDDAPSSATKQRVAAAKQYIENHYKTQMKSLQDRKERRWMLERKLQDAEVPVEEQNNILKHLEKKETEYMRLQRHKMGVEDFELLTIIGRGAFGEVRLCREKASKNVYAMKKLKKSEMLRRGQVEHVKAERNLLAEVDSAYIVKLYYSFQDEEFLYLIMEYLPGGDMMTLLMRKDILTEDEARFYIAETVLAIESIHKHNYVHRDIKPDNLLLDHSGHLKLSDFGLCKPLDSSNFPNLNEPDYMSGKVTTPLPDTTRLSNPSAPRRTQQEQLSHWQKNRRMLAYSTVGTPDYIAPEVLLKKGYGTECDWWSLGAIMYEMLVGYPPFYSEDPMSTCRKIVNWRSHLKFPEEAKLSPEAKALISKLLCNVEHRLGTKGAHEIKAHPWFRGVQWEKLYQMKAAFIPEVNGELDTQNFEKFEETGTQIQSSSKSGPWRKMLPSKDANFVGYTYKNFEIVNDDEVAGIAELKKKSSKSKRPTIKTLFESMDEEEPVQGSFLGMLPPKEGQPSSHSSVPQEKHQPRRK

SEQ ID NO: 220644 - protein, 93 aa, Zea mays
  Clone ID: MRT4577_132814C.1.pep
IVALTTTASDKIGRSVPAPGQGVLTTARENPGKFPSPLLDINYRRRQIERRKKTIKQWQESELEYVHDDIDAMKAQGASFDEKDYAADRFAHI

SEQ ID NO: 220645 - protein, 84 aa, Zea mays
  Clone ID: MRT4577_132815C.1.pep
RTQWLGFTKLRQGAYQKAAEDFFFPLVLLSYALRFEPPYPIYVEVGVFLVERWSGTKVALPLGATYLRNFLEQVPLRPYFKTMS

SEQ ID NO: 220646 - protein, 100 aa, Zea mays
  unsure (1)..(100): unsure at all Xaa locations
  Clone ID: MRT4577_132816C.1.pep
EIARRVADEVLXIDPQDSASYVLLANIYSSANRWQNVSEVRRAMTDKMVKKAPGISWVEVKNQVHQFHMGDEXHPKHVEINQYLEELTSEIKTQGYVPDT

SEQ ID NO: 220647 - protein, 65 aa, Zea mays
  Clone ID: MRT4577_132817C.1.pep
AISRRKKGHPPPHTSSLAHGFVTECARVVLVFRRVPRCPYGFLAYHNTLASWHVYTEAYIGLVIR

SEQ ID NO: 220648 - protein, 55 aa, Zea mays
  Clone ID: MRT4577_132818C.1.pep
HFYAFCSRTTRDFRFLSQIWDTPVGTYMHLQVLTRATWFKPDIFYRTYNLLTMLT

SEQ ID NO: 220649 - protein, 108 aa, Zea mays
  Clone ID: MRT4577_132819C.1.pep
FYPSKRPKAGEVLQHAWCHRFTFFSLPVRPKVLLLSRTPPCVVFLGNLLFSCFLLTSILNSILLCNFIFFLPQIFFVNFFSYHSFFLYFLFVKIFFLFSFFFFPQYIF

SEQ ID NO: 220650 - protein, 96 aa, Zea mays
  Clone ID: MRT4577_13281C.1.pep
RHTGLVRRPDQPTVAGPRAGPADRQDARRSAAGTVPGGSTVVQTADGPNPARLRSRRDQLCRPLPQLADGRPLLPVRRRADQYSWTTCRVTTWTLT

SEQ ID NO: 220651 - protein, 48 aa, Zea mays
  Clone ID: MRT4577_132820C.1.pep
NQPAHQGTGRDGVLSQHNHRKNLNIGWLPRPVDDLKRLSIRHHSSEDE

SEQ ID NO: 220652 - protein, 53 aa, Zea mays
  Clone ID: MRT4577_132821C.1.pep
FAFFGTQHTFFLCMARLFIFSLPHVAHIFHFFACLLLHLLYSHTFSNLIVIAQ

SEQ ID NO: 220653 - protein, 50 aa, Zea mays
  Clone ID: MRT4577_132822C.1.pep
AVAVPAPSMVVGMGRWGEDAPGWINEKKVRRAQAKSTNNSNSPDNTHVQE

SEQ ID NO: 220654 - protein, 79 aa, Zea mays
  Clone ID: MRT4577_132823C.1.pep
ISPVTPPKKKGMFEITSRVLEILKKKGGDTEFENFCAIVLGKVDTKNKIWKIAAPPGKVNKLFLLAQVHGLSGMPPPVE

SEQ ID NO: 220655 - protein, 59 aa, Zea mays
  unsure (1)..(59): unsure at all Xaa locations
  Clone ID: MRT4577_132824C.1.pep
VVARHVVQKAVRNIMHGGDEGXDRRSRARALAAKAKTAVEKGGSSHANVLDLINCFKAA

SEQ ID NO: 220656 - protein, 100 aa, Zea mays
  unsure (1)..(100): unsure at all Xaa locations
  Clone ID: MRT4577_132825C.1.pep
FVGKPLFGTLIALLQNGKPVIGGNDQPILREIWIGVDGKQTTLNGQEISVRXLYTISPHLFEADAEDAFIRPRXKVKVSLYGCDCYAYALLASGFVDIVV

SEQ ID NO: 220657 - protein, 73 aa, Zea mays
  unsure (1)..(73): unsure at all Xaa locations
  Clone ID: MRT4577_132826C.1.pep
MAVKIFSILMLLALSACVANATIYPRYSQAPIDALLPPYLPSMTDXVCEKAALLHYRIQQAFGTSNLRLHTGS

SEQ ID NO: 220658 - protein, 65 aa, Zea mays
  unsure (1)..(65): unsure at all Xaa locations
  Clone ID: MRT4577_132827C.1.pep
SAIFYRTCXSHVSIYYEVLTYYLCHAWHVTAAYTMRRSTNTPTWCVGNSHPVLRNVIGGVFRDQF

SEQ ID NO: 220659 - protein, 187 aa, Zea mays
  Clone ID: MRT4577_132828C.1.pep
MGALTDSRKRLSADRCLSADHRLPYPSFPPPPLTPPSKRTKLAPFPELDPSTSAVPPIRPSPQIIHSAAAASASFTPGPSSSSTIASTPLPHRPRLPPPPPLPRPIHGPQRILRVFRLGGAARTHAAGRSLFSPSSPLPCSLGFQQYVELVNSVSHPAPSTPAATTDATRQAVPLEVVAIEEEEEGE

SEQ ID NO: 220660 - protein, 110 aa, Zea mays
  Clone ID: MRT4577_132829C.1.pep
YKGGRPPSPTKSLKGFLKKPPTRGVWGSPQKPVPFQKAWLKLNPPGFLGENGPTPPQGQLGPPKPVICPPFFFPPLQFNPPLTPGGGFGALLKNRHFPQWVSRKTMFLVP

SEQ ID NO: 220661 - protein, 321 aa, Zea mays
  unsure (1)..(321): unsure at all Xaa locations
  Clone ID: MRT4577_13282C.1.pep
MARLLLFPSQACVDPGRHLLLHPPVSRPRAVRSGPPPAAPRRTGVVSLPGRCPPPLCWNHHPFLPCRSSKRGWVVFASENVQEISSHLPRKDERRSGNLLLRFSALPYCTMAWLSTAQLAQSSVGEKLNMVYEVGELFELGIQLSYLLILIGLLGAGTFFVIRQVLVRRELDLSAKELQEQVRSGDASATEYFELGAVMLRRKXYPAAIKYLQQAIDKWDRDEQDLAQVYNALGVSYKRENKLDKAIQQFQKAVELQPGYXTAWNNLGDAYEQHKDLKSALKAFEEVLLFDPNXKVARPXVDDLXRXVSMYXGVPVKSEKR

SEQ ID NO: 220662 - protein, 84 aa, Zea mays
  Clone ID: MRT4577_132830C.1.pep
NQRKKLSLINARRTQNKKKRAKNMLSSKKGSTQHDHVPINVQIYESERSASLKTAYRPLPHILYLKKKQFFFKLTNQSTTSPNQ

SEQ ID NO: 220663 - protein, 74 aa, Zea mays
  Clone ID: MRT4577_132832C.1.pep
KKFLLDLRKAWCTTTGHTLVASGVVFYYQFPKKSQNSFPLKKKRIPHQTKNLPGGPFSWGAPFGGGPLGNLPPF

SEQ ID NO: 220664 - protein, 139 aa, Zea mays
  Clone ID: MRT4577_132833C.1.pep
FSLLTRLYQTGSPILSLFQHPRSPSQSFANMREVISIHVGQAGIQIGNACWELYCLEHGISPDGTVASDKQSSQFDSSSSTFFSETGAGKHVPRAIFVDLEETVVDEVRRGTYRSLFHPEQLISGKEDAANNYARGHYT

SEQ ID NO: 220665 - protein, 136 aa, Zea mays
  unsure (1)..(136): unsure at all Xaa locations
  Clone ID: MRT4577_132834C.1.pep
MTHGTNLGYMKCEEIXDQVPISAENLLALCGRCYYDGTALHRIIKGYMLQGWDPTGIDEGGWIIWXRIVTVTVDGXVKHSARGIMYMINSGPNTNGSQFLITYVKQPHLIEHYTVCAKVIHGFEVLDLMXKAQTGP

SEQ ID NO: 220666 - protein, 405 aa, Zea mays
  unsure (1)..(405): unsure at all Xaa locations
  Clone ID: MRT4577_132835C.1.pep
FGTRLTHRWNIENFNTTEHQMLDTPYLXFSVHKVRFLKIIVMXYLMILNIVEXSSRYTSRDILAMGIRDFNSSQLTYQQELQHLQSWVKECMLDQLPFVRQNLAYFLLSAAGCMYSPELSEARTLCAKNGALITVVDDFFDVGGSKEELENLIMLVELXPLSFTTMPCASSFFIKQKRWLLIIIXSHFYVFYRWDEHHKIEFYSEHVEIIFSSIYNLVNQYGXRAXLLQVIHVTNHLIQILMXVVELVFSSRCYYLIXYEHGILNNTTLALXLILGGVFFVIEKKENPCIFKIDILLQREYKEGKLNIVSLLVFHEGSMSISDARWKLQKPIDTCRRALLRLVFREKSVVPRPCKELFWKMCKVCYFFYSKTDGFRSPVERAKKVNAVINEPLKLQETHTPMFVL

SEQ ID NO: 220667 - protein, 112 aa, Zea mays
  Clone ID: MRT4577_132836C.1.pep
QDLHAAADPGLGPSRARAWAELNARFGLERNRPSKGKFYKFVQLGMMGAGDKVYATRDSARGGYNKRTLGHANQTNRYNLRGGRSISTVKGGLTLWYKVKDITMLLNTVKGN

SEQ ID NO: 220668 - protein, 73 aa, Zea mays
  Clone ID: MRT4577_132837C.1.pep
LDRTTLRLGLAQEPLLMIKRQDGAVPLSARCFNPLEGDLLPRPPGGLLPEGRGEGPQTIPWTHTGGLDHQVVT

SEQ ID NO: 220669 - protein, 58 aa, Zea mays
  Clone ID: MRT4577_132838C.1.pep
CTDNAHLTTTLPPLTLMRTNALQCYPAQTQLIRVMLLVSTVYFPSTGSHARYDLDPDS

SEQ ID NO: 220670 - protein, 388 aa, Zea mays
  Clone ID: MRT4577_132839C.1.pep
VAACQQANYRVGEDRETGGGDFSARTPSASEGRGSSRHASGSGEQRGTGSNPMNSIGRDLTLNCLLRLSRSDYGSVASLSRDFRSMVRSGEIYRLRRQNGVAEHWVYFSCNVLEWDAYDPYRERWIQVPKMPPDECFMCSDKESLAVGTELLVFGMARIVFRYSILTNSWTRAHPMNSPRCLFGSTSVGEKAFVAGGTDSIGNILSSAEMYDSETHTWTPLPSMNRARKMCSGVFMDGKFYVIGGVANNNKLLTCGEEYDLKRRSWRIIENMSEGLNGVTGAPPLIAVVSNELYAADYSENDLKKYDKKNNRWITLGKLPERSVSMNGWGLAFRACGDCLIVIGGPRTYTGRTIELNSWTPNERPPVWNLIARRPSGNFVYNCAVMGC

SEQ ID NO: 220671 - protein, 164 aa, Zea mays
  Clone ID: MRT4577_13283C.1.pep
MAAAAAAAEPKTKYDRQLRIWGDQGQAALEKASICLLNCGPTGTEALKNLVLGGIGSVTVVDGSKVEQSDLGNNFLLDEGCLGQSRAKSICSFLQELNDAVKAKYVEESPATMIDTNPSFFSQFTVVLATQLLESSLLKLDSICRSANIVLVRVHMTKTTTRVE

SEQ ID NO: 220672 - protein, 250 aa, Zea mays
  Clone ID: MRT4577_132840C.1.pep
MGDHVAVDVGELVASRVGEAAGLVSGAKEETDALIGMVECRICQEEDLRKNLESPCACNGSLKYAHRECVQRWCNEKGDTICEICHELYKPGYTAPTQVHHDETTIEISGGDWTISGNRLDLHDPRILAMAAAQHRLLEDDYDEYTATNNNAAAFCRSIFLILMALLLLRHTLTITNSDDEDDASAIFSLFLLRAAGFLLPCYIMAWAISIMQRQRQRQVGGSVPMEMFLFHVYTVLTFDGKEFHETIYT

SEQ ID NO: 220673 - protein, 79 aa, Zea mays
  Clone ID: MRT4577_132841C.1.pep
VYSLLGKSKPANNTQQGGGKKKTGEPWDPRGSQKWRFTFKQTRVREPQSGEKNELTLTNLWKDLRTKKAMPGLTRPLWI

SEQ ID NO: 220674 - protein, 75 aa, Zea mays
  Clone ID: MRT4577_132842C.1.pep
RAQLYEFQDFKNLKITNLYGLQSFCLGHVVDPHEQLLNYLGRVAITQHCNSIDRLMLSVRVSFRQTLLQKLVVLV

SEQ ID NO: 220675 - protein, 140 aa, Zea mays
  Clone ID: MRT4577_132843C.1.pep
STYKGKVLLIVYVASQCGLTDSNYTELSHLYEKHKGQGFEILAFPCNQFGAQEPGTNDEIVEFACTRFKAEYPIFDKVDVNGDTAAPIYKFLKSSKGSLFGDGIKWNFAKFLVDKEGHVVHRYAPTTSPLSIEKDIKKLL

SEQ ID NO: 220676 - protein, 80 aa, Zea mays
  Clone ID: MRT4577_132844C.1.pep
PRGRPGYSPRRSDQSTCNTKSWVREEGSRPCSIRHGLPDPAVDWKREVVREDRTIVGVASSSAKGRRLLVNCLPVAEIPA

SEQ ID NO: 220677 - protein, 90 aa, Zea mays
  Clone ID: MRT4577_132845C.1.pep
WIQETRTYLLDGSCMVEESGTLESQLEATKRKHQEIRAMRSQLKKIEDLGAAMEEALILDNKYTEHSTVGLAQQWDQLDQLGMRMQHNLE

SEQ ID NO: 220678 - protein, 226 aa, Zea mays
  unsure (1)..(226): unsure at all Xaa locations
  Clone ID: MRT4577_132846C.1.pep
MAPTSLQRPRKPRCPSHAMLSLSPALLSLLLLVPFLYLLIHRSACSPPFSNLTTARRSSSSVSGFAGDLRDIEFSWNHLPFMSSKPPSAKLKIAVFSRKWPVATAPGGMERHAHTLHTALAARGHRVHVFTSPPPHTEAAPSPSADGPQLHFLDGTPGQWRCDEAWKLYEAEGDNDPFDVIHSESVAVFHRYARGVPNLXVVSWHGISLEALHSGIYQDLAXRGED

SEQ ID NO: 220679 - protein, 59 aa, Zea mays
  Clone ID: MRT4577_132847C.1.pep
SSHILCASAGTSAPNIFLGLLFVVLKAMYYPIGCIALSRSMVGWLLSLNIESVSSSEPE

SEQ ID NO: 220680 - protein, 41 aa, Zea mays
  Clone ID: MRT4577_132848C.1.pep
DSLVRGENRGFMLKRPPWTVEGRPPNNERVGTGIITGPGPA

SEQ ID NO: 220681 - protein, 177 aa, Zea mays
  unsure (1)..(177): unsure at all Xaa locations
  Clone ID: MRT4577_132849C.1.pep
FIGACTKPPNLCIVTEFMSGGSVYDYLHKHKGVFKLPALVGVATDVSKGMSYLHQNNIIHRDLKTANLLMDENXAQSGVMTAETGTYRWMAPEVIEHKPYDHKADVFSFGILMWELLTGKIPYEYLTPLQAAVGVVQKGLRPTIPKHTHAKLSELLQKCWQQDPTQRPDFSEILETL

SEQ ID NO: 220682 - protein, 48 aa, Zea mays
  Clone ID: MRT4577_13284C.1.pep
STQRPAETRMAQHVVAQNTRDKHCCLLGEIENRHVIVTPDMDSLLNDK

SEQ ID NO: 220683 - protein, 593 aa, Zea mays
  Clone ID: MRT4577_132850C.1.pep
MAVEETAESCGSHAATAASGGGAAGPATSSSSAAAAAQARKQQQQQRHKLEVYTEVLRRLHDAGLPDARAPGFDDELWNHFNRLPARYAMDVNVERAEDVLTHKRLLEQAKDPAHRPAFAVRAVQVSPILDGNQTDSDSNTAGEEVASRLLNRQQSIYPPPAFGSSTNLEALALEASKSHDHDSTSDNGRSLYRPMHEITFSTIDKPKLLSELTSLLGELGLNIQEAHAFSTNDGYSLDVFVVVGWHDEETEDLVEAVQKEIGRIEETQAWSSSHSWSTPVEKMQIAENSAADRVEIPTDGASEWEIDVKLLKFGNKVASGSYGDLYRGTYCSQDVAIKVLKPERINADMQREFAQEVYIMRKVRHKNVVQFIGACTKPPNLCIVTEFMSGGSVYDYLHKHKGVFKLPALVGVATDVSKGMSYLHQNNIIHRDLKTANLLMDENGTVKVADFGVARVKAQSGVMTAETGTYRWMAPEVIEHKPYDHKADVFSFGILMWELLTGKIPYEYLTPLQAAVGVVQKGLRPTIPKHTHAKLSELLQKCWQQDPTQRPDFSEILETLQRIAEEVGEEHDGKHKDRTLGGFFSALRGRSH

SEQ ID NO: 220684 - protein, 346 aa, Zea mays
  Clone ID: MRT4577_132851C.1.pep
DEETEDLVEAVQKEIGRIEETQAWSSSHSWSTPVENMQIAEISAAGRVEIPTDGASEWEIDVKLLKFGNKVASGSYGDLYRGTYCSQDVAIKVLKPERINADMQREFAQEVYIMRKVRHKNVVQFIGASTKPPNLYIVTEFMSGGSVYDYLHKHKGVFKLPTLVGVAMDVSKGMSYLHQNNIIHRDLKTANLLMDENGTVKVADFGVARVKAQSGVMTAETGTYRWMAPEVIEHKPYDHKADVFSFGILMWELLTGKIPYEYLTPLQAAVGVVQKGLRPTIPKHTYAMLSELLQKCWQQDPAQRPDFSEILETLQRIAEEVGDEHEGKHKDRTLGGFFSALRGRSH

SEQ ID NO: 220685 - protein, 71 aa, Zea mays
  Clone ID: MRT4577_132852C.1.pep
MAQQSTTSNRSSAREAADVSASCIRAGMSVSSTRDLPSSISSPLAHAATATRTHTLATRQDPAGWLARTRG

SEQ ID NO: 220686 - protein, 238 aa, Zea mays
  Clone ID: MRT4577_132853C.1.pep
FGPARPAHLPWRLSLSGHGAHPSRIVTLSTRPPPRPWRPGQPHRPCASPYNQFGSRPSHCRHSTRRLLLAPAAHVELPRCPRCRNFSGRALLCPDHQPPIPVFPSLKNSRHALRPHRVREAVVEFWFDQLVIDFAGVVEPSNPFLSRIRSLCLLSSSVVASFVQLYIPHPPVSSSSPSNLVLPCSTSSNPESRTLGKNKRGPCASLIKCSIEDFNRRSSSFRASSRNPKNRMKMKLAA

SEQ ID NO: 220687 - protein, 240 aa, Zea mays
  unsure (1)..(240): unsure at all Xaa locations
  Clone ID: MRT4577_132854C.1.pep
MVEDGTSSHPSRYVKLTKAPSTSPAHEEHAXPGDXLTTPDHVPQIXGRTSSECVHVLPESYEPPADQPWTTGIFGCTDDPQTCQTGLCCPCVLLESNDEAAREDIPWTDXCVWHAVYLERGIXLAILTVIFHGVDPRTAFLIEERLLINWWLCASYTGIFRHGLHRKYHLKNSPSDPWMLHCCLHWCANCLQHRDRTGRXLAENNASPMTAVNPPPLQDMIMLDEKGAETSDHYDVKGHS

SEQ ID NO: 220688 - protein, 90 aa, Zea mays
  Clone ID: MRT4577_132855C.1.pep
SAHILVTLARCKYTCVGPFIVAMTFDYCVCFKVLLWFGPFGICDYHIYYFIPHIARHTTKGRECTKSWQISAYKLFAYLDTCQCILNITV

SEQ ID NO: 220689 - protein, 344 aa, Zea mays
  unsure (1)..(344): unsure at all Xaa locations
  Clone ID: MRT4577_132856C.1.pep
IISATLLGDAFFDWSDAAAYEELLMLVAKDGCFWASYXIPPFWRASYTRYQTLCAKLKILTESVIRKSRYQNSSLHHFDQRSCQKSEGTDPHRSVLDNMMRSHCLHGAAKGPLNLEEETCGNIMGLMLHGISTSANLIGNILTRLVLFPELQDQLHEEIVSVCNKSSKVEVDDLLRMQVLLATVCESARLLPAGPLLQRCSLKHDLTLGSGVTVPARSILVVPLHLVQMDASVWGDDADQFNPHRFLKRDIDLGEILGAPKGSTRINISSECTKAESFLPFGSGSRACVGQKFVVLAISMLIASLLRSYEVQPHPSLSKEMDTTVDSSHLHLPNPKIILTKRRI

SEQ ID NO: 220690 - protein, 52 aa, Zea mays
  Clone ID: MRT4577_132857C.1.pep
SFRWYDHLEMMYNEGRSVGIVCNGPWWSESKNHRSQLGSNRGWKSRTRGRMG

SEQ ID NO: 220691 - protein, 95 aa, Zea mays
  Clone ID: MRT4577_132858C.1.pep
DTTVHPAIGGPADSTMAATADMERIFKRFDTNGDGKISLSELTEALRTLGSTSADEVQRMMAEIDTDGDGCIDFNEFITFSNANPGLMKDVAKVF

SEQ ID NO: 220692 - protein, 90 aa, Zea mays
  Clone ID: MRT4577_132859C.1.pep
QPQKKARGNKGPPGPKGKHSTPPPQKPKIKGGPTRPSFPPRGEGRAGPPKKKGFFRPAPATRGKKKGAKEKNPPTTEGGRGGGGLALTQK

SEQ ID NO: 220693 - protein, 240 aa, Zea mays
  Clone ID: MRT4577_13285C.1.pep
MAIDDESPIRVNSRGGGAMGGGECDGAENQRWPPWLKPLLGTSFFGQCKVHADAHKSECNMYCLACMNGALCSQCLAYHRDHHAIQIRRSSYHDVIRVSEIQKVLDISGVQTYIINSARVVFLNERPQQRPGKGVTNTCEVCQRSLLDTFRFCSLGCKKQAVVKKHQKKKKQQAQQHRGAALDSEDDSSSTSTSRGSDRSSVVQSFTPSTPPATPNSFRTGKRRKGVPHRSPFGSLVLEF

SEQ ID NO: 220694 - protein, 109 aa, Zea mays
  unsure (1)..(109): unsure at all Xaa locations
  Clone ID: MRT4577_132860C.1.pep
LALPVLDQMVSEEGNKGKFDFAFVXADKXIFLNSPEGLLQLFRVGGLFAYDNTLWGGSVAAPPDNPLSEGGRALPGAPREFNGAVAPDPRVHVCQVPIPEGLPLCPRVP

SEQ ID NO: 220695 - protein, 170 aa, Zea mays
  unsure (1)..(170): unsure at all Xaa locations
  Clone ID: MRT4577_132861C.1.pep
DGRWIRSGFAERQRISIPLPQEGIHAANDLXQMYWIEHDIQADGKMAGDKSIAEEDDDFSTFLSETGAGSDMARDVINDLDPTVINKVRPGRXHQVFHSDXLINVKLDAANNYARVPYAIDKEMVDLCLDGIRKLADNCTGIQGSLILNPAAEGTGSGLDSLLLERLSDD

SEQ ID NO: 220696 - protein, 178 aa, Zea mays
  Clone ID: MRT4577_132862C.1.pep
RLPSASLVYLLFIMPSVSFLGFSSTERASNQDSDGFIFFSPDARRKKDIRSWCLYDLPSRRIVIRVCKVRFFRHACFQSSSERISSMSSLGSNIFVIFVDGAHQVDQNQLAERRRHHRDAERDGRGGDRPASRRRESGKRTPEDVGHSSGIVRPDSPPGLETGRSQLTACTRPASRDP

SEQ ID NO: 220697 - protein, 46 aa, Zea mays
  Clone ID: MRT4577_132863C.1.pep
VLIKRGCKLKLGSLFIRCYVCCRIEGDRGIMIGGLLVVFVGLIFWF

SEQ ID NO: 220698 - protein, 59 aa, Zea mays
  Clone ID: MRT4577_132864C.1.pep
RFTGFFPCPTTTNKAYSKIEEHSSIRYPWSSSAGLLSGASNSLTVQKHLPVVRSVHWQG

SEQ ID NO: 220699 - protein, 44 aa, Zea mays
  Clone ID: MRT4577_132865C.1.pep
VAPWEPDQMVSLCVEVNLLGSKHTPIFFKNTQKKKQGRPQTSEL

SEQ ID NO: 220700 - protein, 75 aa, Zea mays
  Clone ID: MRT4577_132866C.1.pep
GVKKKQHKKQTTQPGAKPKRTPVPTPLYGHNTLLRHYGTMSFKQTKIQPMPRNKLGGPLHIGPPTINHNRGHPPT

SEQ ID NO: 220701 - protein, 49 aa, Zea mays
  Clone ID: MRT4577_132867C.1.pep
TYRCTCSPLVVTRYHIRCVCRHPKDAFVSWWIFDNSMLRRGFSCYSGDL

SEQ ID NO: 220702 - protein, 239 aa, Zea mays
  unsure (1)..(239): unsure at all Xaa locations
  Clone ID: MRT4577_132868C.1.pep
TPPFGLLEPLKLVIDDGRSPSIPESTPVHIMVPVDARMAVLVSIDGSGNVTVSAPSWRIPIIRAGKFEATTSSGAGPLSFVDLHTDGRYSGIDFPVPAGAYRSIGEIIKATCSCLSRPCPSHYRHEDGPSALQQPSDSSPTTTFEDLEEAMFEAAPTFEATSSTCPQAQAVTPGSPMSPILSHIRHDWGLEFYIRVDHQGSFHTYPDIGGPFQSLQQAXNAIDQHLHGRRHTSMCMEQA

SEQ ID NO: 220703 - protein, 40 aa, Zea mays
  Clone ID: MRT4577_132869C.1.pep
WDQASASGLEEKDILGPFEWGSKGASSRRPSDSETGVLDS

SEQ ID NO: 220704 - protein, 257 aa, Zea mays
  Clone ID: MRT4577_13286C.1.pep
MAIDDESPIRVNSRGGGAMGGGECDGAENQRWPPWLKPLLGTSFFGQCKLHADAHKSECNMYCLACMNGALCSQCLAYHRDHHAIQIRRSSYHDVIRVSEIQKVLDISGVQTYIINSARVVFLNERPQQRPGKGVTNTCEVCQRSLLDTFRFCSLGCKIVGTSGDLRIRKKQAVVKKHQKRVQQHAQQQQQQHRGAALDSEDDSSSTSTSRGSDRSSVVQSFTPSTPPATANSFRTGKRRKGVPHRSPFGSLMVEEF

SEQ ID NO: 220705 - protein, 100 aa, Zea mays
  Clone ID: MRT4577_132870C.1.pep
DQTPRSQKGTERRAHSNGHTPNSNQVHANMILASCHLRTDLNFSGRLWPNIMQTRLARKLTSVGGCKTKCGPGQHGVRSREVLLWKVKPLRRWTGRGPPL

SEQ ID NO: 220706 - protein, 66 aa, Zea mays
  Clone ID: MRT4577_132871C.1.pep
LFGPSKNQAKFLKNCLTKYCINHFFVGPKGPKEKNPDSYILVPKPKGCCTCKYPNYFILLTHAECP

SEQ ID NO: 220707 - protein, 41 aa, Zea mays
  Clone ID: MRT4577_132872C.1.pep
VTCMLYILNFTVFLLLTFFYFNFDRQTTTLDCSCVLCAYCC

SEQ ID NO: 220708 - protein, 183 aa, Zea mays
  unsure (1)..(183): unsure at all Xaa locations
  Clone ID: MRT4577_132873C.1.pep
RNPPIKSFRGKPAKGGKKERKKSKRGGAKGPAKGKGPLGXPPPPPGLKAPKRGGPIAKQGGQMFGKXTGGAPLGKPPPGKRGRAPKAKXGKPKGXPQPEGGXNAAQGMENPPPKGEMGPPKGRPNGPPGEGKPQXKPPKGPPGEGKTFFFFFFFFLGFFFFFFFFFFFFFFFFFFFFFFKNLE

SEQ ID NO: 220709 - protein, 95 aa, Zea mays
  unsure (1)..(95): unsure at all Xaa locations
  Clone ID: MRT4577_132875C.1.pep
AVAAAAILLTASAKKSSDVTELQIGVKYKPESCILQAHKGDKIKVHYRXWDQGLLGMCVGEKRKLKIPGKMGYGERCSPPKIPDAMTLILGLEHI

SEQ ID NO: 220710 - protein, 107 aa, Zea mays
  Clone ID: MRT4577_132876C.1.pep
ALGEVYYHPYPPVGSQCHDESGLYLLSAMLPWGGTGLARGSRKDASHVPRNVGVKGRLLGQASEFLRSPNRHIPKWLYEDEHKNSRWGHPHPPLTMRTRGSSREFRP

SEQ ID NO: 220711 - protein, 155 aa, Zea mays
  Clone ID: MRT4577_132877C.1.pep
MGKKRQLICLAAAVAAAAILLTASAKKSSDVTELQIGVKYKPESCILQAHKGDKIKVHYRGALTDGSVFDSSYDRGDPFEFTLGNGQVIKGWDQGLLGMCVGEKRKLKIPAKMGYGERGSPPKIPGGATLVFDTELIAVNGKTSGGANPETESEL

SEQ ID NO: 220712 - protein, 154 aa, Zea mays
  Clone ID: MRT4577_132878C.1.pep
PAGSPYYPGKRSSEQRETSSPPSHPAAAVSTVANKPPHPGMEMKKSACAVLVAASATVALVARGAGSSSSPGRRTSSGSSSKDRMHAMVYTAHAREVVHTCLYLRCRKTGGLTFVPLPFFFLSFWTLWVVLLGQIFKEMRNIFAPTKKKKIAAP

SEQ ID NO: 220713 - protein, 155 aa, Zea mays
  Clone ID: MRT4577_132879C.1.pep
MGKMRQLICLVAAVAAAAILLTASAKKSGDVTELQIGVKYKPESCTLQAHKGDKIKVHYRGTLTDGSVFDSSYDRGDPFEFTLGNGQVIKGWDQGLLGMCVGEKRKLKIPAKMGYGERGSPPKIPGGATLIFDTELIAVNGKTSGGAKAESDSEL

SEQ ID NO: 220714 - protein, 79 aa, Zea mays
  Clone ID: MRT4577_13287C.1.pep
HMLRRPSRIPCRMFVLVVYVEALHLQRIIYWRFWMSNTITAEAEKVHMPHSGEHAEASSRLLYSADDRHRVVHAALCVW

SEQ ID NO: 220715 - protein, 40 aa, Zea mays
  Clone ID: MRT4577_132880C.1.pep
MATLQAPAAHWEKVEPSWHLKVPSVQAPPEAGGGVLLTGG

SEQ ID NO: 220716 - protein, 105 aa, Zea mays
  Clone ID: MRT4577_132881C.1.pep
CNGVVYEPPIGRSLVGRHLRRVMPAIANTGRVGNGLHAPPHGWGWSVLAMGGSSGAPLHYNDSTWPAGRPRGRFRALGGGARGAARGARAWRPGVGVSAAAGRAA

SEQ ID NO: 220717 - protein, 148 aa, Zea mays
  Clone ID: MRT4577_132882C.1.pep
GGGAVFFEFQKNLHLFPPPVGGFRITLPRFGKTFSRSLWLGVAFIRAKGRLSPGGRVWQIGFGNGFKCPSPFLKGLPSIKTPPHGAWGGCIPPFPVEVPGVVKFFPSGFGFGANKGGWGGPPPPPPPFFWGPGGPFCFFFFPFPLLFI

SEQ ID NO: 220718 - protein, 57 aa, Zea mays
  Clone ID: MRT4577_132883C.1.pep
LGLFVRSSCNNTIRQKTNTGFLTAVSRLAHTVTEIRGTCYSYHIYKYQYLLPSHRLV

SEQ ID NO: 220719 - protein, 141 aa, Zea mays
  unsure (1)..(141): unsure at all Xaa locations
  Clone ID: MRT4577_132884C.1.pep
GEELAVGLWLAGEHRPAGPNSIHHTLASKERGCRAPWRRRTAISVVLSKLGELARXEATILLEVGDNMAQLRDRLEWLQAFVRDADRKRRAGTDQLTRVWVRQTRDVAFEAEDALDDFFYETVILLTESTSSCRSKELLRR

SEQ ID NO: 220720 - protein, 191 aa, Zea mays
  unsure (1)..(191): unsure at all Xaa locations
  Clone ID: MRT4577_132885C.1.pep
GEELAVGLWLAGEHRPAGPNSIHHTLASKERGCRAPWRRRTAISVVLSKLGELARXEATILLEVGDNMAQLRDRLEWLQAFVRDADRKRRAGTDQLTRVWVRQTRDVAFEAEDALDDFFYEXSRKQRXQGWKLCHEFLTSLYTQIVVRHGLSTRIKKINTRLEKISENQKEYKIEHTPLAPMASSTIAFSA

SEQ ID NO: 220721 - protein, 178 aa, Zea mays
  unsure (1)..(178): unsure at all Xaa locations
  Clone ID: MRT4577_132886C.1.pep
SNSGKTIHSMKGHLDXSXASAWSPDGLTFATGNQDKTCRIWDARNLTESVHVLRGNVGAIRSIRFTSDGHFLSMAEAADFVHIFDIKSDYNKRQELDFFGEVSDCNLADGEYILVPEQGAAQEVAPDPAPEPAPEDLPATALEGSLEEMVAGITWPTTLPPGWTVEWDPASPEEEHEE

SEQ ID NO: 220722 - protein, 67 aa, Zea mays
  Clone ID: MRT4577_132887C.1.pep
RAESDAAGGGAGAGAGDVMGLLFRERIVFLGNEIVDLLADAVASQLLLLDPDSNNSLFINSPGSLKL

SEQ ID NO: 220723 - protein, 66 aa, Zea mays
  Clone ID: MRT4577_132888C.1.pep
GLSLGNRCNHFFVGKIQISPSIMSHVSSSILCEHGWQSKSVPLRMNLYSRKVWNKLSLCQKIKKKK

SEQ ID NO: 220724 - protein, 49 aa, Zea mays
  Clone ID: MRT4577_132889C.1.pep
YSGCPVMVCAYKYTTGSTCNAHVDGRRYLYMIRSHAKTHAYRRRVCLRA

SEQ ID NO: 220725 - protein, 234 aa, Zea mays
  Clone ID: MRT4577_13288C.1.pep
TARSAPSASPTTATTTTWLKGLLCTSYAVRCRDHADAHMSECNMYCLDCMDGALCSLCLARHRDHHSIQIRRSSYHDVIRVSEIHKVLDIAGVQTYIINSARVVFLNERPQPRPGKGVTNTCEVCERSLLDCFRFCSLGCKIVGTARGYRPKKKHGGGGGGGNKRKRAALKDVRSDSEESCTSTSGASSDKSSVVQSFSPSTPPPASTSYRRPGNKRRKGVPHRSPFGSLIVEF

SEQ ID NO: 220726 - protein, 91 aa, Zea mays
  unsure (1)..(91): unsure at all Xaa locations
  Clone ID: MRT4577_132890C.1.pep
SGNSIVRVIAGALPKGLHMLILSKNNISTIERLXELARGRLLDINYNRISRIGHGMCFSFSYDLFYVFLLGCGHMIGSLLCSYPLSPIFVF

SEQ ID NO: 220727 - protein, 246 aa, Zea mays
  unsure (1)..(246): unsure at all Xaa locations
  Clone ID: MRT4577_132891C.1.pep
VRLQLPVRNSRVDPRVRLTEKQTEVETVMSEVSGFPMPQLDPRVLEVYRGVREVLCKYRSGKLPKAFKVIPALSNWEQILYVTEPEAWTAAAMYQATRIFASNLKERMAXRFYNLVLLPRVRDDIAEYKRLNFHLYMALKKALFKPGAWFKGILIPLCESGTCTLREAIIVGSIITKCSIPVLHSSAAMLKIAEMEYSGANSIFLRLLLDKKYALPYRVLDALVFHCLAFRTEKRQLPVLXXQCLL

SEQ ID NO: 220728 - protein, 141 aa, Zea mays
  unsure (1)..(141): unsure at all Xaa locations
  Clone ID: MRT4577_132892C.1.pep
RWVGFSSPCASGSGSRGSPRFGFVGERLEXAASDVCYRXILGGLSWATDDHXVHNAFSTYGEVLDSTIILDRETQRSRGFGFDTFSTEEAMRNAIKGVNGNDLAGPSISGYDALFRGCRGGGVRGLCRWPWALRVHLWSAP

SEQ ID NO: 220729 - protein, 55 aa, Zea mays
  unsure (1)..(55): unsure at all Xaa locations
  Clone ID: MRT4577_132893C.1.pep
MEVEPARRDAAXLDPELLQLAELAPGALRENSIADALYSQXWLVLPETNXAGEVL

SEQ ID NO: 220730 - protein, 114 aa, Zea mays
  Clone ID: MRT4577_132894C.1.pep
PDSPAPFLTVRLRSGGSSAPTGGAAPPPESSPASVPHRLPLFRRLPFLDRSGAMVASRHALAARAGAGAGTAGRLASRWVAVLRNNWRSAEGEGTKHQGGGGGGLSNSRGHFLV

SEQ ID NO: 220731 - protein, 72 aa, Zea mays
  unsure (1)..(72): unsure at all Xaa locations
  Clone ID: MRT4577_132895C.1.pep
VNKGCPVLSRFRPIVNIPLIPLLSHPSXGAPRPGREHNHPGVLGPSLTHMMNHGTGSNVTTLLHSRSSIQNK

SEQ ID NO: 220732 - protein, 67 aa, Zea mays
  Clone ID: MRT4577_132896C.1.pep
LRSEPAAARGCAPVLRPSSRAGAVRHCRRRAGTWALLMRIFRRLFVVEKTVVSRRQRHRAAAKARAR

SEQ ID NO: 220733 - protein, 55 aa, Zea mays
  Clone ID: MRT4577_132897C.1.pep
IWECCQIVLASVLKKKKKKKKKKKKKKKKKKKKKKKKKKKKKKKKKRVGPGPEPP

SEQ ID NO: 220734 - protein, 81 aa, Zea mays
  Clone ID: MRT4577_132898C.1.pep
LGTSRPAGGHRQQATACSCRRNLRAINIAMRVRERRKSPRVYAIDKHWSRSGERPGNQEFVAGVHHRRGAPLFRGQGLLLL

SEQ ID NO: 220735 - protein, 120 aa, Zea mays
  Clone ID: MRT4577_132899C.1.pep
IYVWEWDPNGGYVPRDHHDLRARANGQVVHDAHHGVPVRPSPLVSSGGLTAFSSWAFPSTSPKVSTPLSSGLFYPSSPCMPPPRWGGGPIYLRALSLLCIPGHCSSPLRCLDVIYVGTEM

SEQ ID NO: 220736 - protein, 148 aa, Zea mays
  unsure (1)..(148): unsure at all Xaa locations
  Clone ID: MRT4577_13289C.1.pep
PTVIGLHSHLPWTITVLMPLAPLVYLNRVTDGCIGLLAYKLDLMELCSSTDDRIGYGSTTDAXDMASYLXGETDLIEPSRAHTGLGVAFMAAAKDYXLTLTVLASXMSWERKIIFYVLEAELGLTDPLXGLCGGVYTATEILAITPYS

SEQ ID NO: 220737 - protein, 98 aa, Zea mays
  Clone ID: MRT4577_1328C.1.pep
FSAWRGKRRRGRCIRMRRCWRSIQLIYGVVVGLWVWCALGWWWRISSLSGCRLGLILVVWIGRRRCGLLWVGWRVRLLVIPRVHTLMPSRLRVARSLR

SEQ ID NO: 220738 - protein, 102 aa, Zea mays
  Clone ID: MRT4577_132900C.1.pep
RRIAATGEHQREGLCLIAESRGRSHAGTAHVDLSEAATAGQLFAARSRVIRRASWYLESQVPGQEQVPQDEAHGGCCDEFVRGLGRRLPVNFGLLDRCLLIM

SEQ ID NO: 220739 - protein, 146 aa, Zea mays
  unsure (1)..(146): unsure at all Xaa locations
  Clone ID: MRT4577_132901C.1.pep
VCVGPRVRRGVLVPAGLCGYERSTAPTKGGQRSPSPAGRPGDINNVPYGMPRTTSVLQAHYHHRYNGMLAVNXPYMPPTRCDYTVSPPNITHRAHGTXESCYSXNTTGQVVLQDTSKHCSYCHPLHLDCYCSLGNSTGFRDYDSPN

SEQ ID NO: 220740 - protein, 95 aa, Zea mays
  Clone ID: MRT4577_132902C.1.pep
KPVNCQAGKSTRLWFYQSMFGSNDLAFSICIRKQGPGSHFEQKITRLQCFRAVFNPICLFLNRLHWKVRYIVRFKLRKMCNGPNMPRTVFRSTDN

SEQ ID NO: 220741 - protein, 74 aa, Zea mays
  Clone ID: MRT4577_132903C.1.pep
VSPAGALASPAMSICLWDQQALCRRHLRPDRPGDLGSQSRSSCWSSPPLVSSFPFFLFLFFLLSCFFFCFCMFF

SEQ ID NO: 220742 - protein, 88 aa, Zea mays
  Clone ID: MRT4577_132904C.1.pep
DTQGQPTRAACYQILTDCQAQASTSVLHTSETVYTSYGVRTETQEHLAAPGLKNADHSIGATDASDQLLGNLVPCPLEKPDENTQYYW

SEQ ID NO: 220743 - protein, 84 aa, Zea mays
  Clone ID: MRT4577_132905C.1.pep
EAKERVTLRTSPAALIPGDGSEREPLVRSFTSADRTGNETIRSIVAKVPLATVNLFSCTDSLRASDYAALESIVPSCKVNRVSR

SEQ ID NO: 220744 - protein, 64 aa, Zea mays
  unsure (1)..(64): unsure at all Xaa locations
  Clone ID: MRT4577_132906C.1.pep
ARHGRRRRERGRAAMESGDKRLNELGYKQELRREMTLFKTLGISCSTMTLFTRITPLYGXSLQY

SEQ ID NO: 220745 - protein, 143 aa, Zea mays
  Clone ID: MRT4577_132907C.1.pep
APELGFAKNPTSSLPSEYVAGASDAAAGGGLIWRERFGRFLRSIGRRSSKRKATVLQLCSFTIKWSTAGDTKFLASNLLLLVIVEWSYTFVESSGVHGGENRKELYLRLAWLVIKEEERRLESDRERERERKGDEERDGKVRT

SEQ ID NO: 220746 - protein, 113 aa, Zea mays
  unsure (1)..(113): unsure at all Xaa locations
  Clone ID: MRT4577_132908C.1.pep
PPPIFPALNRLAEDGSRRGDGLAYRVRTWTTXSCVGXRDYDRVWIIALDQGNRTTHLHGVLTDYXRLIEDAAKXNQTAMNPINTDFDTKSIICRRVSDAPDQRDLKMWPLNVI

SEQ ID NO: 220747 - protein, 136 aa, Zea mays
  Clone ID: MRT4577_132909C.1.pep
PMHVTAARFPGISSTHSLQEGMAAMPLMALKTPTVLPLSTTSLPPPSLYKTRARAHGADSWSPQPLHDLSLSPAVENRCRFAARRRSTSGAEADAAPTTPTAEVVPCFPLLLHRSSHPAPLPTPCSSISSTRKNQG

SEQ ID NO: 220748 - protein, 85 aa, Zea mays
  Clone ID: MRT4577_13290C.1.pep
KTAQQFTGSALLKHTLQTFRPQPHNHDYLYKVVLLLTRHTHLSLVWLLHALGKHIRDSCFGWTMEDARTQRNAITTCRFALGRRR

SEQ ID NO: 220749 - protein, 122 aa, Zea mays
  Clone ID: MRT4577_132910C.1.pep
RSRVVSWTSRRRLGCCVFFFFFFCCFFFFFFFFFFFFWEENLGFSIPKDRTRVKGFFLRGGGGHFLVKEGGFSQGGRGGFPPGGPLTGKTPYKNLDRGWRVIMAPGGGRAKKGTHVFFQNPP

SEQ ID NO: 220750 - protein, 45 aa, Zea mays
  Clone ID: MRT4577_132911C.1.pep
TPLLVQLMLETIVPLRDHHGLVLGYANQAEFINRQLHSAHGVPLL

SEQ ID NO: 220751 - protein, 52 aa, Zea mays
  Clone ID: MRT4577_132912C.1.pep
RIAFHSLGSARMLCRTPVREDARVICGTDLKLLPFNRTLRSRPQAVKSDSVS

SEQ ID NO: 220752 - protein, 122 aa, Zea mays
  unsure (1)..(122): unsure at all Xaa locations
  Clone ID: MRT4577_132913C.1.pep
MPPKKWSYLILLGLXSKSSSPTHFPTFLTTSNTFLFSPILLTTVFXVFKTPIFKPSRIHQPIPAAIXTLITLVLPTPXALYHHFPLFHLLHQTIKAHHLHHLFLENLVAYFKNQKFFPLNQL

SEQ ID NO: 220753 - protein, 124 aa, Zea mays
  Clone ID: MRT4577_132914C.1.pep
TLLGRYHPPLVSHSCSTVPCSHATHALRSLWKPNESRWGPVLRLLYDLLGARHGEQACGAQDAPERRVPQEGAANSIYDEQDDLYVLPLRMGPRPTENLNSEGHRSRASAYTQLTACNTCFMLL

SEQ ID NO: 220754 - protein, 117 aa, Zea mays
  Clone ID: MRT4577_132915C.1.pep
VLCLILGAAADRASSNFPTAGDKRSPSTISTSTTATNMGIGYPIPSASQTADAGTTFVNAIFGPPSGGSGQNSNHLRGGLSHSDLRANSGASQMCARIKSHTYDGSWYRNQCHIFIK

SEQ ID NO: 220755 - protein, 61 aa, Zea mays
  Clone ID: MRT4577_132916C.1.pep
HEAYLLSHGVAWYSTREGIVAHVLRVMGIHKNLSFWHLFCTTSTVSGGAIWMIHMKKKKKK

SEQ ID NO: 220756 - protein, 47 aa, Zea mays
  Clone ID: MRT4577_132917C.1.pep
VNKAFETSLAEGLNYERRIFHATFSTKDQQEGMNAFVEKRAPKWTSS

SEQ ID NO: 220757 - protein, 134 aa, Zea mays
  Clone ID: MRT4577_132918C.1.pep
SPLLTCLPLSLLVVLQSHARLASICSHALVACLLPCSLALNWCGCLCLCFTSGLTCLPSGARRLAQVVRPHGHARTLGRSRSRGVNQRREHSPARRPPLRSRNFSTPTEPRSTLARPRPPPCGTMHRIRPPARG

SEQ ID NO: 220758 - protein, 275 aa, Zea mays
  Clone ID: MRT4577_132919C.1.pep
PTRPPTRPRTRGCEAAIAMYLNVSCIPEAQAIIGSSVAIPFLVNGLGEGGSRSDTCRLDALLTLYNLSLHAPNIPSLMASGIIEGLRGVLTPSSPWTDKALAVLLNLAMTRRGKEEIAASAAMVGAIVLILDNGEPGEKEKAVSCLYVICSGDDGSSQTVLQEGVIPALVSVTANGTARARDKAQRLLRLFREQRQRELELEEMQPRVELHEVASQAAARQEEEEEEEEEMVLAVTPAAAASKPRGGGKKPRLRRSGSRRFTKAFTCLLKKWSLR

SEQ ID NO: 220759 - protein, 67 aa, Zea mays
  Clone ID: MRT4577_13291C.1.pep
SIFSRSSLLLYCIAYVLKERSCLVLTSCDLACYFTMNVQTANQHTYVSRGGRVYSKIYQGWKSPFEK

SEQ ID NO: 220760 - protein, 112 aa, Zea mays
  Clone ID: MRT4577_132920C.1.pep
KKTVLILEGSPPSVTAALSARNQPSKGKLLALLQPFKLSMGRPRQSGALGTPPVRVCFVGGCVKKGMHFLLYRIVWVPGGSLFPLNKERSVAVGTPFDLYGWIRPPCCCNCL

SEQ ID NO: 220761 - protein, 129 aa, Zea mays
  Clone ID: MRT4577_132921C.1.pep
IVRTKVVMLSARSSYLKIAKSCRAHRSFCCAGNKREGETPREGEARRSSFCWGPKRSLSHAAHSEPEKIGAGCKIYLKVLEEQERDDRATGDGAAAHRSAVDNPPRTLRLNKKASHAHCLERCGLVGLL

SEQ ID NO: 220762 - protein, 218 aa, Zea mays
  Clone ID: MRT4577_132922C.1.pep
ARRVREKGRESLEDARRRREATKGFTGEAGHEASGTERGGGRGERRQGRGAAAGGGGGGRGSCQPPTAWEWRARPWRRHAMMQVTIASVIQVASKDDVGALLEEARMRSDVVGYLLAVIESRSARPPSSPSDPTPRGCPRSHAHSPARSRQHHLGGRFLDPWQEVDSFENLLSSTQQLVADAHPVPGLDDFAELSEAVVAPARTERERPRGAGWSTQF

SEQ ID NO: 220763 - protein, 38 aa, Zea mays
  Clone ID: MRT4577_132923C.1.pep
FVLPVYVIRCFKPVPQCPRHSTVNFPLVGYPLLSIRFV

SEQ ID NO: 220764 - protein, 74 aa, Zea mays
  Clone ID: MRT4577_132924C.1.pep
GLYYAASYYPGAGLVNLGWGSNTLALLHIDAPATPVRRALTSLVAPVHLLYLLCTRLGSCICLRLEECEEALSN

SEQ ID NO: 220765 - protein, 62 aa, Zea mays
  Clone ID: MRT4577_132925C.1.pep
RLVGLMVGISLGETLQAHLVCLFTCAQALGQVSLGLENNSSIMFSKARCGQKFSSKQIVSFR

SEQ ID NO: 220766 - protein, 46 aa, Zea mays
  Clone ID: MRT4577_132926C.1.pep
TVIRSLIQLYLALTMVYTYLWFEERQCDVVRMLRVMWGAIDSTAAR

SEQ ID NO: 220767 - protein, 111 aa, Zea mays
  Clone ID: MRT4577_132928C.1.pep
GQISRGVREKNSPHPSKIFQNPNWEGNGGVFGTLKKILPFEPLNPHLPLIKQGFGGFLGDQPLGETTSPSPKGPPKPLGGPYCPFNLKRSLKKWGWSLGGAPPIWGAPVSF

SEQ ID NO: 220768 - protein, 348 aa, Zea mays
  Clone ID: MRT4577_132929C.1.pep
MDDDDGSLGIRNWGFYDTVKGSLGLQLMSPMPPDRDTKPLLPRAGFLQQHGHHNAPHQLHAQQPQHYRDSAGGGVSGGTPAEQHPIHMDFSRNEAWLHPSHHQHPHEQKVLHSRPIGPAGHVGHPGHVAHPVHAVHVVHHHPTGYGMISDAQHTLQMMQPQLESQLQEPPPCKGDEAPPPPIEDHSVVSTGPPVKKRQRGQQQSRQPKSPKPKKPKKVAVLPEGGALNGHATRRRGPKKNVGMMINGIELDLANIPTPVCSCTGAPQQCYRWGAGGWQSACCTTSISTYPLPMNTKRRGARIAGRKMSQGAFKKVLEKLAGEGYNLVNPIDLKTFWAKHGTNKFVTIR

SEQ ID NO: 220769 - protein, 201 aa, Zea mays
  unsure (1)..(201): unsure at all Xaa locations
  Clone ID: MRT4577_13292C.1.pep
STAVTSVIDGXEKXYVEKLKPLEVAYRYNDFARDFEAKPMVMLLGQYSTXXKTTFIKHLLKTSYPGAHVGLEPTTDRFVVVMSGSDGRAIPDNTIVVLLCYAIEVHEAPEVLVGMTKQCLVIPRLLSAPEVDIGPWPPPLENKYTWLNDTMTPYCSLDLSFGYGQEDVKQIPPWPPPQELACLGLNIWSSLCSLLPVTYMQ

SEQ ID NO: 220770 - protein, 51 aa, Zea mays
  Clone ID: MRT4577_132930C.1.pep
SAAAGFIAGGFLNALGAINMRIIPVGRLCALLGRVWERGGFQVFTVAGLLL

SEQ ID NO: 220771 - protein, 348 aa, Zea mays
  Clone ID: MRT4577_132931C.1.pep
MDDDDGSLGIRNWGFYDTVKGSLGLQLMSPMPPDRDTKPLLPRAGFLQQHGHHNAPHQLHAQQPQHYRDSAGGGVSGGTPAEQHPIHMDFSRNEAWLHPSHHQHPHEQKVLHSRPIGPAGHVGHPGHVAHPVHAVHVVHHHPTGYGMISDAQHTLQMMQPQLESQLQEPPPCKEDEAPPPLVEDHSVVSTGPPVKKRQRGQKQSCQPKSPKPKKPKKSAVPPEGGTINGHATRRRGPKKNVGMMINGIELDLANIPTPVCSCTGAPQQCYRWGAGGWQSACCTTSISTYPLPMNTKRRGARIAGRKMSQGAFKKVLEKLAGEGYNLVNPIDLKTFWAKHGTNKFVTIR

SEQ ID NO: 220772 - protein, 53 aa, Zea mays
  Clone ID: MRT4577_132932C.1.pep
VLSTLYDTRQSFLLVDPGNSLRNTYMYLSTIQFQISVEVVRKIAVEINTSQLY

SEQ ID NO: 220773 - protein, 167 aa, Zea mays
  unsure (1)..(167): unsure at all Xaa locations
  Clone ID: MRT4577_132933C.1.pep
MASPDPSAADGCSGARVDEHPADEEAIRMPTVEEIKEEDICHNCAVSMVLSAVMGSAPDELMELYVAPLENAIMIDLMTAREQIVYTDPPIGQRRLTHAQTLGDMXMRFSXAECTIHNARAKDDTTNRPIAGXDSARALTVKGEPKATCFGXAGXAALSAAIDKLFD

SEQ ID NO: 220774 - protein, 97 aa, Zea mays
  unsure (1)..(97): unsure at all Xaa locations
  Clone ID: MRT4577_132934C.1.pep
ACTSAIPDSLLYGVAPVLWAEAGRVRHRPQRLGSDHIMLGIFFNVHSAVLIEDVPFTEKDFENGPXNIYNLYEQVSYNCFIAAGLYLLLGGFSFCQV

SEQ ID NO: 220775 - protein, 66 aa, Zea mays
  Clone ID: MRT4577_132935C.1.pep
TGSNKINSTHPLTHLIPASPGGPARRLHPYNLRLAKLPPKTPPTKEKLINTYLHTPLATRTSFGLT

SEQ ID NO: 220776 - protein, 70 aa, Zea mays
  Clone ID: MRT4577_132936C.1.pep
SSGCRPWKNKLNSEMVRSLSPEGLEPLSYQAQKATHFPCFKIITRQTISTDQLSPVLTNFILLKNTVVIF

SEQ ID NO: 220777 - protein, 80 aa, Zea mays
  Clone ID: MRT4577_132937C.1.pep
AMASIIPACLLFTAVPLHRVQLRSAKYRGCLTSIVTVHPDVPYGDIDHSSEYGPTFGSLLISHTNQVYKEQPGFLMPTTH

SEQ ID NO: 220778 - protein, 59 aa, Zea mays
  Clone ID: MRT4577_132938C.1.pep
VDFVQASAAAVFTITKRFQVRQSVISHTVHVKVKIELEHLKINLYHPFQLSSPIVLYAW

SEQ ID NO: 220779 - protein, 103 aa, Zea mays
  Clone ID: MRT4577_132939C.1.pep
KHHVFKGPLSRVNKFPVQVYRSQRCAYFRQAKNGPYIRMALPDFLCVGHKHFGERFSLCWAQAFRGVLFHIMRQGVLPPQSEFFEPGCINHPGGAIINVSCCR

SEQ ID NO: 220780 - protein, 91 aa, Zea mays
  unsure (1)..(91): unsure at all Xaa locations
  Clone ID: MRT4577_13293C.1.pep
QSYQVVACXNLGAYLQKQQLIAFNQLDGVNPAIYLLAQQLLPFNLLVGSPYAFLLQQQLLPFHLQAVANIAAVLRQQHLLPFYPQVVGNIN

SEQ ID NO: 220781 - protein, 125 aa, Zea mays
  unsure (1)..(125): unsure at all Xaa locations
  Clone ID: MRT4577_132940C.1.pep
SGRLAKPLPFLCPAATPPSRACRHDVLGSGTANYGHGSIVRSRGGGAVPAATDDDAVLRRAMSAADPEEVKRAGNDLYRKGCFEGALKLYDRALALCPDNAACRGNRAXALIGLDRLGEAVKECE

SEQ ID NO: 220782 - protein, 97 aa, Zea mays
  Clone ID: MRT4577_132941C.1.pep
SCIISPDSECTQLSTLARDESERAVREVNLCKVKYAHYIVTGGHFVIKILDCSKSLSLRIDHQIRREIRTLKLLMHPIVLPLHVGCASPTNSYMVLE

SEQ ID NO: 220783 - protein, 125 aa, Zea mays
  Clone ID: MRT4577_132942C.1.pep
MAGAAISHLRRGAQRHALLYLSRRHFSSPSSLAAAAPLAAAARRLLSTSVESGTASKEASYKPPPLDPFRADRAPASTPLEPPPLEETPATPSLPEVGSAAAATEQDPAVMHNEQLERLKARAGG

SEQ ID NO: 220784 - protein, 63 aa, Zea mays
  Clone ID: MRT4577_132943C.1.pep
MLRTKKNPSQRKNLQNVQQKLIFSALEKSVNLSSTHSNSKRRTHQENSTRKRKTKAYVGTVFS

SEQ ID NO: 220785 - protein, 124 aa, Zea mays
  Clone ID: MRT4577_132944C.1.pep
PSWGGLLLPSGAVWSCFLVRCPPSVRAVAAPALFLLRPPLLLLGGGAVPPLPPVLSLGWLAFSLFFRRMPLPSLSQSHFCHHGLGPVSGAQYDGSFGSNVCRAVGLSHIWHHLVAYLVADVPVH

SEQ ID NO: 220786 - protein, 82 aa, Zea mays
  Clone ID: MRT4577_132945C.1.pep
TELNKKMRKDWETYTFRRGAHLQSLCVRAASVERRVSKGERRVKKGAANPGRRTAVLVSGVQVCREEETWDLGGRLAILIMG

SEQ ID NO: 220787 - protein, 49 aa, Zea mays
  unsure (1)..(49): unsure at all Xaa locations
  Clone ID: MRT4577_132946C.1.pep
NPIFFVLGSLRAELKKGAISEEWGLFLAFGPGLPFXGLLVRGVKKPFPS

SEQ ID NO: 220788 - protein, 74 aa, Zea mays
  Clone ID: MRT4577_132947C.1.pep
EPSQSAGSRCTICYETTYLGMCRMKRCCEPLIGDSGNAELAAEAPAAYTGNGYTQALNVVKGVNSGSVLTTYII

SEQ ID NO: 220789 - protein, 176 aa, Zea mays
  Clone ID: MRT4577_132948C.1.pep
IQMSVQQVHENKMTCIILGHSSKVMVKLYIRYTFCFLTNLNISLRLQFQTLATTVCRAERKKSKQSLLLYQWSSLNPNIHLPPPTAHENFTISICLFRIITIGNGNSNFYIVLTNQNRKNKCTKHPFPHNVEHIAHALQSWPGLTVEDDGRDREPGIVEERDNLRMLGEVVVENVL

SEQ ID NO: 220790 - protein, 83 aa, Zea mays
  Clone ID: MRT4577_132949C.1.pep
RKMEVRPSRRTLHPPPGMKGIKRRRCFGENEWRQPFDAPGARVARASRVPPLPNGQSLVLSWREIDETQEKEQAIPPRFRRSH

SEQ ID NO: 220791 - protein, 594 aa, Zea mays
  Clone ID: MRT4577_13294C.1.pep
MPKHVKVPAAAFTISAVSLLNPDWEWNSTFFDEPVMLLGFVLLGRSLEESARLKASSDMNELISLLSPQSRLIVTSSSDNPSADSSLNSDAITVEVPVDDVRVGDSILVLPGETIPVDGNVIEGSSFVDESMLTGESLPVAKETGLPVFSGTVNWDGPLKIRATCTGPSSTIAKIVRMVEDAQAREAPVQRLADSIAGPFVYTVMTLAATTFSFWYYIGTHLFPEVLLNDIAGPDGDSLLLSIKLAVDVLVVSCPCALGLATPTAILIGTSLGAKRGLLVRGGDVLERLAGIDTLVLDKTGTLTEGKPVVTSIASLAYEETEVLRLAAAVEKTALHPIANAIMNKAELLKLDIPITSGQLTSPGFGCLAEVDGSLVAVGTLDWVHDRFETKASPTELRDLRNRLEFMLSSEASSSNQSKSIAYVGREGEGIIGAIAISDILREDANLTVERLQQESITTFLLSGDRGEAVTSIGRTIGIRNENIKSSLTPQDKASIISTLQAKGHRVAMVGDGINDAPSLAAADVGIAMRTYSKENAASDAASVVLLGNRLSQVVDALSLSRATMAKVYHKLVWAAAYNIVAISIAAGVLLPQY

SEQ ID NO: 220792 - protein, 78 aa, Zea mays
  Clone ID: MRT4577_132950C.1.pep
MAERKLDRPSALGKGGLSLGIEEDRVAAAMGFVDHSKDQHHLDNSIPLSPQWLYAKPADGKISLPHGSSLELAEKEVR

SEQ ID NO: 220793 - protein, 111 aa, Zea mays
  unsure (1)..(111): unsure at all Xaa locations
  Clone ID: MRT4577_132951C.1.pep
GPRGPDCVRHHXXLITHSTKAKVTSRWQPSNGLVFRLASALSFYLLPSPSARPLVPTSCGWLWFPPSSMTHSCPQGRRTNCASPLVCTEPCGPRETHGWLVILXSQTCXFP

SEQ ID NO: 220794 - protein, 80 aa, Zea mays
  Clone ID: MRT4577_132952C.1.pep
FTICTISKLLLLCLTPYESIIYEILTKSHPAPMMFPLPAVLVSFSSRRGARPSTTAHLLCFQKFVCLMIENQVGQLPHLS

SEQ ID NO: 220795 - protein, 87 aa, Zea mays
  unsure (1)..(87): unsure at all Xaa locations
  Clone ID: MRT4577_132955C.1.pep
AFAQAFAADVYDILTEKLIVQISVNXALNXDIPSSQYTRXNXKITMTPASILREAGLARYGPGXPXKNYLEVRSRNTTCEPNVILAS

SEQ ID NO: 220796 - protein, 145 aa, Zea mays
  Clone ID: MRT4577_132957C.1.pep
QKQLFSPQIRLKFKGIEHFSGSFGDRITLGPRKKKLTKNGQRPGSTHKKPRKLETLLQNMTFFTCIQLIKGSGVGLDPGAHVLNRRARKPGLGNLPGKRIPKSKNPPRNRDKPSRPKEGEGAASRTGGAQGGPQPGGSAPAMGRG

SEQ ID NO: 220797 - protein, 259 aa, Zea mays
  Clone ID: MRT4577_132958C.1.pep
EAESKRRHPSVIARLMGLEEDLPTKEPTVHHTVSDLSRDLNATNNTLQGKEHHHFIMSKTQNYQSCHEKIEYNDVFEVSEGQPGTDCFHDRTSQKGWSSENKSEQFNIARDKIMEPEQLAIEEKLLCTKELPEALVFPCSNRDLFLEFPEEHNPTFSRQSSGLHANQAPPQTKRITVLKPIRSVDIDGIRRPRAEIGKQNVLKMRRFHQIPSPKEEIPSPPSRIILLRPYPGKPGISKAKLTSRANSFQLPNRNSLNRS

SEQ ID NO: 220798 - protein, 90 aa, Zea mays
  Clone ID: MRT4577_132959C.1.pep
QVESSSNIRAATATKILSLLMLLALSACHANATLLLQCLQAPIANLVTPYLPSMIASVCENLAFQPYRLQQAIAASNIPLSPLIQLSTAL

SEQ ID NO: 220799 - protein, 76 aa, Zea mays
  Clone ID: MRT4577_13295C.1.pep
MGVGTREILRARCAAGPGPGVRTGQGRGKLFTSAAAAAAAVRPQGEEAKKATTQVGRQAVRQAGARAEAKAERGAL

SEQ ID NO: 220800 - protein, 40 aa, Zea mays
  Clone ID: MRT4577_132960C.1.pep
KMLVFMIKICGTHFGRGFKVNAPKALGCSTPVQYAWLFLQ

SEQ ID NO: 220801 - protein, 197 aa, Zea mays
  Clone ID: MRT4577_132961C.1.pep
MESTSGEDAPKRNPLPSALVSNLQSVLAARRPSAAEVNTAATASEAEAEAQEAEASDAPAGDGTPARPIVLLTCAGGIRSAGLAALVDSLVAAGRCDVHVCAPESDMQACGHSITIRETIAASSVDFTGAKAFETSGTPVDCVSLALSGRLFPWSSPALVISGINTGSNCGYEMFHSSAIAAAREALVYGVPSMQSH

SEQ ID NO: 220802 - protein, 57 aa, Zea mays
  Clone ID: MRT4577_132962C.1.pep
LKESIGLPTDLLEQSHFLMKSETGSHDCVLQITVFDYNKIKNLLHYDTIFLHIIHYK

SEQ ID NO: 220803 - protein, 141 aa, Zea mays
  unsure (1)..(141): unsure at all Xaa locations
  Clone ID: MRT4577_132963C.1.pep
ISATLGESKKSESAXVKVDDQKLAIGTLSIEKYPXIEIDLVFNKECELSHTSKTTRVFFFGYKVEQPIEEDEXMDLDSEDEEKELNIPVIKENGKGDGKEDQRSEEKAVAAASKSSLGLEKKXKDEYESDDSNEGEGETGE

SEQ ID NO: 220804 - protein, 59 aa, Zea mays
  Clone ID: MRT4577_132964C.1.pep
RAVGPRLTLSSCWTAGLPPLPCLKKVPGEWSGSTALPEITSALVQLKSSLGPRIITWGL

SEQ ID NO: 220805 - protein, 71 aa, Zea mays
  Clone ID: MRT4577_132965C.1.pep
TRFLCTRKTKLGGGLDKRVPMPWKALSLFGGGITSIYFVHASPGWGDKEQTNSIGLLFITPTKTWGGLRLP

SEQ ID NO: 220806 - protein, 104 aa, Zea mays
  Clone ID: MRT4577_132966C.1.pep
ASSLAKGSGSPESASKLHGLLRSSSRPEVERSRGERTRERGRSGKQRNGRGVEEEEVVVVVLAGVTVRRPCRKWRVECRRRRSSMAARGGGRRPFGWGSRVLAA

SEQ ID NO: 220807 - protein, 153 aa, Zea mays
  unsure (1)..(153): unsure at all Xaa locations
  Clone ID: MRT4577_132967C.1.pep
WRSKVMDMAPKKKVIRYYESWSKQWLGAGIFSEGREXVSVDVIKKLERRMVLSTVEKAGLLSKGXELGLTLSXMEKLGLLSKGDDLGLLMLVETAAGTSPSVLACISLTLLVAAVAAVVVVPDDSLTLVALQARSTAELSAAAAGLFVGSVVL

SEQ ID NO: 220808 - protein, 267 aa, Zea mays
  unsure (1)..(267): unsure at all Xaa locations
  Clone ID: MRT4577_132968C.1.pep
MEVGGGGKHFVLVHGLCHGAWCWYKVATALESAGHRVTALDLAAAGAHPARLHEVRSLEDYSRPLLDAVAAAPDGDRLVLVGHSHGGVCLALAMERFPSKVAAAVFVAAALPCVGKHLGVTLDEFMRRNASEGLLMDCQRVPISGVGQQGTAIVMGPRYMEEKYYQESPSEDLTLAKLLVRPGNQFMDDPLMKDAALLTAASYGSVRKVFVVAKADCSSTEEMQRWMVAMSPGTTEVHEIAGADHAVMNSKPXELCDVLGRVASSCG

SEQ ID NO: 220809 - protein, 122 aa, Zea mays
  unsure (1)..(122): unsure at all Xaa locations
  Clone ID: MRT4577_132969C.1.pep
PRRRHPTPTPPTTGRRHNARATRNGEPNRADAPDNGXASGTKNANQPPHSGKTASGNEPNXKDEKGCGASYKGRRKEKPEGGGKPHTXDITDMNHEPNAPYHNDESGKAYGTRAKPGHNDKT

SEQ ID NO: 220810 - protein, 92 aa, Zea mays
  Clone ID: MRT4577_13296C.1.pep
SFLAINAKGGEILSPKQKDRTTKLQNFSKMMIYVCLFNWYLMIEISSIDMIFSIGIFKDGISKLVSKYKFQLVSIKTLLKTKRRILFRGSFV

SEQ ID NO: 220811 - protein, 71 aa, Zea mays
  Clone ID: MRT4577_132970C.1.pep
TSKELHCTTWMAVGSICYAFLRAAGQEETASITLLTLHNGDYIHHSGQRLLDHLPVLNGIRDRLHIHSDPA

SEQ ID NO: 220812 - protein, 54 aa, Zea mays
  Clone ID: MRT4577_132971C.1.pep
IFNLHKTVFTYIWPYEFGPQNHIFSLNVQSSPSQKNFFFNYNTKEPCPSYKKKS

SEQ ID NO: 220813 - protein, 163 aa, Zea mays
  unsure (1)..(163): unsure at all Xaa locations
  Clone ID: MRT4577_132972C.1.pep
MFRRAATCYRLIINNAYPKTEYCRDVPDPNSRIYHEXMKITTADEVPYCVHLVSCDNDNXYSEALEDDQYYVCNKYMSKLATHDAFHLTCRPRPLHVLHIIEMLAXVGADKLHTATRCASGKTHATXAMTHPDQDLLSDRCXTTMLXHARENLLLAQLLFPGR

SEQ ID NO: 220814 - protein, 120 aa, Zea mays
  Clone ID: MRT4577_132973C.1.pep
SQGTLACLICYFSLYDLNFVELIKFTVSFFLAKLTGHACFLLRALPIDRACSSSACPGPGHATLAMVSPGPGHSRVAAESARPRSPGEAAGAPGRLRPHWPRPRVRVFFSTQIRHMRRNG

SEQ ID NO: 220815 - protein, 51 aa, Zea mays
  Clone ID: MRT4577_132974C.1.pep
KQNGGNLSGGLSLSCIARSLIKRFRCGFVNPRALRFNSCSTCYVLRFMIML

SEQ ID NO: 220816 - protein, 104 aa, Zea mays
  Clone ID: MRT4577_132975C.1.pep
LIAPKVESTTCRTAHLGPLPSFPRLCTTVFPPRSLRTPRPMLGARLTGAVTISAPLGWKSLCPAPTFSPWAGCPPIPEPWGCKVQHWKRVIPQPNHRILKAKEK

SEQ ID NO: 220817 - protein, 42 aa, Zea mays
  Clone ID: MRT4577_132976C.1.pep
SMSRCEGMTRLVRPHSHLPESPGKHDELPPPEWMHSAVAPGI

SEQ ID NO: 220818 - protein, 73 aa, Zea mays
  Clone ID: MRT4577_132977C.1.pep
LMSSSNRFLPLLWGGSFLGGLRFHLGGLRSPPRLLRGLSIFPAVLFFCNKNPIYGWARPILANKKIFFGPCFV

SEQ ID NO: 220819 - protein, 109 aa, Zea mays
  unsure (1)..(109): unsure at all Xaa locations
  Clone ID: MRT4577_132978C.1.pep
XEQFINAAKIIRHPKYNSRTLDNDILLIKLSSPAVINSRVSAISLPTAPPAAGTESLSSGWGNTLSSGADYPDELQCLDAPVLSQAECEASYPGKITSNMFCVGFLEGG

SEQ ID NO: 220820 - protein, 66 aa, Zea mays
  Clone ID: MRT4577_132979C.1.pep
RSFWATSFDRRRGSSPILLVDTRLPRRSARGGCCDQDTADSLKCLEAHLGGKTYVSGDCITKDDIK

SEQ ID NO: 220821 - protein, 185 aa, Zea mays
  unsure (1)..(185): unsure at all Xaa locations
  Clone ID: MRT4577_13297C.1.pep
CPSLTSDFGSGCPGPSSTLAKIVRMVEDAQAREAPVQRLADSIAGPFVYTVMTLAATTFSFWXLLFFYFFYENLMTKNIAFLSLTPFPRYYIGTHLFPEVLLNDIAGPDGDSLLLSIKLAVDVLVVSCPCALGLATPTAILIGTSLGAKRGLLVRGGDVLERLAGIDTLVLDKTGTLTEGKPVVT

SEQ ID NO: 220822 - protein, 89 aa, Zea mays
  Clone ID: MRT4577_132980C.1.pep
LNMPSTNSKLLTVSFSRSGDPTVDYLTKKKAEKQEDDGAVPFLLVLGNRVLLCLSVYTGHQLPDYLITRLHRVQISSSSRKWFRILPVV

SEQ ID NO: 220823 - protein, 215 aa, Zea mays
  unsure (1)..(215): unsure at all Xaa locations
  Clone ID: MRT4577_132981C.1.pep
HPPWGACGDGVHVVSALDATKTECDHFTAIIVASVGYXFTDAYDLFCISLDTKLXLGRIXYTNTTQGQLLGELAPNGPEKLNGDGFCGTLAVQRLLRGGVSHKVAKQRATCEMTLMIMILCSVTAALAISHTPTPGMSTLCVFRFXIGFRIGGDYPLSITIMLEYANNMTRGAFVEIVCVMPLFGILDGGIDAIDISADYPAAYTTAEYSEDYLN

SEQ ID NO: 220824 - protein, 74 aa, Zea mays
  Clone ID: MRT4577_132982C.1.pep
IGAYLSSVSTCQPRRAVRKRSRIMHRLSLGCGMFPVCSHAWVKYLVSAGETISYHGLQGIKWTWMPLCADVIIL

SEQ ID NO: 220825 - protein, 107 aa, Zea mays
  Clone ID: MRT4577_132983C.1.pep
IGFCIFDFPLPLRVVQPVQRLVFSFNGLSRLARRHGVWFVNGTLVPVVILAVRIPMVRLVLIWLFVMYSILFGRISAEFALLPFSSGPPFCSFGARSQEPGALGRSR

SEQ ID NO: 220826 - protein, 92 aa, Zea mays
  Clone ID: MRT4577_132984C.1.pep
RGLHREMEPYVSKNPRGAYVNYRDLDLGVNHDDHRGLASYEKARVWGEAYFKANFERLAAVKAKVDPHDFFRHEQSIPPFMSTRRDVSGTSS

SEQ ID NO: 220827 - protein, 104 aa, Zea mays
  unsure (1)..(104): unsure at all Xaa locations
  Clone ID: MRT4577_132985C.1.pep
MVXRAXXSLVSRCLLARAPAGAPPAAPSAPXRTXPADGMHRLGXGVLXRXXTGXXXEEPXXXXXHXXYTXXXIXXNXXXXXPXXXXXTLDPXQGRVIAHXVAEG

SEQ ID NO: 220828 - protein, 59 aa, Zea mays
  unsure (1)..(59): unsure at all Xaa locations
  Clone ID: MRT4577_132986C.1.pep
PGTQPAXAPXGKAAEPGATTKXPTKPAXPXQTXRXARGXGXXXXGGPGXXEXGXGRXGR

SEQ ID NO: 220829 - protein, 77 aa, Zea mays
  Clone ID: MRT4577_132987C.1.pep
PSRGLPFFFFFFFFLFFLFFHRFVSIYSPYILPFIFINHLTLPIHIQYLTLTILKSKKHLFYNHIYNQFIFHHPNLT

SEQ ID NO: 220830 - protein, 41 aa, Zea mays
  Clone ID: MRT4577_132988C.1.pep
TRLLYRYTISDHEIHLQQEMICPHDGQVLSRYVTSGSRTRG

SEQ ID NO: 220831 - protein, 77 aa, Zea mays
  unsure (1)..(77): unsure at all Xaa locations
  Clone ID: MRT4577_132989C.1.pep
TTRSINYPPAFFFGSFLPRLSFPPFFFWELSLRFRKVNHEMGKTVMPPNFPHQKKKKXXKKXKKKKKKKKKKKRAPA

SEQ ID NO: 220832 - protein, 283 aa, Zea mays
  Clone ID: MRT4577_13298C.1.pep
YPVAPWVCPKLCAPGRSPCSSAAPDSSQLCSSFSLLGVLPLPAESLHRLAAPSFFAPCARLLLCGAELPLRPGPSARVHAAASWSLLDRVTLRSRRCLVPSAWVFFPLRSVIVAASRETPCVELGSLRSGAFPLAKIVIARRFSLLLAALDSSCAGRCPAPVFADPASPWVCVINLALFCPLDVACFCVVCYAWHIRVIRVRHVPGTVVCSCSDKLLCFGVFAIDRPRCSTNGWNPEFVVVSHPRSRQPLLDKCSMKGLSQVLLLLPRISHRIGNSTLARYSY

SEQ ID NO: 220833 - protein, 499 aa, Zea mays
  Clone ID: MRT4577_132990C.1.pep
FLRNSGGRALPFDDNINFHKTIAAAIVVGVVLHAGNHLVCDFPRLISSSEVKYAPLRKYFGENKPTYLDLVKGVEGITGIIMVVCMLIAFTLATRWFRRSLVKLPRPFDKLTGFNAFWYSHHLFIIVYISLVIHGECLYLIHDWYKRTTWMYLAVPVGLYVGERTLRFFRSGSYSVRLLKVAIYPGNVLTLQMSKPPTFRYKSGQYMFVQCPAVSPFEWHPFSITSAPGDDYLSIHVRQLGDWTRELKRVFSAACEPPVGGKSGLLRADETTKKALPKLLIDGPYGSPAQDYSKYDVLLLVGLGIGATPFISILKDLLNNIIKMEEEEEASSDLYPPIGRSKAHVDLDTLMRITSKPKRVLKTTNAYFYWVTREQGSFDWFKGVMNEIAELDQRNIIEMHNYLTSVYEEGDARSALITMLQALNHAKNGVDIVSGTKVRTHFARPNFKKVLSKIATKHPYAKIGVFYCGAPVLAQELSKLCYEFNGKSTTKFEFHKEHF

SEQ ID NO: 220834 - protein, 94 aa, Zea mays
  unsure (1)..(94): unsure at all Xaa locations
  Clone ID: MRT4577_132991C.1.pep
HQREKEDVLARMLQLEKELHEKQQLELEVXRLNGTLQVMKHIXGDHDPGDIHXKMEKLSERFEREKKRLEDLSGDLVTKERESNDELQQARKEL

SEQ ID NO: 220835 - protein, 52 aa, Zea mays
  Clone ID: MRT4577_132992C.1.pep
SRPAGEISAAFHVLLWNKHLLATSQNNIHLGSNLFLIYNSLAQALLHHVPHC

SEQ ID NO: 220836 - protein, 112 aa, Zea mays
  Clone ID: MRT4577_132993C.1.pep
GKQKGVECTVDLVRGGYILRSFEVGARAVLVLRRGLAMLITTSGARHLWLFLSLVHYHHSSSHGWLVMYLCCHRHSLNDGYDRGENSLVYNIYIIGTILLLDRGNSTYAANV

SEQ ID NO: 220837 - protein, 48 aa, Zea mays
  Clone ID: MRT4577_132994C.1.pep
TFPTPTPHVPNHPPSSSNVTIQHQPPSFYLRSHSYSHNSFLIYILIIL

SEQ ID NO: 220838 - protein, 89 aa, Zea mays
  Clone ID: MRT4577_132995C.1.pep
STWPPCWLEWVTQFLKNPNGPVHWGWEWKKNKVFFKRHTWRALIFHGAYNQLFVAPRHDLTPFVFSLWTLGVALGLTREKIFRLHLSKF

SEQ ID NO: 220839 - protein, 211 aa, Zea mays
  unsure (1)..(211): unsure at all Xaa locations
  Clone ID: MRT4577_132996C.1.pep
HVIVADPHYXNVAAPTPRCRTTPSXPVFGRREAKATKRRRHXRDELKXQRLQEGSDIEDAIIACPKWIGLSPCDALKRENSAHGYHRPEAFAQEAPAQSSGQNSGTPTWYASPHSTNVPMRCPRGRTAPPRPPRSSLGHELLPRTNLGALNANRGCLAAAVLGARAANPASPSGSGETESGAAARVSPPEPTTRESDAGALGPVSISRDKL

SEQ ID NO: 220840 - protein, 60 aa, Zea mays
  Clone ID: MRT4577_132997C.1.pep
WQELYFSIKKKGIDLVLRKTESEIYTGCTSNPDNGSPTHKAHTRSLLSSSTQKTSNSEPK

SEQ ID NO: 220841 - protein, 42 aa, Zea mays
  Clone ID: MRT4577_132998C.1.pep
SAAISTGKQPTIDSNLLPLLHFHNPRPWIKGMVYCLIDNSSR

SEQ ID NO: 220842 - protein, 114 aa, Zea mays
  unsure (1)..(114): unsure at all Xaa locations
  Clone ID: MRT4577_132999C.1.pep
RLTVFKAEKKFVVNKLAEEEFVAEKMIVGKKFKVEKWAFVGKLVGKEGGEGKCGKKKGKKSAEMHKTHTPKASKXAYLDTGTLLKVTLTTNLPTNDTPEKSVGEVVKSVCHNKK

SEQ ID NO: 220843 - protein, 98 aa, Zea mays
  unsure (1)..(98): unsure at all Xaa locations
  Clone ID: MRT4577_13299C.1.pep
TIINLHTNIEFSFLHPIPISGFYLYMTGPALTISTIPXPYLINSSFLYNTFSSSSYTTLIYHHFLFNIIHSTLLLSLHLSFFSILITKSLSFYIYILT

SEQ ID NO: 220844 - protein, 53 aa, Zea mays
  Clone ID: MRT4577_1329C.1.pep
PPCLHLYGPPLVHLIWMHTCTRHSYDIYAVTSTPTCMSARQQYAQKSCHYTRV

SEQ ID NO: 220845 - protein, 147 aa, Zea mays
  Clone ID: MRT4577_132C.1.pep
DNPSEECQMIYEVAYAEQGKIDWYRIYTPTCKKTLLQKRKLIRGIMPWLSRGYDPCTELNITKYCNLPEVLDAFHANVTVIPYAWVGCRDPIYECWMDSPRSMLPIYRDLISACLRIWGFIGYTDFLAPLTGTRFSIGALSLPMITK

SEQ ID NO: 220846 - protein, 53 aa, Zea mays
  Clone ID: MRT4577_133000C.1.pep
WGSATIKGMLSTLMYRFDWHLPAGIKAENVDMPKVFGIPVSRKKKLLLVPQVG

SEQ ID NO: 220847 - protein, 55 aa, Zea mays
  Clone ID: MRT4577_133001C.1.pep
KSCAQAMLVKFLTWVKRFRQFELVWLTYYAESGVDSFFLWNSSLARLGGGYAGSV

SEQ ID NO: 220848 - protein, 138 aa, Zea mays
  unsure (1)..(138): unsure at all Xaa locations
  Clone ID: MRT4577_133002C.1.pep
RSSWLIYXLQIAMKTCGTTEGVFTNRRILELAXELAMPLAAXVKYSRXTFIFTGAHTVHXSSYLRQFAGLNRYCVHLKSGVQDYVIEDASXPRQTCDIYYTANYTEQLMVKTHMRITGLDXNKAXSLFNTNADGSTAC

SEQ ID NO: 220849 - protein, 36 aa, Zea mays
  Clone ID: MRT4577_133003C.1.pep
MAEAMLLDPPGWATGVVGDPAEVALCWPHGSLWDAC

SEQ ID NO: 220850 - protein, 247 aa, Zea mays
  Clone ID: MRT4577_133004C.1.pep
MATAFDSPTSSPAAAPFHDDPFLSFADSPAPAAADVHVSGGADDSSFPASPDPYAFRHDSAAAHPFGMPDSNGNGMHHDAEGDGLFTDSGPVLPDPAQMGADEGFLLREWRRQNALLLEEKEKHEKELRSQIILEAEEFKKGFVEKRKLNLETSKDHNREREKLFLSNQEKFHKGADKQYWKAISELIPQEIAHIEKRTGKKDKDKKPGIIVVQGPKPGKATDMARMRQILSKLKHTPPPHMKPPPP

SEQ ID NO: 220851 - protein, 126 aa, Zea mays
  unsure (1)..(126): unsure at all Xaa locations
  Clone ID: MRT4577_133005C.1.pep
FMKYIATKASPDSGQSDLEANYWTHQINAYLTALHREKHTLDVRSSKTTSVAISSLISSVASVLVMHPKLGTSAAESLAMLGTSDPRLGMPLFVVILFYSKILCSSGKFSAEIXLSLLESLPSLAI

SEQ ID NO: 220852 - protein, 88 aa, Zea mays
  Clone ID: MRT4577_133006C.1.pep
VISLHNGPAHLAFILFNANHRSLGAQHVDNQGYDLIKVVDSSYHVPALLHAVVAKVRCHRSVEGQRLIRGDFIPIGDVVQYIDERGHQ

SEQ ID NO: 220853 - protein, 115 aa, Zea mays
  Clone ID: MRT4577_133007C.1.pep
LLSLSSSVAFIGWTSLISHPWVVVVSLAHMFMLCVDHVPRLSRWPLRWRTDRRVRPPYANGTPLWMQEYAAPAAGRGRVVPAKAELCDRSVRAGQLKVDPAPGSAPTSEDGQRSR

SEQ ID NO: 220854 - protein, 58 aa, Zea mays
  Clone ID: MRT4577_133008C.1.pep
AFEFLNDFVNLYTFEFLDDFVNMYTLKFTVSHSLDLAYMKCHVTVRVSTVNVTLICLM

SEQ ID NO: 220855 - protein, 170 aa, Zea mays
  Clone ID: MRT4577_133009C.1.pep
PRGRPGWYFPLCLQAPETDKEGTSLRSPAWRGERLKSRGSRKHDPPGHLLQTPKRAPLEGLRALRPMIRQGGDRHLLPMCFTSTSTPATECQGTSGEELEGSRRMFLPLNHRSVEYSGHDLLADESRTSVHPHSDVVQRYSGLVCSTLCRNIVAQRMCPDVRAACDRGGL

SEQ ID NO: 220856 - protein, 187 aa, Zea mays
  unsure (1)..(187): unsure at all Xaa locations
  Clone ID: MRT4577_13300C.1.pep
PGSTHASGDAEEMKSVDAFRQTLVLEELLPARHDDYHMMLRFLRARKFDIDKSKQMWSDMLQWRKEFGSDTILDDFQFEEMDQVLEHYPQGHHGVDRDGRPVYIEKLGAIDTAKLLQVTSMDRYVKYHVREFERAFAVKFPACSIAAKRHVDQSTTILDVSGVGYKNFNKAARDLIGRLQKXDGDNY

SEQ ID NO: 220857 - protein, 60 aa, Zea mays
  Clone ID: MRT4577_133010C.1.pep
PEICLPLFVADYDLLLVLSILFFSFFIKTVKSAERYQRYRKASIPDITTHGQLQTTTTPS

SEQ ID NO: 220858 - protein, 62 aa, Zea mays
  Clone ID: MRT4577_133011C.1.pep
RLLATCFAASLGLADGDATSDSTSSSSDHTTDTDGTTTGDLPAHLPSPEPCSDHLDAPLADS

SEQ ID NO: 220859 - protein, 348 aa, Zea mays
  unsure (1)..(348): unsure at all Xaa locations
  Clone ID: MRT4577_133012C.1.pep
MSVSEKVAPSKSSVSSSSDLDPLLKGLTEKKLTFRRNVVSLAAELKDVRSKLASQEHLFVRESQTRKVVETKARSMEEEVSKLQKCLQDKDEQLRSSTSSTEQYLHELDDLRTQLSFTQATPEASAASAESSRIQSLLLXNDLNEQAIFSIEVEIRLNNVWEQRGILQRELQARAISQMQVKDEVIRIETDIMDAVAKAGSRSDKDNELLKILSDVSPRNVQNLNNLLNAKDTEIARLREEIRILSAHWTNKTKELESQLEKHRRTDQELKKRVLKLEFCLQESQSQMRKLKRMGERRDKALKELMDQVATKQPNSMCHGNKENFWEGQGFKFIASMSMLALVILAKR

SEQ ID NO: 220860 - protein, 229 aa, Zea mays
  unsure (1)..(229): unsure at all Xaa locations
  Clone ID: MRT4577_133013C.1.pep
GSPPPPVHTXPRTHRGQLSWWGAXXNSPGDVLXXLLGLGVGIRALCRKVLXANMAAHXTITGXFGAVGSVAPCXKLTWGEGGXPAXTTWLXPHGRPLACQGSRGAPPSARAEPGTLLTGALAFHHHHHGASPFTREQXDPPPPRIXPPPARALGGGCREGFQRRVLRGRXXPPSLPLNPAXPSRRSQKVFWGSGXPYLDGCSSFRGGSRTPGTTGLVALXGAGCREYGG

SEQ ID NO: 220861 - protein, 42 aa, Zea mays
  Clone ID: MRT4577_133014C.1.pep
LQGFVHDLVLAIMVCGWMCAVTPFRLYFVLTPPQSNGASWTF

SEQ ID NO: 220862 - protein, 153 aa, Zea mays
  unsure (1)..(153): unsure at all Xaa locations
  Clone ID: MRT4577_133015C.1.pep
RWGEKDGGKRRRALQVLSEQPISARRKGRGAPGTDDQGGGGGXPXXXAPLXFEPXXASSXWSFXXRAGISXXFVATFXLFLYXXTVLXTSLGVSKSTSKCGSVGIQGIVWSXGGMIFALVYCTXXIFGGHINPAVTLGLILGRKLGLTWSMLV

SEQ ID NO: 220863 - protein, 53 aa, Zea mays
  Clone ID: MRT4577_133016C.1.pep
ETTTARRLKSPTDCVLCSFHLRDRVIMVDQRTTGAMEATRLTDGPWGYTPGWA

SEQ ID NO: 220864 - protein, 130 aa, Zea mays
  unsure (1)..(130): unsure at all Xaa locations
  Clone ID: MRT4577_133017C.1.pep
VFKRISKITGNKVQFECGKDCEFDAIVFATGYKSSANLWLKGFEXSHVKFRNTYIRSWHMGRRLLISHKFFCMGQADDKCMVNSDGRPNTCXANIWKGEDGLYFSGFRRMGLAGICMDAYNIGNENVSVY

SEQ ID NO: 220865 - protein, 187 aa, Zea mays
  Clone ID: MRT4577_133018C.1.pep
PPTESDYSPAHYRAPPNVSPRPGPSRVSLVEEDHGSISSGYAGDGSSSSKGSSTAGFIISRSFSRRGLPGGGCWRGRAHLLVRGKRGCKAGGWRGSWSRLPSRLLWGTGAVGGVPGSGCFSGGSSSLGSLRCLGSPAFLRCLCRGLGRAEASNGEHVTELRSCVARHFCWLAGCDGVKRRGPGRTRG

SEQ ID NO: 220866 - protein, 65 aa, Zea mays
  Clone ID: MRT4577_133019C.1.pep
SEKTIGYGVAAGSLVNLATMLYFNSIRGPATIAYSLCAFFGLQVLIGLVKVKKLDRQERLITGTA

SEQ ID NO: 220867 - protein, 95 aa, Zea mays
  unsure (1)..(95): unsure at all Xaa locations
  Clone ID: MRT4577_13301C.1.pep
MSLAFSGDETALFFGFLGASAGLVFSCMGAAYGTVKSGVGVAFMGVMRPELVLKSIVPRVMDGVLGIYGLIIVGIISTGINPKVXPYYLFGGFVH

SEQ ID NO: 220868 - protein, 88 aa, Zea mays
  unsure (1)..(88): unsure at all Xaa locations
  Clone ID: MRT4577_133020C.1.pep
ACTCCRCSTAYRRLSAGGDGGGRRWLLMAVLPAIQFIQGTDDQTVPVVLLTXFRDGTYGVAVFRFQRFSVFYSSAXLGYITGFYMVDD

SEQ ID NO: 220869 - protein, 71 aa, Zea mays
  unsure (1)..(71): unsure at all Xaa locations
  Clone ID: MRT4577_133021C.1.pep
LLYSXSPVPHLLSFXSIPXGGSVDPATTLIASQHSKDILKKLVPKKIIEIPDWYFLPLLSWPFALAIYRPL

SEQ ID NO: 220870 - protein, 58 aa, Zea mays
  Clone ID: MRT4577_133022C.1.pep
DLNHVPTNRSLSLQTDMKSHSLDLESVAQESSTPTPIQSPWIADQRLGFNAMEHYLTF

SEQ ID NO: 220871 - protein, 49 aa, Zea mays
  Clone ID: MRT4577_133023C.1.pep
RPHAGVDPYAPVSVSLVRSEWRRWTHSWIIDAFCAKNGSRTKATHLTFA

SEQ ID NO: 220872 - protein, 34 aa, Zea mays
  Clone ID: MRT4577_133025C.1.pep
NQTNITIHSTICSLNIEYRHTTHVRTQLIYKSYT

SEQ ID NO: 220873 - protein, 50 aa, Zea mays
  Clone ID: MRT4577_133026C.1.pep
RTRAANRGFHHRTAAAASAGGRYQGDWGSSAVPETQTAPAAGECECPVTG

SEQ ID NO: 220874 - protein, 106 aa, Zea mays
  unsure (1)..(106): unsure at all Xaa locations
  Clone ID: MRT4577_133027C.1.pep
KTGGGPGPAPAPGGGAGEDGPRGPKRPRRGPKRGPGPKRRGGPKGGVGGRQKPGGPQTTGRRKTGGGTPPGMREQGPGSPPTMGTSXPKPGGGKQSGGQGPRGPRG

SEQ ID NO: 220875 - protein, 137 aa, Zea mays
  unsure (1)..(137): unsure at all Xaa locations
  Clone ID: MRT4577_133028C.1.pep
LLHYLFYFTQLFKNIKADDFFIYGAPIHASILIVYFNYNVHYLLLLYFTPLSLYHLYCLXFMTFLIPINTTIPTNNDHVFFTYSYNQPYFLIHFYQXDMTLTLYNNLLYKFYLSIIPPSPHFFPHITVFFDIYSNFI

SEQ ID NO: 220876 - protein, 94 aa, Zea mays
  Clone ID: MRT4577_133029C.1.pep
MGGAMRQLLSFLGASNGRPREKKTKRTTLRRRLLVPTVELRVRMDCERCEREVKKALSGIRGWSSSVTLVPRLSPTYPSIRTQLSSLASIAPRP

SEQ ID NO: 220877 - protein, 38 aa, Zea mays
  unsure (1)..(38): unsure at all Xaa locations
  Clone ID: MRT4577_13302C.1.pep
SYVMCQLVIRYSXITXLAXNPWXVWSVSLXXYTFKNHA

SEQ ID NO: 220878 - protein, 105 aa, Zea mays
  Clone ID: MRT4577_133030C.1.pep
NAVGGNTLKHVKKSALVKTKQKENIGTTRTGLMVWELRELMGGTTGEANLAEICICFSKMMCCSVDDHHHASNVKVLDPYMHSISFVESSAISILWIQLNVLVLP

SEQ ID NO: 220879 - protein, 68 aa, Zea mays
  Clone ID: MRT4577_133031C.1.pep
KGGPPFFFFFSAQIMKPVFFPEQWEKPFFLNQKSIFVQYLGPQIFFKGKILWWQPCRISCFNVNLHPK

SEQ ID NO: 220880 - protein, 70 aa, Zea mays
  Clone ID: MRT4577_133032C.1.pep
IRSMMLENMVHSLHSQCKVLCETSDVLNLQAGASRAFMFSSYQFVLLCIPVGPHLVCIRASSQHCAPAFG

SEQ ID NO: 220881 - protein, 84 aa, Zea mays
  Clone ID: MRT4577_133033C.1.pep
PPVRVPVCLASAPVTPLLRPKFFIEQGKLQHTHRSTTLFPSIIDSTIHQPKLLLASIVATLIGNLSVILCLDHSCVDICVTHWL

SEQ ID NO: 220882 - protein, 112 aa, Zea mays
  Clone ID: MRT4577_133034C.1.pep
MVWSGTSSNPDTGNASMSYSSSLPVYVPNLGWIRVSGPLLVVLGWSAAVGSNLRQADMREDEDGLLALHSVMGGPDWDTPSLHAIKSRPSISGYTITIRRKAGSVLNRRIEI

SEQ ID NO: 220883 - protein, 153 aa, Zea mays
  Clone ID: MRT4577_133035C.1.pep
MGNAAVTIISTVASTATVVVIVALIRRCRVVRKKMKKKIVKKVLEEIEKKNSEMQASNAVEDVAIEVGPVETFLNQILNEKPMRFSSEQLAACTRNYSSELGSGGYGVVYKGELPNGLLVAAKVLKVSSMNRKVQEAFMAEIGTIGRTYHVHL

SEQ ID NO: 220884 - protein, 94 aa, Zea mays
  unsure (1)..(94): unsure at all Xaa locations
  Clone ID: MRT4577_133036C.1.pep
RYKTEKGHGEENYTIADTMLKSTQENGXVCVRGHNIFWDDPKDLSDWVRTLSPADLTGAATKRMNWELSRFTGVLIGWDVMNENLRFHCDEDRS

SEQ ID NO: 220885 - protein, 234 aa, Zea mays
  unsure (1)..(234): unsure at all Xaa locations
  Clone ID: MRT4577_133037C.1.pep
MKKKIVKKVLEEIEKKNRERQASNAVEDVAIEVGPVETFLNEILNEKPMRFSSEQLAACTRNYSSELGSGGYGVVYKGELPNGLLVAVKVLKXSMNRKVQEAFMAEIGTIGRTYHVHLVRLYGFCFDASTKALVYEFLENGSLEKYLYYGDEGSTTSTRLEWGTLHGIAVGTAKGIRYLHEECQQRIVHYDIKPANILLTADDTPKVADFGLARLGERENTHMSLTGGGRRLES

SEQ ID NO: 220886 - protein, 188 aa, Zea mays
  Clone ID: MRT4577_133038C.1.pep
MGNAAVAIISSVSATATVVVMIALIRRCRVVRKKIKKKIVKKVLEEIERKNRVGAACDALEDVVIEIGPVEKFLNEILNEKPMRFSSEQLAACTKNYSSELGSGGYGVVYKGELPNGLLVAVKVLKVSMNKKVQEAFMAEIGTIGRTYHVHLVRLYGFCFDADTKALVYEFLEKGSLEKYLYCDEGST

SEQ ID NO: 220887 - protein, 71 aa, Zea mays
  Clone ID: MRT4577_133039C.1.pep
YPNRWGLRSPKTFMVIKSALRLSGGQFFLHPMPLFKYRIGFCAPKKKKKKKKKKKKKKKKKQRKKKKKKRP

SEQ ID NO: 220888 - protein, 110 aa, Zea mays
  Clone ID: MRT4577_13303C.1.pep
ILINHFLHGIYMLTNSRKTFEYIKARVPGAGACMGHAQKRSKIYASEPGPGPLKKNYHLPVGEHWRGGKNNNPIPEGNPPHLGDWGHPGAPLKEGWAELGEPHEDPLRKG

SEQ ID NO: 220889 - protein, 179 aa, Zea mays
  unsure (1)..(179): unsure at all Xaa locations
  Clone ID: MRT4577_133040C.1.pep
VLRYRQRKRNSRVXAASAEVRLDRHLQAWWDNPSWTDEPPEIKVNVPEGSLCNLNLRFKAGLPPDAVYNIIIDPENKRVFKNIKEVISRKVLLDEGSRQVVEVEQAAIWKFLWXKFRQGRAGFMRKFEGCWTIEPLFVDRNYAXSSEPHSLEDMNXCTGGXGRVGSAIYFGQLIEPALY

SEQ ID NO: 220890 - protein, 121 aa, Zea mays
  Clone ID: MRT4577_133041C.1.pep
KFVFKGTELEGSASIFRKEPNQMGMFGALPEIYLMDYILQTLSGGQCIQYHSRPFRILHDNDQLDICKQSRNVYSIAKCKKIIFTSLDVGPPKCKECPTVDHMQHISTCALCETIMCIYYG

SEQ ID NO: 220891 - protein, 46 aa, Zea mays
  Clone ID: MRT4577_133042C.1.pep
GGPLEIFIPNLGLFYFLQSEFWPFFFETGSLFCPRKFKGQTFFLKK

SEQ ID NO: 220892 - protein, 284 aa, Zea mays
  unsure (1)..(284): unsure at all Xaa locations
  Clone ID: MRT4577_133043C.1.pep
VLRYRQRKRNSRVXAASAEVRLDRHLQAWWDNPSWTDEPPEIKVNVPEGSLCNLNLRFKAGLPPDAVYNIIIDPENKRVFKNIKEVISRKVLLDEGSRQVVEVEQAAIWKFLWWSGTFSVHVFVDQNRKKHTVKFRQGRAGFMRKFEGCWTIEPLFVDKELCLPLNPHSLEEYESCTGGRGRVGSAITLDQLIEPALLPPPPISWYLRGITSRTTEMLVNDLIAETARLRTISNNANAKQGTEETGDANIGDPVRECGDIKERWRQRRKSGRHGSSLRLTSRFL

SEQ ID NO: 220893 - protein, 72 aa, Zea mays
  Clone ID: MRT4577_133044C.1.pep
QPAPRRRGGGPFAASAACAAQETMRSDSNSWSRAIAIRSLPSSFSFRLPLVFSRGLIVAAASVFTTEQWSAV

SEQ ID NO: 220894 - protein, 41 aa, Zea mays
  unsure (1)..(41): unsure at all Xaa locations
  Clone ID: MRT4577_133045C.1.pep
CVLARSGYIGVAGFLXXVLXLXVFXCVCNMGIXRLKFSFRP

SEQ ID NO: 220895 - protein, 101 aa, Zea mays
  unsure (1)..(101): unsure at all Xaa locations
  Clone ID: MRT4577_133046C.1.pep
SRLGDSVSIPLPPRAASEMARDQDXLXYSDHWGRRAYDSVSLSSDSMPVLTGRTPVECYSSFIRAFRHHFATHLASTISAIXVGMGPACDLRYPSFSASNG

SEQ ID NO: 220896 - protein, 62 aa, Zea mays
  Clone ID: MRT4577_133047C.1.pep
MVPSSGSISNACQCVGTWLRVNQPTGPEAQVLKDHTHSQHRLSKTSSNNGYSLGPSVIQATL

SEQ ID NO: 220897 - protein, 41 aa, Zea mays
  unsure (1)..(41): unsure at all Xaa locations
  Clone ID: MRT4577_133048C.1.pep
NEPIHGDCLLYTMYIFKSYVNIYIALSYNXRGRGNRHAYSK

SEQ ID NO: 220898 - protein, 109 aa, Zea mays
  Clone ID: MRT4577_133049C.1.pep
LPQTFYPCWCTSFVLTTCTSIILHYTGIQIKTVLPHKWKKKKKKTHPGCGLWLFIPHANPSRMHRTCPLQRCTRTPTLRPELGVTGHRSAGHPCPTDHTSIVGQERKQV

SEQ ID NO: 220899 - protein, 80 aa, Zea mays
  Clone ID: MRT4577_13304C.1.pep
ARYPWCGGGSWRSKNCCLLLFTVRVYCFWSVFVACAGQIHVKMTTSVSLSVTASFYHEHGMAWHGMPTRQGHLPSLSLTS

SEQ ID NO: 220900 - protein, 174 aa, Zea mays
  Clone ID: MRT4577_133050C.1.pep
MATNNPVSLKAEEQKCYGGGGGRVIQAITMLVATAVTAQAAYRARREPWDLAFVLFAYADLGLLFLCLSMYERLPPPLEEIQKGDSGDDGAAVRRRLKMAVWALSTALSVAFAWRVAAVMPAPAMRAAVWGMTSTVAVAGFYLLFVYRPVTISSYSEMDTCKHKQSSPKLDQMV

SEQ ID NO: 220901 - protein, 71 aa, Zea mays
  Clone ID: MRT4577_133051C.1.pep
EQNKMHRAVETGRSHGIDLKYAVLEDINAPKPAMLSGAFYRFMSVTSDRLKDRGLETATVTDVHESKGKSA

SEQ ID NO: 220902 - protein, 180 aa, Zea mays
  unsure (1)..(180): unsure at all Xaa locations
  Clone ID: MRT4577_133052C.1.pep
RGSAVSLLPFLLPFIGRARQLGGRRRPTVSFSAPATSTHHTRRRDQGTATRERLRLPLLLRLLMLRGGGPGSIMDPPLGGRREAIERELKKLRTEREELDGRIRLLESQLEAGPAGFNGAAAGKGVGDDACGRSGACQNRVGNGFAPDGSLPADMIYRYSRHLLXPDFGGEGQRKLSQSS

SEQ ID NO: 220903 - protein, 75 aa, Zea mays
  Clone ID: MRT4577_133053C.1.pep
GRVRQSGARASGRAPATGVPDERSNPTPTATQGPCTTTAPRSPIRRPGNTAQRRASRSARPKGYGEEAPRPITDK

SEQ ID NO: 220904 - protein, 139 aa, Zea mays
  Clone ID: MRT4577_133054C.1.pep
EAAAALRSASLRRRQAPTTPGITHQDHRLHLTKTEAHEFGRGLAGGIHGGDGWHACGMSDAGKEDARGGTVMPVDALVVPLRRRDQGTATRERLRLLLLLRLLMLRTRGPGREAIERELKKLRAEREELDGRIPLLESQ

SEQ ID NO: 220905 - protein, 129 aa, Zea mays
  Clone ID: MRT4577_133055C.1.pep
CSAPAEEGEKRERERKGKKRERNRSSSAPGEGTLLVSGARLFRCFSSPVSSPVYLACATTRRPPPPYAQLLCAGDKHPPHQVTYENSKAGITHQDHRLHLTKTEAHEFGAGWRAEFTAAMAGTRAVCRT

SEQ ID NO: 220906 - protein, 468 aa, Zea mays
  Clone ID: MRT4577_133056C.1.pep
MGGRREAIERELKKLRAEREELDGRIRLLESQLEAGPAGFNGAAAGKGVGDDACGGSGACQSRVGNEFAPDGSLPADMIYRYSRHLLLPDFGVEGQRKLSQSSILVVGAGGLGSPLALYLAACGVGRLGIVDGDDVELNNLHRQIIHKEAYVGQSKVKSAADACREINSSIKVVEYHHTLKPCNALEIARKYDIVVDATDNLPTRYMISDCCVLLNKPLVSGAALGLEGQLTVYHHNGSPCYRCLFPTPPPVAACQRCSDSGVLGVVPGVIGCLQALEAIKVATGVGEPLCGRMLLFDALSARIRVVKLRGSSPDCTHCGENSVFTEEDFQKFDYESFTQSPMSDKAAASVNVLPESARITCREYKKLADDGEPHLLLDVRPAHHFQIASISPSHNIPLSMLEEKLPALEASLKEAGEGSALVVLCRRGNDSQRAVQLLREKGFANAKDIIGGLQAWGQDVDPDFPVY

SEQ ID NO: 220907 - protein, 275 aa, Zea mays
  unsure (1)..(275): unsure at all Xaa locations
  Clone ID: MRT4577_133057C.1.pep
MNRLDMIDNIDGRRVTKNKARIQVGDSSSSDESDREKEEDEEEAHEEVAKAPPLGWNHHNHHEAAGGIGNNSNRRRLLSKQLSMKETTREIKWEKRRRQILRRXPGGVVKRRRRRRMLRQHEEXAEEPERHCHHHVTRSSSERVMRCLTDEDLDELRGSFELGFGFDEESGGAHLRDTLPALDFYFAVNRQLSDPAKLRTLSSAASLTSTPSAVSSSSTLPDVPNDPRSPKVGATAASGGGADAWKIFTPGDNPQLVKTRLRHWAQVVACSIKHG

SEQ ID NO: 220908 - protein, 87 aa, Zea mays
  Clone ID: MRT4577_133058C.1.pep
STPFNRFHSLLKSISTFDRGHNSEFLNVKTIASKYLPIFFSMFHAEVSTPRTNHIFCSSSVFSSNPQNLLPSSDPIFVPLEELIDYT

SEQ ID NO: 220909 - protein, 200 aa, Zea mays
  Clone ID: MRT4577_133059C.1.pep
GESAAQKAAAAAAAGAAGSAAPAAAAGAPGSGGAPSGSQGVLIGDRLYSGVLITLENCLLPDDKLRFTPSMSSGLDTDTETDLRVVGCELIQAAGILLRLPQVAMATGQVLFQRFFYTKSFVKHSMEHVSMACVHLASKIEEAPRRIRDVINVFHRLRQLRDKKKPVPLLLDQDYVNLKNQIIKAERRVLKELGFCVHVK

SEQ ID NO: 220910 - protein, 71 aa, Zea mays
  Clone ID: MRT4577_13305C.1.pep
HNPGGFYKPRGSTHTPGGTPKKACFRTQRKRLHRNQRAKITDANKTQRDRSTWKRGRTPTNSQSGNRHHKY

SEQ ID NO: 220911 - protein, 63 aa, Zea mays
  Clone ID: MRT4577_133060C.1.pep
LHGRVTVEGGGHRADHSEGKPKNHKGLDQTPDNHHGLSYPHGLGGEIDRLLQHKWVHASEHEL

SEQ ID NO: 220912 - protein, 113 aa, Zea mays
  Clone ID: MRT4577_133061C.1.pep
RWRSGKFGSIAISIADNHKRMHPVVLSLCKRTPGAYSLGPVLVYDTMANAMPSGCTKICLFSLYLYKPGSLEHIAEAGNDQMCWRIVSTAKALSNLLLLVRMRNFKRITNFHQ

SEQ ID NO: 220913 - protein, 206 aa, Zea mays
  unsure (1)..(206): unsure at all Xaa locations
  Clone ID: MRT4577_133062C.1.pep
HXCRRFSCAPSEAAAPHPWHRQRPPQPRPFPGPRRQCFTTVDQLRPWTQGHIFTACVISATSCSTTPSPNVEQQPGPLVAAHCRAWLDGSAGGEPIIWRNNVANEQVQPVAATDDLEEEGENLPGLALRLLHSTPHGGDTIVNGALVLLEAHHFRGNHGHVLPAGRCRALSLATGASVAAASPDIVTEVGLAVQERHVCELPLALV

SEQ ID NO: 220914 - protein, 66 aa, Zea mays
  Clone ID: MRT4577_133063C.1.pep
SKRCSLVQGRGLVPLHARHEPNPVTLGYLHRLLPLEQLTWSDSAAAYLASLPGGPCVIRAFVVIYP

SEQ ID NO: 220915 - protein, 73 aa, Zea mays
  Clone ID: MRT4577_133064C.1.pep
SPTPLGLMAAYDLIWLVDKPRPRLKTGADSLRAGHTLLRGRGRPGPFEEARQRFLLFRGAWPVGPLGNLQRFS

SEQ ID NO: 220916 - protein, 183 aa, Zea mays
  Clone ID: MRT4577_133065C.1.pep
MGTPRAGSPASPVTGDHYLDLLVRFVARNAGALLDGTVTLRLHPVGLHYVASRLEALRELEAVGAGAPVDYLRAYVADLGDHRALEQLRRILRLLTSLKVVAPGPRRDPAPLSILPFARLRVLELRGCDLSTSAARGLLELRHTLEKLVCFNSTVRLCHPTYNFLWNSVFAAIRCVTTGLTHL

SEQ ID NO: 220917 - protein, 44 aa, Zea mays
  Clone ID: MRT4577_133066C.1.pep
SYAVPVVTGTDSAVGGRNKKIKCIGLKLDDAHSKSSAKSHCPPA

SEQ ID NO: 220918 - protein, 60 aa, Zea mays
  Clone ID: MRT4577_133067C.1.pep
ANGVRPDHGRRWLGKAYGARDNSMADMGRPPLLIYVPGGVPKTQEMNQPFTGLLRPLPGP

SEQ ID NO: 220919 - protein, 98 aa, Zea mays
  Clone ID: MRT4577_133068C.1.pep
GLYVAGRWVEKFVEHCAARFAFRTLAANIEYFTAGMLHRRPVQALIVNSALLIHHLPDESVSIMNQHDRLFYMANDLLPKLVTLGEHVSNTNTSSFYS

SEQ ID NO: 220920 - protein, 58 aa, Zea mays
  unsure (1)..(58): unsure at all Xaa locations
  Clone ID: MRT4577_13306C.1.pep
LAQLRSVNPSTSRTXAAEKYIQVVSIDNHEFWFMGFVYYDSAVKHLQEALQEARILQA

SEQ ID NO: 220921 - protein, 61 aa, Zea mays
  Clone ID: MRT4577_133070C.1.pep
SFKGQIDGDLGCQKERGLPHKVVCFLFRPNDLFIRAIFFPFFGPGVFKKTVALLLKRGFLG

SEQ ID NO: 220922 - protein, 124 aa, Zea mays
  Clone ID: MRT4577_133071C.1.pep
YAVWRGDRRQRIVGPQSDGVREYASSHNLMELIIPGDGAHGVPSEPFCRRSLHDITFQLVAGQLHPEAVRVRDTPGGLLQSEHDHGILAVDAEDEEHQAQTGMEGVHYLSSCVCDGNLSRVGSA

SEQ ID NO: 220923 - protein, 71 aa, Zea mays
  Clone ID: MRT4577_133072C.1.pep
AMNMCELTLAVSHPHMRRTGGSRGATQRGVRFDLGGVSQLTVAPRMDFSSIYIYLLFCKDFRYVISTLIIL

SEQ ID NO: 220924 - protein, 102 aa, Zea mays
  unsure (1)..(102): unsure at all Xaa locations
  Clone ID: MRT4577_133073C.1.pep
EEFKEALADCXEKPEFIPGEQGVIQVAGHSDAVTVVTRIVGXACLKTTVCCIXTGQDIKLSNIETLIAXVLLELPLAHKHKMTNIPGDANRFAIYHIIQSLY

SEQ ID NO: 220925 - protein, 110 aa, Zea mays
  Clone ID: MRT4577_133074C.1.pep
MGMKRHRFHFHHHHDEDEEKNMAARKRLRHADEHDEDSDDEEDEQMEEMVRRFRKAIMRRRFGHGHGHGRRSRFFHHIVHRHAEEAKKQADVEEEESGVLAWIKGLMNRF

SEQ ID NO: 220926 - protein, 65 aa, Zea mays
  Clone ID: MRT4577_133075C.1.pep
PRVRPRVSFQLTGGEGYMLCVVYYFLCMTKAIANLNGPIDVLFFGACTLLYNFRACLFQLIDYII

SEQ ID NO: 220927 - protein, 121 aa, Zea mays
  Clone ID: MRT4577_133076C.1.pep
HWDPRGRPGLRRSRSHRVRIPSTQPWLDCQPPPRSSSSSSPSSPSRTAVSSQSQQSTTPSPNQPPPWPSATTTCYPTPQSTLRRAPPAPLKRRPSRRSSSSMGSNSSACRLTGSTTTTTSG

SEQ ID NO: 220928 - protein, 43 aa, Zea mays
  Clone ID: MRT4577_133077C.1.pep
MARLSATAALLLLVLSLLAVAHCGALAVAAEHDTEPEEAAPPR

SEQ ID NO: 220929 - protein, 94 aa, Zea mays
  Clone ID: MRT4577_133078C.1.pep
VATCVSALLSLAEMIGEFISSTSRCCITPLDAIISGLAAVQYIEGNEDENKRRWGLGLDRAIGLDRGGSDGSGSRACVTIQLRLHRSRGDVVGK

SEQ ID NO: 220930 - protein, 150 aa, Zea mays
  unsure (1)..(150): unsure at all Xaa locations
  Clone ID: MRT4577_133079C.1.pep
MMRVLCVVLFLLILVASDTSTHIRGICSGNPTPTSHLQALGYLAPPVHLXPPXVHLPTRRCHLPTPXYLPPPXHVTPARSLAXEASQYPTQPPRGRADPQQHPWPYQQAHRSPCQVHGIXVFGSTPIWGQRVKSXKHECSATETPYCSSQ

SEQ ID NO: 220931 - protein, 179 aa, Zea mays
  unsure (1)..(179): unsure at all Xaa locations
  Clone ID: MRT4577_13307C.1.pep
KHREQCAYQEVQSCQISIFPCNYLGLPLSNKKLRKSDLMQWIDKIVDPLPGWKAHLLNLAGRTAMVRFVLSAIPVYLLIALNVPKWVIKKIDKIRRAFLWTGRKETNRDICLVAWGXVTRPINLGGLGTPNLQVAGWALQIRWLWLXKNRWVQPWAGIEIPVHPNSRALFXXFDQPSGY

SEQ ID NO: 220932 - protein, 110 aa, Zea mays; identical to SEQ ID NO: 220925
  Clone ID: MRT4577_133080C.1.pep

SEQ ID NO: 220933 - protein, 187 aa, Zea mays
  Clone ID: MRT4577_133081C.1.pep
MARLSATAALLLLVLSLLAVAHCGALAVAAEHDTEPESTAAVAVSDDNVLSDPTVHAEAGTASATEEEATTAPETTGSMGMKRHRFHFHHHDDEDEEKNMAARKRLRHADEHDEDSDDEEDEQVEEMVRRFRKAIMRRRFGHGHGHGRRSRFFHHIHRHAEEAKKQADVEEEESGVLAWIKGLMNRF

SEQ ID NO: 220934 - protein, 115 aa, Zea mays
  unsure (1)..(115): unsure at all Xaa locations
  Clone ID: MRT4577_133082C.1.pep
RLRRYSVVVVTAFASRARNHGSTVSHRRAPPRRPLPPRRRALRCPRSRSRARHRARINRRRGRQRRQRAIRXRSTLRRAPPAPLKRRPSRRSSSSMGSNSSACRLTGSTTTTTSG

SEQ ID NO: 220935 - protein, 188 aa, Zea mays
  Clone ID: MRT4577_133083C.1.pep
MARLSATAALLLLVLSLLAVAHGGALAVAAEHDTEPESTAAVAVSDDNVLSDPTVHAEAGTASATEEEATTAPQTTESMGMKRHRFHFHHHHDEDEEKNMAARKRLRHADEHDEDSDDEEDEQMEEMVRRFRKAIMRRRFGHGHGHGRRSRFFHHIVHRHAEEAKKQADVEEEESGVLAWIKGLMNRF

SEQ ID NO: 220936 - protein, 174 aa, Zea mays
  Clone ID: MRT4577_133084C.1.pep
MARLSATAALLLLVLSLLAVAHCGALAVAAEHDTEPESTAAVAVSDDNVLSDPTVHAEAGTASATEEEAIPAVQEGDHEEEVRPRPRPWTPFPLLPPHPPPRRGGQEAGRCRRRGERCPGLDQGPHEPVLELPHSSDPSTHSHSHGCLPVFTICHRPSRVHTAVSWTAEFTWCY

SEQ ID NO: 220937 - protein, 174 aa, Zea mays
  Clone ID: MRT4577_133085C.1.pep
IRHEARWAEYLASSAVLPHLFSHPYVRAHLQQKFYRRFVDSDFSVGGMSSTTSIQPSASSGGASTSADENARPPDSGTNSSGPARSILSLQLDQRSLHFSVSAWYKGYRLSLLGTTCTTGYALFALYRLPRAGNMQAVQVWCHHVTASKDFIPLMSWLMVSTCGLGLGRGWGAW

SEQ ID NO: 220938 - protein, 218 aa, Zea mays
  unsure (1)..(218): unsure at all Xaa locations
  Clone ID: MRT4577_133086C.1.pep
MGEADASTGGGDPQKLKRIAAGAYDYENDARWAGYWSNVLVPPHLASRPDVVDHFKRKFYQRYIDPDLVVEPMSSTSSTQSNRSAASSSSTPSSENSRAHDTGSSVRSAGASQPPPTERTGNSLRFDGRTIHFSINXAWVLIVASLGILPILPKDVASKAYXXLSLLGTICSSAYSLYCTYGKPRAWNMPAIQPWLQSXIVAKXWXHLMVSLMMFTSM

SEQ ID NO: 220939 - protein, 70 aa, Zea mays
  Clone ID: MRT4577_133087C.1.pep
APREEQTGYGERDGRAHSEEKLGQVLGVPGARPTNAAACRRSQKGVHLRHERSPEPCQIQIIWDSNETTR

SEQ ID NO: 220940 - protein, 269 aa, Zea mays
  Clone ID: MRT4577_133088C.1.pep
MSSTTSIQPSASSGGASTSADENARPPDSGTNSSGPARSILSLQLDQRSLHFSVSAWVLIVALIGIFPLAPHSLQYKGYRLSLLGTTCTTGYALFALYRLPRAGNMQAVQVWCHHVTASKDFIPFMYCLMFSTSKLHLKLVLVPVICWALEHVARFLRRHFTSSSLYRTYLEQPCTWVETNTNAVQFLRSNAEILTGFLLILSLFSRQRNLMQTFMYWQLLKLMYHSPFTAAYHRAIWLKIGRTINPYIHRYTPFLHDPINAGMRWWFR

SEQ ID NO: 220941 - protein, 61 aa, Zea mays
  Clone ID: MRT4577_133089C.1.pep
MVRRFRKAIMRRRFGHGHGHGRRSRFFHHIHRHAEEAKKQADVEEEEIGVLAWIKGLMNRF

SEQ ID NO: 220942 - protein, 96 aa, Zea mays
  Clone ID: MRT4577_13308C.1.pep
MVMTCMQSEVNFLGRLSHPNLVRLLGYCWEDKELLLVYEYMAKGSLENHLFGSEPRKGGGGAVQPLPWSLRLRIVTGAARGLAFLHSSERHVIYRD

SEQ ID NO: 220943 - protein, 89 aa, Zea mays
  Clone ID: MRT4577_133090C.1.pep
CLQRVSSRDSRLQLLTSGGGSKAWAGKFKPTLDKVEFLYDGQGFMSMRLSRTEARLAFFDVAGSVLHCWTMHAQKLKTTTTTTAAAAGH

SEQ ID NO: 220944 - protein, 74 aa, Zea mays
  Clone ID: MRT4577_133092C.1.pep
SKSRSARAMLTVIILQKVLPIKLASYVACYLASPCCIECKNYEAFIMTALLSFMAPVSVPLLSIAILQQELPGR

SEQ ID NO: 220945 - protein, 63 aa, Zea mays
  Clone ID: MRT4577_133093C.1.pep
LIRVNDGVVTMRSLDDPYRVRGAIKQVKVAVEITKEKMVKGFVTSNFFSAVAIVMSEVEIEML

SEQ ID NO: 220946 - protein, 224 aa, Zea mays
  unsure (1)..(224): unsure at all Xaa locations
  Clone ID: MRT4577_133094C.1.pep
MPELVEDDRRRTQQIAEHCKFCPLNCPMAAPEFSRXEDNVTWQKLAQKADRYHEMSESXMQKVPRTADSKELTGEERNLLSGAYKNAIGARRASWRIISSIQQKEEGRRYDDRPTLLXDYRAKTETEPXPICDGILKLLDTHLVPSSTAPETTVFYLWMTGDYYTYLAEFTTGGERSDSAENTMMRYPVAHDIALGELAPTHPIRIGLRLNFSMCYYETLNVPD

SEQ ID NO: 220947 - protein, 156 aa, Zea mays
  Clone ID: MRT4577_133095C.1.pep
MAAAAAAPASVAPSSPKAAGDNRKTVVSVDASELEKHVLAVDDSSVDRAVIARILRGSRYKVTAVESATRALELLALGLLPDVSMIITDYWMPGMTGYELLKRVKESAALRGIPVVIMSSENVSTRITRCLEEGAEGFLLKPVRPADVSRLCSRIR

SEQ ID NO: 220948 - protein, 157 aa, Zea mays
  Clone ID: MRT4577_133096C.1.pep
MAAAAPAPASVAPSSAPKATGDSRKTVVSVDASELEKHVLAVDDSSVDRAVIARILRGSRYRVTAVESATRALELLALGLLPDVSMIITDYWMPGMTGYELLKCVKESAALRGIPVVIMSSENVPTRITRCLEEGAEGFLLKPVRPADVSRLCSRIR

SEQ ID NO: 220949 - protein, 158 aa, Zea mays
  Clone ID: MRT4577_133097C.1.pep
MAAAAAAPTSVVPSPSPAPKASDSRKTVVPVDASELEKHVLAVDDSSVDRAVIARILRGSRYKVTAVESATRALELLALGLLPDVSMIITDYWMPGMTGYELLKRVKESAALRGIPVVIMSSENVPTRITRCLEEGAEGFLLKPVRPADVSRLCSRIR

SEQ ID NO: 220950 - protein, 62 aa, Zea mays
  unsure (1)..(62): unsure at all Xaa locations
  Clone ID: MRT4577_133098C.1.pep
AKCSDCARRNMKRQAVFKGLQVSIXAXNSKCVYHSACPGQVNKSCALRHPLAIHANCEDLEL

SEQ ID NO: 220951 - protein, 57 aa, Zea mays
  Clone ID: MRT4577_133099C.1.pep
LHKTLYPQTNQLNTHILIPNKKIQTPTYTTFIHPFSPPTNFQPQIPDPSLYSCESTP

SEQ ID NO: 220952 - protein, 196 aa, Zea mays
  Clone ID: MRT4577_13309C.1.pep
SVGRCLSLLVAGCNVSGEPYTLHTNVFTRGQGQRGRGVRLWFDPTADFHTYSILWNPKHVIFMVDDMPIRDFRNLESKGVAFPKSQPMRLYSSLWNADDWATQGGRVKTDWSHAPFSASYRGFKADACVAVAGGRTRCGATVGTEGTGAPASAAGAGDWYNQELDLTLQQRMRWVQRKYMIYNYCTDPKRYQQGLP

SEQ ID NO: 220953 - protein, 97 aa, Zea mays
  unsure (1)..(97): unsure at all Xaa locations
  Clone ID: MRT4577_1330C.1.pep
ANMLTAIISSGTAQYTSDKTEMXXXXXXXXAFAIMANNERCXXXHPRKLQYRTHVTQTRNHILLRYLTPPINHFPDMQVSAVFNSYNVIWFKYQNLV

SEQ ID NO: 220954 - protein, 49 aa, Zea mays
  Clone ID: MRT4577_133100C.1.pep
PGSDPASVLVQFKWVPCVYSGVIIAFRVDLGSIPFYFVVLLVFVDGDGD

SEQ ID NO: 220955 - protein, 56 aa, Zea mays
  Clone ID: MRT4577_133101C.1.pep
FTLRCARLKAHYYRSRRISHVGRSDYCQYISDEAYPTTTFFLTSVTRTTSKDQKNG

SEQ ID NO: 220956 - protein, 106 aa, Zea mays
  Clone ID: MRT4577_133102C.1.pep
PQVRPRVRGRVGLYIQATKPDQTVHSQILSIAYIKCWLPDQCKRMLQMRVIDNISSLRGLWLPDQCKRMLQMLVIDNSSSRRGLWIAIQSVLCPVTTWENEFYLRP

SEQ ID NO: 220957 - protein, 61 aa, Zea mays
  Clone ID: MRT4577_133103C.1.pep
TQQGFFTGGFYLLHSWKMESEMKISKENLWLYRFNPTSDQGNKDKGRRQHGAARRQHGDSN

SEQ ID NO: 220958 - protein, 59 aa, Zea mays
  unsure (1)..(59): unsure at all Xaa locations
  Clone ID: MRT4577_133104C.1.pep
GGKRPLXNIYPRGDTTTEQQGLFTPPLQVHLFTRXVXFPXGSGGGGGXXVHALFWVGRG

SEQ ID NO: 220959 - protein, 73 aa, Zea mays
  unsure (1)..(73): unsure at all Xaa locations
  Clone ID: MRT4577_133105C.1.pep
MSSTACGFLGGGTKTSGTETIGLGVVHDGWVILKXKPDLDIVPLNDGYPVTADYVPNHDLIFVNIAAQTHHIG

SEQ ID NO: 220960 - protein, 59 aa, Zea mays
  Clone ID: MRT4577_133106C.1.pep
ILKGWFLPRGLAGRGILIFKSKGITCKNPVKKSRGPSCPSECKLVCWTRNQFLLGDVKF

SEQ ID NO: 220961 - protein, 127 aa, Zea mays
  unsure (1)..(127): unsure at all Xaa locations
  Clone ID: MRT4577_133107C.1.pep
TKHNIGYSFLGVLHWGVDSEGRGELNHFILNNGHNIPAAGLRTYRLPSHPSYSLRTLIDHGQNRHVXTRLTHRIEXYVTRTLNTGMKIGINNKXNDKTSNIRXTHLYFDMLRSSLQKTLNYLELDNL

SEQ ID NO: 220962 - protein, 97 aa, Zea mays
  Clone ID: MRT4577_133108C.1.pep
PRVRRTWPYIAPSTEQATDNTSGLIRSFIYDHQFVDELLTYKEIYNELQNEVLGKGETQRATHGDIDANICANACDDEGEDDTVDNAADNVDTFGEP

SEQ ID NO: 220963 - protein, 118 aa, Zea mays
  Clone ID: MRT4577_133109C.1.pep
GLLFGGGQQKTLIPEKTPPSLGNLFRGLNFYFTIGKKGKPRGDFKPPGKGNPPLKKNWPGLGPLFFQRNRGQKLGRGNPTLVLGGKVENRGQRGPPDQGGPQPDLKNFEGLGPLKRPQ

SEQ ID NO: 220964 - protein, 85 aa, Zea mays
  Clone ID: MRT4577_13310C.1.pep
ASYRGFKANACVPVADGRTRCGATVGTEGTGAPASAAGAGDWYNQELDLTLQQRMRWVQRKYMIYNYCTDPKRYQQGLPAECSMQ

SEQ ID NO: 220965 - protein, 83 aa, Zea mays
  Clone ID: MRT4577_133110C.1.pep
NALRNASAGLVVPSCELAVAQVYSRVPSSRAGMLTLSTVWPEPGLREQPPSLCTGREGDQGQTRLFYIRPCVAFPQGGGGKAP

SEQ ID NO: 220966 - protein, 99 aa, Zea mays
  Clone ID: MRT4577_133111C.1.pep
FIHKWMITMDEAFPLGLCSGWESKSRHGQRAGRGLHITKWPSAMATIPRLQRLASLRAPKQHPLPRHFSSTLTSRACKALTSRGWELPAHDLSSTRSGN

SEQ ID NO: 220967 - protein, 69 aa, Zea mays
  Clone ID: MRT4577_133112C.1.pep
ILVGLYCSRGVVSTLPLWPYSPLRTSPTLRLGFKGRLYLFQIWCLSVRETTEMGVDKQEDSNEREKIHA

SEQ ID NO: 220968 - protein, 193 aa, Zea mays
  Clone ID: MRT4577_133113C.1.pep
AVAYLHHDCLPAILHGDIKAMNVLLGPRNEPYLADFGLARVLSGAVASGSAKLDSSKAPRIAGSYGYIAPEYASMQRITEKSDVYSFGVVVLEILTGRHPLDPTLPGGTHLVQWVREHVRAKRATAELLDPRLRGKPEAQVQEMLQVFSVAMLCIAHRAEDRPAMKDVVALLKEIRRPAERSDEGKEQPACNT

SEQ ID NO: 220969 - protein, 124 aa, Zea mays
  Clone ID: MRT4577_133114C.1.pep
YTHPPCRARTTVSSQQAAARPPKGMCSLPARSAGPVFSVQRDRSINRSLFLYVWRTNLSHSRHRPLSVLVSGCRVLPLARVVVPQVSFCGCSIGTRGVLVRGPMGARWRRAAPIVVDTKSGASC

SEQ ID NO: 220970 - protein, 72 aa, Zea mays
  unsure (1)..(72): unsure at all Xaa locations
  Clone ID: MRT4577_133115C.1.pep
RPTRPAPCGPRARRLKCGLPVXHSILYSTVSETRTPARPLVITPIRMWNLHTPVVGTGARRIFYRRIHREQA

SEQ ID NO: 220971 - protein, 42 aa, Zea mays
  Clone ID: MRT4577_133116C.1.pep
RKPYPRLVGSGETSALRHEEQRWRPLRRYGVYRDLPGEPVSA

SEQ ID NO: 220972 - protein, 98 aa, Zea mays
  Clone ID: MRT4577_133117C.1.pep
ASKEIQSPWGAITSVTLADGELAPASSFRFSPPYTLRSLSQAGLVLYSPLRTPRRPRRITGSSFSSARAPSAGSLLGLKASSRSRHWLLTSRRTRAGG

SEQ ID NO: 220973 - protein, 94 aa, Zea mays
  Clone ID: MRT4577_133118C.1.pep
PSRPSGKPHSPQATLQLQAKPACHRRLCPSESLTQPERGDAGRNGSRLPTDQGNPRRAEQQWSVIDRSVGHGRSLNATEQRRRDDDSTVRGEPE

SEQ ID NO: 220974 - protein, 192 aa, Zea mays
  Clone ID: MRT4577_133119C.1.pep
MVTSKSSWSQVVKNTRPTNLSVAARNLQPQDLGAVIFGCTNSTIQECHSRQLFGLPRTHISYVQNIKEGLPLFLFNYDDRRLYGIYEASGNGKFCPESNAWSQDSKGKTSYPAQVAMRVKVWCFPLAENQFRNAIIANYYQKIPGVPGQKLHFFKFELDHAQTRVLMDMFTPSPSPNSFWTPPAAAPADEHA

SEQ ID NO: 220975 - protein, 241 aa, Zea mays
  Clone ID: MRT4577_13311C.1.pep
MMAAAALRPHKSSPARVPTRCVAALCAACFLVGVGVVNRYWPVPEPHPGCPDKAGPDHSRAVLNQASQTREVVMALDKTISDIEMRLAAARAAQAMSQGMSPGDSEGDQGTARRRMSFVMGVFTTLANRKRRDSIRQTWMPQGDQLRRLEDKGVVIRFVVGRSANPNLENEVDHAIDMEDEEYGDILRINHVEGYGGLPMKVQMFLSTALTMWDADFYVKADDNVHVNIGITIFFLFFRAL

SEQ ID NO: 220976 - protein, 71 aa, Zea mays
  Clone ID: MRT4577_133120C.1.pep
MMGWLRLHSLFSPLRRMWVRAHSERRNRRGMRILYKDVQSCQDEDVRVLWSILIDSHRRRHHHPDGLDLEL

SEQ ID NO: 220977 - protein, 71 aa, Zea mays
  Clone ID: MRT4577_133121C.1.pep
MMGWLRLHSLFSPLRRMWVRAHSERRNRRGMRILYKDVQSCQDEDVRVLWSILIDSHRHHHHHPAVLDLEL

SEQ ID NO: 220978 - protein, 81 aa, Zea mays
  Clone ID: MRT4577_133122C.1.pep
MGGEATNAGGGGIRARMEHYLYSGEKKHVVAGIAIFAAVFGVPWYFMTRGAKHQSHQDYMEKANKARSERLSSGQSSALKE

SEQ ID NO: 220979 - protein, 71 aa, Zea mays; identical to SEQ ID NO: 220977
  Clone ID: MRT4577_133123C.1.pep

SEQ ID NO: 220980 - protein, 134 aa, Zea mays
  Clone ID: MRT4577_133124C.1.pep
VRAGHAALSVGSKIYIIGGVGDKQYYSDVWVLDVTNRSWSQLEVSGQRPQGRFSHTAVVMNTDIAIYGGCGENERPLNELLILQLRSKHPNGRYNISMCKVLSNQWSQERRKFLRSETKDTGVSNGETVQKRRD

SEQ ID NO: 220981 - protein, 101 aa, Zea mays
  unsure (1)..(101): unsure at all Xaa locations
  Clone ID: MRT4577_133125C.1.pep
SDRGLHYFYTGAKHTIIHHGVETTNILLDENWDAKVSDFRVSKTGLFMVHTYVSTGGTGSISFLYPDYFEMLPLTDQADVYSFGVELIEDLCAXRLCLNPT

SEQ ID NO: 220982 - protein, 254 aa, Zea mays
  unsure (1)..(254): unsure at all Xaa locations
  Clone ID: MRT4577_133126C.1.pep
PGSLSISRPVLAPAALNPSYHSPPRFISPDADGALRYRGHAGSAGRCDPGYGFLLHXLSQADLVEAKKRATDLTKAISEDPKLGIXTLSADNNPLFSSNLIFHKQFXLPLTLLTTTVLAFTDYAVEQPFEXTEMHLDSENKDYHLNVPLDNENVKADDHKQKSQEQXLAXPSKSSPDSWKSKDDDDSDEDQTDDSDDDETDDSDEALSSVAGNDDSSDAYDTSDDEDGDTPTPKKPDVCKXRAAVSTALITPLS

SEQ ID NO: 220983 - protein, 71 aa, Zea mays
  Clone ID: MRT4577_133127C.1.pep
MMGWLRLHSLFSPLRRMWVRAHSERRNRRGMRILYKDVQSCQDEDVRVLWSILIDSHRRHHHHPGVLDLEL

SEQ ID NO: 220984 - protein, 71 aa, Zea mays
  Clone ID: MRT4577_133128C.1.pep
MMGWLRLHSLFSPLRRMWVRAHSERRNRRGMRILYKDVQSCQDEDVRMLWSILIDSHRRHHHHPAVLDLEL

SEQ ID NO: 220985 - protein, 135 aa, Zea mays
  unsure (1)..(135): unsure at all Xaa locations
  Clone ID: MRT4577_133129C.1.pep
MGTHISKKKFVSDGDFYAQLNEMLTRKLPEDGYSGXQVRVTXPMRTXEIIIRVTTTQNVFSKYRRXRIRKLTSADQKRINFPENGRELYAXKGANRGIXAIWQAESLRYELLGCLAXRRTCYARTSVSLLEIAAR

SEQ ID NO: 220986 - protein, 43 aa, Zea mays
  Clone ID: MRT4577_13312C.1.pep
VDMRPFGFIAVNFKEALVSSASSWLQHPPGVSILPKGKAHCTP

SEQ ID NO: 220987 - protein, 60 aa, Zea mays
  Clone ID: MRT4577_133130C.1.pep
MKKKKKKKKKKKKKKKKKKKKKKKKKKKKKKKGRPRSKGTQAFRSRVLGTRKNLFFLGAP

SEQ ID NO: 220988 - protein, 282 aa, Zea mays
  Clone ID: MRT4577_133131C.1.pep
MELDGKYSKDQSLKCECLLFDLDDTLYPFNSGIAADIKKNIQDYMVHKLGVDEAISLDLCVLLYKQYGTTMAGLRAVGYQFDYDDYHSFVHGRLSYDKIKPDPVLRNILLSLPIRKLVFTNGDRTHASRALKRLGIEDCFEGVVCFETLNPTSPPPPVPAQELEIFDLMKHLAHPQPAVQLPKSPILCKPSREAMLQALKVASINPQTTILFDDSFRNIEAAKQIGMCTVLVGTSERKKGADHALESLHNMKEALPELWEEAEKDEDVRNSSKAGIETSVIA

SEQ ID NO: 220989 - protein, 58 aa, Zea mays
  Clone ID: MRT4577_133132C.1.pep
LGGVWGFTGVFSQGVAFYGPCRGQKKIFSLKMGAPGGGFKNIPPFLGNPLGFPLGLGI

SEQ ID NO: 220990 - protein, 291 aa, Zea mays
  Clone ID: MRT4577_133133C.1.pep
AFVELQNQKMDRDDGGFMKFPSRYTVAKSKQETTPETAGLDLYDGRWLPGSGRRGRGRGSRGGSRGGRGRSRGGRIPRGVSSSSRIEFKGGIVASDKAPRKNVRRGRGRGRGRRRGRRTVRPRQPSVGRARSIPKENLLGSFSMLSSSKAATIEESPRSSGADEWGLETRTTYTECDENSSGSQSEDNEENGQPMDDDYEDQVPDYSIGYSTGSRHHVMMSMMDHDSDEEDEDAEGDENVEEDADLAVDDADVEMDEDDEIGDDGEDGGVGGEMNADEDPDATSYSSDYSD

SEQ ID NO: 220991 - protein, 107 aa, Zea mays
  Clone ID: MRT4577_133134C.1.pep
MADAGSSAAARRAPSSSSPGGCAPALGRLVRKLRRQSRLLCAATGGARHAAAAASSSARCRHHHHHQYDPLSYARNFDFGTALEGNEAHCSFASRFVLAAPAARQAQ

SEQ ID NO: 220992 - protein, 68 aa, Zea mays
  Clone ID: MRT4577_133135C.1.pep
LFSNSSRDFKEINTRRKGISYVYSDVIVRRLRLRVDHPQAGPSGPRGQTVLPNTTNGAQHKSRMQCMD

SEQ ID NO: 220993 - protein, 58 aa, Zea mays
  Clone ID: MRT4577_133136C.1.pep
EWFHLLVNWSVRYGDRRHKENVFCHTLAFLTSTNFLCSFSSFCPVSSHLSHLYLHFYI

SEQ ID NO: 220994 - protein, 75 aa, Zea mays
  Clone ID: MRT4577_133137C.1.pep
SSNDIRWCLKTMQMLPWSDRSCEYTLRIPRSNETSYAMLDQALLNAIPLQSMMRKFHTCVGITLLVKIYISLHEV

SEQ ID NO: 220995 - protein, 45 aa, Zea mays
  Clone ID: MRT4577_133138C.1.pep
ILTILTYSIFLHRLFESILFDVGDHSPGGPIYFTQLYPFRSRKHE

SEQ ID NO: 220996 - protein, 62 aa, Zea mays
  Clone ID: MRT4577_133139C.1.pep
LSTPLRCLTGCPQIYRDLLAQHNLALLRNSCGLLDLSSTAPGNNPIRYIISFIPKRIFSTYR

SEQ ID NO: 220997 - protein, 194 aa, Zea mays
  Clone ID: MRT4577_13313C.1.pep
MVAKIINLAMRGLQFFWALLIMALIGNMIATSYAGNPSIVNYSMFVSVFSMLSLFYLIPASIKESFMIHPLLVFCLDVLNAIFYFCGAVAMSAYLGVHSCGNSSYTHSNSITNGSPNTSKRCHEAQASTAFLWIGFAAFVVSAVFAGLQGRSSGVNMPRGAGGIRKGPAMSPGLSDLLQKVLFSKRTTDSPECC

SEQ ID NO: 220998 - protein, 119 aa, Zea mays
  unsure (1)..(119): unsure at all Xaa locations
  Clone ID: MRT4577_133140C.1.pep
MANNSNDPNNLTTSYKDINKDLSVHFKNTLXTAYALGQLALTNAMLYLEDVIAHMQAFPLHRYYCCVRRTWHTKNDHSNRXGPIXLNENNVILHLMNNADTHDDVHSXDLDMLYILHVH

SEQ ID NO: 220999 - protein, 48 aa, Zea mays
  Clone ID: MRT4577_133141C.1.pep
TDSVHDRTTLNDDTINRGRSEILHNNLYGTQGVQCSGGSIQTMTTNHF

SEQ ID NO: 221000 - protein, 130 aa, Zea mays
  Clone ID: MRT4577_133142C.1.pep
MLLTALKRLLLHVCSDVCSLFSDTLQKFEDDFNLLNWWHEHKLTFAVLSILARDVISVPVSTVSSESAFSLCGRIIEERRRRLAPKMVEMLLCIKDWELGDARAQHSAQDKELEDAFEGMYLDEVDELKT

SEQ ID NO: 221001 - protein, 125 aa, Zea mays
  unsure (1)..(125): unsure at all Xaa locations
  Clone ID: MRT4577_133143C.1.pep
LGRSGPKEFLEAPAAGAYVSLIGPFGVGFYSAPPVSKRVVVSPXPHFFYPFVWESQAGGSFPVARDTFGGPLGRGSKITLSPQDGPLGXLXEPPPQGLFQKPPGFFSYPISFWVWKAPPPGIFFF

SEQ ID NO: 221002 - protein, 128 aa, Zea mays
  unsure (1)..(128): unsure at all Xaa locations
  Clone ID: MRT4577_133144C.1.pep
RQDQANQTTALHXFDEQIQLSSIISESIPSHNICPSVSAYERRLGTRNYMTRSXCDPSVSDRGEINGPRKDTPXCANAPDDKRSKNVLNDLMMRRESAVVFXTAAAPIERVKLLILKLNEMIIPGQIS

SEQ ID NO: 221003 - protein, 60 aa, Zea mays
  Clone ID: MRT4577_133145C.1.pep
VRQTFNTRWANCLCSVTIEDDQINRLPSGTSKSLKTTNCLCTVHLRKFSGRLVMLDSAFQ

SEQ ID NO: 221004 - protein, 41 aa, Zea mays
  Clone ID: MRT4577_133146C.1.pep
MIIKRMDVLLTIWNVDSTCDEICHKSRTCKVYPAALTADLL

SEQ ID NO: 221005 - protein, 75 aa, Zea mays
  Clone ID: MRT4577_133147C.1.pep
SSQNKERRFKMKWLLKRTLLQCLLIKWMEPSNWGLIEGFRPPSPQQRQAPMYLPLHCIFKKTFIHLSLVKCALSL

SEQ ID NO: 221006 - protein, 76 aa, Zea mays
  Clone ID: MRT4577_133148C.1.pep
PNPTFVRRLPVLYLLAFRDGAFRAVAAALFAGAALLATGALLAAAAGFLATGAFFAGVALADVLAALPGRPAFSRA

SEQ ID NO: 221007 - protein, 80 aa, Zea mays
  Clone ID: MRT4577_133149C.1.pep
MVRMRFPKRYIIVLLTFICTNVCYIERVGFSITYTVAADAIGVNQANKGMILSMFYYGYVLSQIPGGWAAQRKGGRRVLL

SEQ ID NO: 221008 - protein, 126 aa, Zea mays
  unsure (1)..(126): unsure at all Xaa locations
  Clone ID: MRT4577_13314C.1.pep
MGTSSPGVPLLLLCLGVLGSCSFXGGSWGXELDITWGDGRGKGLDNGRVLTLXLDRTCGSGVQCPDEDLCGKIDMQLRGGXXNSAGTGTGYYRGGQGRAHHEIDFEFLGNGCGEPYTLDTNVGTRG

SEQ ID NO: 221009 - protein, 381 aa, Zea mays
  Clone ID: MRT4577_133150C.1.pep
PRVRGQTPTARVRPCSSVLAIALGCLPSVICGSGWCPSPLPPLPRLAVKRTDKIGDYSGSSKWGKKPVSLDDDRRSTYDQHYSRNIFLGIRLEDERKLLVPVGVQQPHAYARSLARFASKLGPVGWDVAANRIRRALPPGTSFGPGWVVDGEPPQNSQWAPAASTNPSSEPTAPPNMPSKNDVLDHKSGPSSNGDVTAEEHLIRTQTVASTSASFDKSSDISSKVTKLENGVTESCGGTDNTGSSAPPMQQHSHNREIHSNINGFAAMSNAMSQYAGQGLFGSGIHMTHAQVLGMFSGMNGKVNGYIHRHPVTADSLKTAGQNGDVGKATVNPVQGAGQDPKTATENSSAHPGLNSRAQSSGSSPRGKLANPKHPDLALQL

SEQ ID NO: 221010 - protein, 71 aa, Zea mays
  Clone ID: MRT4577_133151C.1.pep
PSRFTKVDPPLYGAGKSSLLTPIHYPHQILPMIPQRYPNKIFGDALTSLTPAPFTCPKPTSHAHRTTILFH

SEQ ID NO: 221011 - protein, 241 aa, Zea mays
  unsure (1)..(241): unsure at all Xaa locations
  Clone ID: MRT4577_133152C.1.pep
MAEEVPTTPPPAPLYVDGCPGCAMDRKKAANKGIPYKEFFFVAVTTIASALPISSLFPFLYFMIEDLHVAKKEQDIGLYAGFLGASYFVGRFLVSFFWGVVADRVGRKPIIIFSVASVVVFNTLFGLSVQYWMAITTRLLLGALNGMLAPIKAYSIEICRPEHHALGLSVVSTAWGLSLIVGPSIGGYLAQPARAYPNVFSEESIXGRFPYLLPCLSISIFSAVGLGSCIWLPETLLNLRI

SEQ ID NO: 221012 - protein, 176 aa, Zea mays
  Clone ID: MRT4577_133153C.1.pep
MSQQLRVAMEDAGEGGRGEYTKDGSVDLHGNPVLRSKRGGWTACTFIVVYELFERMAYYGVAANLVVYLTERLHQGTVQAANNVTNWSGTVFLTPLLGSMLSSAILAAVERVTARRGTPWVTDDLNASHLDWYYAFLAVLAAANLCAFVALSRGYSYRAEAIGVTARVHSEPVVAP

SEQ ID NO: 221013 - protein, 155 aa, Zea mays
  Clone ID: MRT4577_133154C.1.pep
STVCFLGHSPGPLVSSTFLHVQQTMLSSVVSFSWQRSPTTTWCSAHVISLLQGASVMYNSCNMVPHFGHPMSVSHHSRLVNATKPIRQAMYHNNAITFMALRTGPWLGTWEGGFGGCTLAATTVDYWVRGLIEANDGPRARNQADSGQLAKAELG

SEQ ID NO: 221014 - protein, 42 aa, Zea mays
  Clone ID: MRT4577_133155C.1.pep
PISFRAPLKKKKKKKKKKKKKKKKKKKKKKKKKKKKKKKKAA

SEQ ID NO: 221015 - protein, 504 aa, Zea mays
  unsure (1)..(504): unsure at all Xaa locations
  Clone ID: MRT4577_133156C.1.pep
MSQQLRVAMEDAVAGEGGRGEYTKDGSVDLHGNPVLRSKRGGWTACTFIVVYELFERMAYYGVAANLVVYLTERLHQGTVQAANNVTNWSGTVFLTPLLGAFVADAYLGRYWTFVAGSAVYLMGMLLLTLAVSVPALKPPPCDPGAGATCPRASALQLGVYFGGLYTIALGHGGTKPNISTIGADQFDEFHPAERLRKLSFFNWWMFTVFTGILFSTTVLVYLQDNVSWSWGYGVPTLALAASVAVFLAGTPLYRHTRPXMFVPCAVMAQVGTLFVKQGVTLDRRVGRGSFRVPPASLGAVVTLTMLVCVAVYDRALVPAVRRRTENPRGITLLQRIGAGLVLQVATMAATAAVESRRLSFASRSHGATAGGELPLTIFVLLPQFVLMGAADAFLVVGQIEFFYDQAPESMKSLGTAMSLTAYGVGSMLSSAILAAVERVTARRGTPWVTDDLNASHLDWYYAFLAVLAAANLGAFVALSRGYSYRAEAIGVTARVHSEPVVAP

SEQ ID NO: 221016 - protein, 45 aa, Zea mays
  Clone ID: MRT4577_133157C.1.pep
FLKMAFTLLNPWKFIPGLSHGFGGPQKEILNFFSPSELFFPKFFK

SEQ ID NO: 221017 - protein, 99 aa, Zea mays
  Clone ID: MRT4577_133159C.1.pep
VCLVLEFACDGLPVVTVAPDLPTSPWPDQRKQVFVRVVPVLYSPFTSETHSVVISNSTTLWCLEHDRATAYRSRGQLHQGPNNLCFLQATSREHRNLGW

SEQ ID NO: 221018 - protein, 116 aa, Zea mays
  unsure (1)..(116): unsure at all Xaa locations
  Clone ID: MRT4577_13315C.1.pep
MATSSRTVPLLLLCLGVLVSCSFSGGSLDHELDITWGNRRGKVLDNGRVMTLLLDLTFGSGFQSRHEYLFGKIDMQMEVVPGNSAGTVTGYYLSYXGGAHDEIHYEFLGNVFGEPY

SEQ ID NO: 221019 - protein, 73 aa, Zea mays
  Clone ID: MRT4577_133160C.1.pep
PNPVEGFMYFVTGIISPHFVSRFLFFSTPGVSDCLYALPSFNCQLVSSLSVLQVSSPVELFVRIGIYLKKNPP

SEQ ID NO: 221020 - protein, 170 aa, Zea mays
  Clone ID: MRT4577_133161C.1.pep
PTYFNKKKKGKKNPKTPPSKGPILPALATNKKMNLFEQKNLKFFLGAVLPHFASLNSKKKPPPLLRFFGAPCPGKKNYTMGCNSNQKPCSALNFGEEATTFSKENPKPGPGPNLGKTGPLFFQPQLQKLGARAPQISVQGSFFFSTINMDNLPKKPPFLWLNPQGEKILA

SEQ ID NO: 221021 - protein, 109 aa, Zea mays
  Clone ID: MRT4577_133162C.1.pep
KELHLLQVLIYSKCKTYYNSRKVGTLQSLYTSLTNPTLELETPSSLRNTSSTSYHLCCRDGILDPSIQYPVSWLLHLSAATGVDSSFQHHFIWSLHPYVGSSSKIPMLA

SEQ ID NO: 221022 - protein, 272 aa, Zea mays
  unsure (1)..(272): unsure at all Xaa locations
  Clone ID: MRT4577_133163C.1.pep
HWVPRGRPGSSVPPAATQRRRRRLLACNEQTSERAGGGGDAGKGAAAEGEELPGGARRGTVPAPAAKAEGARXIPTKXPPPHRLPEQAQXANAXRVLRRCSQEARRWVKEEQASNRQXAKDKKTKKQALVVPADSKASDIKGNDKRSAANEDVNAEGSKGKRKRGNVKDLRFEELDKNISASKKQRRKQHLDEKKKKRKDNKTETLPDFPGREKVKFGEVVVAPPKLSFPKVKSASDASREMLRKEAIENYRYIKGWTSRPGLQLPTLAESQ

SEQ ID NO: 221023 - protein, 342 aa, Zea mays
  unsure (1)..(342): unsure at all Xaa locations
  Clone ID: MRT4577_133164C.1.pep
MLVRSASTPVLGALHPSGCHSPAVSSPAVHFAESPASAAYHAPPISCHLGGPGSGSDHERSRSRGAGAGMRRTCSEDNLASLAGGRADDHDHHHLLLPPSGKGAPRARPVPLETIQSFRGPHASTDDEEEEDDDDEDAYEVERELRFGQFSFAGGAYSQEHPLFLARGLGIDRLGSGLLSADGGGGXGGSDGSGSGGGGGNLVTSGNGGDRSGIETHYKKMIEEDPCNGLFLRNYAQFLYQVKGDYRRADEYYSRAILADPDDGELLSEYAKLVWEVHRDEDRASSYFERAAKASPQNSHVLAAHAAFLWDTDDEEGGADALSYAAFAQPAHSSLASATATT

SEQ ID NO: 221024 - protein, 42 aa, Zea mays
  unsure (1)..(42): unsure at all Xaa locations
  Clone ID: MRT4577_133165C.1.pep
KTLSTEHIQSHNIQPXXRSITSRRGRRRRCRSHRIGGGLSRR

SEQ ID NO: 221025 - protein, 43 aa, Zea mays
  Clone ID: MRT4577_133166C.1.pep
FPKTMVQLTAQFLDVCTCRNKDLFNFFYSAMLRNWSSKSKKVG

SEQ ID NO: 221026 - protein, 116 aa, Zea mays
  Clone ID: MRT4577_133167C.1.pep
MASKRLLVLVALLLAAVFLAVSAAANDDQAQPRKDDGGENKADVQDYRGGGGGWRGGGGYPGRGYPGGGGYPGGGRGGYCRWGCCNRGYYGGCRCCSRADEVPEPMYRPEPTEVHN

SEQ ID NO: 221027 - protein, 46 aa, Zea mays
  Clone ID: MRT4577_133168C.1.pep
QHSAKHTLPSVITEHSAKHIFIFFIFCNQTFCGVALAYVYLHVSAE

SEQ ID NO: 221028 - protein, 114 aa, Zea mays
  Clone ID: MRT4577_133169C.1.pep
MASKRLLVLALLLAAVFLAVSGAANDDQAQPRKDGGENKADVQDYRGGGGGWRGGGGYPGRGYPGGGGYPGGGRGGYCRWGCCNRGYYGGCRCCSRADEVPEPMYRPEPTEVHN

SEQ ID NO: 221029 - protein, 158 aa, Zea mays
  unsure (1)..(158): unsure at all Xaa locations
  Clone ID: MRT4577_13316C.1.pep
PPPRATPGPGGAAPPPGPPGTNPNSRPSEAMATAPPATRSPGPPPXSLPPAQPRGFASEPEAPSGGPRGSQETLFWKRPLPPSPAKDFPQPGXGQKISPGQEESPPPPPPMSRTQTEGAPKKKKKKGGPPXFFFFELRPXXXXXXPPGTNLPPTPPHH

SEQ ID NO: 221030 - protein, 94 aa, Zea mays
  unsure (1)..(94): unsure at all Xaa locations
  Clone ID: MRT4577_133170C.1.pep
AAANDDQAQPRKDDGGENKADVQDYRGGGGGWXGGGGYPGRGYPGGGGYPGGGRGGYCRWGCCNRGYYGGCRCCSRADEVPEPMYRPEPTEVHN

SEQ ID NO: 221031 - protein, 121 aa, Zea mays
  Clone ID: MRT4577_133171C.1.pep
MASKRLLVLVALLLAAVFLAVSGAANDDQAQPRKDGGENKADVQDYRGGGGGWRGGGGYPGGGGYPGRGYPGGGGYPGGGRGGYCRWGCCNRGYYGGCRCCSRADEVPEPMYRPEPTEVHN

SEQ ID NO: 221032 - protein, 104 aa, Zea mays
  unsure (1)..(104): unsure at all Xaa locations
  Clone ID: MRT4577_133172C.1.pep
SDGIIGVGSSGTVYCVKMSYGDVIVVKXSCGNRRRSRRVELRRRRSXKRKDVAVADDGNRSMYAVVVVLGHLRHRNIVRLLGWCIDGDATLLLYEYMSYGSLDE

SEQ ID NO: 221033 - protein, 39 aa, Zea mays
  Clone ID: MRT4577_133173C.1.pep
VIQAGDSCWGPCAGHEQFQDMPYQPFSNVYRLGKVADWT

SEQ ID NO: 221034 - protein, 86 aa, Zea mays
  Clone ID: MRT4577_133174C.1.pep
CYYQCATLLPTLRNNQMFYLFNCVHLILVPLFHSSSHLLVEWVAYTFRRGATHGLRGPRPSLAATPLRLRTRGAAGPRNNNKAPRG

SEQ ID NO: 221035 - protein, 110 aa, Zea mays
  unsure (1)..(110): unsure at all Xaa locations
  Clone ID: MRT4577_133175C.1.pep
VVAVAPGLAWGCALFVLLVGGRLVCVLRAGAWLVPPFXLRRSASLGGRFRSSCVARVRFXXRGSAVGGCAGGGGGRPCRGVWWRRRRGGAGGSRGGLGLVRRGGGSWGCP

SEQ ID NO: 221036 - protein, 81 aa, Zea mays
  Clone ID: MRT4577_133176C.1.pep
ASPVRKRYGVDMQIFAYLQMYQFRIVHIFWTACGCVDGVSFHALLRSEKEFRRHLPVVLRTVHSLCQDVYSENSGEVFLKF

SEQ ID NO: 221037 - protein, 127 aa, Zea mays
  Clone ID: MRT4577_133177C.1.pep
APGVSFPQYFRGFLPRGPRGPPGSPNPIPHWAKGCPPFHKIKKAFFVKRQHSTECLFEIFYKTKKPPKSRGFSGQIFSGPPGSAPFFNPRPPKKKNIKKFSKTNKKKKKKKKKKKKKKKKKKRAAAD

SEQ ID NO: 221038 - protein, 124 aa, Zea mays
  unsure (1)..(124): unsure at all Xaa locations
  Clone ID: MRT4577_133178C.1.pep
HLRFIYRTVTTTAALRPPGRPPPPPPLDSSPRHRVSGPXRRSAAGGGAYNIMKCIEEVPFFCACIMEEVEEANREXVESCRRVLELMFHXDEHAQVRSIDLGTDEKCTKVKKEDSNDHNGGEGT

SEQ ID NO: 221039 - protein, 66 aa, Zea mays
  unsure (1)..(66): unsure at all Xaa locations
  Clone ID: MRT4577_133179C.1.pep
VKQVNEKAVAMSVMSPRATVVIQLRVTAXNYVSQLCVVTAGPHHFPPLMQPPTSSFFELYIXPSPM

SEQ ID NO: 221040 - protein, 165 aa, Zea mays
  unsure (1)..(165): unsure at all Xaa locations
  Clone ID: MRT4577_13317C.1.pep
MGTSSRRVPLLLLCLGVLGSCSFXGGSVGQELDITWGDGRGKGLDNGRVLTLXLDRTAGSGVQCRHEDLCGKIDMQLRLGPXNSAGTGTAYYLCGQGGAHDEIDFECLGNVAGEPYTLHTNVCTRGQGQREXXFRLWVDPTGDFHTYSILWNPKHVIFMGGDMPI

SEQ ID NO: 221041 - protein, 118 aa, Zea mays
  unsure (1)..(118): unsure at all Xaa locations
  Clone ID: MRT4577_133180C.1.pep
LRRFLTTWTAEKNPGVTQINLLAKHPFFTRWLNNEEAPTDRPYQQFRLLDGKWPXPCGASLTAGVVVVTRRVTTTFGSLLAPASFVFFPFFPATFGCFPREVINGGLLLGLLFSVLRL

SEQ ID NO: 221042 - protein, 217 aa, Zea mays
  Clone ID: MRT4577_133181C.1.pep
MPAMATAPVKFSVATNSPCVQPSLPLRRTPAAISFPCRPWSAAMNSCTGLLRRSDVVAAAGHHKLMGSLTTNEGLRFGVVVARFNEVVTNLLLQGALETFERYSVKEENITVVSVPGSFEVPITAQKLGKSGKFDAILCIGAVIRGDTTHYDAVANSAASGVLNAGLSAGVPCVFGVLTCEDMDQALNRAGGKAGNKGAEAALTAIEMAFLFRHHLG

SEQ ID NO: 221043 - protein, 88 aa, Zea mays
  Clone ID: MRT4577_133182C.1.pep
MAVNVRTMWSSMRAQVAMVVALVFLVSGAWCSRRTVGPCKKITVIYGKDWLDAKATWYGTRTGACPNYNRGGRRYNDVKRPFFFNMGA

SEQ ID NO: 221044 - protein, 238 aa, Zea mays
  Clone ID: MRT4577_133183C.1.pep
MTLAMSTLACHRPLPSKGGRGMCGEEHKEETEKFSERVQGFAAGAPRSAVLQACTLTSGLLLAGGLLLREASHLASINGWPIADPTDVSISFETRHLELVAGLVIVISSARYILLQTWPDFRDSSESANRQILASLEPLDYIVVACLPGISEELLFRGAMMPTLGLNWISALIIGTVFGVLHLGNGRKYSFAIWATFVGFAYGMGTIASSSIVVPIASHSINNIIGGLLWRLTKNSQK

SEQ ID NO: 221045 - protein, 53 aa, Zea mays
  Clone ID: MRT4577_133184C.1.pep
GANRETTRTCCYCPKHKYFPSPFFKTNPFPSMKNNFFEIKKSPPNINCLRPYY

SEQ ID NO: 221046 - protein, 205 aa, Zea mays
  Clone ID: MRT4577_133185C.1.pep
MRGEEHKEETEKFSERVEGFAAGAPRSAVLQACTLTSGLLLAGGLLLREASHLASINGWPIADPTDVSFSFETWHLELVAGLVIVISSTRYILLQTWPDFRDSSESANRQILASLEPLDYIVVACLPGISEELLFRGAMMPTLGLNWISALIIGTVFGVLHLGNGRKYSFAICKFVWCGKRWNHRTRVLLAFCAVIYRVVFGKSK

SEQ ID NO: 221047 - protein, 278 aa, Zea mays
  Clone ID: MRT4577_133186C.1.pep
AVVAVAPEVVPPLKAVVKDSCVDADSDEIGAVKPPKEHAAVAAHQFRWLVSQVSYPKLGDLCSLVIPCALTTLDHWSPEVKVQGMVSFVHIAKNVKATELSLYEDAILDACCQNIPADDELWYQVIEVSVMLLTFTQRSNPRSPWYDRMLSEMLGHLERQPLNKERRVAWLTLIGPVFDAMGLFLLAHFRRLFSLFFQWMHTDDNKTVLLTLKQIHAIIKLTWIRKSPYTLRLVDELVLLYKESATRSNREIMRDHILEILVLLQNCKGHQFEEAWKK

SEQ ID NO: 221048 - protein, 214 aa, Zea mays
  Clone ID: MRT4577_133187C.1.pep
MTLAMSTLACHRPLPSKGWKWKLRTSVATWKHMRPGRRNEAVACAAKNTKRKRRSSPNESKDLLLVSEEAASGSGGSAPGTSLETNGEDAATDDEISGAPRSAVLQACTLTSGLLLAGGLLLREASHLASINGWPIADPTDVSFSFETWHLELVAGLVIVISSTRYILLQTWPDFRDSSESANRQVCRFQCILCRIIFPVVSFCWSYRFHSLTW

SEQ ID NO: 221049 - protein, 291 aa, Zea mays
  Clone ID: MRT4577_133188C.1.pep
MTLAMSALACHRPLPFKGWKWKLRTSVATWKHMRPGRRNEAVAFAAKNTKRKRRSSPNESKDLLLVSEEAASGSGGSAGTSLETNGEDVATDDEISGAPRSAVLQACTLTSGLLLAGGLLLREASHLASINGWPIADPTDVSFSFETWHLELVAGLVIVISSARYILLQTWPDFRDSSESANRQILASLEPLDYIVVACLPGISEELLFRGAMMPTLGLNWISALIIGTVFGVLHLGNGRKYSFAIWATFVGFAYGMGTIASSSIVVPIASHSINNIIGGLLWRLTKNSQK

SEQ ID NO: 221050 - protein, 62 aa, Zea mays
  unsure (1)..(62): unsure at all Xaa locations
  Clone ID: MRT4577_133189C.1.pep
CNYNLRLNRAGMSCRLGWMNYIQPGLKHGRMSTQEERIIIELHARGGNRXPRIERWLSGRTD

SEQ ID NO: 221051 - protein, 299 aa, Zea mays
  Clone ID: MRT4577_13318C.1.pep
MASRRVSLLLGVLLSYSAAVAVAVAAANFNQEFDITWGDGRGKIQDNGQLLTLTLDRTSGSGFQSRHEYLFGKIDMQLKLVPGNSAGTVTAYYLSSQGNTHDEIDFEFLGNVSGEPYTLHTNVFTQGQGQREQQFRLWFDPTKDFHTYSILWNPKHVIFMVDEMPIRDFRNLESKGVAFPKNQPMRLYSSLWNADDWATQGGRVKTDWSHAPFSASYRGFKADACVAVAGGRTRCGATVGTEGTGAPASAAGAGDWYNQELDLTLQQRMRWVQRKYMIYNYCTDPKRYQQGLPAECSMQ

SEQ ID NO: 221052 - protein, 139 aa, Zea mays
  Clone ID: MRT4577_133190C.1.pep
MRGEEHKEETEKFSERVEGFAAGAPRSAVLQACTLTSGLLLAGGLLLREASHLASINGWPIADPTDVSFSFETWHLELVAGLVIVISSTRYILLQTWPDFRDSSESANRQVCRFQCILCRIIFPVVSFCWSYRFHSLTW

SEQ ID NO: 221053 - protein, 87 aa, Zea mays
  Clone ID: MRT4577_133191C.1.pep
HFILQRSSIGKNRAEAAMEFLQELHSDVSGSFVEESPENLLDNDPSFFCRITDVVATQLPESTSLRLADVLWNSQIPRLICMTYGLV

SEQ ID NO: 221054 - protein, 44 aa, Zea mays
  Clone ID: MRT4577_133192C.1.pep
PPPPRKGKRHRHPPQQEQHHPQHRAARRHRDHSLVLSASNLGRN

SEQ ID NO: 221055 - protein, 96 aa, Zea mays
  Clone ID: MRT4577_133193C.1.pep
SYKDARHQHAGVGSDILVINQPLIQRAITPPEMDLCDPVNKVCVCVCYPHVIMERSNRFVSPHAVPRERIGDLYPCLPVDIILMTQMPCFVILLGP

SEQ ID NO: 221056 - protein, 69 aa, Zea mays
  unsure (1)..(69): unsure at all Xaa locations
  Clone ID: MRT4577_133194C.1.pep
WPRPLPVVVQCAGHRRPISADDLSLCCGLVPDSSKHARRDHDSIXADRALRGARRSRGGRRSPMTSLDP

SEQ ID NO: 221057 - protein, 59 aa, Zea mays
  Clone ID: MRT4577_133195C.1.pep
MKLRVVCRKLYDYVRYDLKEIAFPSSLPDPPHIKKRPKLSWHERWCILKEATRLYGASW

SEQ ID NO: 221058 - protein, 93 aa, Zea mays
  Clone ID: MRT4577_133196C.1.pep
LINNNKATYTRATKERPDKPKPPNHSGPTASIERSYTKQADGRPHQRAEEQKAPRTCEQPATSTIALRPDAKTGTASQSDNSKTATRGRPRQI

SEQ ID NO: 221059 - protein, 81 aa, Zea mays
  Clone ID: MRT4577_133197C.1.pep
VELMWDNAGFVCGAGTYIDQWLKSRCSQGHGLCTLHLFAYIIICVIPFTLNDVLWNTINPGHCGSALTDLVLPVAGQVCPC

SEQ ID NO: 221060 - protein, 63 aa, Zea mays
  Clone ID: MRT4577_133198C.1.pep
MSPPPPWLMLGAGRSPLLSAPPKALGWWVAVVSGMSMGYPKSRPREMVSCCVSPPPPRTLVPK

SEQ ID NO: 221061 - protein, 68 aa, Zea mays
  Clone ID: MRT4577_133199C.1.pep
FSTSICNTGIDSILSLFTYANDPQHEWVSDAMNSKVLLSSQQILADRTQAAIFAQCTVSRDSFQPKCV

SEQ ID NO: 221062 - protein, 147 aa, Zea mays
  Clone ID: MRT4577_13319C.1.pep
MAASLQALACAMLLLAVSPLACTASKTLLQDRCESYAGGDRSSYDYCVWTLRRDNKSATADELGLAVIAARMARATAKATGVKIAWLRANETVPVRRDCLAACAREYAAAVRRLGHAASAALAGKLQHAQTLLAEATGAPTLCDAAF

SEQ ID NO: 221063 - protein, 80 aa, Zea mays
  Clone ID: MRT4577_1331C.1.pep
ENVRFQYFCFAVDGCWSRETVADEANLAHAGGSFHEVNEETSCDVPGHHGITALAKATNDYVAKGKRHGPAIPIYFRVVE

SEQ ID NO: 221064 - protein, 62 aa, Zea mays
  Clone ID: MRT4577_133200C.1.pep
ILKLSRSFKLQTPIASSMSSQITVSSSYCHLFALIILATWTLPHSYTDRPNPVPYHYPSSKQ

SEQ ID NO: 221065 - protein, 172 aa, Zea mays
  Clone ID: MRT4577_133201C.1.pep
AGLRALGGLPELTYLALSLKPRSLNSSSCKATVADVVAADGFFLKLRSLKLYGWMVQLVPSEDSASVSLSIWNEGAEGSTRDCTAGRVAPAIMPDLIHLEFNVPIAALYKITNNGCSCYSLGWECLPSLHKIKALVDYDGTYTADFEKPVAEMMQAAKLHPNQPIIEMVTQL

SEQ ID NO: 221066 - protein, 67 aa, Zea mays
  unsure (1)..(67): unsure at all Xaa locations
  Clone ID: MRT4577_133202C.1.pep
EMAASDVEYRCFFGGLACATDYHSLNNSFSTYFXVLESKIILYRXTHMSLVFCFFTFFTDDSIRISI

SEQ ID NO: 221067 - protein, 129 aa, Zea mays
  Clone ID: MRT4577_133203C.1.pep
ILSNILSMVFFLTHPYQIDSLPSDCLVFLSTPNLPIALVHISHHAGCTIHWLVHSLLYIMVVSPSFHRGKSLLLDSPGSLVIIYSAGAVEVFAFKRRHEAVVGVDITWRSISPSSSHAAFFMTRCMLDS

SEQ ID NO: 221068 - protein, 149 aa, Zea mays
  Clone ID: MRT4577_133204C.1.pep
KKKKKKKKKGGGGKKKKKKKKKKKKKKKKKKKKKKKKKKKKGGPFFENPGFLSSRVPKSFALFLGGGGVYFFGAPFFHLPGRGKPQRFPQLKPFGSPSLFLRGAFSFWGPALSPFLPLPLPFWKWGPPLWRSFPPPGGGVSPPGAFFFS

SEQ ID NO: 221069 - protein, 79 aa, Zea mays
  unsure (1)..(79): unsure at all Xaa locations
  Clone ID: MRT4577_133205C.1.pep
MDSCMKADTPRRQRGPLARFDDEAIKVAWAXGSRHSHKDGDRMGQIVTYERGFSKDNRTMLFKKDLFKDTVRKAAHAWK

SEQ ID NO: 221070 - protein, 243 aa, Zea mays
  Clone ID: MRT4577_133206C.1.pep
MASRSPTIALVLILACFSSPAAAFNITRLLGQFSDFTTFNNLLSQTKLAEDINRRQTITVLAVDNGAAGGISSLPSDVQRKVLSMHVVLDYYDTAKLEAIKNHSALLTTMFQSSGQATDRMGFLNFTKRSDGVMVFGSAQPGAQMTSHMVKSVTSRPYNISVLQVSAPIVPPGVGGSADSGKGGAPPPHKGTAPAPGPATKGKKGAPPSKDEEGPGSAPSDDASADAPADAPGPAAGRPTADG

SEQ ID NO: 221071 - protein, 256 aa, Zea mays
  Clone ID: MRT4577_133207C.1.pep
MICLKAISSPLHLPTFRRLTPTSSLRAAAAMSSSSSAVAAPIEHFVLFKARPEAVASGAAAAMVSSLQALATLVPGLAYIHAGPVLRLRSPAAEALGPTHLLHTRYATKEDLASYAAHPAHVAAVQGHVLPNALDITAVDWVNAAPLPSPVAPGSAVRLTLAKVKEGVEVAQLVEKVAAATQAAGDAKVSFGENFSPARAKGYQFGMVAVFDSVEELDAVEGDGKVEEAKALVRPLLDEVMVLDFVVGDAPTPASL

SEQ ID NO: 221072 - protein, 69 aa, Zea mays
  Clone ID: MRT4577_133208C.1.pep
NCLQFIYNHLKVIQCVSKSVNTNKHCCPNLDRFRLYSSNSCNLVSRPPKRVLQNLLEILSKVLQFSYNY

SEQ ID NO: 221073 - protein, 750 aa, Zea mays
  Clone ID: MRT4577_133209C.1.pep
MVVTFQHKIILRPGSMFCFGTISSVADEEGTLHRITDPPERKSSSKISERIGAKQGKAQPPALRERITFSKLGAEGSSTRRTPLSTSPTEEWTRIIRRKEVNEVKGRQAALSVPPLSKENKKKIVATAAPFYPDVLFIGGRVESNPTSDDEPTAPGEEPLHRESRRRSNRRQNIRWHHEAREQDPAQPVSRDEVLEVGETPEERVLIERRNSRRRDRRQAQEQAEQGTRQRRENPLFGRNLNPDFARAMNTPSEVGGVLAWIADGLPQTPDAEGYRQLFTQAANHLLPLAHPPNDLRHAVNSRRDAQSSINASPTRATEDVMTAYLPIVLGQDALQWLRHLPRHCIDDWSDFSRRFTTNFQSLSDKPAQPWDLKSIKRRGDETLQSYLKRFQTMRNRIPEVAEAAVIEDFYRGSNDSAFVQAILQKAPTTSEQLFREADLYITADERALDLIGGAKPAPTAPRRDMNQQPDKRWEKRPREEVHAAGPPASHARGGPRGDERTLDDILDAQCPYHKDMRHTLRNCRDSKHSVGNGRPFQPLPHPPPRGGPGEPRQPQQQEEGGGAFPCVDREVNVIFDRHGSQESKRQQKLNDRQILGAATGPPAPYRWSEHPITFTRADQWLNFDHPGKYPLLVDPVIRESRVKKVLVDGGSSINVTFSRTLQALGVHLKELHKSDTPFFGIVPTKGGYPLGHIYMPDTFGTLENYITEFLRFKVANFDCGYNAIIGRPGLAEFMSILHYTYMILKMPGP

SEQ ID NO: 221074 - protein, 394 aa, Zea mays
  Clone ID: MRT4577_13320C.1.pep
MMAAAALRPHKSSPARVPTRCVAALCAACFLVGVGVVNRYWPVPEPHPGCPDKAGPDHSRAVLNQASQTREVVMALDKTISDIEMRLAAARAAQAMSQGMSPGDSDSEGDQGTARRRMSFVMGVFTTLANRKRRDSIRQTWMPQGDQLRRLEDKGVVIRFVVGRSANPNLENEVDHAIDMEDEEYSDILRINHVEGYGGLPMKVQMFLSTALTMWDADFYVKADDNVHVNIGITRSILARHRMKPRVYIGCMKSGPVVAKNDSKYYEPDHWKFGTEGNNYFRHATRQLYAVTRDLATYISANRHILHKYSNEDVSFGSWLIGLEVEHVDERSLCCGTPPDCEWKGQAGNPCAASFDWNCTGICNPVERMTEVHRRCWEGLGAEGHAQSLTFDSQ

SEQ ID NO: 221075 - protein, 243 aa, Zea mays
  Clone ID: MRT4577_133210C.1.pep
MMEVERPMWELKEEEEPPQLLMEAEEDDYEEEEDTSALLYTRERESMRKKMTTTMADLDLEMESSDSDSDSNAAASAVEEEAAAAQQSIFLDPTQGLWKCRHCDWTHQRLSGPCTAEIILHSQQGHCKIASNVDSLVQHQPLYSSPHKASDHATGLGAENQVEKQDNVSAQQTNYSSSNGNLENETHSNGVHEISSSSEIVTDHCGRTQTDHNHPARAGSTSWPSWWLSWTTFWWQHEHISGS

SEQ ID NO: 221076 - protein, 34 aa, Zea mays
  Clone ID: MRT4577_133211C.1.pep
KQGSRLLVSGFKSQVRSQFVIAQDESIKSELCML

SEQ ID NO: 221077 - protein, 53 aa, Zea mays
  Clone ID: MRT4577_133212C.1.pep
ATPTSNIRNTFTLEVLNLLGRCNQDYRGVYTTLYHNTPLVQEYEELRMCMRSL

SEQ ID NO: 221078 - protein, 88 aa, Zea mays
  unsure (1)..(88): unsure at all Xaa locations
  Clone ID: MRT4577_133213C.1.pep
CSPTVTPYCSPQCQSFRKQSCQQLRQVDPQFRYQPMFGLVLQSIIQQQPQIVQVGGLLAANIAQQLPQMCGLXQPTPCPYETAGGVPH

SEQ ID NO: 221079 - protein, 105 aa, Zea mays
  Clone ID: MRT4577_133214C.1.pep
PSNTVIHPRRKLFILVEAFQRQANFVADVQSRSPRILINLARDLGVLHQLQDGVSTRTSRTASLSHGRRPDPAGESTARNTRMTRILGAIAVICRDGRGGTTKSP

SEQ ID NO: 221080 - protein, 100 aa, Zea mays
  Clone ID: MRT4577_133215C.1.pep
VFLLHEDHHPTWDHQLLFHTTRRGGIYETINIIIQDSVHHLIPHHPQLRFYPAFLFAAQFQYPNCISIQFNQFYQSHPARHHPYQLGSLHFHSDSLLLIQ

SEQ ID NO: 221081 - protein, 314 aa, Zea mays
  Clone ID: MRT4577_133216C.1.pep
SIVLPSAYICTVTLVLHVVLSWVVVYKVGMGLLGASLLLSLSWWVIVAAQFAYIVNEPRCRHTWTGFTWQAFSGLWGFFKLSAASAVMLCLETWYYQVLVLIAGLLPNPELALDALSVCMTVNAWVFMIAVGFNAAASVRVSNELGAGHPKSAYFSVWVVTGVSTLISLVLAIVILCLRNYISYIFTEGEVVSNAVADLCPLLAITLVLNGIQPVLSGVAVGCGWQEFVAYVNVGCYYIVGVPLGAILGFVFKLGVKGIWSGMIGGTFMQTAILVWATLRTDWNKEVEEAQKRLNKWADSKTTEPLLVGFGDGN

SEQ ID NO: 221082 - protein, 539 aa, Zea mays
  unsure (1)..(539): unsure at all Xaa locations
  Clone ID: MRT4577_133217C.1.pep
GDLTGVNSMPLSIXLCHEESSFVSGSLLTSPVGETLSTSMIQEIFLLAKDAKDKHIQDYAAWAISFLRSRWSKNQNQILYEDNGSNRSPDDHDQASSFSEQXLVWNLSLWLSDLKFEKSGDVVPISTVGTVLKCLSKAPRLPTTDWGAIVRRCIKAEAQISHKLTNQEDPKILKEACLYLTLAHAAHISPLLQFLDDLTDILRFQRLDINVQSILLKHLLHLMKLFSDSRLDKLHEDFTEYLYSPTSSYLNYSSEQKSMLRMSFWEGIYTCLVDVSEESGVFSFIEKCIQCLLPLLTLHSDGQPEFMKEWSVAILCLTNAQKKWLDDILQIRSTALVNEGHVDVAKKIILRARLCATGCGSTHELGNIKTAILCTKADGVWWSVLVEITSALNSAENIIKRQWLLDALDIGCVTAHPSTVLCFVGLLCGSCCIYMPLLLVNSINVLSDLPVTLPAFLSTIVSDDFRNSVADRLWLLTTDIYTWAEQLAHGHDQPGHDRIHRSETEIATFLANILLSTCITVEDYLSVDKRLKLANLEAL

SEQ ID NO: 221083 - protein, 86 aa, Zea mays
  Clone ID: MRT4577_133218C.1.pep
ALGSNILLEEGSSMANELFFIPKAKELGVVYLFGPGNIRARKNLFFVKKLGINYFYAFLRRNSRRGIATLSIPPPRFIQVGIQNMV

SEQ ID NO: 221084 - protein, 58 aa, Zea mays
  Clone ID: MRT4577_133219C.1.pep
KKLNPRACERGKNFGCEKQKKKLVLQNVAQKEPVMGFATNPNFFFQGGPGFSLKKKAP

SEQ ID NO: 221085 - protein, 95 aa, Zea mays
  Clone ID: MRT4577_13321C.1.pep
MVCCQTGNSSAGAANGSKMAQTVFTRSLAAMQHVQALHVVMLTKPFLDACKQISAELDRWVGAMGIVKSDFSCYITRLENKYTLEPSKHEHLYSM

SEQ ID NO: 221086 - protein, 108 aa, Zea mays
  Clone ID: MRT4577_133220C.1.pep
DCPVVSFVCDVRTSSSFCLLLSVCAAQGECVRFARSLFSGVMGLRFLAWVSPALMMWWWFCVLLCAVSPVLLLLLGYIGVIHLDGGGSDRPSGCSARSGTAALGVWSC

SEQ ID NO: 221087 - protein, 64 aa, Zea mays
  Clone ID: MRT4577_133221C.1.pep
RSSTFKNFWLYQPARKDVWVYRPFWGREYLFHFTASVLSTMKRKQMKQRHENKQIQTHASAHAS

SEQ ID NO: 221088 - protein, 134 aa, Zea mays
  unsure (1)..(134): unsure at all Xaa locations
  Clone ID: MRT4577_133222C.1.pep
NPQPEPPKPEAAGPRTPPPTRKREESXHGQQPPGGGPPQQGDPGKDGXPPAGGRAGGXPPPAQGXPPQGDPQQGDPQQGDPPQXAQPXPQQQQSSGPPPXEGXXAAXXXXXXXDAXXRNPRGQHGKSNQTEEEG

SEQ ID NO: 221089 - protein, 38 aa, Zea mays
  Clone ID: MRT4577_133223C.1.pep
LHKGRNQHCRTIKHTYLHDIHTVLHNIPRVDTSISSNG

SEQ ID NO: 221090 - protein, 66 aa, Zea mays
  unsure (1)..(66): unsure at all Xaa locations
  Clone ID: MRT4577_133224C.1.pep
GDIIFSQVTVLFLFSPSFYRFFFWKVWFALWWGSGFFGFYLGVGCFFRLKPXTEPGKKKRGKNIYK

SEQ ID NO: 221091 - protein, 45 aa, Zea mays
  Clone ID: MRT4577_133225C.1.pep
SIKIGINGFGRIGRLVGRVALQSDYVYLFPLNDPFISTYFITYIF

SEQ ID NO: 221092 - protein, 141 aa, Zea mays
  Clone ID: MRT4577_133226C.1.pep
VEHQPCCNATVPKGSVVDGGKRKVTTAGVPTEPRYRDAQRRRPRGRYSAEIRDQHKGVWLWLGTFDTAEEAARRYDSEACRLRGPSENTNFLATLDYRVPLPALSLHALLPCVRTLVWIGVERYSQHSKGIVVLHDESTAS

SEQ ID NO: 221093 - protein, 85 aa, Zea mays
  Clone ID: MRT4577_133227C.1.pep
HAVAHASAISLLPSINSNSGGQKLPSRQLPTSWRSSPLLVGANPEAEEEEGSGVGVGPISHESHRGRPGGGATGGWARRRRSWRP

SEQ ID NO: 221094 - protein, 47 aa, Zea mays
  Clone ID: MRT4577_133228C.1.pep
SAETLEPASHYEFGMVKPASVTASLVPVTFAKHPRHLNATARVTSSS

SEQ ID NO: 221095 - protein, 52 aa, Zea mays
  unsure (1)..(52): unsure at all Xaa locations
  Clone ID: MRT4577_133229C.1.pep
FARPISLSTPMYKSCSHEPFFRXGNKSSHLNICFNLQYLLRRPLRPGSRPGF

SEQ ID NO: 221096 - protein, 472 aa, Zea mays
  Clone ID: MRT4577_13322C.1.pep
MATALARRGAAALARWRGMCSSSASAPRRAAALSSEELMRMEQDCSAHNYHPIPMVFSKGEGSHIVDPEGNKYIDFLSAYSAVNQGHCHPKVLRALIEQAERLTLSSRAFYNDKFPIFAEYLTSMFGYDMMLPMNTGAEGVETAIKLARKWGYEKKHIPKNEALLVSCCGCFHGRTLGVISMSCDNDATRGFGPLVPGHLKVDFGDIDGLKKIFEELGDRICGFLFEPIQGEAGVVIPPDGYLKGVRDLCSKHNVLMIADEIQTGIARTGKMLACDWENIRPDMVILGKALGAGVVPVSAVLADRDVMLCIRPGEHGSTFGGNPLASAVAVASLKVVRDEGLVERAAKLGQEFRDQLQKVQQKFPQILREVRGRGLLNAVDLNNDALSPASAYDICIKLKERGILAKPTHDTIIRLAPPLTISPEELAEASKALSDVLEHDLPQLQLQKQIKKPESEAEKPVCDRCGRDLYG

SEQ ID NO: 221097 - protein, 87 aa, Zea mays
  Clone ID: MRT4577_133230C.1.pep
ADRFGPGGLVGTTRSSGLWLGACVIFSARNLSVSSRTSSINLSSCSVFGGGRLLGHDGRRRGLPHGRFYAGRAGLGVGLGNGPLVAD

SEQ ID NO: 221098 - protein, 91 aa, Zea mays
  Clone ID: MRT4577_133231C.1.pep
CAHRLQANSLVKEQQRKRKVSGAVVPLCDRECQFSPFFRSCWSVVSCLRRFLLLFPFQVLWVSLCIQSLILVHACNQTIQSIQSRSNGFIC

SEQ ID NO: 221099 - protein, 156 aa, Zea mays
  unsure (1)..(156): unsure at all Xaa locations
  Clone ID: MRT4577_133232C.1.pep
MEEPRRPRFFKVLVVDFARRIEIPQGFLCHFPEGRDRKPGTTAVASAKVVLTNAEGSSIWPVALESTDGRVFLTTGWPKFVEDNRLGKGEILIFKYHGRMRFVVSIFGVDAVEKAGRWSARSGXRPRRRQVPCNETLKGMNTFHPRAQLVSLTHMK

SEQ ID NO: 221100 - protein, 110 aa, Zea mays
  unsure (1)..(110): unsure at all Xaa locations
  Clone ID: MRT4577_133233C.1.pep
CTSPPTCSRDGLAGATGDHSLHXAFSTYCQVLECKXILYRETQRSRGFGFXTFSRWQAMRNAIEGMNGRELDGRSSTVNEAESRGXNVAGGGGRYCGDQGRWGYGGPGRR

SEQ ID NO: 221101 - protein, 68 aa, Zea mays
  Clone ID: MRT4577_133234C.1.pep
KVFFLRLPFFACLYRWCSTPKTAAFRPPCLGARPWVARVVVRFAYVVFQLRCDAGLMIYYKPVSSKKK

SEQ ID NO: 221102 - protein, 72 aa, Zea mays
  Clone ID: MRT4577_133235C.1.pep
NPRPGWSRACAHSFAVFLLSVHLACATSRATAAAAAALRPAAQVFVAPFAGYEHPPHQITVIQAELWLVLAI

SEQ ID NO: 221103 - protein, 55 aa, Zea mays
  Clone ID: MRT4577_133236C.1.pep
WLACSKGLAVSLPLASGTSVPRALGAPLPLGILNAPAALPPLLSLDLGPSSRTRR

SEQ ID NO: 221104 - protein, 85 aa, Zea mays
  Clone ID: MRT4577_133237C.1.pep
RERGNPSKTYPIKNLGPWNQNKETISHLRGRGGFGLLKRRGGAAKQNGAAHSTAATTLTNQLVWLGGPHPKVKDLHSLGGRSQDV

SEQ ID NO: 221105 - protein, 54 aa, Zea mays
  Clone ID: MRT4577_133238C.1.pep
RPWSQASYLWTLSYCAFCPRHQLIRTHRDAPYKPSFRQRIILGSIHIWWYLEQS

SEQ ID NO: 221106 - protein, 74 aa, Zea mays
  Clone ID: MRT4577_133239C.1.pep
KICTEILSSPTHNEIAREFWVTLVWFKLCTVWPTTNAMGFLFAQRKLSAHKYSWFLLCFQLELQCLRRQYHNFN

SEQ ID NO: 221107 - protein, 79 aa, Zea mays
  unsure (1)..(79): unsure at all Xaa locations
  Clone ID: MRT4577_13323C.1.pep
FSSKNSXPTRAFFYLGGGPKTLKPPPFLTTTNTFVFFPTTQHPYLIFHFKNHLRTIASKVLSPSLISTPMPKLHFYTYT

SEQ ID NO: 221108 - protein, 134 aa, Zea mays
  Clone ID: MRT4577_133240C.1.pep
MRKHRIVSLVAALLILLALAVSSTRNAQEDSMADNTGTLAGGIKDVPGNENDLHLQELARFAVDEHNKKANALLGFEKLVKAKTQVVAGTMYYLTIEVKDGEVKKLYEAKVWEKPWENFKELQEFKPVEECASA

SEQ ID NO: 221109 - protein, 93 aa, Zea mays
  unsure (1)..(93): unsure at all Xaa locations
  Clone ID: MRT4577_133241C.1.pep
GRXXPRAELXDXEPGTRDSXRTGRGGQNXRPDNPXXGQXXAGNNXAKGHXTEGXERNDXXPDXXRKEAENXDGXQGXQXXXXXGGGTRXGXGT

SEQ ID NO: 221110 - protein, 134 aa, Zea mays
  Clone ID: MRT4577_133242C.1.pep
MRKHRIVSLVAALLILLALAVSSTRNAQEDSMADNTGTLAGGIKDVPGNENDLHLQELARFAVDEHNKKANALLGFEKLVKAKTQVVAGTMYYLTIEVKDGEVKKLYEAKVWEKPWENFKELQEFKPVEEGASA

SEQ ID NO: 221111 - protein, 87 aa, Zea mays
  Clone ID: MRT4577_133243C.1.pep
FWHLCFSLSLGSSDVLLGKRETYGTSNVRIRWPFAAPSPWTIGLCLPDLNHSVGSSQPTGFPSLVSHRLVQTEGWDTLSTIFSLSDM

SEQ ID NO: 221112 - protein, 134 aa, Zea mays
  Clone ID: MRT4577_133244C.1.pep
MRKHRIVSLVSALLILLALAVSSTRNAQEDSMANNTGTLVGGIQDVPGSENDLHLQELARFAVDEHNKKANALLGFEKLVKAKTQVVAGTMYYLTIEVKDGEVKKLYEAKVWEKPWENLKGLQEFKPVEEGASA

SEQ ID NO: 221113 - protein, 71 aa, Zea mays
  Clone ID: MRT4577_133245C.1.pep
QSNKAKKASAFLQKVAWGIRHLNQSLNKGATIVFMFRPLAFFGLPFNRSKMFLDFSPPCTQIHWGGNQLPF

SEQ ID NO: 221114 - protein, 52 aa, Zea mays
  Clone ID: MRT4577_133246C.1.pep
TPSTSDYLVVSCWHVVRSHQRCKGLEKTLARTDSTLKPGSSPWRCCQRTDPC

SEQ ID NO: 221115 - protein, 423 aa, Zea mays
  Clone ID: MRT4577_133247C.1.pep
METTEPSRGTKRPLTATAGDDDDAGLERKPRFPKGKKAKYRDVGAEGGPSGNAVDLDSMLNPELAAERRARQRHGQLKEGDDAKGGAAEVKGFEVRYNDSVNFVDDGIRIEPFNLEREREEGYFDENGNFVEYARGNEIKDAWLDSVEVDPTYAAKVQNKGKEKVDEFEDLSSDDIGRLKRQIANLLEPGETIMQALKRLKGTSTDKRGKMAEGTKRIFDELTEAAMKLMENGDYNVYSDDRETFEREAAGYERLARARLGLPEVDGVSEDQKYNQTPSSALEIDQPSSVLEMELGPSTANVYTATAAINDDDSNLDMFGDDDNDDTKHSSDANTVGSGLKPGTSDVKKADNGSVDSDYVYDPSSGYYYSSSTGYYYDPNSGYYGSASTGTWYSYDEQTGTYKEIQDEQTGTVKEELGDAIKE

SEQ ID NO: 221116 - protein, 94 aa, Zea mays
  Clone ID: MRT4577_133248C.1.pep
LLSTPILLSPDPKTFTLSFLAHNLHLHTRDQLDTCRDEGTISSDCLVKSCLKVTHRSISKDSLTPPSPCSSWIDGPFCSFLCETLALLHGKQTM

SEQ ID NO: 221117 - protein, 71 aa, Zea mays
  Clone ID: MRT4577_133249C.1.pep
KYLIIATYIYIFWMTNNLEMISRIYIISYLVYVPVKNNHQYLYYSISLYCRPTHPCAVSASRCPSARAPHS

SEQ ID NO: 221118 - protein, 37 aa, Zea mays
  Clone ID: MRT4577_13324C.1.pep
SSLVPLLYLTPPASISFMSSHPKLMPSPSPYIISSSP

SEQ ID NO: 221119 - protein, 50 aa, Zea mays
  Clone ID: MRT4577_133250C.1.pep
KQLTGQDLFFGLCKSFARNPPFLQLSFLHPKKKLSFFKTPNKKNVLHKKQ

SEQ ID NO: 221120 - protein, 67 aa, Zea mays
  Clone ID: MRT4577_133251C.1.pep
IVRDADHVVLLRSGLMNPWTSETQSGDFFEIILEELDRICCEVMEEVETGHGHLGWDDFYRFDNSSP

SEQ ID NO: 221121 - protein, 75 aa, Zea mays
  Clone ID: MRT4577_133252C.1.pep
MTRGNQRDRDRERAAARKPNAKGSQDGLTPEQRRERDKKALEEKAAKKAQQAAAGGTGTSTDNNNNNKNKAGGKK

SEQ ID NO: 221122 - protein, 62 aa, Zea mays
  unsure (1)..(62): unsure at all Xaa locations
  Clone ID: MRT4577_133253C.1.pep
GRFCKXLRIRFLLIQLIGLIYLFCMVICXXFXLXKVSFDFCVYXSVIGVMHLQXDSCYGVCG

SEQ ID NO: 221123 - protein, 138 aa, Zea mays
  unsure (1)..(138): unsure at all Xaa locations
  Clone ID: MRT4577_133254C.1.pep
MRNEVVPAVPYITTSRLPVRCDGLQQCPRKLSTKKFQEFFSLSGRXXXXXXXXXXXXXXXXXXXXXXXXXXXXXXXXXXXXXXXXXXXXXXXXXXXXXXXXXXXXXXXXXXXXXXXXXXXXXXXXXXXXXXXXXXXXX

SEQ ID NO: 221124 - protein, 40 aa, Zea mays
  Clone ID: MRT4577_133255C.1.pep
QMDLRKSENVWYIEIKERNRDILPLVSYYLSFWIRFESNL

SEQ ID NO: 221125 - protein, 70 aa, Zea mays
  Clone ID: MRT4577_133256C.1.pep
TTKTLKRNRLREYAGGLTHPPTKPTQNFRSIIIQMTPTCTIMSNHPTESSDLFLYICSPEACYTPPSLAG

SEQ ID NO: 221126 - protein, 62 aa, Zea mays
  unsure (1)..(62): unsure at all Xaa locations
  Clone ID: MRT4577_133257C.1.pep
TSTRSESVIIHSLCICQNTIIHQAISSWHASETLKLAHSLPYKHVQTTNNCQLHMXQLLGED

SEQ ID NO: 221127 - protein, 98 aa, Zea mays
  unsure (1)..(98): unsure at all Xaa locations
  Clone ID: MRT4577_133258C.1.pep
MARGLKTWDWEKPGGTQIKWLGRKSPFPKWXNSKKARTNGLSKNLPTLKGKGTPPCTGXLKARGGXVPPRGPVKLAXGLRARSFGFFPXSFLATLAGF

SEQ ID NO: 221128 - protein, 132 aa, Zea mays
  unsure (1)..(132): unsure at all Xaa locations
  Clone ID: MRT4577_133259C.1.pep
FNISXCVGIIVIVGLYFGLYDSIKPVVLTGNLXQDNFFASFALGWLITNGAGLASYPIDTVRRRMMMTSGEAVKYKSSLDAFQQILKKEGPKSLFKGAGANILRAIAGAGVLSGYDQLQILFFGKKYGSGGA

SEQ ID NO: 221129 - protein, 65 aa, Zea mays
  Clone ID: MRT4577_13325C.1.pep
RWQSAEDVGRAAYSRRWAWLASGAAPSCTNTTSMFTWFLTDTYPPLITLMTASPVQPMLFYRRLP

SEQ ID NO: 221130 - protein, 78 aa, Zea mays
  Clone ID: MRT4577_133260C.1.pep
LLLSTNHKNPYEHNHSTFGTLLAFALTACRYSSEYGSLSPLHPSPIEASCPFSIFCQCYLHNRPVFLCICPPLIFNNS

SEQ ID NO: 221131 - protein, 42 aa, Zea mays
  Clone ID: MRT4577_133261C.1.pep
IAVTHRADILDPALIWSRRVARKLAVPHPSGVALARVYGIQS

SEQ ID NO: 221132 - protein, 84 aa, Zea mays
  Clone ID: MRT4577_133262C.1.pep
RGTWDRQPTHTRPTTTTHELDDATPEESIAMGKHVAAAATPIALTTIRQNKLFTHRTRGSEVSPPSRRRSGRRRGGKPAAAPAV

SEQ ID NO: 221133 - protein, 93 aa, Zea mays
  unsure (1)..(93): unsure at all Xaa locations
  Clone ID: MRT4577_133263C.1.pep
HSSALPKLIDALMMPIVRTRDKNHDYHPYIMEVFQSXPPRICLDLNYSTGPYDSFRXAYSADSEESKDQEKKSLMGHTSSRQSDSKLFALKED

SEQ ID NO: 221134 - protein, 225 aa, Zea mays
  unsure (1)..(225): unsure at all Xaa locations
  Clone ID: MRT4577_133264C.1.pep
REDGIAQVLRSRPGVDLVQPREHLCIAITTMLDRVAMSAEDSALAEDLQVEEVLRFSIQSGKACAVCKEGIRSLDASWKPENCDHVICIACFCQYAPETEATGLPRCAVASCDSLCNTETHQGTNVPRCTSISIEDMDRKGKKPLGSSTIQELGQCSRGASTNISSELYCAICMETVHIGESFSRGWDVRTHSASGXVKPVHCXRKGEGECAVLSAGPCPXGARD

SEQ ID NO: 221135 - protein, 139 aa, Zea mays
  Clone ID: MRT4577_133265C.1.pep
VIFYGLCLFQGGHLRPFAGVTPPGPPRLRNTPTARRRPKKTAPNTPAKKKRPTKHAKTRGQKHQSKTKARQVRPRRTPTSRRSRRGGARRGTPPGAPGGSSGAHSGDTPDEDNAGETHAAHRRNEPGGRAADAEGLLGD

SEQ ID NO: 221136 - protein, 86 aa, Zea mays
  Clone ID: MRT4577_133266C.1.pep
LRRLAGARGRCFFFFFGVLFFFFFFFFCLENESRKQPLLWKALQKIYPYMFAHWGRPCFSPRASCIRGGSAWGNVGPQVYRRHFLY

SEQ ID NO: 221137 - protein, 55 aa, Zea mays
  Clone ID: MRT4577_133267C.1.pep
IKRIYNMQVNLKLNGVFPNQVFVNVSSNTENKPTYSTGRLRLSSVTSCQMELSTN

SEQ ID NO: 221138 - protein, 43 aa, Zea mays
  Clone ID: MRT4577_133268C.1.pep
ATPSADAQRTVCPGHIGPIQPVVSSLHWPGFRPRTAGWITSSR

SEQ ID NO: 221139 - protein, 43 aa, Zea mays
  Clone ID: MRT4577_133269C.1.pep
MEQLSAHRWCHAIALKSCLLARDSYGPSHVMQCVAYHNRGTMM

SEQ ID NO: 221140 - protein, 45 aa, Zea mays
  Clone ID: MRT4577_13326C.1.pep
GPSCCHHKTCGRSLLDATSIFKFSQLNCWSFTGSCANRFSHKISF

SEQ ID NO: 221141 - protein, 96 aa, Zea mays
  unsure (1)..(96): unsure at all Xaa locations
  Clone ID: MRT4577_133270C.1.pep
AYTSNKRRDGGRRQTSGLAWRPAAGDKSSRGPLAGTQPGRDDDDTRDCRARYANETPHCAADRGKQAETTAPRNQEAGQPELPXATEATGKKPRGK

SEQ ID NO: 221142 - protein, 58 aa, Zea mays
  Clone ID: MRT4577_133271C.1.pep
LNMDTLPQKCDSRIVRLSTRRYHLQCLHHHPLIKILARGELTYGWGSASGRNNAKSTR

SEQ ID NO: 221143 - protein, 165 aa, Zea mays
  unsure (1)..(165): unsure at all Xaa locations
  Clone ID: MRT4577_133272C.1.pep
GKGSGFSQFVTAFPEKFYFPAKNXEVYQKLXVWGPFGKKSPPRAKDGEVGNNVFYKKLEAEETANPKLAFKPVYVKGDFFDSPFNGTFGRGGPKGRGNPFERPKVNPKTFGEFSRPRQPSRGGGQGSRGGGGSRGSYSGGKGYGNPGRGGPGNFFPPWGNGKNFL

SEQ ID NO: 221144 - protein, 449 aa, Zea mays
  unsure (1)..(449): unsure at all Xaa locations
  Clone ID: MRT4577_133273C.1.pep
MGEGTESGGGATTAPPLRYIRCYKCGFCDVVRSKKCLLRAHVLEHHKDEVDALGGYWEGGDAGPRKEISRACEQCGMSFKKQAHLKQHMQSHSLERPFSCTVDGCPFSYSRKDHLNRHLLTHEGKLFVCPVEGCGRKFNIKGNMQRHXRKSTKMSLLVXKKEFICPKVNCGKAFKYASKLKKHEESHVQLEYTEVMCCEPGCMKFFSNMECLKAHNQSCHQYVQCDICGTKQLKKNFQRHHRMHEGSCVTERVKCHIEDCKCSFSKKSNLDKHVKAVHEQRRPFVCQFSGCGKRFSYKHVRDNHEKSSAHVHTEGDFVEADEQRPRSVGGCKRKPVSVESLMRKRVAAPDDGPAHADATEYLRWLLSKYRSLDLNYKGNMLYWQDLEFLIVQNHSTLHSDLQMHVTKKDNLQMHHEPVAPDARQQLAPVQLAPESLQADQLRRPADRLD

SEQ ID NO: 221145 - protein, 51 aa, Zea mays
  Clone ID: MRT4577_133274C.1.pep
KALVSLMASFFGFGKELKAIEDSLGWFWLKPGSKQKGRRRPGKGQGGCQVG

SEQ ID NO: 221146 - protein, 313 aa, Zea mays
  unsure (1)..(313): unsure at all Xaa locations
  Clone ID: MRT4577_133275C.1.pep
SIGSQRTPKCDKALNGLVSGLGDHPEKLHQACLVHAFLKRPFSCTVDGCPFSYSRKDHLNRHLLTHEGETILCALVEGCGRKFNIKGNMQRHXRKSTKMSLLVXKKEFICPKVNCGKAFKYASKLKKHEESHVQLEYTEVMCCEPGCMKFFSNMECLKAHNQSCHQYVQCDICGTKQLKKNFQRHHRMHEGSCVTERVKCHIEDCKCSFSKKSNLDKHVKAVHEQRRPFVCQFSGCGKRFSYKHVRDNHEKSSAHVHTEGDFVEADEQRPRSVGGCKRKPVSVESLMRKRVAAPDDGPAHADATEYLRWLLSV

SEQ ID NO: 221147 - protein, 90 aa, Zea mays
  Clone ID: MRT4577_133276C.1.pep
LSFVFQSSEYPHLQFIIRILSCHLLRSLTVLQISCSHSSAPCSPSDSTGVVALIGDRMPVTVWRRGGVSSEEREGKPLGESASLPAPARP

SEQ ID NO: 221148 - protein, 54 aa, Zea mays
  Clone ID: MRT4577_133277C.1.pep
RLDPRVHRHLQTLVRLHVFELISGTLIMWSILPFFSYAIVPWNRPLDNLTIHMP

SEQ ID NO: 221149 - protein, 71 aa, Zea mays
  unsure (1)..(71): unsure at all Xaa locations
  Clone ID: MRT4577_133278C.1.pep
DNASVNSCTHVAFSSSSTTSXLSLYDTALNRRELSDLGTKMSHSFFTYTSTRPVSSVTPFQRVVKQVQCEG

SEQ ID NO: 221150 - protein, 181 aa, Zea mays
  Clone ID: MRT4577_133279C.1.pep
HSFPQQAEQGRGQGNQDNQSPAGNGTADSGISVSYDSKKVFIGGLRDNITEKEFRAYFETFGTVTDVVVIYDSATSRSRGFGFVTFDSEEAVGKVMRQSFHDLNGTKVEAKIAIPFGGRDPAAPGYGGFMYQTYNARSGPYNGYMPQPAPTHPYFSAPYFAAGGYPYGSGYPGKASCQHFC

SEQ ID NO: 221151 - protein, 75 aa, Zea mays
  Clone ID: MRT4577_13327C.1.pep
FPHRRRDLTPTPQMGPLFTTDGSIATNFFLTPRQQLLTTGCYAFKAPDLGDDQGSPGTALLPGDDLPAPRPLGCS

SEQ ID NO: 221152 - protein, 155 aa, Zea mays
  unsure (1)..(155): unsure at all Xaa locations
  Clone ID: MRT4577_133280C.1.pep
RGYRDIFPPCLQAPICCCLPPYLSHLPSSMCEKPIVQLYTMQHVIATGILPLSPLLLQQPHVLLQDLPLAHLXAXNIRAQQLQPLVLANLXAAYSQQHQILAFKQVXALNSXAAYMLQQLPFIQIDAGYPQEILSFYPLGALNSAAYLQQLQLLP

SEQ ID NO: 221153 - protein, 374 aa, Zea mays
  Clone ID: MRT4577_133281C.1.pep
MAAAGGEEEAGESRKLFVGGIPAGAQEPELRAHFSRFGEVRSVIVMRDRETGHGRGFGFVEFEDEAAAGTALGDGEKLKHFLCGRMVDVKRARTRAPRNQGEQHSQPQQAEQGRGQGNQDNQSPAGNGTADCGNSVSYDSKKVFIGGLRDNITEKEFRAYFETFGTVTDVVVIYDSATSRSRGFGFVTFDSEEAVGKVMRQSFHDLNGTKVEAKIAIPKDEQYYRNRGGRGARPFGGRDPAAPGYGGFMYQTYNARSGPYNGYMPQPAPTHPYFPAPYFAAGGYPYGSGYPGQGVMPNIPGMGPRRGPPAYGTYPQMYPVYNIIHRAGYGGPATSFQHEINGGGDYKKDQTNVDMQQVDNTASVATKLENMKLG

SEQ ID NO: 221154 - protein, 46 aa, Zea mays
  Clone ID: MRT4577_133282C.1.pep
KKKKKKKKKKKKKKKKKKKKKKKKLKLKKKKKKKKKKSFFPPRAAV

SEQ ID NO: 221155 - protein, 264 aa, Zea mays
  unsure (1)..(264): unsure at all Xaa locations
  Clone ID: MRT4577_133283C.1.pep
MPKITSSPSPTISAMNPLLPSSFPKPPHPPDPNPSSPNPSPCSYLLHADADDEALIQIPGQNPSLVGASAPFALLPSIDPVPHVSSQFYTFSAASYGLMVRCIRAGRSASSDEVRGATSLSVLASWRAVWKDRNEDTAYLTAWKRIQDKLAASADGRHLHFKSNTAQRVSHVGMWRDIVSEAHADPDLLRHLAFRDTVDRIKQSWTVGAKIYGIPESFIRACVAACPXVCKAAPASQPDPATSSPKRXKRRRRFVYTETLDVPA

SEQ ID NO: 221156 - protein, 37 aa, Zea mays
  Clone ID: MRT4577_133284C.1.pep
YVWLARHGYTLVGGSTVISKRYTLFNRQHLNNMYITF

SEQ ID NO: 221157 - protein, 74 aa, Zea mays
  unsure (1)..(74): unsure at all Xaa locations
  Clone ID: MRT4577_133285C.1.pep
YVLGYFRGLSSFCHPILWWCQNNSLSCLGVPNLDFRATVPVLGRKVFPGHLAIHYLPERRLSVGGSLPXXXXXX

SEQ ID NO: 221158 - protein, 50 aa, Zea mays
  Clone ID: MRT4577_133286C.1.pep
TYRISRTSWGHLRSWAKYLPTYRDPDNLISLVHYSYLLLLQILTLPYLSH

SEQ ID NO: 221159 - protein, 90 aa, Zea mays
  Clone ID: MRT4577_133287C.1.pep
LLNSRSSVGCLKASFYSLFSTKSKITFMASIMTTCCSSTAPLEEHDLSSFQVTSYLGHTCSLGELLLKIVITRPVTSSVVVRNYRRRSRC

SEQ ID NO: 221160 - protein, 69 aa, Zea mays
  Clone ID: MRT4577_133288C.1.pep
PNCMCLVCFSPLVALRVGIVGPHSIYGPFLLNPWDGPPHWDLRFLCYSPPVIGVLKDPRTPQRVGLMGN

SEQ ID NO: 221161 - protein, 122 aa, Zea mays
  unsure (1)..(122): unsure at all Xaa locations
  Clone ID: MRT4577_133289C.1.pep
MFFWVCFLNSYMLSYKQRILSSKKMYKKAGDYGQARKLFTQMSERGIPLSTVTFNSLMSFETDYKEVSSIYDQMQRAGLKPDVVSYSLLIKAYGKARREEEXLAVFEEMLDAGVRPTRXSYN

SEQ ID NO: 221162 - protein, 119 aa, Zea mays
  unsure (1)..(119): unsure at all Xaa locations
  Clone ID: MRT4577_13328C.1.pep
IPKMTLTNSMRIIKPMLQRPLRPIRRRLMDMIDNSLIMRLRRIRTHIYMKRTSTRQKLRRRGINLYIPKMIIPSRLELSLVRRRKTRLVDLAMRGQETPKAYGSSALAXGGRHLESPIY

SEQ ID NO: 221163 - protein, 117 aa, Zea mays
  Clone ID: MRT4577_133290C.1.pep
SSLLSKPFSFSFQTLSSPGLFFYTSVHLLLISSRSTCIASFIIAPTSPTFTTFTVLIATTCSVPSLFSLTCSRSLPSSTAISFSFSSPSLSTIFMSIPTSTSSMASSSLCTSSHSPS

SEQ ID NO: 221164 - protein, 85 aa, Zea mays
  Clone ID: MRT4577_133291C.1.pep
KKKKKKKKKKKKKKKKKKKKKKKKKLKKKIKKKKKKKKKKILTLAGTPLRGIFGNFPPPGGGLSFLLGGPIGPLGGGFTIHWPFF

SEQ ID NO: 221165 - protein, 56 aa, Zea mays
  unsure (1)..(56): unsure at all Xaa locations
  Clone ID: MRT4577_133292C.1.pep
SRSRTSPSFTNSQITGEIPGAAPDQHTTXPTGNXGRRAPXPYXXXXSNPSRELMNV

SEQ ID NO: 221166 - protein, 54 aa, Zea mays
  Clone ID: MRT4577_133293C.1.pep
HQPNNNGLPGSGGLLALVALIASASNALIIAQSSLAPRANIPQSLPHNSSMGLE

SEQ ID NO: 221167 - protein, 79 aa, Zea mays
  Clone ID: MRT4577_133294C.1.pep
STAEQGKATLYMSYILDIDLKANTKSDDNYHLYEYTDLYTDVHGLNYYRENNDIDKDVHMIDYKRKTHDMDWIVDMTFE

SEQ ID NO: 221168 - protein, 90 aa, Zea mays
  Clone ID: MRT4577_133295C.1.pep
PPGSRIKVNNIAVRVGRPLLVVRKFSHLAPPSCGGPIFHIWWWALPLFFMGMRSSLRSNFYSALGPLCLYSPGFSWSPCGVFSCSVCVCP

SEQ ID NO: 221169 - protein, 127 aa, Zea mays
  Clone ID: MRT4577_133296C.1.pep
MRPSSSAASQSSPQAATSPRQQAAPSSSPTLSDAAAERADVRAFVSDAGHGHGHGHQQQHHFFMPHPQFLHGFSLLPGNPEAVAGNGNGSSSSASVAASSGDEIALALAAAEEAHAAGCMLPLSVFN

SEQ ID NO: 221170 - protein, 46 aa, Zea mays
  unsure (1)..(46): unsure at all Xaa locations
  Clone ID: MRT4577_133297C.1.pep
LFXCIHMNNIQQPDIAAPGAAAKMFTPGAAISGCXILFMCVHGNIN

SEQ ID NO: 221171 - protein, 164 aa, Zea mays
  unsure (1)..(164): unsure at all Xaa locations
  Clone ID: MRT4577_133298C.1.pep
PLTPTAALVGAKGAARDPWATFCASGEILSAAAAKDVAGSMSQRLREASQQLSQQLKQVSCIELRXFVVFMRIQVSWVYLSGGRLRRSRRVGCPDCGRCCRGRTSPGTACGCCAGEVGCGKQEPQADREGGRHGGREDGSPSPAGGGEEGGRADNGPQILHYKT

SEQ ID NO: 221172 - protein, 47 aa, Zea mays
  Clone ID: MRT4577_133299C.1.pep
FLGIFKSTAGKVLPAENIKPNKPNNERELGSHAECSATGRILTDRLT

SEQ ID NO: 221173 - protein, 50 aa, Zea mays
  Clone ID: MRT4577_13329C.1.pep
GFDAGRLSWVAPGLAQALRCYGSARDVLLGSTIYGLCGRMHDVSKLVIKT

SEQ ID NO: 221174 - protein, 92 aa, Zea mays
  Clone ID: MRT4577_1332C.1.pep
HRHHKLQYFKPLRSHTERREKRNAIKYAHDYMYATYVLYDVGALQMGTARSTHVVTAQCRNTILASMYVHKFATSMTSRRSSISGSLAVVMV

SEQ ID NO: 221175 - protein, 77 aa, Zea mays
  unsure (1)..(77): unsure at all Xaa locations
  Clone ID: MRT4577_133300C.1.pep
HEYMHQGVINEDEDIFTRYDRTLIVADRRRCLSKNSGDRIRPKHVPEVLPVNDLMAPLAVPMPVLXRLDSPMAAPVA

SEQ ID NO: 221176 - protein, 161 aa, Zea mays
  unsure (1)..(161): unsure at all Xaa locations
  Clone ID: MRT4577_133301C.1.pep
DTPSRSCFLPLFSPFQQFFLLLGPRGVPRLPLFSHGPTVRGXNXLFPFSLVKRXTPLAPKGPTASPPVLAGLLIQLARRVFRFSGWQSARRHFCFFVSLFAPSGFPLFAFGSSVVWYCGRVTFSRCHPGPPFFPPALKLLTSGKGGPPGGPRAKFPEKTKQ

SEQ ID NO: 221177 - protein, 92 aa, Zea mays
  unsure (1)..(92): unsure at all Xaa locations
  Clone ID: MRT4577_133302C.1.pep
RGSIPYFAXGLMGVARIMPTSVALDVVAENLNLKFFEEPTGWKFFGNWMDAGMCSICDEESCATGSDHIRENDGMRAWLEWFSIVAFKNKDN

SEQ ID NO: 221178 - protein, 80 aa, Zea mays
  unsure (1)..(80): unsure at all Xaa locations
  Clone ID: MRT4577_133303C.1.pep
PKLGPNWTKAGXKVLGPFLKGGSPDKNKALPKVAKTQPPVANPKGPKKDGPQFPTKILSAPVPCKIPGHRERFFWSPGHD

SEQ ID NO: 221179 - protein, 67 aa, Zea mays
  Clone ID: MRT4577_133304C.1.pep
RLDDVVLERKLGERRGASYRRFDYVIDLRPACGRGWSMVYTVHVCNLSVREHHRGTVALLVGGMDPP

SEQ ID NO: 221180 - protein, 142 aa, Zea mays
  unsure (1)..(142): unsure at all Xaa locations
  Clone ID: MRT4577_133305C.1.pep
MSVTGGAPAIVIDLGTRYCCAREWQHDRGEIXATDQPKSTSTIHGAFTESERXLIGDAANNQLPMXNPINTGFDAKRLIDMTISXATEHSDTKXSTSTAMPGPAEKPLMAVNNEADEKQFAGVDISSMIIIKMLEIGVHYLA

SEQ ID NO: 221181 - protein, 35 aa, Zea mays
  Clone ID: MRT4577_133306C.1.pep
GAIFGMQKELQVLQPAFKKEIDRHLEPVLYMTPLN

SEQ ID NO: 221182 - protein, 93 aa, Zea mays
  unsure (1)..(93): unsure at all Xaa locations
  Clone ID: MRT4577_133307C.1.pep
MGKDGESAKLNEEKKSKDEMHLKVKSKGEASGEEDGKEEEVEVQIEAKFVEKEXVKDTGDGAXKXGTKKKDTQEKDKNKKEGGDDSGKAEEDK

SEQ ID NO: 221183 - protein, 249 aa, Zea mays
  Clone ID: MRT4577_133308C.1.pep
EVIQKKRAEKPEVRDAAREAALREIKERIKKSKDEIHLKVKSKGEASGEEDGKEEEVEVEIEAKFVEKEEVKDTGDGAAGKGTKKKDTKEKDKKKKEGGDDSGKAEEDKKGKAKDSEGKGQVKKEKKDGAGDDGGEEKGKEKKDKKDKGEKNDKEKKEKKKDKGGEKKKDKGAKEKTTDPVKLRAKLEKVDTKLQDLHAKREDILRQLKELELEEEGKGKANEEEPAHVQNLEQGGESVVKEQSHVAAA

SEQ ID NO: 221184 - protein, 224 aa, Zea mays
  Clone ID: MRT4577_133309C.1.pep
MGKDRESAKLKEEKGSKDEIHMKVKSKGEPSGEEDGKEEVEVEIEAKFVEKEEVTGSGDGAGGKGTKKKDTKEKDKKKKEGGDDSGKAEEDNKGKAKDSEGKGQVKKEKKDGAGDDGGEEKGKEKKDKKDKGEKNDKEKKEKKKDKGAKEKTTDPVKLRAKLEKVDTKLQDLHAKREDILRQLKELELEGGGKGKANEEEPAHVQTMEQGGESVVKEQSPLAAA

SEQ ID NO: 221185 - protein, 71 aa, Zea mays
  Clone ID: MRT4577_13330C.1.pep
TYKSPHEQGRRCTHALSKTLSGLTDGPVYPAAAGIAVPMDVERGNDPEDHVRLVPITTTQSIGRVMTNAST

SEQ ID NO: 221186 - protein, 478 aa, Zea mays
  Clone ID: MRT4577_133310C.1.pep
MATAAADGPPVEPQSLKKLSLRSLKRSLDLFAPAHALLFTPDAESKRIRTGCKVSAEYGAVKDLTPEQGRGGQGKGPAPPSSTALALPGTQDTKDAHGEGSRNAIVPAPLMLPKAPESTIPGKNTTLSIPGSSDRFSTSALMERIPSRWPRPTWHAPWKNYRVISGHLGWVRSIAFDPANEWFCTGSADRTIKIWDLASGTLKLTLTGHIEQIRGLAVSQRHTYLFSAGDDKQVKCWDLEQNKVIRSYHGHLSGVYCLALHPTIDILLTGGRDSVCRVWDIRTKAHVSALTGHDNTVCSVFARPTDPQVVTGSHDTTIKFWDLVAGRTMCTLTHHKKSVRAMALHPKEKAFASASADNVKKFNLPKGEFLHNMLSQQKTIINSMAVNEDGVLATGGDNGSLWFWDWKSGHNFQQDQTIVQPGSLESEACIYALSYDVSGSRLVSCEADKTIKMWKEDLTATPETHPINFKPPKDIRRY

SEQ ID NO: 221187 - protein, 232 aa, Zea mays
  Clone ID: MRT4577_133311C.1.pep
MGKDGESAKLKEEKESKEEIHVKVKSKGERSGEEDGKEEVEVEIEAKFVEKEEVKDSGDGAGGKGTKKKDTKKKDKKKKEGGDDSGKAEEDKKDKAKDSEGKDQVKKEKKDGGGDDGGEEKGKEKKDKKDKGEKNDKEKKEKKKDKGGEKKKDKGAKEKTTDPVKLRAKLEKVDTKLQDLHAKREDILRQLKELELEGGGKGKANEEKPAHVQNLEQGGESVVKEQSHVAAA

SEQ ID NO: 221188 - protein, 232 aa, Zea mays
  unsure (1)..(232): unsure at all Xaa locations
  Clone ID: MRT4577_133312C.1.pep
MGKDGESAKLKEEKESKDEIHMKVKSKGEPSGEEDGKEEVEVEIEAKFVEKEEVTGSGDGAGGKGTKKKDTKEKDKKKKEGGDDSGKAEEDNKGKAKDSEGKGQVKKEKKDGAGDDGGXEKGKEKKDKKDKGEKNDKEKKEKKKDKGGEKKKDKGAKEKTTDPVKLRAKLEKVDTKLQDLHAKREDILRQLKELELEQGGKGKAKEEKPAHVQTLEQGGENVVKEQSPVAAA

SEQ ID NO: 221189 - protein, 232 aa, Zea mays
  Clone ID: MRT4577_133313C.1.pep
MGKDGESAKLKEEKKSKEEIHLKVKSKDERSGEEDGKEEVEVEIEAKFVEKEEVKDSGDGAGGKGTKKKDTKEKDKKKKEGGEDSGKAEEDKKDKAKDSEGKGQVKKEKKDGAGDDGGEEKGKEKKDKKDKGEKNDKEKKEKKKDKGGEKKKDKGAKEKTTDPVKLRAKLEKVDTKLQDLHAKREDILRQLKELELEDGGKGKANEEEPAHVQTLEQGGESVVKEQSHVAAA

SEQ ID NO: 221190 - protein, 233 aa, Zea mays
  Clone ID: MRT4577_133314C.1.pep
MGKDGESAKLKEEKKSKDEIHLKVKSKGEASGEEDGKEEEVEVEIEAKFVEKEEVKDTGDGAAGKGTKKKDTKEKDKKKKEGGDDSGKAEEDKKGKAKDSEGKGQVKKEKKDGAGDDGGEEKGKEKKDKKDKGEKNDKEKKEKKKDKGGEKKKDKGAKEKTTDPVKLRAKLEKVDTKLQDLHAKREDILRQLKELELEEGGKGKANEEKPAHVQNLEQGGENVVKEQSHVAAA

SEQ ID NO: 221191 - protein, 153 aa, Zea mays
  Clone ID: MRT4577_133315C.1.pep
KKGEQGSCFKIITCIEKKREYISDPGRLQYISNVAIHMLDEPCTILRGRSTHEVIWVEMLSFVLHLDTYGRESAAGDDRSISAWPTGGGARRRRRRARTSRPKRPAARARCARCTPPSPPASPCIDQICNLLASLEQLMHACTYIYPGPAGLE

SEQ ID NO: 221192 - protein, 65 aa, Zea mays
  Clone ID: MRT4577_133316C.1.pep
ARAVTLACGSVEVHGSLPERCRRDTDVGPLTDSLACSLRERNVLAWHYPDITDAFVSEVGVAAND

SEQ ID NO: 221193 - protein, 90 aa, Zea mays
  Clone ID: MRT4577_133317C.1.pep
FEYFPTKFLFLTLHSHLRLSTNKHTSILQPWVSCGTRALAERGLVAVSLLTNTVFDAHPFASRAVVSLASAKHPPSSYQRFTTSLNTSIS

SEQ ID NO: 221194 - protein, 99 aa, Zea mays
  Clone ID: MRT4577_133318C.1.pep
GGLWPPGPPVLAFFFYPPEKFVFFPPKKGWFGFCCLKKRVACFFFWGFFLFFNLGLFGFTGVSPPFQKKKKKKKKKKKKKKKKKKKKKKKKKKEFFEGG

SEQ ID NO: 221195 - protein, 81 aa, Zea mays
  unsure (1)..(81): unsure at all Xaa locations
  Clone ID: MRT4577_133319C.1.pep
MQRTYHGGGITFTVGSHDGLPASQMPVEAARWFQGSIHADRXYLCVLEDYHXHRSIGHIXILSRDQLYRVDHMQLLHTHLH

SEQ ID NO: 221196 - protein, 110 aa, Zea mays
  Clone ID: MRT4577_13331C.1.pep
RANAKKEEIKSVSIQLATGLWLCCLVELTQHHNFPPTQNNIEDMLVYKVISYTISVRFPASHKHSIYKKYHNDHGRILYYCHDTPYDLAKIRRCNKVTCCLFQFNMNLRM

SEQ ID NO: 221197 - protein, 81 aa, Zea mays
  unsure (1)..(81): unsure at all Xaa locations
  Clone ID: MRT4577_133320C.1.pep
NAVEDWVANPHQDLLGRRHRHAGSSRLRKCGLRYDHRYEPLXFDLDIKEALGGVPKEVVNTRIQGDQRLNNKLMKHQDVPE

SEQ ID NO: 221198 - protein, 47 aa, Zea mays
  Clone ID: MRT4577_133321C.1.pep
CDIHTVLAPEAGSIGDEAFRVITQSGSHGDGSVRGLWESADVTKMLI

SEQ ID NO: 221199 - protein, 54 aa, Zea mays
  Clone ID: MRT4577_133322C.1.pep
ASGLIRQTITCQTISLDYLLCLHVLSILSLLFILAQQCHTFVPLRVRTRLMLNM

SEQ ID NO: 221200 - protein, 137 aa, Zea mays
  Clone ID: MRT4577_133323C.1.pep
MDSTGTGAAGKGKKGAAGRKVGGPRKKSVSRSVKAGLQFPVYLAAVLEYLAAEVLELAGNAARDNKKTRIIPRHVLLAIRNDEELGKLLGGVTIAHGGVLPNINPVLLPKKTAEKASSGGSKEAKSPKKAAKSPKKA

SEQ ID NO: 221201 - protein, 93 aa, Zea mays
  unsure (1)..(93): unsure at all Xaa locations
  Clone ID: MRT4577_133324C.1.pep
VSRSGVRRRDSQFLFLGLDPLSVPRGRAPLQVFPDFLGRFRPRFPGLLGHGLPEVPVGFGPFXELRFPLVPXAHGSWGFPGLREFPFFPQVLG

SEQ ID NO: 221202 - protein, 125 aa, Zea mays
  unsure (1)..(125): unsure at all Xaa locations
  Clone ID: MRT4577_133325C.1.pep
GEEGSGRIGRYLKKGRYAQRVGTGAPVYLAAVLEYLAAEVLELAGNAARDNKKTRIIPRHVLLAIRNDEELGKLLGGVTIAHGGVLPNINPVXLLPKKTAEKASQXGGSTEQKSPQKAAKSPKKA

SEQ ID NO: 221203 - protein, 140 aa, Zea mays
  Clone ID: MRT4577_133326C.1.pep
LYQVWRNESCTVTLRLPAGGQRRVAENEIVVLKYCPGRQPSWDVVKDLGGYSLFVGTNNAVSMYAEGVPGLRGNCVYWIGGRATRNKGMVFDMKSGRSTPCRAPQAGSLSGGHDYSTVCWYFMSDVINNSYNGRRQNVEE

SEQ ID NO: 221204 - protein, 87 aa, Zea mays
  Clone ID: MRT4577_133327C.1.pep
YHINMLVWQVNSRELSHARDRTRGGGGAAKSVPTCLLVPFYSQQFLQARFSPGLPTEALAPSHSPVCGRTRGRGVTVGPPPMHGQDL

SEQ ID NO: 221205 - protein, 59 aa, Zea mays
  Clone ID: MRT4577_133329C.1.pep
AHAFVHAFGLSLYRQFQALAGSRSQNHLGSLNKKLTKWWSPPFFFPVLVEYHILIWALN

SEQ ID NO: 221206 - protein, 86 aa, Zea mays
  Clone ID: MRT4577_13332C.1.pep
KKRDAKVLVRSIVLLYPNASAWHRLGGAAVYISSFLFPPPFFSSRHGTFFLVCRFCRRSICTHLHLLIVLRSILSMYSLVNWLHWT

SEQ ID NO: 221207 - protein, 191 aa, Zea mays
  Clone ID: MRT4577_133330C.1.pep
MDSTGTGAGGKGKKGAAGRKVGGPRKKSVSRSVKAGLQFPVGRIGRYLKKGRYAQRVGTGAPVYLAAVLEYLAAEVLQFEPSSLFVLIWRRSINSCVPIRFASLFDQVLELAGNAARDNKKTRIIPRHVLLAIRNDEELGKLLGGVTIAHGGVLPNINPVLLPKKTAEKASSVGSKEAKSPKKAAKSPKKA

SEQ ID NO: 221208 - protein, 105 aa, Zea mays
  unsure (1)..(105): unsure at all Xaa locations
  Clone ID: MRT4577_133331C.1.pep
LQRRRRXLQLAALRTAVLPRSDPSKAPFSLSGSLPAWCRLRLTASVFLWRHRQAQGLGWVGETXXAFKTPKGXKRCILLCXVVLYFHLICSGKCGLRVHCWLLQY

SEQ ID NO: 221209 - protein, 75 aa, Zea mays
  unsure (1)..(75): unsure at all Xaa locations
  Clone ID: MRT4577_133335C.1.pep
MFGFGHHGHHGXEXPPVHGGLHQPIFNIVCNADEGYCFNVRDGNVVLAPADPRDXHQPWDNAMRFSTHVMVQEGR

SEQ ID NO: 221210 - protein, 48 aa, Zea mays
  Clone ID: MRT4577_133336C.1.pep
VPDSRGGFPFLCPFIVSAEWWQGTITLMVIFGTAVDCPIYVVELYYKL

SEQ ID NO: 221211 - protein, 71 aa, Zea mays
  unsure (1)..(71): unsure at all Xaa locations
  Clone ID: MRT4577_133337C.1.pep
TSPKLVRARGLLLPTRPHHSAGFASNQWSYAPIWGPAGVGLVGTCXTXPRTVPSAFCKPXXVCKXLQTVQL

SEQ ID NO: 221212 - protein, 156 aa, Zea mays
  unsure (1)..(156): unsure at all Xaa locations
  Clone ID: MRT4577_133338C.1.pep
GNKPHDLASLKGKLDPEAKENLGMALGYPLGSLTQEGLSEXYGQNCFDEGPXKKPNPKKEVLFHKGNPVPAKTFLPXKNHLELKLPFHLLNLFPNPLLTSSKEKNLPDRKIFKVERLPWKGPTPVPDENNNKEEDIDSINNFENNKKAFLDLNLLH

SEQ ID NO: 221213 - protein, 85 aa, Zea mays
  Clone ID: MRT4577_133339C.1.pep
TTHSYTGYLRLLDASHRGRLLSRAGALNIVPTSTGAAKAVALVLPHLKVKLNCIVLRVPTANVSEVDLVIYTVKTGMTVKDVNAV

SEQ ID NO: 221214 - protein, 191 aa, Zea mays
  unsure (1)..(191): unsure at all Xaa locations
  Clone ID: MRT4577_13333C.1.pep
PPKPPXGKKNGPINGGGNPQTPPPKGDPTGNKHWGQQHSXNNMGGPKRPKKKKKGPGEPFKGPEDPQXGPGKPPGXPGGGPWGKGKTPSGRGPVHLKKRPHKGEKHPGPRGQSPLGKRPRAGTPLGGNXPPHGGPEQGDPTWDPXAGGNKGQSGPRGEMGTPSQFPQTNKPGTKKGKPGGPKGGAHPHKWG

SEQ ID NO: 221215 - protein, 104 aa, Zea mays
  Clone ID: MRT4577_133340C.1.pep
PKTEYGFCPSGGRTLFSLQEISAEIKKKTFFLPGVLIAFMGCIVNGPGKMAYSDFGYVGGAPGKIDLFFGKTVFQGALPMEGATDAFIQLIKGHGRWGGPPPQE

SEQ ID NO: 221216 - protein, 83 aa, Zea mays
  Clone ID: MRT4577_133341C.1.pep
GLEFLKQAPGRSFQPTQHGSQFLVDRLGARQSQPAFPCYVLGGSRVPPLVLEWRVGPPQSAKCGVKPWPAKVKCFLLGRSLNF

SEQ ID NO: 221217 - protein, 27 aa, Zea mays
  Clone ID: MRT4577_133342C.1.pep
LCMCIRGSKGPTGRLVHWCEFSRKINL

SEQ ID NO: 221218 - protein, 89 aa, Zea mays
  Clone ID: MRT4577_133343C.1.pep
NSARGKRRTTTLLRSLLSLFYQTAPRLILRGLHDPQLNEIRPANSIFPDHQIACMKTIRGIGRASSSTQLSLAPAMFMPVQTLDHERQA

SEQ ID NO: 221219 - protein, 121 aa, Zea mays
  unsure (1)..(121): unsure at all Xaa locations
  Clone ID: MRT4577_133344C.1.pep
WRFFDAVKIGLRTELCRFSGRKIYPGKGMRSIPAERQVCLLDNXKWKRYFHKRLKPAGVNWTAMYRNAFRKDIHAEAVNKRRRATRXAYSRYIEGASLEVIHMKRGANLEVRDGGREAAFR

SEQ ID NO: 221220 - protein, 73 aa, Zea mays
  Clone ID: MRT4577_133345C.1.pep
SACVHPQSGVGSMSSFSGSQDKCAELDNTVHFVHLPHGRRQSKYHMIMLQAASQLHRDASRLCSLLFAWTRVV

SEQ ID NO: 221221 - protein, 26 aa, Zea mays
  Clone ID: MRT4577_133346C.1.pep
NQADCDSMSRSSLRATTGLTVAAVLN

SEQ ID NO: 221222 - protein, 70 aa, Zea mays
  unsure (1)..(70): unsure at all Xaa locations
  Clone ID: MRT4577_133347C.1.pep
MADGEDIQPLVCHNGTXGMVKAGFGGDDAPRAVLPNIDGRARHTGVEVRMGHKDAYVXDEAQSTRGVLTL

SEQ ID NO: 221223 - protein, 73 aa, Zea mays
  Clone ID: MRT4577_133348C.1.pep
KLDGPVSIKNQTPVRYFPPPNKDAQFPPNLFFFLFKKKSFPPPQRLGIQSNPPPCKCINPPVSEKALAWKKFK

SEQ ID NO: 221224 - protein, 93 aa, Zea mays
  Clone ID: MRT4577_133349C.1.pep
DRYMVGTRWDRIGEAPQSASQTTRARAPSWMGLGPHQERPASVVGLNAALIPGHDPAVAADGVVLRVVAGRHIPIRVIHLVRRWLGGLDPRQE

SEQ ID NO: 221225 - protein, 69 aa, Zea mays
  Clone ID: MRT4577_13334C.1.pep
PTRPPTRTPTLGLTRGSSHRLSVIDGCASIRRNHMNICAITETLQATLHENTPYILKTPTAKSVCTLPI

SEQ ID NO: 221226 - protein, 138 aa, Zea mays
  unsure (1)..(138): unsure at all Xaa locations
  Clone ID: MRT4577_133350C.1.pep
RKPAAALPPCRRVVVPPPDTKPGASLPNPPIMKPVASPPGKNPAAPPPDTKPLATPPXEXKPVAPPPETMPLNPAPEIGPRPVTSGASPPGPKPGPMGTGLGWRPGAGGPPGPIPAPAGEPEVQELLLRRARLRRPPD

SEQ ID NO: 221227 - protein, 580 aa, Zea mays
  Clone ID: MRT4577_133351C.1.pep
MTEEAEAKAKGNAAFAAGRFEEAVQHFSDAIALAPDNHVLYSNRSAAYASLWRYAEALDDAKRTVALKPDWAKGYSRLGAAHLGLGDAPKAVEAYEKGLALEPSNEALKSGLAQARQSASAPRRPVGSGADAVGKMFQGPELWSKVAADPTTRGYLDQPDFVQMLREVQRNPGRLNSYLSDQRMVQVLTLMLNIKFQNQSSGAPDPAAAQSNPPPPKQQPEAKAREPEPDPEPEPMEVTEEDKEQKERKASAQKEKEAGNAAYKRKDFDTAIQHYTEAMELDDEDISYITNRAAVYLEMGKYDECIKDCDKAVERGRELHADFKMISRALTRKGTALAKLAKSSQDYDAAIEIFQKALTEHRNPDTLKKLNDAERAKKELEQQEYYDPRIADEEREKGNEFFKQQKYPEAVKHYTEALRRNPKDPRVYSNRAACYTKLGALPEGLKDAEKCIELDPTFSKGYTRKGAIQFFMKEYDKALETYQAGLKHDPKNQELLDGVRRCVEQINKASRGELSEEELKERQNKAMQDPEIQNILTDPIMQQVLTDLQENPRAAQAHLKNPGVMQKIQKLVSAGIVQMK

SEQ ID NO: 221228 - protein, 58 aa, Zea mays
  Clone ID: MRT4577_133352C.1.pep
GGTSPKFIYLQQNKKKKLVNLRGSGRVTLKPPFNPGGAKFPGDLKGTSLLRLQLQVTH

SEQ ID NO: 221229 - protein, 124 aa, Zea mays
  Clone ID: MRT4577_133353C.1.pep
RLERRQLVLVLFGNHPRQHGITPSCLRKHKTDASARVWQSHAAVLLICSSRPADVSRSIVMTGVQWRCRAEIAPLSPLARLVSCAHQSQMSREASPYWSPYTATHFFICRLSKNDPAGGPIYEA

SEQ ID NO: 221230 - protein, 41 aa, Zea mays
  Clone ID: MRT4577_133354C.1.pep
PHHHHHHHHHHHHHHHHHHHHAQYRCRCPRRRTHWAPASSL

SEQ ID NO: 221231 - protein, 66 aa, Zea mays
  Clone ID: MRT4577_133355C.1.pep
VGLGWGLAGVLQLVGSGFFIAPDLLRFPLAGLKFDVFCEGGGGLKKNQKVLKKPPQKKKKKRAAIY

SEQ ID NO: 221232 - protein, 109 aa, Zea mays
  Clone ID: MRT4577_133356C.1.pep
RQLIVLICIIHTGFKWSFMIQLHGLGNNSDQRACALPKGGRRERKRAQELCVKSKRYCCDLLPAVSCFFVTRVLGLMTCGEESGDQKADMSSRSSSMGSVCRAMATDRL

SEQ ID NO: 221233 - protein, 445 aa, Zea mays
  unsure (1)..(445): unsure at all Xaa locations
  Clone ID: MRT4577_133357C.1.pep
HWVPPSRPGQSRIASLGPSIWRGPVWRLAGTGLPSRSIDVRRGRCSGTPVGWTGGATMGALSRPEEVLALVKLRVAAGQIKRQIPPEEHWAFAYSMLQKVSRSFALVIQQLGPELRNAVCIFYLVLRALDTVEDDTSIPTEVKVPILQEFYRHVYXRDWHYSCGTNHYKVLMDKFHLVSTAFLELGQGYQKAIEEITRRMGAGMAKFICKEVETVDDYDEYCHYVAGLVGYGLSRLFYAAGTEDLAPDSLSXFMGLFLQKTNIIRDYLEDINEIAQPRMLWPREICSKYADQLEDFQYVRTYLXAVLCLNDIATNALIHAEECLQYMSGLKNHAIFRFCAIPQIMSIATCALCYNNVXVFTGVXVKMRRALTARIIDETNSMSDVYTAFYEFSSLIETKIDDDDPDAALTXRHVNSIKQTCKSSGLVKRRGHHFGHITLQAYAGE

SEQ ID NO: 221234 - protein, 403 aa, Zea mays
  Clone ID: MRT4577_133358C.1.pep
MGALSRPEEVLALVKLRVAAGQIKRQIPPEEHWAFAYSMLQKVSRSFALVIQQLGPELRNAVCIFYLVLRALDTVEDDTSIPTEVKVPILQEFYRHVYNRDWHYSCGTNHYKVLMDKFHLVSTAFLELGQGYQKAIEEITRRMGAGMAKFICKEVETVDDYDEYCHYVAGLVGYGLSRLFYAAGTEDLAPDSLSNSMGLFLQKTNIIRDYLEDINEIPKSRMFWPREIWSKYADKLEDFKYEENSKKAVQCLNNIVTDALIHAEECLQYMSALKNHAIFRFCAIPQIMAIGTCALCYNNVHVFRGVVKMRRGLTARIIDETNSMSDVYTAFYEFSSLIESKIDDNDPNAALTRRHVNSIKQTCKSSGLVKRRGYHLDTSPYRPMLIMIVLLLVAILFGALYTK

SEQ ID NO: 221235 - protein, 103 aa, Zea mays
  Clone ID: MRT4577_133359C.1.pep
PGLTLTPSHTHCTKRLSNMRVGSNDVGRTRGVRVPNAGVFDPHGTSGGGASRPAAPGAAHLLVRRRVLQQEDEHRRALGYRTVDRTTRWTSTRQTRRATTCTT

SEQ ID NO: 221236 - protein, 74 aa, Zea mays
  Clone ID: MRT4577_13335C.1.pep
SIFVKEPKYPPKLWYTNKKKVLAWQKKQKQLAHENCEFYTLFWGSPRFLNMAPPGWGKKGVFSLYKNKGGGGGG

SEQ ID NO: 221237 - protein, 91 aa, Zea mays
  Clone ID: MRT4577_133360C.1.pep
GLLLICLPHKKEMQSVNRKSVKSETAERLFFSDTRNGILCFMYNPFPTGNVFSFLSYLSLSCCLFYGITCTTKPWEGETYNEKKIIPFFFV

SEQ ID NO: 221238 - protein, 81 aa, Zea mays
  unsure (1)..(81): unsure at all Xaa locations
  Clone ID: MRT4577_133361C.1.pep
ERIAYQRNDDDEEEAARERRRRARQERLRQKXEEESLGQVTDQVEVNAQNSVPDEEAKTTTSNTQVEGDDEAAFLERLARR

SEQ ID NO: 221239 - protein, 103 aa, Zea mays
  Clone ID: MRT4577_133362C.1.pep
VKTDRPEVFYLKDRGNCHSWKSIKYARSSVTMNDNITKLELPQTWPQSSWKGSLRASPRSNWSQRCCAVSLCTVCIIRSHWAYVNACTRLGGLFLYQKPPSRC

SEQ ID NO: 221240 - protein, 95 aa, Zea mays
  Clone ID: MRT4577_133363C.1.pep
VCITSGAAWSVLSLEGHPVGSLGLLLPAAPHLLGVSRHGVTGAVVRWVFLPMQHKRNDSRFTSLEQFPVKIGNVSFCPKPVLALYDMLQAYWCTL

SEQ ID NO: 221241 - protein, 88 aa, Zea mays
  unsure (1)..(88): unsure at all Xaa locations
  Clone ID: MRT4577_133364C.1.pep
IVHIAVVAGTFNGSTGGVNWPSLYTHAYVHSEVHTSIILHTLPLTFVLRSNLSFVHCHASSSVCNPDXITKLFPNLFCQPSSSLLPSG

SEQ ID NO: 221242 - protein, 37 aa, Zea mays
  Clone ID: MRT4577_133365C.1.pep
SSLIGRAMHNTIHIGSEHGLLHRMILMDKPEDDHQRD

SEQ ID NO: 221243 - protein, 104 aa, Zea mays
  Clone ID: MRT4577_133366C.1.pep
VMRLLFDLLCYLATTCRLALRLGLLKSRNETMARSGSMLFWMLVLQLVMQLVMQTATQTAAAADQPGDQRRVVRQVMWHYTCHYSNSNRLTCSIYCWTCCNTCC

SEQ ID NO: 221244 - protein, 106 aa, Zea mays
  unsure (1)..(106): unsure at all Xaa locations
  Clone ID: MRT4577_133367C.1.pep
RXHXYIXXXFGXXFXIXXCRRLXXSXTXXLIXXXYXXXYXLSLXSXVLXLXVIMXIXXSCVKLLSAHNSTQHNXXKKKHQTXXLQHXIXXXNIXLXPFFXXXXXXX

SEQ ID NO: 221245 - protein, 44 aa, Zea mays
  Clone ID: MRT4577_133368C.1.pep
CALSGLRRVCYVLCVFCVANAVWFPKGSPAGVCSQGCGYKGSEE

SEQ ID NO: 221246 - protein, 40 aa, Zea mays
  Clone ID: MRT4577_133369C.1.pep
MAALSVSAPAAASTSSFWGNRLATYSAPQPGGWIGVCGQR

SEQ ID NO: 221247 - protein, 44 aa, Zea mays
  unsure (1)..(44): unsure at all Xaa locations
  Clone ID: MRT4577_13336C.1.pep
XVQXQPAXLLPQIRHEHLVGVSDTRCGRXRAGPRRRXGXRCRCR

SEQ ID NO: 221248 - protein, 116 aa, Zea mays
  unsure (1)..(116): unsure at all Xaa locations
  Clone ID: MRT4577_133370C.1.pep
RKAKKEAQIPKPERKRPPKKPEKPKRKKTGKQGQSIQTKEGLDXLGPQYRLFKKLQRGDLDXKEFEKLPGFGDFYGEASHGDGSNLGERKKGPKGQKKPQQRGKXAKVGXKFEGRS

SEQ ID NO: 221249 - protein, 134 aa, Zea mays
  Clone ID: MRT4577_133371C.1.pep
LSHYVPMASCAALVTGCILVACPPCVNRVRRKIQGSMFLQSQHNRVRPHFLGSHISQWFGCAPVGGHLTVAHAQGRSCLFRFAPKMTIQGLLLVLQGSRKACFDGFHDSTVISSSIVQSREILVSKNTRQLLIC

SEQ ID NO: 221250 - protein, 77 aa, Zea mays
  Clone ID: MRT4577_133372C.1.pep
QDLSSSGSDTVYRQCFGVLSVRSALMMPSISIFSALHMPVCSSYYDECRHRDSERAAWHLTSSQQPSWRNTGTPARP

SEQ ID NO: 221251 - protein, 92 aa, Zea mays
  Clone ID: MRT4577_133373C.1.pep
MASFNQESRAGTQREEAPLQGKYGGISPKKALINKDHERAYFDSADWVLGKQQGVSSNSPTTVPAAEPLKPKLQRTAYHQLPPRRPAYTSSE

SEQ ID NO: 221252 - protein, 111 aa, Zea mays
  Clone ID: MRT4577_133374C.1.pep
LKPQSIIHAPTNYTSKVMKVISVGVLMDYLHLWNLLSEFVLHPNVEDNHIFSIAANGVYSAKAAYEGLFTGSVSFGHYEKIWGTWAPSKCHFFLWLAALNRCWTANRLAKR

SEQ ID NO: 221253 - protein, 59 aa, Zea mays
  Clone ID: MRT4577_133375C.1.pep
EIELTGEGNSRFTYSTLVDGCTSHTGTWGKTVIEYRTTKTSRLPIIDVAPVDIGAPDQE

SEQ ID NO: 221254 - protein, 38 aa, Zea mays
  Clone ID: MRT4577_133376C.1.pep
LFWLPPLPIFYFFWAPFSSRPCCRPSCLNFPRSWVACF

SEQ ID NO: 221255 - protein, 37 aa, Zea mays
  Clone ID: MRT4577_133377C.1.pep
SAHVCPRTPWAKVSASSGERAYKGRQILIRQGQPTVK

SEQ ID NO: 221256 - protein, 95 aa, Zea mays
  Clone ID: MRT4577_133378C.1.pep
RFLFLHVSPALGLPNWGGSQLPQKPVPLLRFLSYTTGQDILPFLHLYLLNGASILFIFSHLIGTFTLLHSLNPLLNTHPFPFFFTCPSNYVFIIF

SEQ ID NO: 221257 - protein, 94 aa, Zea mays
  Clone ID: MRT4577_133379C.1.pep
IRYPRATNDQFVLYTPDHSRAVKTRPEKERKWLHARNLGYLKPLAGPTTPCKGTVGEKKKCSLAMCQSCLVLENPYLDCLLDNAQPLYLQLKMG

SEQ ID NO: 221258 - protein, 90 aa, Zea mays
  unsure (1)..(90): unsure at all Xaa locations
  Clone ID: MRT4577_13337C.1.pep
FGSRLVVDCFFSTTGAYTCRXEXGHTERTGAYHILVIDEHEHELCEHVLGSSPDKGGAHAQADRERAPVLLTSNNGVASNGGMANAMGFH

SEQ ID NO: 221259 - protein, 185 aa, Zea mays
  Clone ID: MRT4577_133380C.1.pep
WRSPAPLWRYADIDYRGVQSFSASHQCHSGSCLLRRGKVTCAAATVSSSSSTVCPTSRRSRYNGGRCPDPTGHGLGHLWEFDLTRAARGEPPSIELGGVASSGLGCPGLSTARVRAVELSVAQSRGGETANGGRRRASPCLQRRRERLGASNHRASLGRRRVQSITDTSDSDAFPCSPAGLEVPN

SEQ ID NO: 221260 - protein, 514 aa, Zea mays
  Clone ID: MRT4577_133381C.1.pep
MDALPEAWSQVRAPVIVPLLRLAVAVCLTMSVLLFLERVYMAVVISGVRLLRLRPDRRYRCDPLPEDDPELGSSAFPVVLVQIPMFNEREVYQLSIGAVCGLSWPADRLVVQVLDDSTDEVIKEMVRMECERWARKGINITYQIREDRKGYKAGALRAGMRHAYVRDCEYVAIFDADFQPDPDYLKRTIPYLVHNPEIALVQARWRFVNADECLMTRMQEMSLDYHFTVEQEVSSSVCAFFGFNGTAGVWRISAVNEAGGWKDRTTVEDMDLAIRASLKGWKFVYLGDVQVKSELPSTFKAFRFQQHRWSCGPANLFRKMLMEIVTNKKVTIWKKIHVIYNFFLIRKIIAHIITFSFYCVIIPATIFVPEVRIPKWGCVYIPSAITLLNSVGTPRSFHLLFFWVAFENVMSLHRTKATLIGLLEAGRANEWVVTAKLGSAMKMKSANKAGLRKQFMRIWERLHVTELGVAAFLFSCGWYDLAYGRDHFFIYLFFQSVAFFIVGVGYVGTIVPQS

SEQ ID NO: 221261 - protein, 56 aa, Zea mays
  unsure (1)..(56): unsure at all Xaa locations
  Clone ID: MRT4577_133382C.1.pep
LRGGEKHFVLVHGLCLGAGGGGKVAXXLESAGHRVTALDLAAXGALPVRLLVVLFV

SEQ ID NO: 221262 - protein, 104 aa, Zea mays
  unsure (1)..(104): unsure at all Xaa locations
  Clone ID: MRT4577_133383C.1.pep
TVGMAPRKQLATKAVRKSAPATGGMNNPXSVGPGTVALLEIRKYQKITELLIRKLPFQRLVREIAQDFKTVLRFQSSAVAALQEADEAYLEGLFEDTNLCAIHA

SEQ ID NO: 221263 - protein, 78 aa, Zea mays
  unsure (1)..(78): unsure at all Xaa locations
  Clone ID: MRT4577_133384C.1.pep
EVSMNGMQVALFQRSHVIWQHQHKGSTLFSLGMVVYVPVARKFRXVCAVTGYRVSWLNIRWFCPCSNKKGPMAQVYSS

SEQ ID NO: 221264 - protein, 91 aa, Zea mays
  Clone ID: MRT4577_133385C.1.pep
PFCNFAEHPICPRGGFKKRWRGYPRNTHNGGRLMRRQQPESPSRDQTPPNGETATRTKGKGRYIQAWARAQPARSARTAKGPAEDGAGEPG

SEQ ID NO: 221265 - protein, 73 aa, Zea mays
  unsure (1)..(73): unsure at all Xaa locations
  Clone ID: MRT4577_133386C.1.pep
QMFSLSAIPAHHSSPKHISVNPQVSKESARSALDCGGREPLRQSGMPAVSRGIYRVSGQYXEEFARLCPLFGR

SEQ ID NO: 221266 - protein, 49 aa, Zea mays
  Clone ID: MRT4577_133387C.1.pep
MWYGRLKKKKKKKKKKKKKKKRKTNKKKKRIANRESPAMVHLNFLAKLS

SEQ ID NO: 221267 - protein, 377 aa, Zea mays
  Clone ID: MRT4577_133388C.1.pep
MAIRRGPSRAVLALLALASVAAVSADVFFQEKFEDGWESRWVKSEWKKDENMAGEWNHTSGKWHGDAEDKGIQTSEDYRFYAISAEYPEFSNKDKTLVLQFTVKHEQKLDCGGGYVKLLGGDVDQKKFGGDTPYSIMFGPDICGYSTKKVHTILTKDGKNHLIKKDVPCETDQLSHVYTLIIRPDATYSILIDNEEKQTGSIYEHWDILPPKQIKDPEAKKPEDWDDKEYIPDPEDKKPEGYDDIPKEIADPDAKKPEDWDDEEDGEWTAPTIPNPEYKGPWKQKKIKNPNYQGKWKAPMIDNPDFKDDPYIYAFDSLKYIGIELWQVKSGTLFDNIIITDEPALAKTFAEETWGKHKEAEKTAFDEAEKKKKKKKG

SEQ ID NO: 221268 - protein, 84 aa, Zea mays
  Clone ID: MRT4577_133389C.1.pep
LVRSTSKCAWGRVSVIILFDIELAELALTTTALFLLLYNTSAREPRRSVFLRSESDNITAFRPRSSLISLIIFLLTWTSATTED

SEQ ID NO: 221269 - protein, 211 aa, Zea mays
  unsure (1)..(211): unsure at all Xaa locations
  Clone ID: MRT4577_13338C.1.pep
TFIQEVNYLASLCHWNLVKLLGYCQEDGMQMLVYEYISNGSVSTHLHGNSHALGSRLEFKKRLSIAHGTAKGLSHLHSLTPPAVHMNFKTSNVLVDEDFAPKVADTGIPGMLDRLGVTGLSSRTFNDPFVEPRMKEAMNLNFSIQSDVYSFGVFLLELISGRKAVSDQCIIQWAQSFQESSDISVIADSRNGRGFTSXSMKELLSLTXTCV

SEQ ID NO: 221270 - protein, 94 aa, Zea mays
  Clone ID: MRT4577_133390C.1.pep
RVSTHASGFAANKKKKKKKKKKKKKKKKKKKKKKKKKKKKKKKKKKKKKKKKKKKKKKKKKGGGPPRGPGFMSPPGGFKPPPRGPPSSFPGAVF

SEQ ID NO: 221271 - protein, 167 aa, Zea mays
  Clone ID: MRT4577_133391C.1.pep
GGAPITPQLKKFEKGFDFFGVTPGRWVDFLEREKVSLQPIKTLALEEEKKRFEMGFKPQVKKIVEQRDMPFPGARKTRLFRGTFPKKTQKRASVFRENNLFRGGEKVGPRTVLIAHPVDFGPGAKKKTPLGDLFLAQRDTGKQTFPLVFGKTKRGVDSLKTWLGKKG

SEQ ID NO: 221272 - protein, 56 aa, Zea mays
  Clone ID: MRT4577_133392C.1.pep
EYALSGNSLMSNTTTGRKLQAFNIITSKINPNISQPHSAQKTKFIRPIATKGSNET

SEQ ID NO: 221273 - protein, 37 aa, Zea mays
  Clone ID: MRT4577_133393C.1.pep
LWINILVNTVCRLVHILIRETECFQPYTMKNIESKHF

SEQ ID NO: 221274 - protein, 93 aa, Zea mays
  unsure (1)..(93): unsure at all Xaa locations
  Clone ID: MRT4577_133394C.1.pep
MDFFWVGRKDFGLLXPVKRVFRGSIQSFGHDVVGLIFKGWADPYVTGLNEGFLRGKYLGRNFVAFFVGFTNDIRKLFFFIGGGKRKFMVGARL

SEQ ID NO: 221275 - protein, 90 aa, Zea mays
  Clone ID: MRT4577_133395C.1.pep
GCGRGHIRTYRNAGFDGCTKVKTCSSPLYGCCYNEELVRDSCSPVYGRYQIPEARPEGLDDCVTEAFWFHPNTFVSADAQLVNFPNGRDA

SEQ ID NO: 221276 - protein, 130 aa, Zea mays
  Clone ID: MRT4577_133396C.1.pep
ERPPGQVKKKKKKKKKKKKKKKKKKKKKKKTKKKKKKKKKKRLVPGAGTPLGGIFANFLHLGGRWTLLLGGPFRPLGGGFKFNGPGFNNVGRGKTRGFPNLMAWGKIPFSPVGVLAKGPAPFAFPNICPP

SEQ ID NO: 221277 - protein, 45 aa, Zea mays
  Clone ID: MRT4577_133397C.1.pep
PLTTTTSTFFNHPKTPKGRPPCNSFRIPRYHALTITASRAPSPET

SEQ ID NO: 221278 - protein, 76 aa, Zea mays
  unsure (1)..(76): unsure at all Xaa locations
  Clone ID: MRT4577_133398C.1.pep
KIVMDTCRNIGFVSYDAGIDAYHCKVLVNIDQQSPDIAQGVHGHFTKRPEEIGAGDQGHMFGYATYXTPELMPLSH

SEQ ID NO: 221279 - protein, 221 aa, Zea mays
  Clone ID: MRT4577_133399C.1.pep
MRGRMDLLPRLLLRRHVHRRAKPASPSPPPLPPNPPRPPQKPEPVSIHGETWHDSYAWMGALSDAAAMRHMDLHMEAEEKYAEACLAACGADRLARKLQLEMASCLASDSCTPPVRWGPWLYYRRADEGKQYPVLCRRSAALHSEFVSYSDPSAGFDFTAGKRIEQKLVDYNKEAERFGGYSYEELSEVSPDHRFIAYTMYDKDKDSFTLMVRDLVTGTLH

SEQ ID NO: 221280 - protein, 371 aa, Zea mays
  unsure (1)..(371): unsure at all Xaa locations
  Clone ID: MRT4577_13339C.1.pep
MSSRAGGGKPLWSASTIVAKVASGYHILRIDGYSRTMETPTGESIASLPFSVGGRCWRIRYYPNGDKLENKEYISXILISTTEAXRAEKAQLMFRFVGDVAEQPLILGGLHTFEKQGWGYGKFIKRKDLEESKHLVDDSFSIRCDVAVRFNDVRVEKAPEAAAAAAMISVQPSDLHQHLGSLLLTQKGADVVFDVAGETFAAHRCVLAARSPVFTAELFGAMKEGHTGGVVRIEDMEPRAFKALLYFLYTDLLFPKTMATTMNQSEDGDVGGDDEDVLCQHLLVAADRYNLERLKSLCEKKLSECIHVGTVAIILTLAEQHRCPGLKKVCLHFLRSPANLRAVASSDAFKHLSSSCPSVMVELVAMLGNSA

SEQ ID NO: 221281 - protein, 99 aa, Zea mays
  unsure (1)..(99): unsure at all Xaa locations
  Clone ID: MRT4577_1333C.1.pep
ETRVVPACGHXSSLAGSVGCSHASTQPTSHRAPTKSPGILVLGRWRRLSPRRARPGPSRRTAAYALRRAGAGAPRRRLRDKHPSFQRRTTSWATPFSPV

SEQ ID NO: 221282 - protein, 66 aa, Zea mays
  Clone ID: MRT4577_133400C.1.pep
GKILHVVAMVTFPVPWRRPPGNHVDPIAGIGGERRRWSPPRGFASLHDRHSLTGDGSWALRASPAG

SEQ ID NO: 221283 - protein, 125 aa, Zea mays
  Clone ID: MRT4577_133401C.1.pep
SHNILLRPPTTSTTRRLTTPGMLRNRMCLTLTNRRLIRLRSIKIAGRTRSKSLTLSLISRTSTRRLLLISSLSNRTLTKHRIPTIMRLNRNTLPRHTPRLMPIRRSNQLLKHINKHINQPKGSKP

SEQ ID NO: 221284 - protein, 50 aa, Zea mays
  Clone ID: MRT4577_133402C.1.pep
TTTLQVGYVTTICFSCFLIRCVMMCLNSFDKEADLDVLNHPILNFLYYLV

SEQ ID NO: 221285 - protein, 257 aa, Zea mays
  Clone ID: MRT4577_133403C.1.pep
GRLRYRSGIPGSTTCPVFVHQTAIKKNNPRKYLRSVGDGETVEFDVVEGEKGAEAANVTGPGGVPVQGSKYAADRNHYRRYPRRRGPPRNYQQNYQNSESGEKNEGSESAPEGQAQQRRPYRRRRFPPYYMRRPYARRPQYSNPPVQGEVMEGADNQGAGEQGRPVRQNMYRGYRPRFRRGPPRQRQPREDGNEEDKENQGDETQGQQPPQRRYRRNFNYRRRRPENPKPQDGKETKAADPPAENSSAPEAEQGGAE

SEQ ID NO: 221286 - protein, 65 aa, Zea mays
  Clone ID: MRT4577_133404C.1.pep
SFHIESLHLLSPFYPSNFSASSDITHHRDLLLYSISIILVLVRMHFRGLCSQISLPVRIWTWRRS

SEQ ID NO: 221287 - protein, 116 aa, Zea mays
  Clone ID: MRT4577_133405C.1.pep
NHSSLNIITCRPKAQIVYYPYIIIALVLHMRLLGSSDQRYITTWAIQRRADGYIFFDILFPLSLSPLSIRLYGHTARGQPGTSLNLKTEGPRSSMQWLARRAQRPFSCYRRRRRQA

SEQ ID NO: 221288 - protein, 65 aa, Zea mays
  Clone ID: MRT4577_133406C.1.pep
IFFLQCHIFVRGLFIVVRVQSLNSIQYNNRFCFISKTHFCLMLLMYHIIKIARLSYAYALLVFFY

SEQ ID NO: 221289 - protein, 41 aa, Zea mays
  Clone ID: MRT4577_133407C.1.pep
EYYHNRTRLCSLHFNCSFRTLITLTLAPMGMQDTLLLNYRR

SEQ ID NO: 221290 - protein, 237 aa, Zea mays
  unsure (1)..(237): unsure at all Xaa locations
  Clone ID: MRT4577_133408C.1.pep
MAGAGAMGFPRELMVQRIQSLVEEGFWDALRRHKLDVLGTDDSPIPITGYYTPRQRRPMASFFNLRSGSLVLPSHSSVGDRNNCPVPGTLINTNNMRGFENLDREQLLKAEAKKILHDIVSGKVEEDPSVLLRFLVTSFADLKNWKVYYNVAFPSLVFNSRITLLSLQPASKVLTXEEAASMYTSLQKWRTSSXTTVIPFLLVXISSDSSASIXXLRDXKAGQGNYXKLLFGIYDMD

SEQ ID NO: 221291 - protein, 216 aa, Zea mays
  unsure (1)..(216): unsure at all Xaa locations
  Clone ID: MRT4577_133409C.1.pep
MARDAKFDVGVVVIGGGPAGMAIALGCIKAGIDVKVYERYPYARPAGNILNLWPPAIHALKCMGVNTTDLGAASPATTFRNPSGHVRATVRLADDVVEKYDGGFLGLLRPDLYKRMLSAIPEGVMEFNKSVTSFEDTGDCVRMTLGDGTVVKAAVVIGADGIDSSVRTHLXGQSPRRNHDLHVIGGFTFDTDGVIPNECVITHDPQVQGTYGPLLS

SEQ ID NO: 221292 - protein, 300 aa, Zea mays
  unsure (1)..(300): unsure at all Xaa locations
  Clone ID: MRT4577_13340C.1.pep
SVWLAMASGYNRKLLILVVLVSFLAPLRALXKIDSLSMSSAASVALAVVFVVVSSIIALVXSTGGKISMPRMGPDFISRAAMLDLLVVIPIMTNAFICHFNVQPIYNELKEKTPQNMYKVGRISTVLCVAVYALTALSGYLLFGEDTESDVLTNFDKDLGIRFSSLLNYIVRIGYVIHLVLVFPVVHFSLRQTVEALIFGELATPSRKRTFTLTVVLLALIYLGSTMIPNIWMAFKFTGATTGLALGFMFPALVALRLDKEGSRLGHGERLLALGLLGLSILVSVIGVVGNVYTLKSKSE

SEQ ID NO: 221293 - protein, 375 aa, Zea mays
  Clone ID: MRT4577_133410C.1.pep
PCLHLVTLGVSTNFGLHRSEMNHSQGSRIIRGRGRNKRMWTSDEDDELVKALCEISADPRYKVEGGAFKNCYSQGIENILSQKLPGRGIKASPHVDSRLKVMKRKYYSIKDMIASTGFSWDDTRKMIQCEKQRYDEYCRDHPRAKGLYGVPFVYFDTFDAIYGKDSSAGEGLEGSEAAIANMENENINEVGDDEVEEDRMSTGISGRSLAATLSFKSQKKYNYDGKTNRTESNCPSLDKFKDVNVQFQNAIQHASTMAAAMELFKDVRDRFQNVVQHASEMAAAVELFNDAHSRFQSALQNVNTSAVIEQFKDALDHFQSITHNGKMVAAVEYGTEMQEKSMCEEPQRKAKVIAIAEVLKLGFSGIEVVTVTPGF

SEQ ID NO: 221294 - protein, 192 aa, Zea mays
  unsure (1)..(192): unsure at all Xaa locations
  Clone ID: MRT4577_133411C.1.pep
MVTATTSPLFSLSSLRASLPSPTRFHTSLSLRALSPRARLSAALPFASPLXGYGTWAATSISSAGRLKRRGLEVVCEATTGRQPDSVKKRERQNDKHRIRNHARKAEMRTRMKKVLRALEKLRKKPDAQPEEIIEIEKLISEAYKAIDKTVKVGAMHRNTGNHRKSRLARRKKAIEILRGWYVPNAEPVAAT

SEQ ID NO: 221295 - protein, 194 aa, Zea mays
  Clone ID: MRT4577_133412C.1.pep
MVTATTSPLFSLSSLRASLPSPTRFHTSLSLRALSPRARLSAALPFASPLVSGGYGTWAATSISSAGRLRRRGLEVVCEATTGRRPDSVKKRERQNDKHRIRNHARKAEMRTRMKKVLRALEKLRKKPDAQPEEIIEIEKLIAEAYKAIDKTVKVGAMHRNTANHRKSRLARRKKAIEILRGWYVPNAEPVAAT

SEQ ID NO: 221296 - protein, 150 aa, Zea mays
  unsure (1)..(150): unsure at all Xaa locations
  Clone ID: MRT4577_133413C.1.pep
MSSGRYMAYSPSPSTTPHSPHISGLRASSAAVADQEKYFAELLAERHKLNPFVPVLPHSIRLLNQEFISLXSWLGGSQGSSSGLIVKKTMRVDIPVDKYPTYNFVGRILGPRGNSLKRVEATTDCRVLIRGRGSIKDPARVKLLIPCFLN

SEQ ID NO: 221297 - protein, 68 aa, Zea mays
  unsure (1)..(68): unsure at all Xaa locations
  Clone ID: MRT4577_133414C.1.pep
VVLFCFFLFFCFFFIFFYFIFYFYYYLFLFTFIYVIYLXLFLFSFLFIIFFFFIFLFMFFIYFYFIYF

SEQ ID NO: 221298 - protein, 229 aa, Zea mays
  unsure (1)..(229): unsure at all Xaa locations
  Clone ID: MRT4577_133415C.1.pep
RRRLERTSYCCSRERDASGRYMAYSPSPSTTPHSPRISGLRASSAAVADQEKYLAELLAERHKLNPFVPVLPHSIRLLNQEILRVSTLLENASLLNQSGFEHGSPLTSGGLYSNGAATDMNGWTSAFQSESSSAYSWLGGSQGSSSGLIVKKTMRVDIPVDKYPTYNFVGRILGPRGNSLKRVEATTDCRVLIRGRGSIXDPAREEMMRGKXGYEHLKXTLHILVEAEL

SEQ ID NO: 221299 - protein, 60 aa, Zea mays
  Clone ID: MRT4577_133416C.1.pep
DSHSSIKLSEKRWQFCMFCFLSLCMSPANHDAAAVLPLLASLCPPQKHQAKGGIPKPALV

SEQ ID NO: 221300 - protein, 212 aa, Zea mays
  Clone ID: MRT4577_133417C.1.pep
MAASGKAGSAPCKVVDSHLHVWASPLQAAENYPFFPGQEPTLRGDVDFLLECMDEAGVDGALIVQPINHMFDHSLVTSVLKKYPSKFIGCCLANPADDGSGIKQLEHLIVQEKYRAVRFNPNLWPSGQKMTNEVGRSLFAKAGELGAPVGIMVMKGISSYIQEIEELCTDYPATTVIFDHMAFCKPPTNDDEEKAFSSFLNLSRFPQVYVKY

SEQ ID NO: 221301 - protein, 215 aa, Zea mays
  Clone ID: MRT4577_133418C.1.pep
MYHQIYTHPSPRSNHLLLPTVHTFNSLLLAFHREGKCDEFEIVLQEMDKYSCKHNVCTYSIRMSGYCNGGHVDKARTLWDEMIQEGIQPDITAYNTMISGYCHSGEVGVAEEMFKNMLMGGIDSSATTFEWLVRGHCMARDVEAAMLVRADMKRKGFGLAPEVVEELLDGLCQNGRVEDGLSVLREEMNREEFVPTPTSYEGLIYWVFLFDQKCM

SEQ ID NO: 221302 - protein, 154 aa, Zea mays
  Clone ID: MRT4577_133419C.1.pep
FFIPQGISILLNAENSSESKFSVLQNLEMESTIEVYRSLSTNSCNSKFFSKVFFDGFYKYLVCTIDENMALFQANLEHLSEEFENASVLSALGEIVIGLLQNDQMLTYANQELKETPEDSSVCRQPELFLNCFKLANRFMKLSSFHFKANPAGQ

SEQ ID NO: 221303 - protein, 47 aa, Zea mays
  Clone ID: MRT4577_13341C.1.pep
PQDSSLLVTGDAGSPNATPTRRRHDERPGHRAHSFQAGSRGGLVPSA

SEQ ID NO: 221304 - protein, 417 aa, Zea mays
  unsure (1)..(417): unsure at all Xaa locations
  Clone ID: MRT4577_133420C.1.pep
MKPIAHSLHAAVDRRWLLPLAVGSALSLLLLVALTTFPSPSAPSSSSALFVEHKLAPSPPSPAASLPRIAFLISGSAGDASALRRVLLALYHPRNRYILHLDAEAPDSDRSNLAADLASHPAIAAAANVRVVDRANLVTYRGPTMVANTLHAAAAFLWGDGASHWDWFINLSASDYPLVTQDXLIHVFSKLPRDLNFIDHTSDIGWKEFQRAKPVIIDPGLYMKKKADVFWIPQRRSVPTAFKLFTGSAWMALSRPFVEYCIWGWDNLPRTVLMYYSNFISSPEGYFHTVVCNAEEFKNTTVNHDLHYISWDNPPKQHPHYLTAEDLDRMVASDAPFARKFHEDDPVLDRIDEEILGRGADVPTPGGWCAGTRENGSDPCSVVGDTGLVVPGRGAARLQRLVTSLLSEEKFHPRQCK

SEQ ID NO: 221305 - protein, 65 aa, Zea mays
  Clone ID: MRT4577_133421C.1.pep
TQTALLNGRDHFRNDNSCYTLTEKPQVGNDRIRPPQPAETITRPKAHRFRGGPPWLEAKVQPLRL

SEQ ID NO: 221306 - protein, 88 aa, Zea mays
  Clone ID: MRT4577_133422C.1.pep
HEPRHAIALSQCSLQLVVVTLFVSFSLSSFHSDVNRIIPYDNINMVVRNISCISCAIVYLLKLSNQSLWARVRIWQITICTDHMLMMT

SEQ ID NO: 221307 - protein, 105 aa, Zea mays
  Clone ID: MRT4577_133423C.1.pep
LLAQTPPNSVGDCRPWTQHTAIYPFKIIYPATGGLRITIRIFDRLIRCARAPRELTKPNSMSQLGMELIWDESEFVTLVSPKRKEREAVLCVIMSLEIEERENKI

SEQ ID NO: 221308 - protein, 72 aa, Zea mays
  Clone ID: MRT4577_133424C.1.pep
IELVDPLRADRYQEAYHHFIYMGRLKVCLITGQGISLGKRGSFQKFHKPYESGGKNRPPGGPKGLTKLKLMS

SEQ ID NO: 221309 - protein, 56 aa, Zea mays
  Clone ID: MRT4577_133425C.1.pep
DFRYLSPPHQSEPGIPDRVLLKPSNGKALSLSSPVGYPKKTVVLFGKCKFGPIFAK

SEQ ID NO: 221310 - protein, 37 aa, Zea mays
  Clone ID: MRT4577_133426C.1.pep
NAWDFWYWPFIWIYRMVKGADEKERNKPVGFLLLVSG

SEQ ID NO: 221311 - protein, 219 aa, Zea mays
  unsure (1)..(219): unsure at all Xaa locations
  Clone ID: MRT4577_133427C.1.pep
MPEAPTTKINPPAGGFAPGAHREALEFIEHVTANAGKVQRRVLAEILSQNAPAEYLRRYGVPGGSADAVEAFRRVVPLVTYEGLQPDILRIANGDASPILSGKPISEFLTSSGTSGGERKLMPTIADELDRRSLLYSLQMPVMSQSVPGLDKGKAMYLLFVKAESRTPGGLVARPVLTSYYRSRQFLERAHDPYTEYTSPNEGIXLCVDSYQSMYAQLL

SEQ ID NO: 221312 - protein, 42 aa, Zea mays
  Clone ID: MRT4577_133428C.1.pep
SFFTPISFTHKSRLYYKLGWHHTSISSLTHHQLTQITTSSII

SEQ ID NO: 221313 - protein, 230 aa, Zea mays
  unsure (1)..(230): unsure at all Xaa locations
  Clone ID: MRT4577_133429C.1.pep
MDMGTQGSGRKRLPNRERLTAEDDALNQIAREAEARLAAKRAARAEAREIRMKELERQQKEVEERPDKDFAEKGSRNMPSLSAATLASLGGTSSRRGSGDTSISMDTEASIREIKELNELKDQIQDVEGKYMQGLKEMKDSLAEVEEKYKKAMVSNAQLDNEKTNFMYQVDTLKDMLLELEEQLAESQXAYEEKNKEFEREKHAHSILQFQFAEVKEXLRQREEMLENMG

SEQ ID NO: 221314 - protein, 68 aa, Zea mays
  Clone ID: MRT4577_13342C.1.pep
MAHILSGLRVAVKLLIKSVHSFAKKKKKKKKKKKKKKKKKKKKKKKKKKPQKKKKKKKGPWAGTPLRA

SEQ ID NO: 221315 - protein, 76 aa, Zea mays
  Clone ID: MRT4577_133430C.1.pep
EKYKKSRFFRGKIQLRVTKRNRETGGVFGVFERGNPWDHHLGVKGPKDVKIQGVWYAHLKKFVLTFKGGGPFWKIF

SEQ ID NO: 221316 - protein, 138 aa, Zea mays
  Clone ID: MRT4577_133431C.1.pep
MSKPVKIGPWGGDGGEPRDIEYTPFALVGVAVRSGDAINGVRFTYVDTSGNLHEEEWGGSEAEKFEELLLQELEYVEEISGTYGSPPESYVTCLELVTNKGRTIRGGTDGSGGSFNVPLVNNRIMGWFGAAETTDIDC

SEQ ID NO: 221317 - protein, 131 aa, Zea mays
  unsure (1)..(131): unsure at all Xaa locations
  Clone ID: MRT4577_133432C.1.pep
PTRPELPHEMTLKDVMDTVGKDVXEINDVKAXHDXMISATSYALGLXGIAKSTWYLLTLTRAXTGTTVTVFPVIGYDCAHKSLQRNKQDEDDDGTLADMTVIYAYEPGRFKHCRHHAKTYMLIEDTALQHD

SEQ ID NO: 221318 - protein, 47 aa, Zea mays
  Clone ID: MRT4577_133433C.1.pep
APCVNVNSLAFYSNKLQQPIGVFNMGAGILLIHIDSTSQTQFTLTQF

SEQ ID NO: 221319 - protein, 59 aa, Zea mays
  Clone ID: MRT4577_133434C.1.pep
DRMMNIFTGSAKSYFPSSDRKRRPLRPTDSSKLSCFVLLHKLKQTKLKQRWSLHASLPQ

SEQ ID NO: 221320 - protein, 178 aa, Zea mays
  Clone ID: MRT4577_133435C.1.pep
MDRRKEVTAAKLTDDLVVDILSRLTYKDFCRCKCAYKAWSAFSSDPDYRKRLPKKVTTGLLYQARNTSAIPLVSLSRDDGEIDGILADVPHYEHLEFLDCCNGLVLCKYKSSYTSPGICRFVVCNPATREWRILPDTFVGTDGHRRTTILGFDPSWSPHFYVFSFNRMHSFLQFGRQS

SEQ ID NO: 221321 - protein, 120 aa, Zea mays
  Clone ID: MRT4577_133436C.1.pep
AVVTSQLLVSLYSAAGKKAKRRNCYTRRAVTCTRCAVDRKDQTVTLQGGIDTRSEVGSFLRNELREGVFWTFGFPKLKRLFSRVKLVTKNDLAPRKGLLLGSCFGAPKVSHEEAASAEVV

SEQ ID NO: 221322 - protein, 58 aa, Zea mays
  Clone ID: MRT4577_133437C.1.pep
TMTHKNRGGTILPTPFTQPTIKRNPMIYCLLFFKFLFPLTTHGASNEAKGWSKGSGCL

SEQ ID NO: 221323 - protein, 75 aa, Zea mays
  Clone ID: MRT4577_133438C.1.pep
PPTTARALLALCEGRFATVSETETVAFHPEIHQLVSLIINTFYSNKEIFLRELISNSSDALDKIRFHSPTDKTNL

SEQ ID NO: 221324 - protein, 294 aa, Zea mays
  Clone ID: MRT4577_133439C.1.pep
MAMPPSRSWAELQHDLLVSIMTRVGAPDLLWGGASRACSSWRAAARDPLAWRRVDLRDWVALTSGRRAARPGHSSSRVPVHAALVGILEVAAKLAEGRIEAVLLPEFADEDHLLFLAERCPNLHYFSLPSTCMTYDQFCKAIGGLQSLKGMAVDESLINYDVLLHVHQCCPDFVELKVSALYVDEEMASVICNSLPRLKKLEIPSCDMSSAAIIRFLDCLEQLEHLDISGYETSAISSPVLEKASRLKVFLWNSKFELGEFMDCSNCGEHNINPQEPCKCMMEHKVMDWLAGPS

SEQ ID NO: 221325 - protein, 123 aa, Zea mays
  Clone ID: MRT4577_13343C.1.pep
MANGCPTSTTSSLPLFFLLSCLLIGHALCSQAHNGRTSDADYVVQFPHQELTTKHIILPKVIKGLNKGILSKYARRMLIGSIAPICTYNECRGCRFKCTAEQVPVDANDPMNSAYHYKCVCHR

SEQ ID NO: 221326 - protein, 65 aa, Zea mays
  Clone ID: MRT4577_133440C.1.pep
GVCVHDGSHPPGNLLPRSPLKFITRPILRLSPWCTLCTTNSVHALFMPIHPPQLHNEPEIHGDMA

SEQ ID NO: 221327 - protein, 136 aa, Zea mays
  unsure (1)..(136): unsure at all Xaa locations
  Clone ID: MRT4577_133441C.1.pep
MSDSEDHQYESIVHSAIPKTYPQEAGLDRNNRFLHIINLPCKVVQVPTXSNTGKYGHTTCNFGRIYIFNVKYLQDIDPSSPHCDLPYXVNRTDNHLXVHIIDNXFVHLLTSDVHTTDDLKLPTDKTLSWTLSRNAI

SEQ ID NO: 221328 - protein, 95 aa, Zea mays
  Clone ID: MRT4577_133442C.1.pep
TTRPPTHTSTRSRTATAQFRFSGSSCASPDTGDHPFVVVSGADRRSVAAYLLCSSPICGRRRRHLSGVYWSIRRRDVRYVTASLPVVGVQRGLWT

SEQ ID NO: 221329 - protein, 88 aa, Zea mays
  Clone ID: MRT4577_133443C.1.pep
SRFIGNFLVAYWWIQVNHILFYVKACIPYIMSSGAVKTSFTKVQVHGQVHTYSIINCYGASDSSGASCSHLHRLSTSFQVPFSSQLII

SEQ ID NO: 221330 - protein, 569 aa, Zea mays
  unsure (1)..(569): unsure at all Xaa locations
  Clone ID: MRT4577_133444C.1.pep
MLEELLIFTRGGLILWSSCRALGAAALKGSPIDALIRSCLLEERSADASFSQDNYALKWTFHNDLGLVFVAVYQKILHLLYVDDLLAAVRKEFSQIYDPKRTSYDDFGDIFRQLHREAEARAEEMKKSKQALSSRPQPALTQKKPGPKGRGGDSRGGAANKGGSGAKDDSDGDSYGNQDHRTLANGAFKGQENGVRKENSSHGRTVVVKGKENGAPKDEGAFDVSKLQKLRANKKNGATDNGTKKLTKPDIKKKGKQDRVWDDKPSNKKLDFTDPADERGDEVTDNVAVIEGESMMDKDEDLSSDSEDEEVEDGPKKKGWFSSMFQSISGNNVLEKSDLQPALKALKDRLMAKNVAEEIAEKLCESVAASLEGKKLGSFTRISSTVQTAMEDALLRILTPRRSIDILRDVHAAKERGRPYVIVFVGVNGVGKSTNLAKVAYWLLQHNLSVTLAACDTFRSGAVEQLRTHARRLQIPIFEKGYXEALVGNDAVDQLTKFNQKLADLSAVPTARLIDGILLTKFDTIDDKVGAALSMVYISGAPVMFVGCGQSYTDLKKLNVKSIVKTLLK

SEQ ID NO: 221331 - protein, 36 aa, Zea mays
  Clone ID: MRT4577_133445C.1.pep
LTTRSIHLRIALDLTNNSLLTTPSTTNIKNRSDIFV

SEQ ID NO: 221332 - protein, 174 aa, Zea mays
  Clone ID: MRT4577_133446C.1.pep
WPGCDTFRSGAVEQLRTHARRLQIPIFEKGYEKDPAVVAREAIQEATRNKSDVVLVDTAGRMQDNEPLMRALSKLINLNSPDLVLFVGEALVGNDAVDQLTKFNQKLADLSAVPTARLIDGILLTKFDTIDDKVGAALSMVYISGAPVMFVGCGQSYTDLKKLNVKSIVKTLLK

SEQ ID NO: 221333 - protein, 49 aa, Zea mays
  Clone ID: MRT4577_133447C.1.pep
VKGRSIAHHPEVQRANIWMPNYRLFLASGATFKIHHLYFNILIQKEMPH

SEQ ID NO: 221334 - protein, 237 aa, Zea mays
  unsure (1)..(237): unsure at all Xaa locations
  Clone ID: MRT4577_133448C.1.pep
MLEELLIFTRGGLILWSSCRALGAAALKGSPIDALIRSCLLEERSADASFSQDNYALKWTFHNDLGLVFVAVYQKILHLLYVDDLLAAVRKEFSQIYDPKRTSYDDFGDIFRQLHREAEARTEEMKKSKQALSSRPQPALTQKKPGPKGRGGDSRGGAANKGGSGAKDDSDGDGYGNQDHRTLENGAFRGXNWRPQGDSSHGHXFSQGKGNGAPNDEWAFDVSKLQKLRANKKNGAL

SEQ ID NO: 221335 - protein, 625 aa, Zea mays
  Clone ID: MRT4577_133449C.1.pep
MLEELLIFTRGGLILWSSCRALGAAALKGSPIDALIRSCLLEERSADASFSQDNYALKWTFHNDLGLVFVAVYQKILHLLYVDDLLAAVRKEFSQIYDPKRTSYDDFGDIFRQLHREAEARAEEMKKSKQALSSRPQPALTQKKPGPKGRGGDSRGGAANKGGSGAKDDSDGDGYGNQDHRTLANGAFKGQENGVRKENSSHGRTVVVKGKENGAPKDEGAFDVSKLQKLRANKKNGATDNGTKKLTKPDIKKKGKQDRVWDDKPSNKKLDFTDPADERGDEVTDNVAVIEGESMMDKDEDLSSDSEDEEVEDGPKKKGWFSSMFQSISGNNVLEKSDLQPALKALKDRLMAKNVAEEIAEKLCESVAASLEGKKLGSFTRISSTVQTAMEDALLRILTPRRSIDILRDVHAAKERGRPYVIVFVGVNGVGKSTNLAKVAYWLLQHNLSVTLAACDTFRSGAVEQLRTHARRLQIPIFEKGYEKDPAVVAREAIQEATRNKSDVVLVDTAGRMQDNEPLMRALSKLINLNSPDLVLFVGEALVGNDAVDQLTKFNQKLADLSAVPTARLIDGILLTKFDTIDDKVGAALSMVYISGAPVMFVGCGQSYTDLKKLNVKSIVKTLLK

SEQ ID NO: 221336 - protein, 54 aa, Zea mays
  unsure (1)..(54): unsure at all Xaa locations
  Clone ID: MRT4577_13344C.1.pep
AYSLLGGPSXXISSIMRSQLTVLIELIYLSYFHNLSFIGYHIYSSLSPSLMINQ

SEQ ID NO: 221337 - protein, 1027 aa, Zea mays
  unsure (1)..(1027): unsure at all Xaa locations
  Clone ID: MRT4577_133450C.1.pep
MKGPFIKSKWSHIPITFSQEDLKLKDYPHNDAMVISCVIKGFLVHNVLVDTGSAMDIIFAKVFTQMQEPEDKIHDATHPLCGFGGRHIVALGKITMPVTFGFVHNTRTEQVVFDIVDIKYPYNAIIDRGTLNAFKAILHPAYLCMKIPSEQGPIAVHGSQEAARRAEGNWTDSKAIHNIDGAEACQQYKYKREKAASVDQSKPMLLCEDIAEQRVLLGSQLSEEQEKTLLRFLFNNKDVFAWSANDLCGVNRDVIEHSLNVDPSFRPRKQRLRKMSEDKAEDDRNEVKRLLSVGVIREVKYPEWLANTVMVKKANSKWRMCIDFTDLNKACPKDEFPLPRMNSLVDATASSELMSLLDCYSDYHQIWMKKEDEPKTSFITPSDTYCYLRMPEGLKNAGGSFSRMTTKVLHSQIGGMQAGLKLNPEKCVFGVKKGKFLGYLVSTMGIEANLSKIEAILRMEPPSTKKGDQQLAGRLASLNRFISRAAERNMPFFKILKSAEVFQWGPTQQKAFEELKQYLIDLTTLTPPSPGAPLLLYVVASHSAVSAALLQEKLDGQTKKQAPVYFVSEVLSLSKKXNYTELEKVXPLKDIMRNKEATGRIGKWAVELNEFSIDYVHRSSIQSQALADFIADWTPGSQEEETNKDAEAWIVFCDGSWGTFGAGAAAVLVSPSKVRTCYAAKLDFDCTNNIAEYEAILLGLRKLKCLSRAEGIELMKEIHAGLCGSHIGSRPLLGKVFRQGFYWPKAAPDAAKLVQKCEKCQKCARDQKQPSSLTQLIQPTWPLQRWGLDLLGPLPPAQAKPLATITSATVQEFFWQNIVCRFGVPKAITVDNGTQFDAETFKEFCDHTGTKIHFASVRHPESNGLVERANGIIMTRIMKLIFNQPRGKWPDELIKVVWSHNTTISSSTGFTPCKLLFDDEVVTPEEAKAGSIRTVASAEDEADYHVAKDTIEGTRLQAVENINKYQAETIKWRDRKVRLKNIKPGHLVLRRVANPDIVGKLQLKWEGPFLVVSSSRPDSIRLKDMDG

SEQ ID NO: 221338 - protein, 70 aa, Zea mays
  Clone ID: MRT4577_133451C.1.pep
KGVIDSRNQQWIYKSLLSYLPYALALGVVLAIVIVLNFALHFSSTLCRLETLWMACRPQGNPKIFLPVRI

SEQ ID NO: 221339 - protein, 76 aa, Zea mays
  unsure (1)..(76): unsure at all Xaa locations
  Clone ID: MRT4577_133452C.1.pep
YHAQLTFEKSPIFLFNINAPAFLLYLPLFDFLGILTLYHFDTYQMLQIMFVHHPDTCDXLXKFMTSLPTKHAENNI

SEQ ID NO: 221340 - protein, 63 aa, Zea mays
  Clone ID: MRT4577_133453C.1.pep
VFFGESFFYEQVFFKLKKFLNPPNVNFLKKFFFKKTPTKKIEIFLKPLNFQPFPPFFKKNFPS

SEQ ID NO: 221341 - protein, 227 aa, Zea mays
  Clone ID: MRT4577_133454C.1.pep
MAGTSSWSSSSSCASSFGSPDHDVVCVTEPDSVGAAGAVADAEGSVKFLCSYGGRILPRRTDGTLRYVGGDNRVLSVDRPIRFYVLQRKLRELCGGWEAHLRCQLPTEDLDALISVTCDDDLAKLLEEYDEASKDRLQSLKIRAFLFPTRTPAPSILQRRSPPSIAHLHWQNTSPPAAAGVSLTCAPRWWAAPQASRQAQAPQAQNYDRHSLGEERPRLYYSYMPRT

SEQ ID NO: 221342 - protein, 245 aa, Zea mays
  unsure (1)..(245): unsure at all Xaa locations
  Clone ID: MRT4577_133455C.1.pep
MAGTSSWSSSSSCASSFGSPDHDVVCVTEPDSVGAAGAVADAEGSVKFLCSYGGRILPRRTDGTLRYVGGDNRVLSVDRPIRFXVVHIFVPANRHESSEQSFDFSDFSCRLFLSAVLQRKLRELCGGWEAHLRCQLPTEDLDALISVTCDDDLAKLLEEYDEASKDRLQSLKIRAFLFPTRTPAPSILQRRSPPSIAHLHWQNTSPPAAAGVSLTCAPRWWAGPQASRQAQAPQAQNYDRHSLGE

SEQ ID NO: 221343 - protein, 68 aa, Zea mays
  unsure (1)..(68): unsure at all Xaa locations
  Clone ID: MRT4577_133456C.1.pep
FKGGGRALVDAGGGEKVKNTNAGRGKWFGGGYTPKKGLSLFWRGTPSLETQKQTKALXSWGLKREGGS

SEQ ID NO: 221344 - protein, 78 aa, Zea mays
  Clone ID: MRT4577_133457C.1.pep
LDIHVPKYKQSFGGYEYSNFCFSFTAWNELVHLSIHLHVSRARSLQDLYAQIESLDNIPILSSSRSRTHAWVGPVVPV

SEQ ID NO: 221345 - protein, 189 aa, Zea mays
  Clone ID: MRT4577_133458C.1.pep
MAAAASASTPQGVAERRGIPAAAFVEDVEAYLRQAGLDVNSALAFLQERLQQYKIVEMKLLAQQRDLQAKIPDIEKCLDIVSTLQAKKDLGEALIADFELSEGIYSCAKIEDTDSVCLWLGANVMLEYSCDEANALLKKNLENAKASLEVLVADLQFLRDQQTITQVTIARVFNWDVHHRRSKQAVKEP

SEQ ID NO: 221346 - protein, 39 aa, Zea mays
  Clone ID: MRT4577_13345C.1.pep
KSRVPSSSACELYAPPTLPGGSLAQWCLSSRGKCRECAN

SEQ ID NO: 221347 - protein, 78 aa, Zea mays
  Clone ID: MRT4577_133460C.1.pep
YTWTCYVRPKGTDHQPHPLESASSPTQPTRPNRRRTSTHSVVLAGRLPFRGAGGGTAGLPPARLPAAVRAAVSTAVAQ

SEQ ID NO: 221348 - protein, 160 aa, Zea mays
  unsure (1)..(160): unsure at all Xaa locations
  Clone ID: MRT4577_133461C.1.pep
MKQNGAGMIQLAHQMPVHQXSPATHSTSETSHQQACGTNQRSLNDHNIDHSRELDGVFKXDENNMMLQSCVDTPQTGYAHNXKPDRAELFGISYPYADAYYRGAAAXNYGPHAIXMHPQVVGMGPPSRVPLTIEPRAEQPIYVYAKQYHAILRYIQLHAK

SEQ ID NO: 221349 - protein, 106 aa, Zea mays
  Clone ID: MRT4577_133462C.1.pep
KSPGAPWVSAAPPQRPVRGIYDPLLNGSASSRGVPKGQKYPKVVGSVSAVDNWGGGDPTFCGYEIQGPRRAVKNLRLFIPRWVIRPLSRGGKRPFRFPPVFPTPGH

SEQ ID NO: 221350 - protein, 71 aa, Zea mays
  Clone ID: MRT4577_133463C.1.pep
GRPPWACFCPPAGLLTRGPCWQTPSWTLFQIRFWGKCRGCWPKLTGCFPGPLVMPLSPPHLEGCGCNPFGS

SEQ ID NO: 221351 - protein, 107 aa, Zea mays
  unsure (1)..(107): unsure at all Xaa locations
  Clone ID: MRT4577_133464C.1.pep
QCSEQADSVLPEGGEGSSVGSEKGLECLLGSCYAKIMHRIIKSPNIFVDYHFHPKVKXIGFDQXQAGEVNPFNKIVIVTFVYPAPEYXSLFNINFRSDLLSFSVMLV

SEQ ID NO: 221352 - protein, 115 aa, Zea mays
  unsure (1)..(115): unsure at all Xaa locations
  Clone ID: MRT4577_133465C.1.pep
GVRVSXPVVALAGGRLAALGGLXVXSAXXGCXVXXLGXXXGXSVLXXVAAFXGASGXXXXXFXXXXVPASSXXXXXGVFRXSXXLAXWLGSXXXXPLVFAGXXPXXAPLVXAAXA

SEQ ID NO: 221353 - protein, 80 aa, Zea mays
  Clone ID: MRT4577_133466C.1.pep
AAGPAPRKIWRLENAPGSAPVPESEGPCLGPCPEGVLRAKRGGLFGEEANDRGQNRIMRAISKRGQGRRRPLLCRTRGRP

SEQ ID NO: 221354 - protein, 46 aa, Zea mays
  Clone ID: MRT4577_133467C.1.pep
NTSCCSFCQFSPSFQEHHIQQTKITSQTSLSHLIMFFLVLSFTSVF

SEQ ID NO: 221355 - protein, 126 aa, Zea mays
  Clone ID: MRT4577_133468C.1.pep
KKPHSKRLGFVFFLFNKKKNASHKSKSQFGGLFLTPKFAHNFKGFDFLKIHFFQDPQINSCFQFTGSRFEKYSGHTNPWSTFPGGPFKGGISTHWGALLGDPSLGPNLGELWAKVFPWGNFFSLTI

SEQ ID NO: 221356 - protein, 79 aa, Zea mays
  Clone ID: MRT4577_133469C.1.pep
LVKCQSVAIVCKPAEMSCVLCSGKQSLVMHPGLDAEDGVRSLRLEGDGLYSESLREDVHRGPGTGTRIRDRRPAGGCAP

SEQ ID NO: 221357 - protein, 124 aa, Zea mays
  unsure (1)..(124): unsure at all Xaa locations
  Clone ID: MRT4577_13346C.1.pep
DREYETATVTDVLKSTRKSADACSVWCTREDSGYDYAKSMTQDNVRSLLGAKSEQNMSITSTVTERDYLRKNIVEGRTSEPTKXVADFMTEENTLISVSPDTKVLQAMHFMTENRVIHIPVIDT

SEQ ID NO: 221358 - protein, 42 aa, Zea mays
  Clone ID: MRT4577_133470C.1.pep
WFRFFFWFFLSLIFFFFFLEAIQADANHVIAICKSRLRLKLK

SEQ ID NO: 221359 - protein, 77 aa, Zea mays
  Clone ID: MRT4577_133471C.1.pep
SNGGQASKKRPGRKNPGYSARTKAGRGTNEGGEGQKKRGLKRRGGFSRGGGRPRTNSKARRRGRKGRRRATWPRGGH

SEQ ID NO: 221360 - protein, 78 aa, Zea mays
  Clone ID: MRT4577_133472C.1.pep
WNESVQLAYNILSSVQIAIKYSSVQILHGASCTCHRAIDTKAKPRDSFVVGSKNQMAVVNLSSGTKEIVQDHLPVITQ

SEQ ID NO: 221361 - protein, 101 aa, Zea mays
  unsure (1)..(101): unsure at all Xaa locations
  Clone ID: MRT4577_133473C.1.pep
MCRVIRAHIXGPXDERVSRHHTWRLSPQSSTRRRILSFATPAATEYIPKARHKRRPSDITHRTAAPPDYTPIAAASSDDLVXASNDDDRKEPSWSHYCHDH

SEQ ID NO: 221362 - protein, 819 aa, Zea mays
  Clone ID: MRT4577_133474C.1.pep
MLATTSVSDTCKTEEFVNQQKALEADASNASLNQPHISAVPSDKQDIECECSSPTPRSDCKEPLMDNSVLTSAVPEILATSSASDKCKMEEFVNQQRPIEVDASNASLNQRPRCHIFNASSDNQDVGRECSSPTPRSDCEEPLMDNSVLTSAVPEILATSSASASDKCKMEEFVNQQRLIEADASNASLNQPRIFAVSSDNKDIERECPSPTPRSECKESLMKNSVLTSAAPEILVRSSASASDTCKMEEFVNQQRPIEVDASNASLNQPPRCHIFTASSNNQDIERECPSSTPRSDSKEPFVDNLVLTSAVPGNLLTSSAVASDTCKMEILNKKITLEADASNAPLNQPPLSSVFASSSGDDHVDVCGRPSPNPRPEGEQPLMGNSGLISTVPRNLTSTSASASDICKMEILNEKRTLEANPSNGLITQSPQPKVFLVPSPDILECEFSSETPRHEFKEPVADSSGLTSAAHENLGTKPHVHSPDAFVPPKSGALTGELGDTKSDFKGEEIIQKEQYFGSESIAATRENLLIDPSSGVESIDVSDVLDSLMEERSGTSYMPGSIEDFLAEEEPQYSSPIALSPWGEPSYYQGDAVDSALWGTQDLINDMWSLLSPRPMLQPSSGIGTEGKETFDINEVAVTHVSSDYFQKGSMFGEENVNQANLSAAADWMLPEQVPSIPNGMSTSSVDESTIVLGSQPSTNQSLDWGGTTWSIGQNASVYSNEKAEPSSKSYWEEPRKQETAKSSVSISGQAIGNNKGLDPRDNAANRGSRLSHHHRGRYSQISESWLLSSSHSRSRSDRFGSGGSSRSTSKGQSRG

SEQ ID NO: 221363 - protein, 155 aa, Zea mays
  Clone ID: MRT4577_133475C.1.pep
VKLARPPDRPGHFLAGPTHAFAVNEGEVPYEEAGFNGYAHFDSSDMSTWRPLKMLDSAALSDKRPDEVPQLLESMLSKLVEEFENRLNSQNELVKAALKTGIDNTRSFPKSKVLVETTPNTSGRKMDTADIYCNHKQTKKVASSELALKQYSILQ

SEQ ID NO: 221364 - protein, 115 aa, Zea mays
  Clone ID: MRT4577_133476C.1.pep
SPTADHTLVFAFISSPCCTPVPSGTSMRRPSPPPSTTSLLSPPPSDTSACWLFTSPTRCTPPRNPVFRLLQLSLPPPNTSLPLCSGLSSLLSTASSHSLSPITVRLHLMDLFTGL

SEQ ID NO: 221365 - protein, 85 aa, Zea mays
  Clone ID: MRT4577_133477C.1.pep
SPPLEPDPDFALDIRNDSQNECSKFGPVKHIFFSKKTPGFVYFQFERVTPPPKAQNPLPGKWFPGKIISPPFLSPLESSTKFPNF

SEQ ID NO: 221366 - protein, 479 aa, Zea mays
  unsure (1)..(479): unsure at all Xaa locations
  Clone ID: MRT4577_133478C.1.pep
MTRAHLPAAAQRRPTVALLLGLALAFCLAVLSIQSSFFAAPGAPGRRLDLDADDVRELAGFQSRVQQCVASRGLGLTAHIIDHCKLVLKFPEGTNSTWYNAQFKIFEPLEYKYDVCETILLWEQYRNMTTVLTREYLDVRPDGWLDYAAKRIAQLGADKCYNHTLCDELLSILLPAKPPFHPRQFATCAVVGNSGDLLKTEFGQEIDAHDAVFRDNEAPVNKKYAKHVGLKRDFRLVVRGAARNMAPILKGSCNXDEALIIKSLTHKEINAVIKELPNPVYLFQGIVLRRGAKGTGMKSIELALSMCDIVDMYGFTVDPGYTEWTRYFSAPRKGHNPLQGRAYYQLLECLGVIRIHSPMRAQRVEDWSDIPSKEEIRRAHTIAFRLKKHETGQLAELGPFSNCKVWGTVDPDYGPVSGTSDMSETRKNSNYSKWELLPFEKLRREAQEHHIQMGGVSLYKMDGNKLDDLVCVRHQRSSS

SEQ ID NO: 221367 - protein, 108 aa, Zea mays
  Clone ID: MRT4577_133479C.1.pep
FLFFFFFFFFRSFFLVFLTPKNLFAIMFYNLGQNLIQHVIQDRNPFDKNQHIPYFSRVFFFTSSNRENNIIHSCYIGGKNQLPTTPGNLCLPPKAGGAKTQMNQPAYL

SEQ ID NO: 221368 - protein, 37 aa, Zea mays
  unsure (1)..(37): unsure at all Xaa locations
  Clone ID: MRT4577_13347C.1.pep
FVASSNTSCTNTTKWDXXTRSRRTLSXTINNSNSHTF

SEQ ID NO: 221369 - protein, 76 aa, Zea mays
  Clone ID: MRT4577_133480C.1.pep
SSQMARLVLHTKLDRRRRRHLHPEPRPAEHPAPVPQQGPPLVGLLRHQHARQARRGPGQQLGRVGVGASRHRELRE

SEQ ID NO: 221370 - protein, 56 aa, Zea mays
  Clone ID: MRT4577_133481C.1.pep
ESSYPEGWPWAKFNEMSKLNLFFLYSRLSYFIVRNLFFYELCDVLRVFFFFTRPKQ

SEQ ID NO: 221371 - protein, 100 aa, Zea mays
  Clone ID: MRT4577_133482C.1.pep
LGDDGLDLARTCHNILHAPHLVVPVLDHARHRFTAAIHLSFHGDELSDHRACTKRSWTHSVYPTTPTRAHAGFERLRWCDSGVADHRDPKPSVRSPSCFR

SEQ ID NO: 221372 - protein, 79 aa, Zea mays
  Clone ID: MRT4577_133483C.1.pep
QILMLPTCINVKEKECDFLTLYVSLTLTNKLISSTIPLDIRLVWLRLAGVICAAAPPKLRARYEHSVLQRPQTTLLMFC

SEQ ID NO: 221373 - protein, 117 aa, Zea mays
  unsure (1)..(117): unsure at all Xaa locations
  Clone ID: MRT4577_133484C.1.pep
DPQVTEDQIQRDLAMNKFDWDHPMHLQPSSPTAIKQVNCVWDAYXATKGAHGVCILTEWDEFKTLDYQKIFDNMQKPAFVFDGRNIVDPEKLREIGFIVYSIGKPLDAWLKDKPAVA

SEQ ID NO: 221374 - protein, 287 aa, Zea mays
  Clone ID: MRT4577_133485C.1.pep
VYAHWVPEENIITTNLWSAELSKLAANAFLAQRISSVNAMSALCEATGANVSEVSYAIGKDSRIGPKFLNASVGFGGSCFQKDILNLVYICECNGLPEVANYWKQVIKINDYQKSRFVNRVVSSMFNTVSGKKIAVLGFAFKKDTGDTRETPAIDVCKGLVGDKAQVSIYDPQVTEDQIQRDLAMNKFDWDHPMHLQPTSPTAVKQVSVVWDAYEAAKGAHGVCILTEWDEFKTLDYQKIFDNMQKPAFVFDGRNIIDPEKLREIGFIVYSIGKPLDAWLKDMPAVA

SEQ ID NO: 221375 - protein, 101 aa, Zea mays
  unsure (1)..(101): unsure at all Xaa locations
  Clone ID: MRT4577_133486C.1.pep
AFRSHLAKRTSNDLTTVATKILCLFALLALFVSATNALIIAQCSLAPSAIIPQXLRPVTXSGLXHPAVQAYRVQHALGGTPLRQPVGRLRRRWLVHVAIQT

SEQ ID NO: 221376 - protein, 78 aa, Zea mays
  Clone ID: MRT4577_133487C.1.pep
VLPSIWLNWSPQPFNFWLIQYRIQEVPPNFHSNTGVSLESGGGRARRPRKKKIPGARFPLECNKRGPSLGVPPSKEQE

SEQ ID NO: 221377 - protein, 41 aa, Zea mays
  Clone ID: MRT4577_133488C.1.pep
MGRLGGCQFPWGPGRKKKKKKKKKKKKKKKKKKKKKKKKKK

SEQ ID NO: 221378 - protein, 155 aa, Zea mays
  Clone ID: MRT4577_133489C.1.pep
SSGNNAEYAGRFAQMWNAIITSFREEDLIDNREKDLLLVPACKDRELDIFQWPPFLLASKIPIALDMAADSGGKDRDLTKRIKSDPYFSFAIRECYASFKNIINTLVFGQREKDVLVQIFTVVDKQKKKKKKKKYSALLPLLALSKKFVELLELL

SEQ ID NO: 221379 - protein, 76 aa, Zea mays
  unsure (1)..(76): unsure at all Xaa locations
  Clone ID: MRT4577_13348C.1.pep
DAWADACADSWADAWALLPIVGGVALASLTEASFNWAGFWSAMASNVTFQSRYVLIXKLMVNKVESLDNIILFSII

SEQ ID NO: 221380 - protein, 68 aa, Zea mays
  Clone ID: MRT4577_133490C.1.pep
PPKEGPSRLVRAPHVRNHLWAPSTYVPQSSLRGPHIKRALCMRAPCDHPTQSALNTEVEKTPARGPGG

SEQ ID NO: 221381 - protein, 60 aa, Zea mays
  unsure (1)..(60): unsure at all Xaa locations
  Clone ID: MRT4577_133491C.1.pep
AVTREGDARGRTRGRAHGRLGEGVRHRREKWMERGAGRIPRPEKVEVDGFXDGDALRVLP

SEQ ID NO: 221382 - protein, 152 aa, Zea mays
  Clone ID: MRT4577_133492C.1.pep
MALTRRWAASLLLLLAATLLAGSAAATGKAGNVVVFWGRNKDEGSLREACDTGTYTIAVISFLDVFGRGKYHLDLSGHDVSAVGADIKYCQSKKFLVFLSIGGFGGQYSLPTAQSAADVADYLWNAYMLGTREDVYRPFGNAYVDGIDFFLD

SEQ ID NO: 221383 - protein, 38 aa, Zea mays
  Clone ID: MRT4577_133493C.1.pep
ERPHLYFIFIFFFFFFFFFFFFFFFFNQFRVTDQADYF

SEQ ID NO: 221384 - protein, 154 aa, Zea mays
  unsure (1)..(154): unsure at all Xaa locations
  Clone ID: MRT4577_133494C.1.pep
XRSQELQHLGLXENNQXXQAKGTPNAQQQQXXPXNQRXTRNXXXXXQQQXXPXSQLATGWCQQQQLLPFNQLAALNPAAYLQQQILLPFSQLAAANRACFLTQQQLLPFYQQLAANPATLXQLQQWWPFVQLAGTDRAACYQQHMMGWGPVGDG

SEQ ID NO: 221385 - protein, 71 aa, Zea mays
  Clone ID: MRT4577_133495C.1.pep
YLMSCKNQPTGTACPLFSFGFNTNRKYSFFLCYYLTWHTTREVQSFEPTIELRKALQRLILPKGKKKERHL

SEQ ID NO: 221386 - protein, 140 aa, Zea mays
  Clone ID: MRT4577_133496C.1.pep
PFQNLRDMGRASYFFQTMPPEGMGPSNSINGRKNPGPGSSKAQNPFGGNGQHQPVGSLLGGPRASPFPFFPKPNVKFLGPLSGPWGLKSTPLRLFLLGPCVDFPMPQGKNVGQKGGVGLINAYGSFPKFLPPPQAGFGVF

SEQ ID NO: 221387 - protein, 130 aa, Zea mays
  unsure (1)..(130): unsure at all Xaa locations
  Clone ID: MRT4577_133497C.1.pep
PTRXWRIVNHRDIIPTGPRLXGYCHVXHPFILQFGDAKDAPVSNSILDDEDQGDVIGEYTPDVLVTEFMKGEKQLVEKLLQTEINLLRSIRDGSALMQHMEDFYYVTLLENVRSSYQVADTANDEYQLTA

SEQ ID NO: 221388 - protein, 377 aa, Zea mays
  Clone ID: MRT4577_133498C.1.pep
MVGSQYDDDDDNVVGRRKTRWYAVTGGRGFMARHLVAALLRSGEWRVRVTDLAPTLALGHGETEGILSDALRDGRAVYASVDVCNLDQLAKAFEGVDVVFHTAAADPSKNNLQLHYKVNVEGTKNVIDACKICKVKRLIHTSTSAVVFDGVHGLFDADESLPYPDKFPDAYAQTKAEAEKLVIKANGINGLLTCCIRPGSMFGPGDIMMPTLDRYGWSNVTIGEGKNYDDFVYVENVVHGHLCADKTLSTIEGARTSGGKAYFITNMEPMNMWDFLYLVQEELGYKRIFKIRVPIIVIKPASYLIEWAYRAVFSHFGTCQPQILTPARIRYVTLNRTFSCNKAVEELGYKPIVTLQDGLKKAVKLYIQLRDKDLPKI

SEQ ID NO: 221389 - protein, 49 aa, Zea mays
  unsure (1)..(49): unsure at all Xaa locations
  Clone ID: MRT4577_133499C.1.pep
KDSLSHGIKXXLRTFLKIKKTSFTSPNSIHHNLFTHSSFILILLNLLSH

SEQ ID NO: 221390 - protein, 113 aa, Zea mays
  unsure (1)..(113): unsure at all Xaa locations
  Clone ID: MRT4577_13349C.1.pep
MGHHNPRRGSEAVRIPRTVPPHQGKEDTHDRQPLSPAASGAPLDLVXNYGAPLTICMIGAHGFIGSHLCEKHKLDTPHVVLHTNIYCDTIRRLPEPCRAAPCHAHLLTPFQKL

SEQ ID NO: 221391 - protein, 73 aa, Zea mays
  Clone ID: MRT4577_1334C.1.pep
MESITKTAQNAATYVQESISGTSATASKEANKQEAKNSNAGVGERLSAAGSAIGDKADEQKSEANKESAKQNL

SEQ ID NO: 221392 - protein, 66 aa, Zea mays
  Clone ID: MRT4577_133500C.1.pep
GSGDDTQGLPIAISGTLAPMFHLQSSRMTLRQHRHSRAYHPIAPAVGAPWVPGEGNEEERRLGGSA

SEQ ID NO: 221393 - protein, 108 aa, Zea mays
  Clone ID: MRT4577_133501C.1.pep
QTKKKKNFFFFYTPKKVFLFKPSLFRGPKPHLSFLGHKPSKKENQFQIPWLGNPFGKKKHPKFYQKGKNLWPPLCAHTFYSKRNKTLPPLGKKKTPKKKKRPLLWPPP

SEQ ID NO: 221394 - protein, 38 aa, Zea mays
  Clone ID: MRT4577_133502C.1.pep
CCLPDSLSRVVHVPFVLNRWTVDDHERSLPGVGKEHFV

SEQ ID NO: 221395 - protein, 80 aa, Zea mays
  Clone ID: MRT4577_133503C.1.pep
LIRILRSISRILNLRLKRRHTLHPNNAIITSSSHHHRIITLSLTRRILIRMHLPQRLYPIARIRFTTLRGKSRERERAST

SEQ ID NO: 221396 - protein, 70 aa, Zea mays
  Clone ID: MRT4577_133504C.1.pep
FDHPPKVLVVTPWVRSFGSQYNPGDRIASLTLTSDPRILIPGSRCVTLIPFEPQPASCFPGNVLKFLLML

SEQ ID NO: 221397 - protein, 76 aa, Zea mays
  Clone ID: MRT4577_133505C.1.pep
MGQVAGGQAACSWERRQIGGGDGQERLYGGGVEQARHGVSVEWDGGLKFDRPREREREREKERERERESSSRIPSL

SEQ ID NO: 221398 - protein, 86 aa, Zea mays
  Clone ID: MRT4577_133506C.1.pep
GKLPCAWVYLHIAASKTAQYGKALGSLSYELVMRHDNMEAAVYLRKVSSLLSMHSRYKIFAVRHLYRGWSVSIPWWTPHGSTLPML

SEQ ID NO: 221399 - protein, 159 aa, Zea mays
  Clone ID: MRT4577_133507C.1.pep
MNNIESSELRKVFQMFDKNGDGQITKKELGESLKNLGIHISDDELDATMDKIDANGDGCVDVEEFGKLYRSIVGEGQVDKHDEEEDMREAFSVFDQNGDGFITVEELRSVLSSLGLKQGRTAEDCRKMISKVDADGDGRVDFTEFKQMMRGGGFDALGT

SEQ ID NO: 221400 - protein, 47 aa, Zea mays
  Clone ID: MRT4577_133508C.1.pep
VVVAFMVLIMMLVVMRQCLLHLEEEVGRVEAQIQRAREGVLVEDATL

SEQ ID NO: 221401 - protein, 55 aa, Zea mays
  unsure (1)..(55): unsure at all Xaa locations
  Clone ID: MRT4577_133509C.1.pep
SDRIVKMLAVLDPNXILWVNPEXGLNTRKYTEVKAAVSNMVCAGKLIRTQLASAK

SEQ ID NO: 221402 - protein, 121 aa, Zea mays
  Clone ID: MRT4577_13350C.1.pep
MACPRGPCFSRGATAPALPRRPPAPAPPCVARSARPPARAHYPAPAPVRRVARGHGARPPSPPRPANSPAPSPTRPRRRARAALPQRGHGAPARLAAPARGAARRAPSRHGSPAPATIPTY

SEQ ID NO: 221403 - protein, 422 aa, Zea mays
  unsure (1)..(422): unsure at all Xaa locations
  Clone ID: MRT4577_133510C.1.pep
DQAFLQGMSFLASLLKQIDRFLQFDNFMPGYNGVLTVSCIRTLVRIAKKVPSFVCLDHIFELVAPFRNMDKPWKVRIEASRILIDLELHHKGLDAALLLFLKYVDEEKSLRGWIXEYFLMVLYALLSFDMEAVEGATKLAVHVLRICQTSIVPYANDQINXATLIGLLHLLAGTKAYNNVFLRHHVFCILQVAAGRSPTLFGVPKVVTPPLVVKDICSDQHTKADSSIPQPSKPQEPSTSTPSVREVLPTSGPTKDADNISNCSERRNVVKIRVKLTASSSKASDADHRGHFHGGRNENEPGPCSSMSVDAPMVGTANEPLNVSNHNIEEQNSCHDLGSRMSASVSNVKLLDRHDISKELQCTADSRLDTLPKNQFSPAINLPEALDKPGSQLEGVSNSYDGNQAPESERSGNGRERKKQER

SEQ ID NO: 221404 - protein, 106 aa, Zea mays
  unsure (1)..(106): unsure at all Xaa locations
  Clone ID: MRT4577_133511C.1.pep
ALSRPLPKGPPLLFFEKATPALDTXTEQALLQNINRIPKDKRRPSVFVAHRLRTIYDSDQILGPKDGQVVKMGSHRELLDLEGVYAELWNAQETPVGDEEKEFPPL

SEQ ID NO: 221405 - protein, 1142 aa, Zea mays
  unsure (1)..(1142): unsure at all Xaa locations
  Clone ID: MRT4577_133512C.1.pep
SKFGTRKEEKNGNEKSKENGKVTENEKVKNIKLVHIDYILEKAETGIHFVGNVMHSSNQIRRAHCWFPCVDTATQRCPFDLEFTVSTDFIAVSNGDLLYQVLSKEDPSKKTYVYKLNTPVSAQWISLVVGPLEILLDRNDINVSHICLSPALSKLQNTIAFFHDAYSCYEDYLAAPFPLGLYKQIFLPSEMTVLPASLGASMCIFSSDILHDEKVIDLANHTVCESDVSGATALSSTAASSDLYGTQTIGSYGKVRSLKAVAVLQMLEKQMGPDSFRKILQVIVXSKSCLKFSTKXRHLANKVGNLERPFLKEFFPRWIESCGCPVMRLGISYSKKRNMVELAVSRGCTGKATPDPDSHTNGDTREGDAPGWPGMMSVRVHETDGAYDHPVLPMAGEALQVVEIQCHSKLAAKRVWKSKKNTKLDGSDDNIDTSNQENRTSMDSPLLWIRVDPEMEYLAEIHFHQPVQMWINQLEKDKDVISQSQAISALEKLPQLSFAVSNALNNFLNDTKAFWRVRIEAAYALAVTSSEATDLAGLLHLVKFYKSRRFDSDIGMPRPNDFHDVPEYFVLEAIPHAVALVRSSDKNSPKGAIEFILQLLKYNDNNGNVYSDVYWLSAMVLAIGELEFGQQGTGFLPSLLKRIDRLLQFDNFMPGYNGVLTVSCIRTLARIARRLSSSVSLDPIRELIAPFRDMDKPWKVRIEASMVLIDLELHHKGLDAALLLFLKYVDEEKSLRGATKLAVHILRICQANIVPSANDQINLTTLIGLLHLLAGTKAYNNVFLRHHVFCILQVAAGRSPTLFGVPKVVTPPLVVKDICSDQHTKADSSIPQPSKPQEPSTSTPSVREVLPTSGPTKDADNISNCSERRNVVKIRVKLTASSSKASDADHRGHFHGGRNENEPGPCSSMSVDAPMVGTANEPLNVSNHNIEEQNSCHDRESRMSASVSTVKLLDRHDISRELQCTADSRLDALPKNQFSPAINLPEALDKPGSQLEGVSTSYEGNQAPESVNGVETKERKKKDKKDKKRKRDEKRLKKDDPEYLEKKRLKKEKKMEKELARKQLEGEGRATPEQPKTVKPSGSLEVLPARPPAPVLSAEPAAVRSSEPQVSSKETTVDTARTAAKPRIKIKVKPLVRKPEGN

SEQ ID NO: 221406 - protein, 454 aa, Zea mays
  unsure (1)..(454): unsure at all Xaa locations
  Clone ID: MRT4577_133513C.1.pep
MAKARKQKGDGGSTGGGATVLHQKLCLSIDMENQLIYGYTEIKVLAENNRFALHADNMTIQSXLMDGETVEFDYSPHWKNESDQPNWSSVSCLKTAADAACSMYTLSLNREATPNLIVSSERSVKSMTEQQLDENSXSMKKIVEGLKNMVEILFKLPMIKLLMAAVEEGIENSAVEEGKEKENDKEKEEENGNEKSKETGNETEYEKVKNIKLVHIDYILEKAETGVQFVGNVMRSSSQIRRAHCWFPCVDSATERCPFDLEFTVSMDFIAVSNGDLLYQLXYEDYLSAPFPLGLYKHIFLPSEMTILPASLVASTCILSSDILHDEKVIDLIIGTRTKLAYALAKQWFGIYTSAEEPNDEWLLDGLAGFLTDLFIKRYLGNNEARYRRFKANCSVCESDVSGALXLSSTAASSDLYGTQAIGSYGKVRSLKAVAVFKCWRSRWDQTHFGRFCR

SEQ ID NO: 221407 - protein, 222 aa, Zea mays
  unsure (1)..(222): unsure at all Xaa locations
  Clone ID: MRT4577_133514C.1.pep
MEELHKSLSIVLFITCIAGAVAYSDRSELLSHKTCPQPQDFPSEQLYRSYVVIQRFKSTITSDPKNVTATWIGNDICGETTYVGFYCGVLPGRGPIPQSIGHLQDSLFEMLLLNNQLSGCLPHELGMLTKAAVIDAGMNQLTGPIPSSFSCLTSVEQLNLAGNRLYGQVPEALCKLAGPAGRLTNLTLSSNYFTSVGPACRXLNKNGVPDVKNNCIPGLPSP

SEQ ID NO: 221408 - protein, 40 aa, Zea mays
  unsure (1)..(40): unsure at all Xaa locations
  Clone ID: MRT4577_133515C.1.pep
MEICSRVKKKKKKKKKKKKKKKKKKKKKKKKKKKXGGGPF

SEQ ID NO: 221409 - protein, 83 aa, Zea mays
  unsure (1)..(83): unsure at all Xaa locations
  Clone ID: MRT4577_133516C.1.pep
SRMPRRPYDARHPHPGVPWCXAALPPPQRGPAPLPSHRHSLPPSPCSAPAPSPLWLRSTSLSASELTESPHRPNGIFASDAPI

SEQ ID NO: 221410 - protein, 52 aa, Zea mays
  Clone ID: MRT4577_133517C.1.pep
SVIFLVMPPIALKEFRNPLRLVLAVRQKILNGFKVKKKKKKKKKKKKKKKRR

SEQ ID NO: 221411 - protein, 275 aa, Zea mays
  Clone ID: MRT4577_133518C.1.pep
MAVVTRDAACLPLVLLLLVFSAAPSPADGCDRCVRRSKATYYQASSLALNAGSCGYGSLAASFNGGLLAAASPELYRGGVGCGACFQVRCRDSELCSAAGAKVVVTDQARTSNRTALVLSAAAYAAMASAGKAARLRDRRVVDVEYKRVPCEYAKDRNLLIRVEEKSRPPSNLSIRFLYQGGQTDIVAVDVATVGSSNWRFMARDHGPAWSTAQAPPGPLQFRLVVTGGYDGKWVWAESEVLPRRWEAGRVYDAGVQVSDVAQEGCYPCDTREWQ

SEQ ID NO: 221412 - protein, 74 aa, Zea mays
  Clone ID: MRT4577_133519C.1.pep
SLQMMADWPQFYNLFKFPSDFLTKGLTLIFILGLAAARAVSTAVSLLDTWGSEIRTGVVQHLELELVALKAKLL

SEQ ID NO: 221413 - protein, 106 aa, Zea mays
  Clone ID: MRT4577_13351C.1.pep
KMVGPFVKKKKARLKKITGVNVGPVDPTQKLFPFPVGRPKLLLPPLKVSHVVCGNVNPPVLILLVGKKRSPPLYFLNPPPRIFFFGPFFFFSSGRNKIQCFVRGVV

SEQ ID NO: 221414 - protein, 107 aa, Zea mays
  unsure (1)..(107): unsure at all Xaa locations
  Clone ID: MRT4577_133520C.1.pep
MKLNISFPATGCQKLIEVDDERKLRTFYEKRMATEVAADALGEEWKGYVVRISGGNDKQGFPMKQGVLTHGRVRLLLSKGHSCYRPRRTGERKRXSVRGCIVDGNLS

SEQ ID NO: 221415 - protein, 440 aa, Zea mays
  Clone ID: MRT4577_133521C.1.pep
MPSFQHNRDWHRHGCMEELHKSLSIVLFITCIAGAVAYPDRSELLSHKTNPQPQDFPSEQLYRSYVVIQRFKSTITSDPKNVTATWIGNDICGETTYVGFYCGVLPGQGNNLTVTAVLLNGYRLHAPKLQGFIDEIPDLALFHAASNNFGGGIPRVVGLGYFYKLNVGVELPLHTTVYGLTVGSSPAASIPYACVTTALNFTFSIGTDGAKGRKFPGVTDAKALLLNHNSLSGALPADLGYSKVSYLALANNRLTGPIPQSIGHLQDSLFEMLLLNNQLSGCLPHELGMLTKAAVIDAGMNQLTGPIPSSFSCLTSVEQLNLAGNRLYGQVPEALCKLAGPAGRLTNLTLSSNYFTSVAPACAALIKNGVLDVKNNCIPGLASQRRPAECAAFQSQPKTTCPAESTLVACPAAAAMDAAALGERKVRDYSSYVTYATLHD

SEQ ID NO: 221416 - protein, 76 aa, Zea mays
  Clone ID: MRT4577_133522C.1.pep
KTNHEKLYIKERLSHAPLYFYHQLTSPHFTSSLFMTSDPSLPSTCLHLTSSLHLPPCPLPTFSFCPLPFFLHSPTY

SEQ ID NO: 221417 - protein, 40 aa, Zea mays
  Clone ID: MRT4577_133523C.1.pep
GGVRRRGPTAEESQSPATMTDQQAEARSYLSEQIIAEFKA

SEQ ID NO: 221418 - protein, 138 aa, Zea mays
  Clone ID: MRT4577_133524C.1.pep
APGYSFSGVSVFFLNPIHDGGHRVPLPFHVHEMFKFRRPSCLFFCPSVPPRSSGPCGPPCKEQKSPLVLVSPIILFFPPGFLTLFPLPRSPSGRGDSLFCRMLYGPPPILFLAPIVVTTLGALCPFASTYKSMYNSNE

SEQ ID NO: 221419 - protein, 50 aa, Zea mays
  unsure (1)..(50): unsure at all Xaa locations
  Clone ID: MRT4577_133525C.1.pep
LLSXXIXXVXXYPXXXELPCGXXRGXXNGEYWXNALMNPXAVDVYSXSXA

SEQ ID NO: 221420 - protein, 228 aa, Zea mays
  Clone ID: MRT4577_133526C.1.pep
MTHMFPREGASSSSTSMSSQRSETHDDRMIAMVLSEEYAKLDGAMAKRLTNLTSIPHVPRINTYFPTYSDATMDHYRLLDRLNAYGLFEVRVSGDGNCQFRALSDQLYRSPDYHKHVRKEIVKQLKKCNTLYEGYVPMKYKKYCKKMKKSGEWGDHVTLQAAADKFAAKICLLTSFRDTCFVEIVPQYQAPQREIWLSFWSEIHYNSLYDARDLPSKYKPRKKHWLLF

SEQ ID NO: 221421 - protein, 73 aa, Zea mays
  Clone ID: MRT4577_133527C.1.pep
MSNFFMYFWQFAAKICLLTSFRDTCFVEIVPQYQAPHREIWLSFWSEVHYNSLYDARDLPSKYKPRKKHWLLF

SEQ ID NO: 221422 - protein, 132 aa, Zea mays
  unsure (1)..(132): unsure at all Xaa locations
  Clone ID: MRT4577_133528C.1.pep
VTLTDVLSMAIVQADQLLLVQRDAMSGSRYMTYPGTQVTFIFVYDGHGCPXETFGCINDYLCNHLRKFATDRMWMSANLTRXAFQATEDGXLSIVSKEWSVKHEIRQDDCRYLVSIISDLTSVCGIRVQLKC

SEQ ID NO: 221423 - protein, 228 aa, Zea mays
  Clone ID: MRT4577_133529C.1.pep
MTHVFPREGASSSSTSMSSQRSETDDDRMIAMVLSEEYAKLDGAMAKRLTNLTSIPHVPRINTYFPTYSDATMDHYRLLDRLNAYGLFEVRVSGDGNCQFRALSDQLYRSPDYHKNVRKEIVKQLKECNSLYEGYVPMKYKHYCKKMKKYGEWGDHVTLQAAADKFAAKICLLTSFRDTCFVEIVPQYQAPQREIWLSFWSEVHYNSLYDARDLPSKYKPRKKHWLLF

SEQ ID NO: 221424 - protein, 99 aa, Zea mays
  Clone ID: MRT4577_13352C.1.pep
GVTAESSGERSYFANKLKATSRLKAKLLLIAREWKVSDIKTINRQAVEDKCNCGARRYTFGRQKLVHDLNTGIQLSDLNSVLEGDIEPFIRGRITSRQL

SEQ ID NO: 221425 - protein, 240 aa, Zea mays
  Clone ID: MRT4577_133530C.1.pep
MAAKIFALLALLALSASVATATIIPQCSQQYLSPVTAARFEYPTIQSYRLQEAITASILRSLALTVQQPYALLQQPSLVNLYLQRIAAQQLQQQLLPTINQVVAANLAAYLQQQQFLPFNQLAGVNLAAYLQAQQLLPFNQLVRSPAAFLLQQQLLPFHLQVVANIAAFLQQQQLLPFYPQVVGNINAFLQQQQLLPFYPQDVANNVAFLQQQQLLPFSQLALTNPTTLLQQPTIGGAIF

SEQ ID NO: 221426 - protein, 281 aa, Zea mays
  unsure (1)..(281): unsure at all Xaa locations
  Clone ID: MRT4577_133531C.1.pep
QVRLPRPNPFKPWPFPTSLGDCQSITNFSANSVNMTGTLPDFFGSMPSLQELNLAGNSLSGPVPPSLADAPLEVLWLNQKIETTGFSGSISFVAKMTKATKLWLHSNDFTGPLPDFSKLTSLSDLGLRDNQLTGRVPDSLVNLKSLKTVSLGNNLLQGPSPNFAPSVEVDRTGKNQFCLPPGQPCDPRVDLLLEVEAGFMYPAKLAAGXAXNDPCSYQPGVVCDSGKNITSLNFAKMGLNGSISPSIGKIATLETLLLSDXNITGTVPKELAELPALKKSI

SEQ ID NO: 221427 - protein, 240 aa, Zea mays [sequence omitted]

SEQ ID NO: 221428 - protein, 49 aa, Zea mays
  Clone ID: MRT4577_133533C.1.pep
KNCFCQNTKNTLIQCQKNLLKLLAFNNQREYTNYVPMINFRGKKTSAKI

SEQ ID NO: 221429 - protein, 47 aa, Zea mays
  Clone ID: MRT4577_133534C.1.pep
IVAVVIIDMHRLYLFNDYEIPFNIAIVPDRVNLPRTHIVKPCSADDC

SEQ ID NO: 221430 - protein, 382 aa, Zea mays
  unsure (1)..(382): unsure at all Xaa locations
  Clone ID: MRT4577_133535C.1.pep
MTSPSSHHPDSTSASSTPRAGVGNGGIHHLHPPSLHPAPAPTPAAPPAQAQAAHGGPQVRLMCSFGGRILPRPXDRQLRYVGGETRIVSFPRAVTSFAALVAALAKVAPVLFAPGAPRPSLKYQLPQDDLDSLVPITSDDDVDHLMDELDRIQDXRQRRLSPRLRVFLFAPAPDAAFGSVFSGTTSEAASTDQWFVDALNAPAPQPHPTERGRSEASSIVSEVPDYLFGLETTSGEPSPGPAAARAKSDATETPRHDDDDECDVPPSARQMPYVVEGASSWPAPPPPYMAQPVYYFPVPPPVHYLEPSAQGGYMPRPVYHIVAGGGSEAPVGDLHAAGGVYGVPQHMQAFPPMMYAPPRAVVYNYNSEGMPSLPPEGGAHSS

SEQ ID NO: 221431 - protein, 245 aa, Zea mays
  unsure (1)..(245): unsure at all Xaa locations
  Clone ID: MRT4577_133536C.1.pep
MLSPMGAKIYTLLALLALLGCAATFTIITHCXNIYLSPVTAAGFQHPTISXYMLHEAIEGSILRPLALTLRQPYALLQQPFLVHPTLQRIGTQQLRQQXLPTINQVGAANLAAYLQQQQFLPFNQLAGVNPAVYLQAQQLLPFNQLVGSPDAFLLQQQLLPFHLQAVENIASFLRQQQLLPFYPQVVGNINAFLQQQQLLPFYPHNVANIVAFLQQQQLLPFSQHALTNPTPLLQSPTXLGGAIF

SEQ ID NO: 221432 - protein, 564 aa, Zea mays
  unsure (1)..(564): unsure at all Xaa locations
  Clone ID: MRT4577_133537C.1.pep
EPSLTPIAAFQDHRQFKQRYFEFLDYHRAPGGPVFLRICGESACDGIPNDYLAVLAKKFGAAVVTPEHRYYGKSSPFKQLTTENLRFLSSKQALFDLAVFRQYYQESLNARYNHRSGFDNPWFVIGVSYSGALSAWFRLKFPHLTCGSLASSGVVLAVYNYTDFDKQVXVHSGHXGESAGPECKAVLQEITELVDEQLRLESHSVKALFGAQTLKNDGDFLFFLADAAATTFQYGNPDALCPPLIKAKKKRKNLVEAYAQFVKDYYIKKMETPPSSYDREYLKETTPHDSSSRLWWFQVCSEVAYFQVAPKNDSVRSARINTRYHLEGDRHVLKLGVSICSIWEXYYIKKMETPPSSYDREYLKETTPHDSSXSRLWWFQVCSEVAYFQVAPKNDSVRSARINTRYHLDLCRHVFGEGVYPDVFMTNLYYGGTRIAXRLSLASIDCLLCDIKSDNEQLFRLSPFLXHQIYMYTASKIVFTNGSQDPWRHASKQKSSKDMPSYIMKCRNCGHGTDLRGCPQWPFRIEGDASNCSSLAVVNTARERIAKHIDLWLSQCSKPSVGAW

SEQ ID NO: 221433 - protein, 241 aa, Zea mays
  Clone ID: MRT4577_133538C.1.pep
MAAKIFAILALLALSASVATATIIPQCSQQYLSPVTAARFEYPTIQSYRLQEAIAASILRSLALTVQQPYALLQQPSLMNLYLQRIAAQQLQQQLLPTINQVVAANLAAYLQQQQFLPFNQLAGVNPAAYLQAQQLLPFNQLVRSPAAFLLQQQLLPFHLQVVANIAAFLQQQQQLLPFYPQVVGNINAFLQQQQLLPFYPQDVANNVAFLQQQQLLPFNQLALTNPTTLLQQPTIGGAIF

SEQ ID NO: 221434 - protein, 109 aa, Zea mays
  Clone ID: MRT4577_133539C.1.pep
MIKMGELQNPRKGEIRRNCRVANNAPRQPRTAMASVQTTSELRRGREIAQDFKTDLRFQSSCVSALQEAGEAYLGGLCEDTNLCAIHAKRVTIMPKDIQLARRIREERA

SEQ ID NO: 221435 - protein, 74 aa, Zea mays
  Clone ID: MRT4577_13353C.1.pep
PRKMERRCISSPPLSPLLLPPVAPSRSHSSICVQWGMKTGYGRTGRVRALVGWRLGAPILYVIVHRESAQALLQ

SEQ ID NO: 221436 - protein, 240 aa, Zea mays
  Clone ID: MRT4577_133540C.1.pep
MAAKIFALLALLALSASVATATIIPQCSQQYLSPVIAARFEYPSIQSYRLQEAITASILRSLALTVQQPYALLQQPSLVNLYLQKIAAQQLQQRLLPTINQVVAANLAAYLQQQQFLPFNQLAGVNPADYLQAQQLLPFNQLVGSPAAFLLQQQLLPFRLQVVANIAAFLQQQQLLPFYPQVVGNINAFLQQQQLLPFYPQDVANIVAFLQQQQLLPFSQLALTNPTTLLHQPTIGGTIF

SEQ ID NO: 221437 - protein, 240 aa, Zea mays
  Clone ID: MRT4577_133541C.1.pep
MGAKIFALLALLALSASAATSTFIPQCSQQYLSPVTAAGFQYPTIQSYMVQEAIQASILRSLALTLQQPYALLQQPSLVHLYLQRIAAQQLQQQLLPTINQVVAANLAAYLQQQQFLPFNQLAGVNPAIYLQAQQLLPFNQLVGSPYAFLLQQQLLPFHLQAVANIVAFLRQQHLLPFYPQVVGNINAFLQQQQLLPFYPQNVANIVAFLQQQQLLPFSQHALTNPTTLLQPPTIGGAIF

SEQ ID NO: 221438 - protein, 62 aa, Zea mays
  Clone ID: MRT4577_133542C.1.pep
IILVRKVFHCLVDVYTIATFLDCIAHRHTDYLTYIHQHFIKCCTQMTMHTFNCDLAGCSTTS

SEQ ID NO: 221439 - protein, 35 aa, Zea mays
  Clone ID: MRT4577_133543C.1.pep
QKPAIKLAVSPPPSASWLHAPDLKFLNPVPVTVRF

SEQ ID NO: 221440 - protein, 240 aa, Zea mays
  Clone ID: MRT4577_133544C.1.pep
MGAKIFALLALLALSASAATSTFIPQCSQQYLSPATAVGFQYPTIQSYMVQEAIQASILRSLALTLQQPYALLQQPSLVHLYLQRIAAQQLQQQLLPTINQVVAANLAAYLQQQQFLPFNQLDGVNPAIYLQAQQLLPFNQLVGSPYAFLLQQQLLPFHLQAVANIAAFLRQQHLLPFYPQVVGNINAFLQQQQLLPFYPQNVANIVAFLQQQQLLPFSQHALTNPTTLLQPPTIGGAIF

SEQ ID NO: 221441 - protein, 87 aa, Zea mays
  Clone ID: MRT4577_133545C.1.pep
MGKGTQRNEATAAGGEVEENITAWLVSKNTPQIMPFKLPSGGPYDVRVRMTAMRICCSDVHYPTEMRIAHFTVKEPMVIGHDCTALA

SEQ ID NO: 221442 - protein, 144 aa, Zea mays
  Clone ID: MRT4577_133546C.1.pep
INVKLYYALRKSSLPAGRPCSCGMVSSSALEISRTGSRAGAPRSQLNHHTTPLLFFPHELIANSFLLLACSAGVAGPGHAGMCSPRPLPAPMRSNPNSNPTTFSSQPSTDAAGRCVRVSSLSYCGGDGDGDSPSPTDGGSTSPG

SEQ ID NO: 221443 - protein, 97 aa, Zea mays
  unsure (1)..(97): unsure at all Xaa locations
  Clone ID: MRT4577_133547C.1.pep
PYNLRVAAVYGGVSKFDQFKELKAGCEVVIATPGRLIDLLKMKALKMFRATYLVLDEADRMFDLGFEXQIRXIVGQLDQSTTYFFCTMHTSRRLQRI

SEQ ID NO: 221444 - protein, 62 aa, Zea mays
  Clone ID: MRT4577_133548C.1.pep
ADTVELLPWHYDNMQHYPLSAHYLGDDWLTIAAVLQQEHTAELLCSDWPGDQLDRADEPTVL

SEQ ID NO: 221445 - protein, 43 aa, Zea mays
  Clone ID: MRT4577_133549C.1.pep
LLLSILWLYLFRVFTVVRGFQILYYYYEKEALSLSVLSWDTEQ

SEQ ID NO: 221446 - protein, 116 aa, Zea mays
  unsure (1)..(116): unsure at all Xaa locations
  Clone ID: MRT4577_13354C.1.pep
DGYWHITFFCRHLPDCNLGDLPXVYNPYRKAMEQSHQRSVTSDMIRCSHLLRENLCLHPRYLNGCFWGTHCPTFRTKVSPEPSCPRPELDNGLLSHTDXSXIALLFQDDHVTGLQL

SEQ ID NO: 221447 - protein, 38 aa, Zea mays
  unsure (1)..(38): unsure at all Xaa locations
  Clone ID: MRT4577_133551C.1.pep
AFRWFXFILPSTRVNQFLEPLTGGPNFYQFTIFPRGSY

SEQ ID NO: 221448 - protein, 44 aa, Zea mays
  unsure (1)..(44): unsure at all Xaa locations
  Clone ID: MRT4577_133552C.1.pep
CKGXFIAAQAPAINPPGLLPRNCGRNVKASGPITPPXQXDVVFV

SEQ ID NO: 221449 - protein, 115 aa, Zea mays
  Clone ID: MRT4577_133553C.1.pep
MAELRHSMAVRSSNSPAKRDSDTFAALSPFLLSPSTRGSRGGGGGDDDGKDAHRSSPLLSHHHHKRVHLLTSPFRSLLALEDPRSSVDSSSYRILLALLALLLAAVIFCAPLFWS

SEQ ID NO: 221450 - protein, 73 aa, Zea mays
  Clone ID: MRT4577_133554C.1.pep
WNGHEVATPNAQDGDRAHKGRRKASGERQQLGIAARVRACVHTSCCYCTFVSPPLISGLLQYLYVAGTNGSNL

SEQ ID NO: 221451 - protein, 72 aa, Zea mays
  unsure (1)..(72): unsure at all Xaa locations
  Clone ID: MRT4577_133555C.1.pep
MADGSIVVDFPSMGAALCLPNLESLLRDFASGFLFAVSGAPVPGAXDLTNFHRVLSRVLSTYSDPPLEVVWF

SEQ ID NO: 221452 - protein, 117 aa, Zea mays
  Clone ID: MRT4577_133556C.1.pep
WRTRPILSAPLSIPITPTYGDTITEGSDASAAAPPSPHSSLPQEGAPAYGPTLADILPPTSLRDDKEENVDYLNLPCPVPFEEIQREAVMSLKPELFEGSKLDYTKGFNQNHCLSHR

SEQ ID NO: 221453 - protein, 144 aa, Zea mays
  Clone ID: MRT4577_133557C.1.pep
KKKKRFLLNPLPGAKGPKNLQQKLLQQIGPALNQQRGGNPVGYLEKGVPFNQQNMGKFGGGPQKGQKVFYPLGGGNPLGGAFPKKKKMVPKNRVFFKKPGLGREQPPGGGAPFLVTKKRGPKKGPPNREGVPKKKQKIGWDFSP

SEQ ID NO: 221454 - protein, 114 aa, Zea mays
  unsure (1)..(114): unsure at all Xaa locations
  Clone ID: MRT4577_133558C.1.pep
RGGKKEGKTACDSAAAHLKTCTDQKQNSTEKKPGPMXCRVAPSYAAHAPMCMAGAPQRAVLGAKCPPASKLFLARNTWSHNTSLETETPTTAMERTYIREEARKXHLCDDHRIS

SEQ ID NO: 221455 - protein, 363 aa, Zea mays
  Clone ID: MRT4577_133559C.1.pep
MGAPEVHHLFHNPIADHSFSADQSTLAVARDTSVELYGKVGSAFKLKDSLKGHDKTVTGVDIAPNSGRIVTCSQDRNAIVWEPSPEGYKPTLVLLRISRAATFVRWSPSENKFAVGSGDRVIAVCYFEEENDWWVSKHLKKPIRSTITSVAWHPNSVLLAAGSTDAHARVFSAFIKGMDARPPPGVWGERLPFNTVCGEYLNNSAGWVHSVSFSPSGDSLAFAAHDSSITVVYPSGPDQAPRAVVTVSTQQLPFKSLIWTSEDEIIAAGYDCEAFRFQGGEGGWQLAGPIEQKGGPGLGEHREESALNMFRQMDLKGKAKDDTQLQTTHQNTISTVRPFESSGDRVTKFSTSGVDGRIVLWSA

SEQ ID NO: 221456 - protein, 123 aa, Zea mays
  unsure (1)..(123): unsure at all Xaa locations
  Clone ID: MRT4577_13355C.1.pep
MVRSKQTALKFTGGKAPRXQIASKVDXKSAPTTGGXKKPHMYWPETVVLRXIRMYHNSTVVLIGKVSFQCLIRDIAQDFKTHLVFQSHDALVLHEAGDGYLGGLFEDNNLCAVHADRVNIMPK

SEQ ID NO: 221457 - protein, 84 aa, Zea mays
  Clone ID: MRT4577_133560C.1.pep
DGGGAGEDDDEQEMREAFRVFDVDGDGFISAAELQEVLKKLGLPEASSMANVREMICNVDRDSDGRVDFAEFKCMMQGITVWGA

SEQ ID NO: 221458 - protein, 65 aa, Zea mays
  Clone ID: MRT4577_133561C.1.pep
SCWHSEARSSSAHLDVKEGTNYDKTKRLPHFGASKSHICHSYGSIFIRTAFVLVLSTSTASSSNN

SEQ ID NO: 221459 - protein, 58 aa, Zea mays
  Clone ID: MRT4577_133562C.1.pep
KEQKSTRGPLRNFPDSHNIFCFYPSSGAMVPDISHRRLGTSITPPKLNLLHYNLTNTS

SEQ ID NO: 221460 - protein, 94 aa, Zea mays
  Clone ID: MRT4577_133563C.1.pep
MAKASSRLLFSLSLVVLLLLVETTTSPHGQADAIDCGASCSYRCSKSGRPKMCLRACGTCCQRCGCVPPGTSGNEDVCPCYANMKTHDGQHKCP

SEQ ID NO: 221461 - protein, 50 aa, Zea mays
  Clone ID: MRT4577_133564C.1.pep
MDAINSTSCLIVQDLLLSYNIAVDRSDETKKILNKSAASVGLQLPDVYKP

SEQ ID NO: 221462 - protein, 62 aa, Zea mays
  unsure (1)..(62): unsure at all Xaa locations
  Clone ID: MRT4577_133565C.1.pep
CCAPFAGSXSLLWGVAPGVVLCRRLVCCPVPSLTVAPPCGLVCGCSMYACYGGGFGAGVAWV

SEQ ID NO: 221463 - protein, 75 aa, Zea mays
  Clone ID: MRT4577_133566C.1.pep
KKKKKKKKKKKKKKKKKKKKGDVKKAGVINDFHFTYSFLYRATYIILTAGFSSLSLLVQPWYCKTYSVTHLIPFA

SEQ ID NO: 221464 - protein, 386 aa, Zea mays
  unsure (1)..(386): unsure at all Xaa locations
  Clone ID: MRT4577_133567C.1.pep
MSRTFKSTTGLSRRFLNLIAANHSPGVKSLHRIGLGRIFNSTPGPIPNGDRLESAAGQEDYMVRPRALDIIRLPTPVMSFRSSASFESKEWKLDCFPLSDCKVFCMDQSGRGFLFDANSCGVSTVAHLHTPKVKPISLSIPQPNVDEDDHNDEWGSKLFILESMPEEPEVNCQFEAFIYXHARCXPRVLKHWNRHLVPPPPPFIRETVNQNSRRLEVTSYAVIEDGSHICISIEGAGTYCMHTVSHTWNRVGEWTLPFRGKIEYVPELKLWFGTSAESGHLAAADLSAMDSQPQLVGTWKELDPPEGWKECKDSQVVNLGSGRFCIARFFKKNPVDVRSGDELPGQSFAVLTGVEVVNRGCDAEVELRMVTHKSRRVNSTTIETLF

SEQ ID NO: 221465 - protein, 80 aa, Zea mays
  Clone ID: MRT4577_133568C.1.pep
VFPQESLGSRVNGIKAPVKFQLKRVLCMGVPVGNLGMGEKQIPRNIQMGGNFLVSLLKKNWQNVKCLFVKGPMGKPTRGF

SEQ ID NO: 221466 - protein, 231 aa, Zea mays
  Clone ID: MRT4577_133569C.1.pep
MGGFEDDEPPSKRARASSVESASLPDCFLFSKSANPLGSTMARPLPSQGKEAMVGSKGVIKKEEFVRIISKTLYSLGYEKSGAVLEEESGITLHNPMVNLFREQVIDGNWDNAVVTLNKIGLQDVNIMKSAAFLILEQKFFELLRNDNVMGAMKTLRCEITPLGVNRKRVHELSTCMISCSPQQLFLGFSKLGIDSSSSRFKLLEELQKVLPSTVMVLERRLENLVEQALT

SEQ ID NO: 221467 - protein, 71 aa, Zea mays
  Clone ID: MRT4577_13356C.1.pep
PRRVLHKILIFVLEKGRASLTSTYLVKGKKPASSSKSLSLLWKKGRASLTSTYLVREKLLHQGTFIIESFS

SEQ ID NO: 221468 - protein, 45 aa, Zea mays
  Clone ID: MRT4577_133570C.1.pep
DRSVSVHYVWHIYYLENLLYSYMCYRCIRSMTTSAIRPDMIYNRH

SEQ ID NO: 221469 - protein, 295 aa, Zea mays
  Clone ID: MRT4577_133571C.1.pep
DAWADAWADAWADAWADAWGSSDDCQLLTCGQEEAIRRWDVKSGKCLHVYEHPGIGLRSCAWFRDGKQILSGLADQTFCIWDLDGKEVDCWKGQRSATTSDFAVAKDGNLIISLSRDNAILLFDRETKHERIIEEGSTITSFSLSEDGDFLLVNLVSEEIHLWNIRNDPVRVNRYNGHKHSRFVIRSCFGGFEQAFMASGSEDSQVYIWHRAPGDLIETLAGHSGTVNCVSWNPVNPHMLASASDDHTVRIWGAKVSLKRKDVGSSNCNSNGFHHSNGNAHGNGFAHQCNGNSTK

SEQ ID NO: 221470 - protein, 47 aa, Zea mays
  Clone ID: MRT4577_133572C.1.pep
GGRQPPQIGLLTQVLEFGENRFGCPPFVPTPPKWSPKTEGHPCFIRL

SEQ ID NO: 221471 - protein, 598 aa, Zea mays
  Clone ID: MRT4577_133573C.1.pep
MGGSEDDEPPSKRARTSSVESASLPDCFSFSKFSNPLGSTMARPLPSQGKEVMVGSKGVIKKEEFVRIITKTLYSLGYEKSGAVLEEESGIILHNPMVKLFREQVIDGNWDNAVVTMNTIGLQDENILKSAAFLILEQKFFELLKNDNVMGAMKTLRCEITPLGVNRKRVHELSTCMISCSPQQLFLGFSKLGIDSSSSRLKLLEELQKVLPPAVMVPERRLENLVEQALTVQRDACYFHNSVDGLSLYIDHHCGKDQLPSRTLQVLHAHHDEVWFVQFSNNGKYLASASNDKSAIIWEVDEDGELLLRHTLSGHQKSVMMVAWSPDDCQLLTCGQEETIRRWDVKSGKCLHVYEKSATGLISCAWFPDGKQLSGLADQNFCIWDLDGKEVDCWKGQGSTGTSDFAVAKDGNLIISLSRDNAILLFDRETKHERIIEEGSTITSFSLSEDGDFLLVNLVSEEIHLWNIRNDPVRVNRYNGHKRTRFVIRSCFGGFEQAFIASGSEDSQVYIWHRATGDLIETLAGHSGTVNCVSWNPANPHMLASASDDHTVRIWGAKKSSLKRKDVGSSNCNSNGSRSNGNAHNNVFVQKCNGNNTK

SEQ ID NO: 221472 - protein, 77 aa, Zea mays
  unsure (1)..(77): unsure at all Xaa locations
  Clone ID: MRT4577_133574C.1.pep
SKTHINHFACPRFKFELPIFGNLYVTEPNTAPIYNFLKSSAGGFLRDLVKXHFHKFLLDXNGQVFYKNPPSISPGLI

SEQ ID NO: 221473 - protein, 61 aa, Zea mays
  Clone ID: MRT4577_133575C.1.pep
ELTMMCLCGLSTLDLHDPLMGLCDDGHCVLGGLLTDPSDLTALRMRLPDSPSSDGSNSPLL

SEQ ID NO: 221474 - protein, 90 aa, Zea mays
  Clone ID: MRT4577_133576C.1.pep
AHDSLIRLSFLCASFAALTSSLLQPTNEVVVAPGKVVASFKEIVHVLKEASHLSLHHPVVWGRGGVVGILVGGPQQEGYSRLRVQADEWA

SEQ ID NO: 221475 - protein, 116 aa, Zea mays
  Clone ID: MRT4577_133577C.1.pep
SRPPPRTLFTHCLLIKFRVPPPPLKILRSFAVFSFFTAGFFLALIAFFFCGSLFLLRFPFFLQWVFRILVRIFSVPGSFFPCFFHLLSTLFLSFAWVFVFFIFLYILFVGADTQCR

SEQ ID NO: 221476 - protein, 138 aa, Zea mays
  Clone ID: MRT4577_133578C.1.pep
AVASSVRRVLMSAALSTELRHKYNVRSIPIRKDDEVQVVRGTYKGREGKVVQVYRRRWVIHVERITREKVNGSTVNVGIHPSKVMVTKLKLDKDRKALLDRKARGRAADKAKGKFTADDVAAAAGGAAATGASLQEID

SEQ ID NO: 221477 - protein, 52 aa, Zea mays
  Clone ID: MRT4577_13357C.1.pep
SYFPEIYLQTQAAYNQGIFLLIEENDCCNSKVNLFYYIDDFLKAMYTMIQNH

SEQ ID NO: 221478 - protein, 99 aa, Zea mays
  unsure (1)..(99): unsure at all Xaa locations
  Clone ID: MRT4577_133580C.1.pep
SASPCVTSSRRKCLMEHFTGPFYVRRVLMSAGLXTDLRHKYNVRSMPIRKDNEVHVVRGTYKGREGKVVQVYRRRCVIHVERITREKVNGSTVNVGIHP

SEQ ID NO: 221479 - protein, 157 aa, Zea mays
  Clone ID: MRT4577_133581C.1.pep
MKRNPRVTSSRRKCRKAHFTAPSSVRRVLMSAGLSTELRHKYNVRSIPIRKDDEVQVVRGTYKGREGKVVQVYRRRWVIHVERITREKVNGSTVNVGIHPSKVIVTKLKLDKDRKALLDRKARGRAADKAKGKFTADDVAAAAAGGAATGASLQEID

SEQ ID NO: 221480 - protein, 136 aa, Zea mays
  unsure (1)..(136): unsure at all Xaa locations
  Clone ID: MRT4577_133582C.1.pep
MGTEKSRINIVVIGHVDSAKXTTTGHLIYKGGGVDKRVIDRFEKEAGEMNKRPLEYAXVLDKLKADRERGITIDIALWNFETTKYYCTVIDAPGHRDFIRNLITGTYQADCAVLIIDSTTXGFEAGLFEVWQTREH

SEQ ID NO: 221481 - protein, 130 aa, Zea mays
  Clone ID: MRT4577_133583C.1.pep
MKRNPRVTSSRRKCRKAHFTAPSSVRRVLMSAGLSTELRHKYNVRSIPIRKDDEEQVARGTYKGREEKVAQVYRRRCVIHVERITREKVNGSTENVSIHPSKAIVTKLKLDQDRKALLDRKVREPRRRQG

SEQ ID NO: 221482 - protein, 44 aa, Zea mays
  Clone ID: MRT4577_133584C.1.pep
VLASPTLARRSSVPYLHSCSLTSSLFPSSTEVAFYEARSRLPRK

SEQ ID NO: 221483 - protein, 103 aa, Zea mays
  unsure (1)..(103): unsure at all Xaa locations
  Clone ID: MRT4577_133585C.1.pep
MKRNPRVTSSRRKCRKAHFTAPSSVRRVLMSTGLSTELRHKYNVRSIPIRKDDKVQVVRGTYKGREGKVVQVYXRQRWIIHVERITQXKVNIYTINVGMHQSK

SEQ ID NO: 221484 - protein, 158 aa, Zea mays
  unsure (1)..(158): unsure at all Xaa locations
  Clone ID: MRT4577_133586C.1.pep
MKRNPRVTSSRRKCRKAHFTAPSSVRRVLMSAALSTELRHKYNVRSIPIRKDDEVQVVRGTYKGREGKVVQVYRRRWVIHVERITRXEKVNGSTVNVGIHPSKVMVTKLKLDKDRKALLDRKARGRAADKAKGKFTADDVAAAAAGGAATGASLQEID

SEQ ID NO: 221485 - protein, 56 aa, Zea mays
  Clone ID: MRT4577_133587C.1.pep
IAVIGLRFVPVPRVIKVKSSKRSPFVPRVFHIRGLQTLYNVPVISIALSMRPLAWV

SEQ ID NO: 221486 - protein, 157 aa, Zea mays; identical to SEQ ID NO: 221479
  Clone ID: MRT4577_133588C.1.pep

SEQ ID NO: 221487 - protein, 157 aa, Zea mays; identical to SEQ ID NO: 221479
  Clone ID: MRT4577_133589C.1.pep

SEQ ID NO: 221488 - protein, 38 aa, Zea mays
  Clone ID: MRT4577_13358C.1.pep
LNGHTFLFRPLNYLFITSMPAAVCNNPALQMYKLTQAI

SEQ ID NO: 221489 - protein, 157 aa, Zea mays
  Clone ID: MRT4577_133590C.1.pep
MKRNPRVTSSRRKCRKAHFTAPSSVRRVLMSAALSTELRHKYNVRSIPIRKDDEVQVVRGTYKGREGKVVQVYRRRWVIHVERITREKVNGSTVNVGIHPSKVMVTKLKLDKDRKALLDRKARGRAADKAKGKFTADDVAAAAGGAAATGASLQEID

SEQ ID NO: 221490 - protein, 111 aa, Zea mays
  unsure (1)..(111): unsure at all Xaa locations
  Clone ID: MRT4577_133591C.1.pep
NNRGVPLLKVSNFATVIQANWHVFLQRPQRKNPGATQHNGLAGXTPFGPQVNSXEAIPVRPSEQLPNRPGQWDPPNSGALRWANGTPPGRGTYPLGRALLPAPCPFLLAFP

SEQ ID NO: 221491 - protein, 63 aa, Zea mays
  Clone ID: MRT4577_133592C.1.pep
FYQPPPFLVSFASASPPNLLPFLHPIPLPFPLPRHLVRSVPAVVAAFSLGARIVAFLDGGEDL

SEQ ID NO: 221492 - protein, 89 aa, Zea mays
  unsure (1)..(89): unsure at all Xaa locations
  Clone ID: MRT4577_133593C.1.pep
LSARGPGLWWLRRSFGXLPPLSVPPRAPCCVPFRLFWLAGVGFLVRSFPFLSFLLGGPGPRVLRVPVCVLLGFRALFRRLAFVVFFRLR

SEQ ID NO: 221493 - protein, 149 aa, Zea mays
  Clone ID: MRT4577_133594C.1.pep
FPKLYVSFPLCLLIYCLLLACWFKNFGVWGGRYKQGQFKFYGPKGGGTLKFWEKRGGPYPPPPKKQPTKYLGGRPTSPGGGGPLENFWGGENSNFFLEKKPLGAPRAFAHTRTAGPSREGRTDTKNTTRVNFNTPIRKLAKFFKSRGGG

SEQ ID NO: 221494 - protein, 140 aa, Zea mays
  unsure (1)..(140): unsure at all Xaa locations
  Clone ID: MRT4577_133595C.1.pep
DVDLRRCLVTESRRQGGHTGDTRGNVIKRKPAAAWEAGKPLATEAARHVAPTQAMEVRVKILFTSLCHTDLYLWEAKGHTAVFPRXIFGHEAGRLIERAGDGATDEPPGDHVLTVSTGECKECAHCKSADSNLCELLMIN

SEQ ID NO: 221495 - protein, 57 aa, Zea mays
  Clone ID: MRT4577_133596C.1.pep
ATFRTQLRMGLLTLLMSKLQTYEHMNSNQHFLAEKKKKKKKKKKKKNDIKDPKLKNA

SEQ ID NO: 221496 - protein, 146 aa, Zea mays
  unsure (1)..(146): unsure at all Xaa locations
  Clone ID: MRT4577_133597C.1.pep
LASRMGMVAILSLFVCALVXSTPVHANVWQADEDAFFSSNKLVVFGSMEMAPPPGGFFGLCPTLAFFHWASGQLARFSRPVPMGPGPLPPSIPSLFSLLPPFFFFAPYFLFQSLAFSGLSVSIGPSPFFFFFLFLPSLLVFLPLCP

SEQ ID NO: 221497 - protein, 153 aa, Zea mays
  Clone ID: MRT4577_133598C.1.pep
RPCARRVRGPLSGRALFFFFFFFFGWLLCYFWFFVCIYVYQNSQEKFISYIGWHICLKKLTGHYPPLFGGGALLPFGPHRHGPTTLPLFCRGCWTFFQPILKKKKNPGPLHFFEGETHNLTIPERGGSICYRLVSTLKWAARFSNPSKWENPR

SEQ ID NO: 221498 - protein, 63 aa, Zea mays
  Clone ID: MRT4577_133599C.1.pep
FPSTNYSVIVQYLLYCECTHLSAYYRPGCILSTLIMLHAYSDSLLQRVGLKYLIFTYLTLILL

SEQ ID NO: 221499 - protein, 79 aa, Zea mays
  Clone ID: MRT4577_13359C.1.pep
FRCCRMTTAATIPVGLHHYHRWPLGSGLATIFLGLPERGLFLYCKSWTAAPSPRELTVTLWKHWQDPAPHLVSRVSSYV

SEQ ID NO: 221500 - protein, 50 aa, Zea mays
  Clone ID: MRT4577_1335C.1.pep
HLDVAELVGAFGGVSVHEGAELVLHQVARRGRVVVEVTAAGTVAGTESLA

SEQ ID NO: 221501 - protein, 244 aa, Zea mays
  Clone ID: MRT4577_133600C.1.pep
NGFDWLAFSDLSGFARLSLGSAVMLCLEFWFYMFLIVIVGNLENAQVAVAAVSICTNLFGWQIMVFFGFNAAISVRVSNELGAGRPRAAKFAILVVLMSSVAIGLAFFVLVLAFRDVYGAPFTESPEVVRAVASLGVVFAFSLLLNSVQPVLSGVAVGAGWQWLVAYINLGCYYLVGIPVGYIIAFPLRGGVQGMWGGMLTGVGLQTLILVAITLRTNWDKEASEAHSRIQKWGGSAAAKVSHA

SEQ ID NO: 221502 - protein, 166 aa, Zea mays
  Clone ID: MRT4577_133601C.1.pep
IQDSRQSCPGFVIDTKPDLQVAEIIKSSLYLGSQDVTQDLKLMKDCRITHIVSIGVPVPPLPHMSNLVYSFIPALDVPDEPIDNMLNKALPSMEEVIRKGGCVLVHCNAGISRAPTVVIAYLMTYCGLTFNDANALVKEKRPASKPNAGFVQQLLSLERKLMREKT

SEQ ID NO: 221503 - protein, 77 aa, Zea mays
  Clone ID: MRT4577_133602C.1.pep
LTSESGEQSSTEAHYLAPDLKQRAAARMLACPPCLAAPAPPLLRGHTPLLPVCACIPCLARAGHLAVPPVLPGHATP

SEQ ID NO: 221504 - protein, 214 aa, Zea mays
  Clone ID: MRT4577_133603C.1.pep
MAVGKNKRLTKGGKKGAKKKVVDPFSKKDWYDVKAPAMFNIRNIGKTLVTRTQGTKIASDGLKGRVFEVSLADLQNDEVAFRKFKLITEDVQGKNCLTNFHGMDLTRDKMCSIVKTWQTMIEAHVDVKTTDGYSLRLFCVGFTKKRNNQIRKTSYAQHQQVRQIRKKMMDIMTREVQTNDLKDVVNKLIPDSIEKDIEKACQSIYPLHDVFVRK

SEQ ID NO: 221505 - protein, 56 aa, Zea mays
  unsure (1)..(56): unsure at all Xaa locations
  Clone ID: MRT4577_133604C.1.pep
RFLSTVFXQGLETGLTWFKGLNNRAFSLGAAISPLENLLKLETVALRHSQFXRTLG

SEQ ID NO: 221506 - protein, 372 aa, Zea mays
  unsure (1)..(372): unsure at all Xaa locations
  Clone ID: MRT4577_133605C.1.pep
LEAGRLPVYIPLKLVKKVVARQIPLIKLHIEKKVCSEFNDWLVHIRRMAKQIGQASISQASLAHQKGEEMXVHHMHTCLGMEDKFRDYYYKNRLMQLNLDMQISTSQPFLESHQPFLAQVAGFVEERVLRTADGLLLESQVETTWETSIGKITSILEEQFSRMRXASHFLLIKDYVTLLGAAVNKYGYRITQLIEVLEKSRDKYHQLLLLEEVNWIAEEAPDNANDYMNEVLIYLETLVSTALLNDGVKRFTVNAVLGIDIDLKTLEAFADDKFDSTGCXDLGKETTFRDCLVEIRQLTNLLLSSQPENFMNPVIRQRNYGSLDYKKLAIICEKYKDSADSLFGSLSNRNTPQQSARKKSMDVLKRRLKDFS

SEQ ID NO: 221507 - protein, 271 aa, Zea mays
  Clone ID: MRT4577_133606C.1.pep
MAASHRLILLVLCLTATAASAHNITAILDGRSEYTLYNSYLSETKVCDEINSRSSVTVLVLTNGAMSSLVANLSLADIKNALRLLTLLDYFDEKKLHSIGSSSQLTTSLYQTTGQAAGDMGHVNITDLRGGKVAFASAAPGAKFQSTYTKRVADFPSNLSVLEVSDPITFPGLFGAPSASSANITDLLEKAGCKQFARLIVSSGVVKTYQAAMDKALTLFAPNDDAFKAKDLPDLSKLTSADLVALLQYHALPQYAPKASLKVASGRHRGG

SEQ ID NO: 221508 - protein, 338 aa, Zea mays
  unsure (1)..(338): unsure at all Xaa locations
  Clone ID: MRT4577_133607C.1.pep
HASGQIPLIKLHIEKKVCSEFNDWLVHIRRMAKQIGQASISQASLAYQKGEEMCARQREAEAHSHAGPDEHLYALDLENTEEESTLYFDLTPVYRAHHMHTCLGMEDKFRDYYYKNRLMQLNLDMQIFTSQPFLESHQPFLCQVAWXFIVEERVLRTADGLLLESQVETTWETSIGAAVNKYGYRITQLIEVLEKSRDKYHQLLLLEEVNWIAEEAPDNANDYMNEVLIYLETLVSTALLNDDVKRFTVNAVLGIDIDLKTLEAFADDKFDSTGLSDLGKETTFRDCLVEIRQLTNLLLSRQPENFMNPVIRQRNYESLDYKKLAIICXKYKYSADSL

SEQ ID NO: 221509 - protein, 121 aa, Zea mays
  Clone ID: MRT4577_133608C.1.pep
SQPPLPHRHTHALMIAPPPRRTLASPPLRLRLLFLVPRRFLLNMDAYRWCRISETTSRHLATRQEDCKVPDNTTKRGFVSETTVEETNYYHVGHVVLGSFIFVVIGSCMRSNHLRDISFYI

SEQ ID NO: 221510 - protein, 64 aa, Zea mays
  Clone ID: MRT4577_133609C.1.pep
QQPSSCRRRHRSNKQTSNQEEARQAPAGSWVTRRQARLPELAVLLLPPRRRHRRVLVVVLTVGG

SEQ ID NO: 221511 - protein, 215 aa, Zea mays
  Clone ID: MRT4577_13360C.1.pep
MEDGSSAPRRATPAPTRRSRSADFHNFSERRRRDRINEKLRALQELLPNCTKTDKVSMLDEAIDYLKSLQLQLQMLVMGKGGGMAPVVPPELQQYMHYITADPAHQMMPPPLRPSAGQLQPAAGRQFQITQAAAAAANNDNDPQRRRQSNVESDFLSQMQNLHPSDQPPHHHNFLRPPRLQLFTPEQRGGGGGLPNTSHNAGWISGRSSSYNFME

SEQ ID NO: 221512 - protein, 641 aa, Zea mays
  Clone ID: MRT4577_133610C.1.pep
QLVCSEDGDQLAMRLISALMEYYIGPEGRGTVEEISTKLREGCPSYFNESDYKYYLAVECLERASMTNNADERDILARDAFNLLTKIPDSADLSAICKRFENLRFYEAVVRLPLQKAQALDSNADIINGQIDPRHHDTIMLQREQCYRIVMDALCTLKGVGHSRMQSADKSSALATAADPASRSKYIKQIIQLSVQWPDTVFHEHLYRTLIELGLENELLEYGGSDLVSFLQSAGRKHQEEVRAVSSVTPGAAKMHDLGAPISTSQTKYLELLARYYVRKGEHIAAARMLLILAERQCSNSEEAPALDKRYEYLRDAVLQAKSAGIAADLSKNPVDSSTVDLLEGKLVVLRFQIQIKEELELMVARLENIPSSSELPNVPFPRDNILANAETAKAAKDKAKELSLNLKSITQLYNDYAVPFDLWEVCLEMLSFANYSGDADSKIVREVWARLLDQALTKGGVAEACSVVKRVGSKLDPADGACLPLDIICLHLEKAAVDRLSSGEELVGDDDVARALLGACKGLPGPVLSVYDHLLSNGAIIPSLNLKLRLLRSVLAILREWGISVIAHRLGTTSAGASFFLDGTFSLNQTGTANQGARDKIISLANRYMTEVRRLNLPQNQTENVYRGFRELEEKLLSSY

SEQ ID NO: 221513 - protein, 264 aa, Zea mays
  unsure (1)..(264): unsure at all Xaa locations
  Clone ID: MRT4577_133611C.1.pep
WSVPRDNILADAEAAKAAKDKAKELSLNLKSITQLYNDYAVPFELWEVCLEMLSFANYSGDADSKILREIWARLLDEALTKGGVAEACSVVKRVGSKLDPADGACLPLDIICLHLEKAALVDRLSSGEELVGDDDVARALLGACKGLPEPVLAVYDQLLSNGAIIPSLNLKLRLLRSVLAILHEWGISVIAHRLGTTSTGASFFLDGTFSLNQTGTANQGARDKIISLANRYMTEVRRLNLPQNQTXNVYRGFRELEEKLLSSY

SEQ ID NO: 221514 - protein, 81 aa, Zea mays
  unsure (1)..(81): unsure at all Xaa locations
  Clone ID: MRT4577_133612C.1.pep
PAQEKFIKFFXNTQFVLFKPALLVFSSSRNLQPIKVKVFALTNAPPTFAESPGNIALFAGQQGLGFSPMALDNXPKPPKPF

SEQ ID NO: 221515 - protein, 145 aa, Zea mays
  Clone ID: MRT4577_133613C.1.pep
AVDRLSSGEELVGDDDVARALLGACKGLPGPVLSVYDHLLSNGAIIPSLNLKLRLLRSVLAILREWGISVIAHRLGTTSAGASFFLDGTFSLNQTGTANQGARDKIISLANRYMTEVRRLNLPQNQTENVYRGFRELEEKLLSSY

SEQ ID NO: 221516 - protein, 464 aa, Zea mays
  Clone ID: MRT4577_133614C.1.pep
RGPDSLSRLIKQLIQLSVQGPDTVFHEHLYRTLIELGLENELLEYGGSDLVSFLQSAGRKHQEEVRAVSSVTPGAAKMHDLGAPISTSQTKYLELLARYYVRKGEHIAAARMLLILAERQCSNSEEAPALDKRYEYLRDAVLQAKSAGIAADLSKNPVDSSTVDLLEGKLVVLRFQIQIKEELELMVARLENIPSSSELPNVPFPRDNILANAETAKAAKDKAKELSLNLKSITQLYNDYAVPFDLWEVCLEMLSFANYSGDADSKIVREVWARLLDQALTKGGVAEACSVVKRVGSKLDPADGACLPLDIICLHLEKAAVDRLSSGEELVGDDDVARALLGACKGLPGPVLSVYDHLLSNGAIIPSLNLKLRLLRSVLAILREWGISVIAHRLGTTSAGASFFLDGTFSLNQTGTANQGARDKIISLANRYMTEVRRLNLPQNQTENVYRGFRELEEKLLSSY

SEQ ID NO: 221517 - protein, 97 aa, Zea mays
  Clone ID: MRT4577_133615C.1.pep
LFIVPASAGIAIIITVDTTTCHFSSSHLALSLLVQVAAFSRALCYDDLLAPPTLRSAHKQVKGGHWLCVQTCIWRRRRDRQHEQYDSFCHDHSPNQR

SEQ ID NO: 221518 - protein, 54 aa, Zea mays
  unsure (1)..(54): unsure at all Xaa locations
  Clone ID: MRT4577_133616C.1.pep
RPIGCLVCHLSSDHWFQNMYLITIDHLTAGYAQPPVCXXXXXXXXXXXXXDYCT

SEQ ID NO: 221519 - protein, 97 aa, Zea mays
  Clone ID: MRT4577_133617C.1.pep
MSAPAGASTYQVAPPHGYVAYEQVPPPASYYPYPYYGYGSGDGMGHANPSYYQPQPQPQPDGNQQPQVAYPPYPYQFDMAPAPQLFSDENPNACSVM

SEQ ID NO: 221520 - protein, 90 aa, Zea mays
  Clone ID: MRT4577_133618C.1.pep
AHNVLVKGVALDQVKRCCSEYSLIRPIAPSPFNYVFLLWFQLGTRRLFLLGCYPDCTTWQLTAEQPYIADAGPSAQRYSWRTTSAHHCIC

SEQ ID NO: 221521 - protein, 527 aa, Zea mays
  Clone ID: MRT4577_133619C.1.pep
MALEAAYDYLHVAVVQCTPTQAAAVLGVLLLLAIRLAAAARSSSATSPKWKQHRLPPTPPGKLPIIGHLHLIGSHPHVSFRDLHAKYGHNGLMLVQVGAVPTIVVSTPQAAEAVLRTHDHVLASRPRNPVADIIRYNSTDVAFAPYGEYWRTARKVVNTHLLSAKMVFSKRREREEEVRLVVARIRDAAEASPGTALDMTELLGGYASDFVCRAVLGESHRKQGRNKLFRELTETSAALLGGFNVEDYFPKLADVDLFLRIICAKAKGVSKRWDSLFNELLALSGGKQGDHNSEDFVHLLLSLQKDYGLTTDNIKGILVNMFEAAIETSFLVLEYSMSELMNNRHVLAKLQKEVRTATPDGRMVMEEDLSRMPYLKATIKESMRIHPPAPFLLPHFSTHDCEINGYTIPAGTRVIVNAWALARDPTCWDKAEEFFPERFLEQGRDAEVDMYGKDIRFVPFGAGRRICAGATFAIATVEIMLANLIYHFDWEMPAEMERTGAKVDMSDQFGMTLRRTQKLYLVPRIPK

SEQ ID NO: 221522 - protein, 79 aa, Zea mays
  Clone ID: MRT4577_13361C.1.pep
GRGRLAAVLQVGRWIDPRGGRSLSPTTGWIKLGGKFPAAAGGERADLEVGGEGRRCGPAARGRPGTWRRADGGEGREEG

SEQ ID NO: 221523 - protein, 530 aa, Zea mays
  Clone ID: MRT4577_133620C.1.pep
MALEAAYDYLHVAVVQCTPTQAAAVLGVLLLLAIRLAAAARSSSATSPKWKQHRLPPTPPGKLPIIGHLHLIGSHPHVSFRDLHAKYGHNGLMLVQVGAVPTIVVSTPQAAEAVLRTHDHVLASRPRNPVADIIRYNCTDVAFAPYGEYWRTARKVVNTHLLSAKMVFSKRREREEEVRLVVARIRDAAEASPGTALDMTELLGGYASDFVCRAVLGESHRKQGRNKLFRELTETSAALLGGFNVEDYFPKLADVDLFLRIICAKAKGVSKRWDSLFNELLSEYALSGGKQGDHNSEDFVHLLLSLQKDYGLTTDNIKGILVNMFEAAIETSFLVLEYSMSELMNNRHVLAKLQKEVRTATPDGRMVMEEDLSRMPYLKATIKESMRIHPPAPFLLPHFSTHDCEINGYTIPAGTRVIVNAWALARDPTCWDKAEEFFPERFLEQGRDAEVDMYGKDIRFVPFGAGRRICAGATFAIATVEIMLANLIYHFDWEMPAEMERTGAKVDMSDQFGMTLRRTQKLYLVPRIPK

SEQ ID NO: 221524 - protein, 284 aa, Zea mays
  Clone ID: MRT4577_133621C.1.pep
MRDFASCLSQSAVQVAHSSSSSGQNFVQSAYVARLRDKRCVVTVTWSKVAMGQAFAIAIHDYSNRCLCKAEVKPWLFSKRKGSKVMELDSGNVEIIWDLSAAKFAAGPEPLEGFHVALLYGLEVVLVLGNLSKEEDHRVLSDASHCDAVMIARKEHIYAKKMYSAKARFLDIGQIHHISIECDMAGVRDPCLEIRIDKKKVLHLKRLAWKFRGNQTIYVDGLPVEVLWDVHDWLFGSTNGCAVFLFQSGQSMEKISFRTCSQNEKEAQAHRLGFTLILKAWKTE

SEQ ID NO: 221525 - protein, 76 aa, Zea mays
  Clone ID: MRT4577_133622C.1.pep
PARRVQKLHFTLGHQTPEAGPVNPLYQPTELYLGAQAFFLPVAGSPLALKDPRGNVAPGNLVPRELRSEDCSPTKF

SEQ ID NO: 221526 - protein, 86 aa, Zea mays
  Clone ID: MRT4577_133623C.1.pep
PEKAPWITSPSTAFAFWAPICSRLSLAFERGRLPCKYGLLAAYLWLVMYCCIPSLISAGWSSGWEGLKNVQCLRVLVIDRANKPFI

SEQ ID NO: 221527 - protein, 284 aa, Zea mays
  Clone ID: MRT4577_133624C.1.pep
MRDFASCLSQSAVQVAHSSSSSGQNLVQCAYLARLRGKPCVVTVTWSKVASGQAFAVAIHDYSNRCLCKTEVKPWLFSKRKGSKVVELDSGNVEIIWDLSAAKFAAGPEPLEGFRVALLYDLEVVLVLGDLSKEEDRRVLSDALHSDAVMIARKEHIYAKKVYSAKARFLDIGQIHHISIECDTAGARDPSLEIRIDKKKVLQVKRLAWKFRGNQTIYVDGLPVEVLWDVHDWLFSSSNGCAVFLFQSGHSMEKSLFRTCSQNEKEAQAHRFGFTLILKAWKTE

SEQ ID NO: 221528 - protein, 69 aa, Zea mays
  Clone ID: MRT4577_133625C.1.pep
PPYTTVFSLPGPVLVLPKAPPPKGAPLLKSIPMEKIPLFPPVFFPPRRVQAPPAQAGITRNKACLFGDA

SEQ ID NO: 221529 - protein, 125 aa, Zea mays
  Clone ID: MRT4577_133626C.1.pep
VLISHSYVNAIIYRLDTSVRMVSSIRAISAVGSILWSASAPPPLYISLVSVTMYSCRTSLPVHRVMKTCLCPHSSYRSLCSSPSFIVERVGPPPMTFISTHIFTFPAYPAMAPRVRLDNFSLLRS

SEQ ID NO: 221530 - protein, 211 aa, Zea mays
  unsure (1)..(211): unsure at all Xaa locations
  Clone ID: MRT4577_133627C.1.pep
GQAMAFMKRTFGGDLPDRARPQQASERAAAAGLAXAQAGARGRGSAVGTRYTRGAYVQAAHAETDNTIQACRAAPTASGRLWRTLNSDHVGIQELPLNERLYXLQPLPPDEAVAEGARLATQDIMILKPFINQNAWDGVQNYLLLLSFYLCYELNTEMXSSTKEDNLYLNELTGKFLSTIDXIDHALXIKSSPYVYQYFAATKYALGDVLD

SEQ ID NO: 221531 - protein, 48 aa, Zea mays
  Clone ID: MRT4577_133628C.1.pep
SLTFTLLLAERQLIAAWELHNTILRMRTYAADATHSYATSRLGGATGP

SEQ ID NO: 221532 - protein, 131 aa, Zea mays
  Clone ID: MRT4577_133629C.1.pep
RALWVSCPPPLTPPATLGPGFAGVFLGPFPPPAFGLFLKFPAGFFFPSPQLPPRPVGVVSTPGKMLVPPPGPSEVPPFFLRSPLFFLPPPFCFLVQFVPHPWLGKKKTRQPAYLLTTCCFYMVPFIKRNNP

SEQ ID NO: 221533 - protein, 84 aa, Zea mays
  Clone ID: MRT4577_13362C.1.pep
QLLGQPVCWLITAFVIRLWFDTTSDWTLFVLRMQFLSIFHLYYYHPPAASDPRRLRARSSSYVSLLRCLVRSFLARSSVLFPPL

SEQ ID NO: 221534 - protein, 66 aa, Zea mays
  Clone ID: MRT4577_133630C.1.pep
YVLPLHADPSWVDSLRGTPGQFGGKQVHRLRQGPDLPLKEDHERTELESRQGVSRQRRCRMSPKTF

SEQ ID NO: 221535 - protein, 118 aa, Zea mays
  Clone ID: MRT4577_133631C.1.pep
NLQVRILRQLCSVGLVSSKHARLSSCTSKALDRGEEETNGQQAGDAGVPPAAAAATGSHEERRVARRTARDALLLLPAALPRALPQPLRRVASGPQRHLFFSRTRRLSQTTSDSEPAI

SEQ ID NO: 221536 - protein, 69 aa, Zea mays
  Clone ID: MRT4577_133632C.1.pep
VPKGGGFKQKPFPLPPRDSKILRCEEHSCPACGCDFLRPRGGPERNPRPVFYFVWASALRGSPCYNEHK

SEQ ID NO: 221537 - protein, 637 aa, Zea mays
  Clone ID: MRT4577_133633C.1.pep
SARANTFKVLTLEPIWANAMLDRIVSMVERDKNHACIIVWSAGNESSYGPNHASMSGWIRERDPTRLLHYEGGGSRTSSTDIVCPMYMRVWDVGKIAKDPSETRPLILCEYSHAMGNSNGNIDAYWMAIDNTFGLQGGFIWDWADQGLLKEDSDGSKFWAYGGDFGDTPNDSNFCLNGIVWPDRTIHPALHEVKYLHQPIKISSADNMLKIENGHFFETTEALDFSWVLHGDGCVLGSGPLNIPTLAPQTSQLINMESSPWFALWSACAAKEVFLSVNVKQRHETRWAKAGHLLASAQLCLPQKNGFVPSVIALSSSPLVCERIGDNVTICKNNAWKIKVNSQLGTIDSWKVNDVELMSKGILPCFWRAPTDNDKGGFFTKPYDSRWREAFLDNVSFHSSQFSVKELPDNTVEFSTLYYGVPGHLPKPDDEASESILFRVKMVCRIHGSGDVVLDYEVNPRSDLPPLPRVGVVFSAGRSLSHVTWYGRGPFECYPDRKAAAHVGVYESSVEELHVPYIAPVECGGRADVRWVALRDAGGLGLYASAHGGSPPMQMSASYYGAAELDRATHVHRLVKGDDIEVHLDHRHMGLGGDDSWSPCVHEQYLLPPTRYAFSLRLCPLLPSSSCHDIYRSQLPS

SEQ ID NO: 221538 - protein, 66 aa, Zea mays
  Clone ID: MRT4577_133634C.1.pep
SLCYWGHGQCQRDSYISAITIIWIFVHASAGSRTSSMFTCPYANRVTDSFNVLLLIFLLTCMCGRS

SEQ ID NO: 221539 - protein, 43 aa, Zea mays
  Clone ID: MRT4577_133635C.1.pep
QPPIHAKGFCIRTPHNILFSHRAQGLWSISYGRGGSKRKFGYG

SEQ ID NO: 221540 - protein, 134 aa, Zea mays
  Clone ID: MRT4577_133636C.1.pep
VKVEGFKHLDSCFPFLAFPFKARSLGIFHPFRSCFTASFHLAFPFKARSLGIFHPFRSCFTASFHVNFDLPLPLFPLLSRLRIPHIVASGGLRWNCPNHLNRCWTSFSQLMLSLAYHVYHCSGLDPFLYAANPT

SEQ ID NO: 221541 - protein, 62 aa, Zea mays
  Clone ID: MRT4577_133637C.1.pep
SIDQYQSLACAYADDAKAYMEGGLLGACLPSFLVPDHYAFPLPLPPLQLPSSQPNNKPFQMP

SEQ ID NO: 221542 - protein, 85 aa, Zea mays
  Clone ID: MRT4577_133638C.1.pep
GQGDAIQPLTTTSCPLHPPARTSSSDNLLSFTPRRSRRLMEEFIMGRSSYLRDYLFKPLLFMLLTQRERFEIHNNTLLEHIRLPP

SEQ ID NO: 221543 - protein, 68 aa, Zea mays
  Clone ID: MRT4577_133639C.1.pep
FINTRVTASVVRPKSYLTSRKPDDVLHIYTLLNFMDHPEVVTIHTYSCSRSGTTNMTFNHKLTLLGRD

SEQ ID NO: 221544 - protein, 61 aa, Zea mays
  Clone ID: MRT4577_13363C.1.pep
EQAANTRFYPNRIRCNLLGKTHRKRFTNKWSRLVHSTRDGCGCRTTSQLTRVSQKIQVQEK

SEQ ID NO: 221545 - protein, 46 aa, Zea mays
  Clone ID: MRT4577_133640C.1.pep
MAFLPLAAFVVGCSLGSRAFVHMRVSCSLCLLQHASVAGVAPDVGV

SEQ ID NO: 221546 - protein, 138 aa, Zea mays
  Clone ID: MRT4577_133641C.1.pep
GKDSKQLDVFISKNSSWGNPMGCANPGQTLVLRVGKKRKKKKPARKGMGGAPLPGRQPLDQNYRGRGPPLSFFFFLEKKKKIMQIFRRFPGRPGTMTPLEPSRAFHRFFPFGVLHHVAQFAEPKATNWGQQRGRCPLN

SEQ ID NO: 221547 - protein, 165 aa, Zea mays
  Clone ID: MRT4577_133642C.1.pep
GFLPDAAPATARARDAGAPAQPGATTNGARGPPCYLPSAATTQHKDQARTGLQHPSTGDPTNVRHIVTSNHANYPKGQEPAENFHIGSGSILTVNRQACHHQRGMHQTVPTNQRVLEQTFRCSRHKVAHHLLHFLPPMESTATPFDTQDSMTKLIFDLTATPIIG

SEQ ID NO: 221548 - protein, 97 aa, Zea mays
  unsure (1)..(97): unsure at all Xaa locations
  Clone ID: MRT4577_133643C.1.pep
GNPEDNLNYTGGGKQTQYTSYNYNXGYIHHCTIKKREEDTKDYYAVGIGQTARKXWLKTPPKSGPDVPYTXGLIXEPGQSFDSNDTLTHYEPKAKAR

SEQ ID NO: 221549 - protein, 24 aa, Zea mays
  Clone ID: MRT4577_133644C.1.pep
LDTEPVSQTSFNELRRYELVSVGS

SEQ ID NO: 221550 - protein, 150 aa, Zea mays
  Clone ID: MRT4577_133645C.1.pep
IITEWNKGELDSYLIEITRDILKFKDTDGSPLVEHIKDTAGQKGTGKWTVVSALDNGMPVTLIGEAVFARCLSAIKNERVRASKILSGPNGKFTGDKKQFIHDVSKALYASKIISYAQGFMLMREAAKENRWHLNNAGIALMWRGGCIIR

SEQ ID NO: 221551 - protein, 71 aa, Zea mays
  Clone ID: MRT4577_133646C.1.pep
PDHYFLSSCSHLCHCPAYMFSSHLGSPSEFAPKKKKKPGNMPRMLLGLNGVPSKHVKRSACDQGSRLQPVG

SEQ ID NO: 221552 - protein, 112 aa, Zea mays
  Clone ID: MRT4577_133647C.1.pep
LVIGFTQILLPLDGMLCSVDDDPEHEFKFQRPRKDEQGREDLLPRKVEQESKWQGAPSARYMWRRSGAMYLSFTGAAIDSATFVHPQCLGTTVVAKPAIEPGECLEIAKLST

SEQ ID NO: 221553 - protein, 108 aa, Zea mays
  unsure (1)..(108): unsure at all Xaa locations
  Clone ID: MRT4577_133648C.1.pep
PLCDSSLGSLRFYCPLTECFALWMMXEHGEALIANVECPHCCRMFCAQCKVPXHTGVACAEFKFQRLRKDEQGREALLPRKVEQESKWXRCPECKIYVEKIRXYVFII

SEQ ID NO: 221554 - protein, 53 aa, Zea mays
  Clone ID: MRT4577_13364C.1.pep
PMINTTHKTSGSFLFQLLIKHYEQEIQNPCLILPPSTNVSLCYSCRSNFLKFD

SEQ ID NO: 221555 - protein, 99 aa, Zea mays
  Clone ID: MRT4577_133650C.1.pep
DVYLVLVLSLVCLVNLVLHSAGRGSLLGVGEAVIPGGMLGRSFLLELEEVVVLLLPHHSSLWPPIPSLLHILLSHRCVCDSISFCLSLEVVSRPASRYP

SEQ ID NO: 221556 - protein, 42 aa, Zea mays
  unsure (1)..(42): unsure at all Xaa locations
  Clone ID: MRT4577_133651C.1.pep
QFWLGGSSDNLQNFLKMIGGWYXPALKGAGIKYDDPXVLYLD

SEQ ID NO: 221557 - protein, 107 aa, Zea mays
  Clone ID: MRT4577_133652C.1.pep
MADRARGIDGSTELASQPASSQLARRARPSSSPPFRSVPSRPPPPPHSGMEMKKIACAVLVAASAATVALAAEAPAPGPTSGSSAVAPAVGAALGAAVASFFAYYIQ

SEQ ID NO: 221558 - protein, 515 aa, Zea mays
  Clone ID: MRT4577_133653C.1.pep
HLAATKLRHLVLFPPKTPVPGRLDLLIRCLCPRIGLWEAGSVSDSLEWWAYAGISFFLVLFAGIMSGLTLGLMSLGLVELEILQRSGTDAEKAQAAAILPVVQKQHQLLVTLLLCNAAAMEALPIFLDRMFHPVVAVVLSVTFVLAFGEVIPQAICTRYGLAVGANFVWLVRILMVICYPISYPIGKVLDCALGHNESALFRRAQLKALVSIHGKEAGKGGELTHDETTIISGALDLTEKTAAEAMTPIESTFSLDVDSKLDWEAIGKILARGHSRVPVYSRNPKNIIGLLLVKSLLTVRAETETPVSAVSIRRIPRVPSDMPLYDILNEFQKGSSHMAAVVKAKPKTEPPPDRTEPNREAVGPAQLTVTLLSNAEESADNVVVDIERPHNRQINGIPASNAVPRSSEDIEDGEVVGIITLEDVFEELLQEEIVDETDEYVDVHKRIRVAAAAAASSVARAPSVRRLTGQKAANLQGAQNRQGQQPPGILKKPTEGDSNSSKQVNLVEPLLEKRR

SEQ ID NO: 221559 - protein, 107 aa, Zea mays
  unsure (1)..(107): unsure at all Xaa locations
  Clone ID: MRT4577_133654C.1.pep
AGRFGLGSLLTVCLIQIANMHYTNEKELWDVLTTKYSASDAGSEMYIMKSFHDYKMVDNHSIVEXTHEIQCIAKELDQKKKKKKKKKKKKKKKKKKKKKKKKKKRPL

SEQ ID NO: 221560 - protein, 522 aa, Zea mays
  Clone ID: MRT4577_133655C.1.pep
MAAAAGKARAMSLAAAVRVVAATARPASSAAAAAGVGAMALIVQGEDTAFGSLEWWAYAGISFFLVLFAGIMSGLTLGLMSLGLVELEILQRSGTDAEKAQAAAILPVVQKQHQLLVTLLLCNAAAMEALPIFLDRMFHPVVAVVLSVTFVLAFGEVIPQAICTRYGLAVGANFVWLVRILMVICYPISYPIGKVLDCALGHNESALFRRAQLKALVSIHGKEAGKGGELTHDETTIISGALDLTEKTAAEAMTPIESTFSLDVDSKLDWEAIGKILARGHSRVPVYSRNPKNIIGLLLVKSLLTVRAETETPVSAVSIRRIPRVPSDMPLYDILNEFQKGSSHMAAVVKAKPKTEPPPDRTEPNREAVGPAQLTVTLLSNAEESADNVVVDIERPHNRQINGIPASNAVPRSSEDIEDGEVVGIITLEDVFEELLQEEIVDETDEYVDVHKRIRVAAAAAASSVARAPSVRRLTGQKAANLQGAQNRQGQQPPGILKKPTEGDSNPSKQVNLMEPLLEKGR

SEQ ID NO: 221561 - protein, 275 aa, Zea mays
  Clone ID: MRT4577_133656C.1.pep
MHQRPAVSRGACVREREATSRRFSIFFSLSLTLSLAKASPFFPPLFPHCSRNRSSPPRCSWNRKVGSAMSNEFDYLFKLLLIGDSSVGKSCFLLRFADDSYVDSYISTIGVDFKIRTVEVEGKTVKLQIWDTAGQERFRTITSSYYRGAHGIIIVYDITDMESFNNVKQWLDEIDRYANDSVCKLLVGNKCDLAENRAVDTSVAQAYAEEVGIPFLETSAKESINVEEAFLAMSAAIKKSKAGSQAALERKPSNVVQMKGRPIQQEQQKSRCCST

SEQ ID NO: 221562 - protein, 53 aa, Zea mays
  Clone ID: MRT4577_133657C.1.pep
KATNAQSPVYLRSKGLGYILQHGGRAVLIGAPQPLVGIPTLCHQGGPQTKDYT

SEQ ID NO: 221563 - protein, 70 aa, Zea mays
  Clone ID: MRT4577_133658C.1.pep
VHFSVPCINAVYVPVYRIVVKRRDMLGFLYVNPDGFYVEMVMLWVDLIERVWSTSLLVTAASLVGVLGGP

SEQ ID NO: 221564 - protein, 61 aa, Zea mays
  Clone ID: MRT4577_133659C.1.pep
FPCPFNNCDLRFVKPQFSTLPDPTSYRKLHLNVYNHCHPTIINPITAYYFGALIGTKHHGT

SEQ ID NO: 221565 - protein, 181 aa, Zea mays
  unsure (1)..(181): unsure at all Xaa locations
  Clone ID: MRT4577_13365C.1.pep
MRFSEVFAASSVASLVAAHGGIQGAPKLFGLPNDIKIRMPSPRAARAAAAMEGPHHLQARQGGDANNRCGPSFGNAVCAAGYCCSGAGYCGNTAEHCNAPDCLFNFGPGCDANKTPAGASTRNDARPQKGSVXTGGAGIYACRKPGTVAITYDDGPYISPDEGSEQVQGQLVSRLLFFVTG

SEQ ID NO: 221566 - protein, 40 aa, Zea mays
  Clone ID: MRT4577_133660C.1.pep
HRVSFFQANLKEFLFSSFYFLYFFFFFFIFFFFFFFFFFF

SEQ ID NO: 221567 - protein, 69 aa, Zea mays
  unsure (1)..(69): unsure at all Xaa locations
  Clone ID: MRT4577_133661C.1.pep
XXGGKSSTKXXKHXXXRGIXPLQMLLQXPTXGXELGLGRXASPLRAPPPPAPSPVLRAAAGMTKNEXPX

SEQ ID NO: 221568 - protein, 78 aa, Zea mays
  unsure (1)..(78): unsure at all Xaa locations
  Clone ID: MRT4577_133662C.1.pep
MSSLLYASPPCANYECAHSDATKTIGLLEKHKDYAVRAQSLPHHGGTMANLTDKAAFRSTDDMYHKMLTTKXTGGGIH

SEQ ID NO: 221569 - protein, 97 aa, Zea mays
  Clone ID: MRT4577_133663C.1.pep
PLFISHSSHQSFSVQIRTGLADYTVSTTISFSNYRAKKLPVLTLMHSACVGIGTSISDGHGVRSFFSSSGINLAAQCLTCFRYRCVILIHVGTQAPT

SEQ ID NO: 221570 - protein, 345 aa, Zea mays
  Clone ID: MRT4577_133664C.1.pep
MDEASTSASGAATRRGFVPARSGVFYRFTQQNLPAWKPAMTPGCIIAMFLIIGIIFIPFGLLCLQTSNHIAEIIYRYDVDCVPDAYRGNRQAYIKDSSISKNCTLEAKVLEYMRAPIYVYYELENFYQNHRRYVKSRSDKQLRFGAKYTADSCSPVEWDNNGSPIVPCGLIAWSLFNDTYGFTRGSKEIKVNRKNISWKSDREHKFGKHVFPSNFQNGTLIGGGKLDPTVPLSEQEDLIVWMRTSALPKFRKLYGVIEDDLHADETINIFVGNNYNTYTFGGKKSIVLSTASWLGGKNDFLGHAYIVTGSLSIIISILFALIHVKYPRPQGDPNCLSWNRKNSNS

SEQ ID NO: 221571 - protein, 143 aa, Zea mays
  Clone ID: MRT4577_133665C.1.pep
LLLSLDAAGRRADRRSTAAGPGLLPHESGGEWEGRKCPPSSPSVARLPPLPPLARWKQGRGSSRRPSSRRLASSSSSDDEYDEDSRNLFSSRSLSSDSSDFYSCPRRNASASRGRAFVSGPCRALALAPAPAPPRRGASQSCR

SEQ ID NO: 221572 - protein, 63 aa, Zea mays
  Clone ID: MRT4577_133666C.1.pep
MESRMEGDVYSGFGERYQMDGKLLHNFQKSFVQVQDILDQNRLLINEINQNHESKQADHLGRN

SEQ ID NO: 221573 - protein, 61 aa, Zea mays
  Clone ID: MRT4577_133667C.1.pep
DGNLPEVQFLKKNNDPSQLINKLINYWHWVFFLLFEHLNKLYSTQNLQIPPFFLTISTGET

SEQ ID NO: 221574 - protein, 87 aa, Zea mays
  unsure (1)..(87): unsure at all Xaa locations
  Clone ID: MRT4577_133668C.1.pep
CTPPPPFLPPPPPFPPPLPRPPPPSPSPGSGAPSKSNLPGLGXPPPAWGPIPXVSIPPPAPFYNQSTPPPPAWGLPQWAWGVLLVSS

SEQ ID NO: 221575 - protein, 76 aa, Zea mays
  Clone ID: MRT4577_133669C.1.pep
FSRFQGNNEFRSGSMVVPLYAPPKACSFVLRVCRVMECPPAGFTPPQGGHGGPSDCVVHPSDDLNVYFVRASQWFC

SEQ ID NO: 221576 - protein, 72 aa, Zea mays
  Clone ID: MRT4577_13366C.1.pep
KFESTPLFTTGFMIYQLHTPPLWQKDENFKIVYKPNIAKTVYISILHFFMYKDKTVKSSILHILRAAQVCHN

SEQ ID NO: 221577 - protein, 173 aa, Zea mays
  Clone ID: MRT4577_133670C.1.pep
MVGKADGPGIVIDLGTTHSCVGVWQHDRVKIIANDQGNRTTPSYVAFTDYERLIGDAAKNQVAMNPINTVFDAKRLIGRRFMDACVQSDIKLWSFKVISGPAEKPMIVVQHKGEEKQFAAEEISSMGLAQMRDDAEAYLGSTIKNAVITGPAYFNDSQRQDTMDAEVIAGLNV

SEQ ID NO: 221578 - protein, 123 aa, Zea mays
  Clone ID: MRT4577_133671C.1.pep
PTAASTLASGAGRRPAVPCTRRAFTTRPRRRWATPPGRATRGRCSHVTCRSACAPEPRPVPHGAGKYLWADGCMYEGEWRRGKATGRGRFSWPSGATYEGEFLDGFMHGAGTYVGASGDTYRG

SEQ ID NO: 221579 - protein, 80 aa, Zea mays
  Clone ID: MRT4577_133672C.1.pep
MAETADMERIFKRFDTNGDGKISLSELTDALRQLGSTSADEVQRMMAEIDTDGDGCIDFNEFITFCNANPGLMKDVAKVF

SEQ ID NO: 221580 - protein, 96 aa, Zea mays
  Clone ID: MRT4577_133673C.1.pep
GVGGFFFFFFFFFFFFFFFFFFFFFFFFFGDQSKLKPRGGQKRIIGQNDKGGGGPGEKKKYPFSKKINPGKLNFHGGKQTRGRRGPPPPPGAPGQP

SEQ ID NO: 221581 - protein, 93 aa, Zea mays
  Clone ID: MRT4577_133674C.1.pep
VDFARVLRGALALPGDRTAALGEQPGARPRMLIVSRASTRRVLNLDDVAAAADELGFNVTAAEARADLPAFAVQVNADDVLEGVHCAGLTNQE

SEQ ID NO: 221582 - protein, 60 aa, Zea mays
  Clone ID: MRT4577_133675C.1.pep
GPLVTGYVFLRNWSPVFPILMAAALLAGLLFSKLVCAQLQGKTPSSVSKDPGGEHGAYSN

SEQ ID NO: 221583 - protein, 64 aa, Zea mays
  Clone ID: MRT4577_133676C.1.pep
CALVYNYHVIVALHLKKKELTPSAIWLNSLFLSEIGSMRLKKSTEIMFQGLIATAWILALILLV

SEQ ID NO: 221584 - protein, 152 aa, Zea mays
  Clone ID: MRT4577_133677C.1.pep
PRAGAAAGARQAPRPPAPGPLLRLPGRGGWSRSGTPWQAAWSSQGSDSESWLGSNLWGLLLQEAQSLRQKSKTGVWIDARTSGEMERMLWSAVSCRIGTSSQCLGEKWHTLTHWTQQAATLFPGGRGGVQLSGEKFDGSQETSSKNPLQSEQ

SEQ ID NO: 221585 - protein, 132 aa, Zea mays
  unsure (1)..(132): unsure at all Xaa locations
  Clone ID: MRT4577_133678C.1.pep
MASRSYSNLLDLATGAADQAPAVAALGALRRRLPRVVTTPGLIDDSPASPSTPPRXRTIIVANQLPIRSHRXRVAGGXWTFEWDEDSLLRHLHHSSSPLMEFIYIGCLRDDIPQAEQDAVAQALLETHNCVP

SEQ ID NO: 221586 - protein, 69 aa, Zea mays
  Clone ID: MRT4577_133679C.1.pep
HINNLVYTAKVAILNKPNSQKDMTVISIDPGYLSLSLCLTRHTHIHETSSYIHATMHMHAYVHKQRDFI

SEQ ID NO: 221587 - protein, 103 aa, Zea mays
  Clone ID: MRT4577_13367C.1.pep
IVRMDIYIHGVLFSIWQDQSRIIYIYREACNSMHLGRLGHSLRIYIWYMARPVVAAHAIEALISSRCVPAFMGWSRPSLVLTDDGSGAGSGASDSVTASFMSV

SEQ ID NO: 221588 - protein, 97 aa, Zea mays
  Clone ID: MRT4577_133680C.1.pep
TSYMSSLLQVPYGTTHYTCSTDASHMHWMIKISQQRVHASSHRRSYTGTRTHAPIPSHKINATYHIMGVKPITEKLPRAISAAEPFATSVTVSAVTT

SEQ ID NO: 221589 - protein, 49 aa, Zea mays
  Clone ID: MRT4577_133681C.1.pep
LTNLQAATVRRMPFFGYWNLLCDHLLRIIDPLLVRINMFLVSLMVIFII

SEQ ID NO: 221590 - protein, 60 aa, Zea mays
  Clone ID: MRT4577_133682C.1.pep
SHNPWLSMMIVRCDCASWLLRLSIVIFLFCEINMWMGVGHLHMQSVWYLSQSNSMGTLGN

SEQ ID NO: 221591 - protein, 51 aa, Zea mays
  Clone ID: MRT4577_133683C.1.pep
IILSSHIFFFLCNKDIQGWCLLLLGLLILTFAFQYVINTARSSVRTKGNLY

SEQ ID NO: 221592 - protein, 36 aa, Zea mays
  Clone ID: MRT4577_133684C.1.pep
RRMQLSRRLTGAFYVQTQNGRDSSYASSLSEQASTI

SEQ ID NO: 221593 - protein, 171 aa, Zea mays
  unsure (1)..(171): unsure at all Xaa locations
  Clone ID: MRT4577_133685C.1.pep
MEIITTASTMVKPVYSTPHPLAGEKVPLTVFDRAAFDIFVPIVFAYPAPAPSNEALKEGLRRAVALYPHLAGRLAVDGRGRRFFHLNDEGVLVVEAAVSGDLAXXVLGDGMATANVDELYPTPPEDNFGAALLQIKLNRYKCGGXLVIGITSHHXXVADGHSMSTSLTTGG

SEQ ID NO: 221594 - protein, 93 aa, Zea mays
  Clone ID: MRT4577_133686C.1.pep
LGPRAGGASVTEFLIHPLAKLSLCCGRSRPERSSGMGSRKGWFPVALLLLAASALWPPVAAAAAGGGEAEHAVQQHSERISGAPPSSPLNFRS

SEQ ID NO: 221595 - protein, 120 aa, Zea mays
  Clone ID: MRT4577_133687C.1.pep
MFYHCAGARNFLGWNNFLNLEWPRENEDNKVGGGFNIYREAAQERVGLTRSNASNLKKLYKSRKGGFKEPKLPRRILVLQRTGPDFSEHRTTAKRVRTRPGNRCTPENRGRQPPPGGTLA

SEQ ID NO: 221596 - protein, 42 aa, Zea mays
  Clone ID: MRT4577_133688C.1.pep
HRGQVNQADRYSHSQLWPCQHATVTQPMHHTPNLDKYLARRS

SEQ ID NO: 221597 - protein, 42 aa, Zea mays
  Clone ID: MRT4577_133689C.1.pep
LHMGSRLCCRSKATYAYVPRFRSRAWEPISNSLGDVIQRHYP

SEQ ID NO: 221598 - protein, 52 aa, Zea mays
  Clone ID: MRT4577_13368C.1.pep
GIHSSYRLVVLSALELYDCLLLPQLLRQFVHVLLQCYFPARGVDSMDPSLRT

SEQ ID NO: 221599 - protein, 387 aa, Zea mays
  Clone ID: MRT4577_133690C.1.pep
MSNPGSLPASAHHEHEHTPLCRSCGAPTTSPTPAPWSGTTDSPPPAYRPIRLPAINAPTNTAAIVLSPVPQPLPVPPAAPPHAFLVPAKRITSPDDIARFHASVHGLHFLGFVAALSASVHGRKLSDPLPSPPSPAIAALLDLVSALAALVASTPPLPHSSRYGNPAFRLWHEKLTDSASELISRITATASSPADLAGADVELAPYLLDSFGNATRIDYGTGHETNFAAFLYCLARLGLITEPDYPAVVLRVFTAYLDLMRTLQDTYQLEPAGSHGVWGLDDYHFLPFIFGSAQLIDHKYMKPKSIHNPDILENFSKEYMYLACVAYVKKVKKGPFMEHSPMLDDISGVANWKKVNSGLLKMYKAEVLEKVPIMQHFLFGSLIKWED

SEQ ID NO: 221600 - protein, 490 aa, Zea mays
  unsure (1)..(490): unsure at all Xaa locations
  Clone ID: MRT4577_133691C.1.pep
MSFLRSLADSFSSLLFSSGGGAVSMDAAGAAPSPAAVVGERVAVKLRGYFDLAKEEIDKAVRAEEWGLPDEATAHYRNAMRVMLEAKAARVPDAVSSSXRGGRSGCTRRRSPSGRPRSRSGSECLVREAVXATAAEVPKKVAANNPIIRTAKTASNSIQRSPLQNSPTFNRGGQASTHQKIGSGASRPVQKAGGNYDDKLVEMINTTIVDRSPSVKWDDVAGLDKAKQALMEMVILPSKRRDLFTGLRRPARGLLLFGPPGNGKTMLAKAVASESEATFFNVSASSLTSKWVGEAEKLVRTLFMVAIDRQPSVIFMDEIDSVMSTRLANENDSSRRLKSEFLIQFDGVSSNPDDLVIVIGATNKPQELDDAVLRRLVKRIYVPLPDPNVRRLLLKNQLKGQSFKLSNHDFERLAVETEGYSGSDLRALCEEAAMMPIRELGPQNILTIKANQLRPLRYEDFKNAMTVIRPSLQKSKWDELENWNEEFGSS

SEQ ID NO: 221601 - protein, 103 aa, Zea mays
  unsure (1)..(103): unsure at all Xaa locations
  Clone ID: MRT4577_133692C.1.pep
FRRFRPCYPRHFFSFNQIDELYFPVFFSRRKLVPFIQLVGVSPVTFFTQPQLVRFXQPVGPIRGPLLKMXQLFAFNPLGFSKPPVFSPQPFIGGAPFLIFCKG

SEQ ID NO: 221602 - protein, 234 aa, Zea mays
  Clone ID: MRT4577_133693C.1.pep
ILVYTLALLLQERPGFLAHPLMDSEISKTQPSSMASAALPVSGGASVSKPQASRSLVAAAALPERPAEDDGADPATLSPTLTASSETHVDPTWVSILPNDVVPPLALSEVASEYGHQPSHDGLLLSAVFVLPFPAPVNSHRGKNTLPFLMYSPPRSVYSQPPKNEEGKRPKEKIVKKVVRKWQEEVVMGEKIKRGELENPSRFKKIRGGCIRVASPLTMAPESCIETLSRLPPS

SEQ ID NO: 221603 - protein, 59 aa, Zea mays
  Clone ID: MRT4577_133694C.1.pep
PRVRKFIAHPSATLGGFFNNIRAVGAPLAALVAGGSCGPPKVPPGPNITTNYNRSWLTS

SEQ ID NO: 221604 - protein, 90 aa, Zea mays
  Clone ID: MRT4577_133695C.1.pep
SASTPRRSPDNQVHCAGTPTTGVLCLSIVDPNDSDFHIIIRAAQRPWLDTHCGCFAYLNKRLDVALRIYNRFLRLSSTYEVLLACDCLPY

SEQ ID NO: 221605 - protein, 49 aa, Zea mays
  Clone ID: MRT4577_133696C.1.pep
MRAPRPWRDQLTDDHIDDFKEAFSLFDKDGDGCMTTKELGTVMRSLAQN

SEQ ID NO: 221606 - protein, 112 aa, Zea mays
  unsure (1)..(112): unsure at all Xaa locations
  Clone ID: MRT4577_133697C.1.pep
MDYLVKQEYYLMRNXCIPCLEFHKVXFVYRENSTSQCYYDGRYRTMWNLTMIGCNDSTQVYNELKEDIKCYPEAFHRNIGVNNIKQTQCVGFIAHEPFFFFYPAPAGRPPPR

SEQ ID NO: 221607 - protein, 91 aa, Zea mays
  Clone ID: MRT4577_133698C.1.pep
LASSCFPAFLAGIGGPVCISCCVVCSLCAVAFFFFARPVVFFFLSARFLARLRVLCFYPTGWWFSVAAPPARAVFSTRAGSVGCSWWCLGG

SEQ ID NO: 221608 - protein, 225 aa, Zea mays
  Clone ID: MRT4577_133699C.1.pep
MTLGSAAHKIPLEVAHTLVEIAEVARYAYHHRPGRPATHEGDPTAPPAGADSSGGTNEDAARLLEENAMLRARLADDLALLRELHGAPCVSKECPPDLYNRLMAAVNNVSFLAHLEKLQDESARQLNELTSGDMTEVEAADIPDKAGNGKKGLWVLVPCDTAGANLEEISGIDDENYVIVNEDDIVDGIAAFVARCILEDPKSKSLSPMQLQKAVAKALDSMKAR

SEQ ID NO: 221609 - protein, 50 aa, Zea mays
  unsure (1)..(50): unsure at all Xaa locations
  Clone ID: MRT4577_13369C.1.pep
SQRLNPPAGGTVANNXXTFXADFAAAMVKMGSVGVLTGTSGKVRANCRVA

SEQ ID NO: 221610 - protein, 93 aa, Zea mays
  unsure (1)..(93): unsure at all Xaa locations
  Clone ID: MRT4577_1336C.1.pep
SIPVNDPPQVGIFDEPKNLQVLVIKSSPPAKIFLYDDWSIPHTPRXLKFPFVWDEDCFEPPKADLWVPSVSPNLSASPMTPRGLGSPNSQPPL

SEQ ID NO: 221611 - protein, 276 aa, Zea mays
  Clone ID: MRT4577_133700C.1.pep
MTLGSAAHKIPLEVAHTLVEIAEVARYAYHHRPGRPATHEGDPTAPPAGADSSGGTNEDAARLLEENAMLRARLADDLALLRELHGAPCVSKECPPDLYNRLMAAVNNVSFLAHLEKLQDESARQLNELTSGDMTEVEAADIPDKAGNGKKGLWVLVPCDTAGANLEEISGIDDENYVIVNEDDIVDGIAAFVARCILEDPKSKSLSPMQLQKAVAKALDSMKARWRWSTFWEAGQIIYILATWGITLAGLYKSRHVLKVAAKGAAVSARFVMKAI

SEQ ID NO: 221612 - protein, 154 aa, Zea mays
  unsure (1)..(154): unsure at all Xaa locations
  Clone ID: MRT4577_133701C.1.pep
KLTFLYFHLIQHXPLHKSLXNHPPNPLSIIKKSSSPFSPLQTHKSXPTHNTFTTPYSTPNIPLNYXPNHSYILNTPHXPSQSIPHLXIHTFKSYTLXLPYTINSSLQTSQIKIFSNKNHKPXXSTNPXHTLPYYHSLXXNSPNIHHTXAPSNII

SEQ ID NO: 221613 - protein, 232 aa, Zea mays
  Clone ID: MRT4577_133702C.1.pep
MTLGSAAHKIPLEVAHTLVEIAEVARYAYHHRPGRPATHEGDPTAPPAGADSSGGTNEDAARLLEENAMLRARLADDLALLRELHGAPCVSKECPPDLYNRLMAAVNNVSFLAHLEKLQDESARQHNELTSGDMTEVEVADIPDKAGNGKKGLWVLVPCDTAGANLEEISGIDDENYVIVNEDDIVDGIAAFVARCILEDPKSKSLSPMQLQKGSSILHATMLHSNIAPLNS

SEQ ID NO: 221614 - protein, 47 aa, Zea mays
  Clone ID: MRT4577_133703C.1.pep
YTTNSDHALVDASSVILQIIPCLRLRLLLGSFLLIAFLSRISRRMCH

SEQ ID NO: 221615 - protein, 44 aa, Zea mays
  Clone ID: MRT4577_133704C.1.pep
RLCISKIQLALVTWGKILTVSYTHFGTLFVIVPLMSHSLIGTNY

SEQ ID NO: 221616 - protein, 154 aa, Zea mays
  Clone ID: MRT4577_133705C.1.pep
HVDYDVQAERRPSCRFPAPRTRSPATFEQILEMDEDEDEREFSKSIVYDFFGQADQTFKKMDKELEKKEGKYLKELSELGHFLKGSSATLGLTKVKDSCEKIQHYGQLKDDAGTKDITEEQAQENLGKIIKQAKKEFADVKDILKEFYKDDNEA

SEQ ID NO: 221617 - protein, 56 aa, Zea mays
  Clone ID: MRT4577_133706C.1.pep
GRPAVLVGHPLSPIFGVDSITLVQDGRVVEQGSLGALVYSPEGAYSGLIQLQVLHG

SEQ ID NO: 221618 - protein, 44 aa, Zea mays
  Clone ID: MRT4577_133707C.1.pep
FGHAGAKAYAFDHPGCVGSGEGSKNSQGRGMSFISPNSASCSIF

SEQ ID NO: 221619 - protein, 333 aa, Zea mays
  unsure (1)..(333): unsure at all Xaa locations
  Clone ID: MRT4577_133708C.1.pep
MAAPVLLTIPTMDEEGAPPPAPASPSRTPPQQEPKPAVLRWRPPVRVTSEFDSERRLFSHRLSCRVLDGLAKLRLRISHGAXRRDSLGPDXVGLLARNFSVVVDPATRGAVLRGAADLAGSLRLRASHNTKEQQGEVAITANLRDSPCKIELSSLVPPNGPPRATFFFPNGEVSIKEKILDERDRILSVNGLVKSRVLHGVCTAVYNDNVMSIKYRYKDDEVSFIPSISLPSNSLSFAFKRQLTPLDKLSYWYNFDTNYWGAIYKHKAHKHLKWKAGYESDNRLGWASLWVGDAGGSTKEAPLKAKIHLTLKVPQDNIQNSVVVFHVKKRWDF

SEQ ID NO: 221620 - protein, 49 aa, Zea mays
  Clone ID: MRT4577_133709C.1.pep
NPLDEFMAATMFPGGLLHMDITPKGTFLGSPHSPLYIGWFQVNAFKTLF

SEQ ID NO: 221621 - protein, 67 aa, Zea mays
  Clone ID: MRT4577_13370C.1.pep
NYELRRTRTRTPTGSNFTSPSILLHRGPVVSPTCNSLTRILITALLVKHLCFPTKLACSTYQYFLQA

SEQ ID NO: 221622 - protein, 220 aa, Zea mays
  unsure (1)..(220): unsure at all Xaa locations
  Clone ID: MRT4577_133710C.1.pep
MDEEGAPPPAPASPSRTPPQQEPKPAVLRWRPPVRVTSEFDSERRLFSHRLSCRVLDGLAKLRLRISHGAXRRDSLGPDXVGLLARNFSVVVDPATRGAVLRGAADLAGSLRLRASHNTKNCQTGEQSYYIHVGCSALCLSMSCNYEYDKSIVSCIQLDRCFQFKYHSVKEQQGEVAITANLRDSHARLNCHLWFLLMDRQEQLFSFQMVKVSIKEKILD

SEQ ID NO: 221623 - protein, 81 aa, Zea mays
  unsure (1)..(81): unsure at all Xaa locations
  Clone ID: MRT4577_133711C.1.pep
SVRSVGSVGGSVGRPRVRGRVXKKKKKKKKKKKKKKKKKKKKKKKKKKKKKKKKKKKKKKKKKKKKKKKKKGGDGFKKNQV

SEQ ID NO: 221624 - protein, 50 aa, Zea mays
  Clone ID: MRT4577_133712C.1.pep
RAYNVSPVIPLRKLLINDRASDACLHMVHESYLTCVNDCTNDPSKTFGSP

SEQ ID NO: 221625 - protein, 84 aa, Zea mays
  unsure (1)..(84): unsure at all Xaa locations
  Clone ID: MRT4577_133713C.1.pep
PRAPLLSRRPPNGPFFPSPTXTPARSRLTPQWGLFPFPLPFSGDRKTTLNRPFSLLKARGMIQPGALVFPLWAMLQPTRVITVP

SEQ ID NO: 221626 - protein, 93 aa, Zea mays
  Clone ID: MRT4577_133714C.1.pep
RNHTGRLYWAEVPHPPLEEIQEINQQLIDTELHVSEDEAESSTTSKGGKGTDIRCTPTAVAVSPSLKSAFASAQMRPIMSPRLLVPACYPKRS

SEQ ID NO: 221627 - protein, 74 aa, Zea mays
  unsure (1)..(74): unsure at all Xaa locations
  Clone ID: MRT4577_133715C.1.pep
DLYMINFLMSMCTQILXGQLGNLQLAISXLGYTGIQPLAYTHMLPMDSTVETLCXLVYRAHTHRMLGVYLHALD

SEQ ID NO: 221628 - protein, 88 aa, Zea mays
  Clone ID: MRT4577_133716C.1.pep
PQAGAQRRVLRPIRAAFLVLTRLQTWEQNQERQGKSVAASITPETTRTSCYFLPHPVGTQKTPIEPLISRFSIWRAHGSAAPRSRRVS

SEQ ID NO: 221629 - protein, 70 aa, Zea mays
  Clone ID: MRT4577_133717C.1.pep
GGGGPAAPRTAYMEDLLHHLLTLYPHMLPKLLRNSLDDFGYDLNSLNKLLMEGGGGILSAILCDTEKDIS

SEQ ID NO: 221630 - protein, 42 aa, Zea mays
  Clone ID: MRT4577_133718C.1.pep
CKMILVSFIINSKSSEMEGTELVWKTRHKFLTTNHKTIGVTI

SEQ ID NO: 221631 - protein, 106 aa, Zea mays
  Clone ID: MRT4577_133719C.1.pep
ESGASSRVHYPLTGADRTVGGGMTSLSMKNQPKRGHVGFEHGSVSTSTGRTREVAVPPVACTIIVYSATSAIQGYFLRGWHSFTCIKLQHPSTTGLAANMRAPSGR

SEQ ID NO: 221632 - protein, 215 aa, Zea mays
  Clone ID: MRT4577_13371C.1.pep
NVKFGRQFLATMQNSRDNYLILCGNWENSFQIISLSDGRIMQSIRQHKDVVSCVAVSSDGNVVATGSYDTTVMIWHAFRGRPIDKKIRGANFELSEKEQVIVERPVHILCGHDDIITCLFVSTELDIVISGSKDGTCIFHTLREGRYVRSIQHPSGVGLSKLVASQHGRVVLYSENDLSLHMYSINGRHIASSATLGRLNCIELSCSGDFIVCAG

SEQ ID NO: 221633 - protein, 124 aa, Zea mays
  unsure (1)..(124): unsure at all Xaa locations
  Clone ID: MRT4577_133720C.1.pep
SPSRPPRKSGSTGSIARWRRIGELVVGRSRSDGKDKFLFLSAPPSPARDRXTPPPPRPRPSXPKGSKAAAATELDTVAAGRRLSYGGGAAKGTSGGRRTFLPYRQDLVGLFASVHGLSRSPHPL

SEQ ID NO: 221634 - protein, 37 aa, Zea mays
  Clone ID: MRT4577_133721C.1.pep
KKAWVPLKKKKKKKKKKKKKKNKKKKKKKKKKKKKTP

SEQ ID NO: 221635 - protein, 124 aa, Zea mays
  Clone ID: MRT4577_133722C.1.pep
HKRSVQSAYFSPSGCSLATTSLDNTIGIYSGVNLEDAAVINHNNLTGRWLSTFRAKWGWDDSYLFVGNMKRGVDVVSSVERKIVMTLESQHMSAIPCRFDTHSYEVGMLAGATSGGQVYIWTSR

SEQ ID NO: 221636 - protein, 72 aa, Zea mays
  Clone ID: MRT4577_133723C.1.pep
PSRKRAQILDTPAKGRPQAELAGFPFEIQAADPLEVGIQVLRDRVPLRWFSFLKDLFRALNLRPHANSLFHH

SEQ ID NO: 221637 - protein, 79 aa, Zea mays
  Clone ID: MRT4577_133724C.1.pep
RSDSIKLAPPVLQHPQVSLLELGQAQGRRGRRRAGGHVLAVCCHRSHSVPSVWSSRPRWLWLYGHYARLAASDSGHGRV

SEQ ID NO: 221638 - protein, 51 aa, Zea mays
  Clone ID: MRT4577_133725C.1.pep
DQCDHRSRQWLITCQTLTSCGQLSQVASFIHHASRVPISSSSAVNATFMAP

SEQ ID NO: 221639 - protein, 255 aa, Zea mays
  Clone ID: MRT4577_133726C.1.pep
MTALVRLAGRAASRSRVGIAAAAAPPPVGLSVQRRRAFQGVRMETGGSKGGRGALVVLEGLDRSGKTSQCARLLSFLKGKGYNAEGWRFPDRATSVGQMISSYLANDSQLDDRTIHLLFSANRWEKRALMESKLLSGTTLIVDRYSYSGVAFSAAKGLDIEWCKAPENGLIAPDLVIYLDVQPEKAAERGGYGGERYEKIEFQKKVAEHYHSLRDSTWKVVDGFLPMETVEEKLRDLATSCIQDCQGNPLTNLAW

SEQ ID NO: 221640 - protein, 55 aa, Zea mays
  Clone ID: MRT4577_133727C.1.pep
CISPSGSRLGICFQINKELLQSVFPNQRSHVILLLETYNWAQYGNFHNSSYICQP

SEQ ID NO: 221641 - protein, 46 aa, Zea mays
  Clone ID: MRT4577_133728C.1.pep
VSSRSLATLLVVILTAGSSDPLDRLSRCQEWRPSHTINQIQYVVDV

SEQ ID NO: 221642 - protein, 96 aa, Zea mays
  Clone ID: MRT4577_133729C.1.pep
IICWWYKHKSAFFVFIPFTLPASRKVATCCISAIHSSCCTLSVAAISLHSSMAIRALFWYRQHIVEQVLSCFQRTSHFLLRLPWYRATSHEIPDGV

SEQ ID NO: 221643 - protein, 75 aa, Zea mays
  Clone ID: MRT4577_13372C.1.pep
RVGFKHIARTIDTSFQITTGPCGRGGSSPILDRVKNCDKQGKVYRRGEFDSYPHTISKKKAVKKKVKDWRRYKGT

SEQ ID NO: 221644 - protein, 174 aa, Zea mays
  unsure (1)..(174): unsure at all Xaa locations
  Clone ID: MRT4577_133730C.1.pep
PTLAAVAXKILFLLALLALFAGASVASIXPHCSLAPSSIVPQFLPPVSSLAFVAGGVQAFWLQQAIAASVLPHXXAXLRQRSLAHLTVHTIASHQQLQFLPALSSLAVVNPVAYLQQQLLASNPLALADXVAYQLHQQLQQFLLALSQLALVNLVAYLQQQQLLSSSPLAVANA

SEQ ID NO: 221645 - protein, 97 aa, Zea mays
  Clone ID: MRT4577_133731C.1.pep
GSSFLFNFFFFRLGLQNKDNTLRIPMAGHAQGKPGGPQDKKTQKNRKKDQGVPRRTEPSNKPALEHRTGGKICYSRIPSLPTRECHLGTLSERDLRP

SEQ ID NO: 221646 - protein, 107 aa, Zea mays
  unsure (1)..(107): unsure at all Xaa locations
  Clone ID: MRT4577_133732C.1.pep
FFFFLSFFFFFFFFFFFFFFFFFKKNNPLKNLYSPLLLIKKNFYFWGGTPNPPIPKHLKKNSQPSPPLKTTPLKTPFPISFPSNTSTXHSSPSKFFPPXLTISKKFS

SEQ ID NO: 221647 - protein, 137 aa, Zea mays
  unsure (1)..(137): unsure at all Xaa locations
  Clone ID: MRT4577_133733C.1.pep
ILPGTVVDSKICHPTEFXFYLCSHAGIQGTSRPAHYHVLWDENNFTADGLQTLTNNLCYTYARCTRSVSIVPPAYYAHLAAFRARFYMEPDTSDSGSMASRGPPPGGRNTKAAGVGNVAVRPLPALKENVKRVMFYC

SEQ ID NO: 221648 - protein, 897 aa, Zea mays
  unsure (1)..(897): unsure at all Xaa locations
  Clone ID: MRT4577_133734C.1.pep
QQFQQLAIRIQSITIQDGQLAPASSKSVRCPLRPGKGTHGSRCIVKANHFFAELPNKGLHQYDVSITPVATSRGIXRAIRETDLGLVSHCCLNKHVFKANKHQYLANLALKINVKVGGRNTVLVDAXGGESRLSVMFRVLTKFAARADLHHWKMFLAGLQPCAPQKAVQGLDIVLREMPTAKYCPVGRSFYSPKLGSPQQLGEGLETWRGFYQSIRATQMQISLNNDMLSAAVSETVPVYDFVSVLLIIDIRVRPLSDSDRVKITXALQGLKLEVQLRGHMRSRHRISGLTAQXTTEFSSTSEDSGTVKYGMQYFLKTYSLSTWYTTLPCLQVGNLQRTNNLPMEVCKIVEGQRYSKRLNDKQITALLKVTCQRPQAREKDILETVYHNAYSKDPYAQEFGITIDERLASVEARVLPPPRLKYHDSGRERDVLPKVGQWNMMNKKMVNGGRVSSWACINFSRNVQDGAAGSFCHELALMCQVSGMDFVLEPVLSPCYARPELVERALKGRYQDAMNILGPQGRELDLLIVILPDNNGSLYGDVKRICETNLGLVSQCCLTKHVFKVNKQQYLANVALKINVKVGGRNTVLVDALARRIPLVSDIATIIFGADVTHPHPGEDSSPSIAAVVASQDWPEVTKYAGLVSAQAHRQELIQDLFKVWQDPERGTVSGGMIRELLISFWRATGQKPKRIIFYRDGVSEGQFYQVLLYELDAIRKACASLESDYQPPVTFVVVQKRHHTRLFANNHNDNRAVDKSGNILPGTVVDSKICHPTEFDFYLCSHAGIQGTSRPAHYHVLWDENNFTADGLQTLTNNLCYTYARCTRSVSIVPPAYYAHLAAFRARFYMEPDTSDSGSMASRGPPPGGRNTKAAGVGNVAVRPLPALKENVKRVMFYC

SEQ ID NO: 221649 - protein, 97 aa, Zea mays
  Clone ID: MRT4577_133735C.1.pep
QQGDKGTPDHTHERGGEHRRAHGREKKKEREGGNTEDASEHAKHDKGNRDVHVDGAEGRARAENRPPPPPPKGERAAKKARHPGSGPARRAPTARVS

SEQ ID NO: 221650 - protein, 299 aa, Zea mays
  Clone ID: MRT4577_133736C.1.pep
DDGSATASAGFSWTGSSSNGLPAADFSGDTPSSNALTPLSSSSCCGFSTYTLSSDDLAFASSSSDGFSRAALSSDGSTLASLPSSDFSSATLDRGLAITSSSSFASSWAALSSNGSAVVEPSSNGFSGVTTSFTGLASTSSSSNGLSRTELSSDGSTLPTPSSSGFSGVAISSDGLALTSSASNIFPKDASLSDGSALVLSSSSGFSGVTVSPEGLELSSLTSNGFPRGALSTDASAFSLSSSDDFSEVTWSSGSLALTSSGSSIALFSSDGLLLVSSWCMQSSTTVSLPGVVSMGALL

SEQ ID NO: 221651 - protein, 75 aa, Zea mays
  Clone ID: MRT4577_133737C.1.pep
MYTLYPLGTLGVHQTESVYLLIHFLEQVFHIDKFLQLGGIVAGIHEYVLAVNGNLMAEHLVLLVINGPSKSANVG

SEQ ID NO: 221652 - protein, 146 aa, Zea mays
  unsure (1)..(146): unsure at all Xaa locations
  Clone ID: MRT4577_133738C.1.pep
PRPSRAGKGGKGGLAANXTAAKXAEXEDKGKKAPXXRXXRAGPQXXXGXXHXQXKQRTQAXXRGERTAXXXXXANQEXPTAEXXEPXGXASKXXKXKXXTXRXXQXAXRGDEEXDTXXKGTXAGGGXNPHKHKXXXNKXPKERRPG

SEQ ID NO: 221653 - protein, 160 aa, Zea mays
  Clone ID: MRT4577_133739C.1.pep
MASMANAAPGKRKGATSPSNSTYPSPSTQPIQLPRLKLSFRNTPPPQPQPASRAPAKVYARNRAGPSTQRRNVLDDSDSDLTPEETDDDEDEEHDDDEDMDQDDEDEDEQQFTPRNSKSQKGKNAESATKAAPSCVEIRSRKKELADREKTSSSAATAAG

SEQ ID NO: 221654 - protein, 344 aa, Zea mays
  Clone ID: MRT4577_13373C.1.pep
QRLAHCFAMGLEARLAGTGSQAYQSLMAQHTSVVEFLKAYSLYMAASCFMKVRFIFSNMTICNAVAGRSKLHIVEYGVQHGFQYPGLFHLLARREGGPPEVRVTAIAVPQPGFRPAHQIEETGRRLSNIAREMGVPFKFRGIAAKWEAVRAKDLNIDPDEVLAVNSECYIGNLMDESVLVDSPSPRDTVLNNIREMRPNVFVHTVVNGTYGAPFFLTRFREALFFFSAQFDMIDATIPRDNNERLLIERDIFGTFALNVIACEGADRVERPETYKQWQVRNHRAGLRQLPLNPEVVKASRDKVKNYYHRDFLIDEDNRWLLLGWKGRVLYAMSTWVAEDNKPIF

SEQ ID NO: 221655 - protein, 116 aa, Zea mays
  unsure (1)..(116): unsure at all Xaa locations
  Clone ID: MRT4577_133740C.1.pep
MDQQVFLGVSWGNLLTYMKRNSGMDPDMDLDMGDYYNVVLSFVYNYIPDPPVSPTPTLPLSGLPWVPDGVDRISCLPDKVLRNIVSRLXPAKEAARTAALASHWRPLCRSAPLALV

SEQ ID NO: 221656 - protein, 159 aa, Zea mays
  Clone ID: MRT4577_133741C.1.pep
TTYTYFCIKANPEVSLFAALQVYSKTGADTLFCAHLAETNSRGAHHTKPEGSRGHRALGVTRKKTGPGGDRNTAAPAMNLDGRGPTTPISGGGGGTKRPSGAARKQEQEKGGRTKEGKPKGGEGENPAQEGKKGASPHFHIKRKKERGEHPPRGKRKAP

SEQ ID NO: 221657 - protein, 161 aa, Zea mays
  unsure (1)..(161): unsure at all Xaa locations
  Clone ID: MRT4577_133742C.1.pep
PPPPVPPPGPXEGPPPPRLSPPRKGRDPPPAQGAPPEGCPWRXGLNSPPWFRRVVAPFPLGGWAPVEKGPPGGAVAMEPPPKLKEWGAPGRPAPMPPPPVDVAAAAARHVFQKFSLPPPESELDCSPPAQCRFGLKMSPPGGFVVCLFVCPVPQSRVGPLF

SEQ ID NO: 221658 - protein, 76 aa, Zea mays
  Clone ID: MRT4577_133743C.1.pep
YFEDIAGVIVNPNGQKKGRCLGVPMDREGADLCPTIDRGSHAIVRELAVIELDLHVHHVKCVKQLLSRCSRTRWIL

SEQ ID NO: 221659 - protein, 316 aa, Zea mays
  Clone ID: MRT4577_133744C.1.pep
MAGFSRPNNSLLLKMPATLASSHTPNLSSLLFYDQNHGQAVNANAAAMTMVEDDASLQSSSAVLDTSPQPQGSAAAASPMERKRKPAEDSATLSSAQSKEDCKQQQESKSRRGKRPHNKEANTEEKSATEDEATRGYIHVRARRGQATDSHSLAERVRRERISERMRMLQALVPGCDKVTGKALILDEIINYVQSLQNQVEFLSMRIASMSPVLYGFGLDSDGLHDHAQKMGVMFQEALAMAGPVLSQASPAAPSEAIMDTTTPYSLHGHGQGSISFSQDNGSSTYLMQHQQAAGEPTRQQELLSQLVFNNMCSFQ

SEQ ID NO: 221660 - protein, 41 aa, Zea mays
  Clone ID: MRT4577_133745C.1.pep
RLGALCCIVYMTGEICYVRHGRLVGVVTPMRSGNSTKVMCR

SEQ ID NO: 221661 - protein, 99 aa, Zea mays
  Clone ID: MRT4577_133746C.1.pep
PPKGGVCPPRPLCWAPPVFPIPEVGPPRPVRCKGPPHRGGVPPLNAPPGGRHCVGYFPPSPFPPPPRAGAPSPGAIPPPLCPAPASIFGQTPLCSCVSS

SEQ ID NO: 221662 - protein, 65 aa, Zea mays
  Clone ID: MRT4577_133747C.1.pep
DPLSGRCSASCVRISRLGDALHVVAEHLPVPLGFTIQQAIHAPAARWHSRHLETGLSLLSVVSPQ

SEQ ID NO: 221663 - protein, 49 aa, Zea mays
  Clone ID: MRT4577_133748C.1.pep
FIVESQLFLVFVVFETLSWSLGLVFSHFCGQGGFLMCAFLLTLYMNFVI

SEQ ID NO: 221664 - protein, 357 aa, Zea mays
  Clone ID: MRT4577_133749C.1.pep
MAKNYRERRLKRAMKIDEGEDDFEADYQAFSKKYDEKDECHYKFMALLPFKNGLPNVSPPTKEKVGLHFAMKDVVISQKPTTTNEGIIVRPKCKRKTPYRGIRRRPWGKWAAEIRDPTKGVRVWLGTYKTPEDAARAYDAEARKIRGNKAKVNFPNEPPNMVSNAPKLIVTAMTTMAIPADKLNANELMCHKNYSNEDFFSMVNFSGNNGNFISTAAFGLQCIKKPRVPYDIPRMGECSNQNRMTYGLSNGLGNEASRNLNGCSFLPQAGMPIFIQPTFDGPSRMIGRNDGVIVPTLTNATPMAGVDAAKKMNQQPIFQEMESEDIPSILQGDVSEDVAAEISMWEFYDNLLDNKEN

SEQ ID NO: 221665 - protein, 97 aa, Zea mays
  Clone ID: MRT4577_13374C.1.pep
RTTFDVSAQSFTMVRGTLGWRYLPRSVVEVGLIASRGHRAAVNPRISVVQARHTVTAEEPMAEDPGVQQVEVVEQELIEGDEQVAQEEPHNKEFDLI

SEQ ID NO: 221666 - protein, 53 aa, Zea mays
  Clone ID: MRT4577_133750C.1.pep
AAYTCGLTADVYLWYSCHFNHLPQNNLTFHGVTWYINRVHRVTPISYTTQKNG

SEQ ID NO: 221667 - protein, 142 aa, Zea mays
  unsure (1)..(142): unsure at all Xaa locations
  Clone ID: MRT4577_133751C.1.pep
RVRSQGKLAPRYIGPYQIQARRGEVAYQLSLLENLSAVHDVFHVSQLKKCFRVPEQXTSXDDLEVQEDLTYIEKPTQILETADQVTWRTTIRMCKVKWGHHSEEEATXEREDDLKAKYPELFSSQXESRGRDSFKGDRSVTP

SEQ ID NO: 221668 - protein, 52 aa, Zea mays
  unsure (1)..(52): unsure at all Xaa locations
  Clone ID: MRT4577_133752C.1.pep
ANLNHAYRPKILHLQIALEHSNCWKIPXNLTNVHAYTXAIFSCESYVKTKSS

SEQ ID NO: 221669 - protein, 134 aa, Zea mays
  Clone ID: MRT4577_133753C.1.pep
GPQVREGELVFGVAHIFASFNDTFVHVTDLSGRETISRITGGMQVKADRDESSPYAAMLAAQQVAAKCKELDINALHIKLRATGGTGTKTPGPGGQAAIHALARAGMRIGRIEDVTPIPTDSTRRKGGRRGRRL

SEQ ID NO: 221670 - protein, 81 aa, Zea mays
  Clone ID: MRT4577_133754C.1.pep
DTRVYFNAYAGHVLSAQLQVVLGPWTSIMGGRPYPPVLCMAQPQHATIVDLARVVGYLGHVPIPFLSSLSCTSALSSLGVW

SEQ ID NO: 221671 - protein, 128 aa, Zea mays
  unsure (1)..(128): unsure at all Xaa locations
  Clone ID: MRT4577_133755C.1.pep
SARGNAPHLLLYDELEIVADKLPVDRLILLGRLLYMGDXDGKWGAHEXDYLLIMGCDVKLNLNPGQVVNPKFVNRDQLMELMRKADAXEDGFKMCSRFTLVEDNFLMGWRDHVXHGTLLGAADMNTIH

SEQ ID NO: 221672 - protein, 252 aa, Zea mays
  Clone ID: MRT4577_133756C.1.pep
MHILTAAQTEPDSNQAACYESRRVIKAYFATKKKPRERRKEQRITTRCPIFQAEVSAAAASLLSSELGASAAAATLLSSEPGASAATAAWIDSGSIRFSSSAACASPPLGRPSLSSSAVSSCSVATEACTVACGDPIVSPAAAALAGSPATTFSASWSTSSSPSLPSASRLSRSLRDLRRLTSAWSTSAAAATGTSAAFAFSSAAASGAAASSATRGASPLTLRSPGFVAHAPMAKRDVATLATLEPVNLPL

SEQ ID NO: 221673 - protein, 63 aa, Zea mays
  Clone ID: MRT4577_133757C.1.pep
LIIVYRSVNKRNIGVTCFGPAHLTSDACEVCWAAIVPLLDSLGVTDRVCVYDKSMCSCLVSAA

SEQ ID NO: 221674 - protein, 135 aa, Zea mays
  Clone ID: MRT4577_133758C.1.pep
IPDSTHACADACYHSSYHSYEPSPHRDGLSHQSPHHIYLSILPIVDVQQLQHTPKLFIRCTFDHLHVNDISLNDYLAANSTNHAMYLPHTPEHYSKNRLPIAQCTIVQRLTNSLMIHGLNNRKKVISVRIIKHTL

SEQ ID NO: 221675 - protein, 178 aa, Zea mays
  Clone ID: MRT4577_133759C.1.pep
MGAAPLAAWWAQPRRLWVLPRRPMARYPEPRPRWRRPLAAALAARAWRLRPSAGAWRSRCPCSAGGQALGGARAAWALPALATARRPGPGGSPWSGGYGPVPGSPAGGPGAVQARGPATARRDTGALWRCGLGQARGRGTDAGATATARPQQCGGAAPGRRAGATPGPGATARRRTGA

SEQ ID NO: 221676 - protein, 68 aa, Zea mays
  unsure (1)..(68): unsure at all Xaa locations
  Clone ID: MRT4577_13375C.1.pep
RTLVCRKGLLISDQELFNGSASXAQVQAYVISQSAFFSDFVPGMVKMGAISPLTGSSVLIRKTCRRII

SEQ ID NO: 221677 - protein, 79 aa, Zea mays
  Clone ID: MRT4577_133760C.1.pep
VPRAGAFKNPVSSQSPGRVQGHGASGSGTAGVLWWPRAVPLATSHFRVVSGSSPWQCPLVHTNLSGKVTIPCLLERTHS

SEQ ID NO: 221678 - protein, 571 aa, Zea mays
  Clone ID: MRT4577_133761C.1.pep
MDTGCLSSMNITGASQARSFAGQLPPQRCFASSHYTSFAVKKLVSRNKGRRSHRRHPALQVVCKDFPRPPLESTINYLEAGQLSSFFRNSERPSKPLQVVVAGAGLAGLSTAKYLADAGHKPILLEARDVLGGKVAAWKDEDGDWYETGLHIFFGAYPNIQNLFGELRIEDRLQWKEHSMIFAMPNKPGEFSRFDFPETLPAPINGIWAILRNNEMLTWPEKVKFAIGLLPAMVGGQPYVEAQDGLTVSEWMKKQGVPDRVNDEVFIAMSKALNFINPDELSMQCILIALNRFLQEKHGSKMAFLDGNPPERLCMPIVDHIRSRGGEVRLNSRIKKIELNPDGTVKHFALSDGTQITGDAYVCATPVDIFKLLVPQEWSEITYFKKLEKLVGVPVINVHIWFDRKLNNTYDHLLFSRSSLLSVYADMSVTCKEYYDPNRSMLELVFAPADEWIGRSDTEIIDATMEELAKLFPDEIAADQSKAKILKYHIVKTPRSVYKTVPNCEPCRPLQRSPIEGFYLAGDYTKQKYLASMEGAVLSGKLCAQSIVQDYSRLALRSQKSLQSGEVPVPS

SEQ ID NO: 221679 - protein, 84 aa, Zea mays
  Clone ID: MRT4577_133762C.1.pep
AQAATGCIIDPEENRKLTAEEAFKAGMFGKETYVKLLTAERAVTGYTDPYTGQQIFLFQAMQKDLIVREHWIRLLEARSHGRII

SEQ ID NO: 221680 - protein, 572 aa, Zea mays
  unsure (1)..(572): unsure at all Xaa locations
  Clone ID: MRT4577_133763C.1.pep
MDTGCLSSMNITGASQTRSFAGQLPPQRCFASSHYTSFAVKKLVSRNKGRRSHRRHPALQXLSAKDFPSPPLESTINYLEAGQLSSFFRNSERPSKPLQVVVAGAGLAGLSTAKYLADAGHKPILLEARDVLGGKVAAWKDEDGDWYETGLHIFFGAYPNIQNLFGELRIEDRLQWKEHSMIFAMPNKPGEFSRFDFPETLPAPINGIWAILRNNEMLTWPEKVKFAIGLLPAMVGGQPYVEAQDGLTVSEWMKKQGVPDRVNDEVVIAMSKALNFINPDELSMQCILIALNRFLQEKHGSKMAFLDGNPPERLCMPIVDHIRSRGGEVRLNSRIKKIELNPDGTVKHFALSDGTQITGDAYVCATPVDIFKLLVPQEWSEITYFKKLEKLVGVPVINVHIWFDRKLNNTYDHLLFSRSSLLSVYADMSVTCKEYYDPNRSMLELVFAPADEWIGRSDTEIIDATMEELAKLFPDEIAADQSKAKILKYHIVKTPRSVYKTVPNCEPCRPLQRSPIEGFYLAGDYTKQKYLASMEGAVLSGKLCAQSIVQDYSRLALRSQKSLQSGEVPVPS

SEQ ID NO: 221681 - protein, 85 aa, Zea mays
  Clone ID: MRT4577_133764C.1.pep
MVSRSMMPYSDVEYRCFVCGLVWDTDHQSLHNDLNIYGEVLLANIILHPDTHSARGFGFVTFSTEDAMPNDIEGINSKELDCRNI

SEQ ID NO: 221682 - protein, 75 aa, Zea mays
  Clone ID: MRT4577_133765C.1.pep
IYGVNNYIWRYRTETNSTGVKIQGHPCMARTAPHELLPIMKCWWGGKTTKNTTTTWIKLDFESATPQAHRARGHP

SEQ ID NO: 221683 - protein, 43 aa, Zea mays
  Clone ID: MRT4577_133766C.1.pep
VVLELTVIMAIPADYETLVSADGEDKLTLEGISCNDGGAYRLR

SEQ ID NO: 221684 - protein, 180 aa, Zea mays
  unsure (1)..(180): unsure at all Xaa locations
  Clone ID: MRT4577_133767C.1.pep
MSNKQGKMAGYINWRMRVTLNDGRAMTGQMLAFDKHMNLVLADTEEFRRVKRKQNKPAAPGASGSGSLVESEEKRTLGLTIVRGAHIISLSVESPPPADPSARLGKSAPGGIXLLWLXGPGVARPAGRGAAPPSLAGPAXGVGGIPPPGFPGFXEVLLASRVLXGRGAPPPGFPGNFLLS

SEQ ID NO: 221685 - protein, 70 aa, Zea mays
  Clone ID: MRT4577_133768C.1.pep
GRSHSNKQAIRNVRIRATGSSHQQIQKPIQGLPLQSIFLRHCILWLYIDLFAASSRYLITYDMSVDSPYT

SEQ ID NO: 221686 - protein, 75 aa, Zea mays
  Clone ID: MRT4577_133769C.1.pep
MMQTECHMSPSSCVLGLSRRLVSIYVACLHLCHNLFLFLYDCLQWIFWVGPFIGAALAAIYHQVIIRAIPFKSRS

SEQ ID NO: 221687 - protein, 60 aa, Zea mays
  Clone ID: MRT4577_13376C.1.pep
IGHPFLRTSTVDGWVSRSTRRETRTNRIETAGSLKNILGETFPPSRILSGMCSRGRSSNS

SEQ ID NO: 221688 - protein, 90 aa, Zea mays
  Clone ID: MRT4577_133770C.1.pep
CVYSHAPVTDVKNSRSNTFHSCLARPGSAARRDDVLPPTGSTAQPHGTVTAILIPAHQERAANFILDAVHLITNLANPPGSSIYYTGRVG

SEQ ID NO: 221689 - protein, 70 aa, Zea mays
  Clone ID: MRT4577_133771C.1.pep
AAAGVLRHACQFGRTSVFLWGVSCLPTPSFSAESPSLFPSRLLTAALLCYLNPELCVLLYRAVCMFFFSS

SEQ ID NO: 221690 - protein, 109 aa, Zea mays
  Clone ID: MRT4577_133772C.1.pep
GNDAASKLAGGDNPGWDWEDMLYFRWQACVSPGESVMLDHARSPSPCLVAVTTMLICSSRTSNVYGIGKWEAFCLLAREMFRTLLNLLGSGKMSVYWSLHCPANKLAEP

SEQ ID NO: 221691 - protein, 78 aa, Zea mays
  Clone ID: MRT4577_133773C.1.pep
SQIYRKAFIVSDNLLLYLLYIFHFFHIKPRLILFINSPKYPILVPSFPKYTYLRHYTPFLKKDTNNCSKNEKSPTPPK

SEQ ID NO: 221692 - protein, 73 aa, Zea mays
  Clone ID: MRT4577_133774C.1.pep
SVGGDRVRNEPFREAVIGQQVVRRADEVCDESSEKRRRRLEGLEPQVGGEVHTWPLRLASLGNMRFWCLLYFR

SEQ ID NO: 221693 - protein, 117 aa, Zea mays
  Clone ID: MRT4577_133775C.1.pep
MTTDIQNLKSFDPFAEVDDAGGEVKSTQQNYIHIRIQQRNGRKTLTTVQGLPKKFDQKKILKVIKKKFACNGTVVADSEMGEVIQLQGDQRKDVMDFLTDKKEGLGLDGKTIKVHGF

SEQ ID NO: 221694 - protein, 396 aa, Zea mays
  Clone ID: MRT4577_133776C.1.pep
DAWGLGHIEDALKHLSLATPQPDLLELHKLQTVEKHFGRCLDARKAGDWKSVLRESDAAIAAGADSSALLLAARAEALLRLNLLDEADLAISSASKLDYTSSCSPDTKFCGFLANAYLFYVHAQIDMSSGRFDNAVSSIDKARIIDPGNTEVVNMHNKVKSVARARSLGNELFNSGKFSEACVAYGEGLKQHPMNKVLYCNRAACRFKLEQWEKSIEDCNEALKIQSNYTKALLRRAASYGKMERWVESVKDYEILRKELPGDAEVAEAYFHAQVALKSSRGEEVSNMKFGGEVETIIGMEQFQMATSLPGVSVIHFMTPSNQQCCKVSPFVNTLCARYPSVNFLKVDVNESPAVARAENVRTIPTFKIYKNGIRVKEMICPSQQLLEYSVRHFGI

SEQ ID NO: 221695 - protein, 78 aa, Zea mays
  Clone ID: MRT4577_133777C.1.pep
QGIVVPFGQLVQPSPASFLTQQQLLPFYQQFVANPATLLQIQQLLPFAHLALKNPAASYQQHIIGGALLLECLLVVIQ

SEQ ID NO: 221696 - protein, 85 aa, Zea mays
  Clone ID: MRT4577_133778C.1.pep
LTPGPPQTHLGPQVIEHASPHLNCATRCTNNRGTLALCRFTSDLASSETDQTMDKILDLYILSSERADICAAGLSCYWFARFWWR

SEQ ID NO: 221697 - protein, 70 aa, Zea mays
  unsure (1)..(70): unsure at all Xaa locations
  Clone ID: MRT4577_133779C.1.pep
LAAESWTHLSDRAVELSSTMSWSQSENARLGATRWPPTIGTLSFGGRXRXPRSAEGRPPRTPGGPTPTSG

SEQ ID NO: 221698 - protein, 62 aa, Zea mays
  Clone ID: MRT4577_13377C.1.pep
PIGAQFFRTGGVLFHFATPILPVLKGGLLFWAPKVFFFVNWCPMGPPACLFPPPHYFGLWAR

SEQ ID NO: 221699 - protein, 45 aa, Zea mays
  Clone ID: MRT4577_133780C.1.pep
VSLLHWSGSGKPWACLGAGRPCPLNALWAPFDLYGPPGAGGEESR

SEQ ID NO: 221700 - protein, 63 aa, Zea mays
  unsure (1)..(63): unsure at all Xaa locations
  Clone ID: MRT4577_133781C.1.pep
ETVPPFDKIKNAPGKFNEGPFSLGQFSLVGLGFVPFLERFQIXFSPLKNFFFSKGRPPLPKFF

SEQ ID NO: 221701 - protein, 293 aa, Zea mays
  Clone ID: MRT4577_133782C.1.pep
GIVPVLTGSRSKSRSQSTSANHSMSKSMSVSPRSPIKRSNVSLERLVSPSPVHQRSRSPVHASKQKESRSPPRQRNMSMSPHRRSPSKSPPGRASRSPVVRRNRSPVEVRTRSISRSSARSLQRRSPSRSPERTHVRKSVSPSPTPMEKGKSISRTSARSPLHKGFSRSPDMPPRKTTSRSPQRNAHRNFSRSPVGSSRRSLTPVRGGRSRRNASRSPSPPRRAVSPLNHGRSPSRSVSPDGSKRIRRGRGFTQRYSFARQYRSPSVDRSHRYGGRSDRDRYISHRGTRYRSP

SEQ ID NO: 221702 - protein, 64 aa, Zea mays
  Clone ID: MRT4577_133783C.1.pep
KKKKKKKKKKKKKKKKKKKKKKKKKKKKKKKKKKKKVFPLGRNHLKGVFLENFHKIWGAFKPFF

SEQ ID NO: 221703 - protein, 140 aa, Zea mays
  unsure (1)..(140): unsure at all Xaa locations
  Clone ID: MRT4577_133784C.1.pep
MMEEDQQIVAGVDAAARGGGGLGRAGAVFLTATCAAATYSAAAAGDIPSVAFAVASYGALLLLLRSLRAYELAPPEAAARREALRRRVWALCTLLSVMFAWKVASVVATPWXSLSGVWAAAAVTSAAGFVLLLRQQQRCQ

SEQ ID NO: 221704 - protein, 138 aa, Zea mays
  Clone ID: MRT4577_133785C.1.pep
PPPRGPSGRAQPGAGRSPPRAPPGRQEFGAEETGAPPKRESSAKPTTGGKTSWPEVVRFSVEEPKKVILAGKPNARHRGGAHPPAGGAPPPWVFLCPRVRRDRCPDAPPASARASAYRLSAPPAMSSWYMSLPVIKYK

SEQ ID NO: 221705 - protein, 117 aa, Zea mays
  Clone ID: MRT4577_133786C.1.pep
SRDGNSLCGDESGGTALSETKALTVSSRGATTTRSLPDRAGNRKVDGSRVASRLAGAGAGPPHKSMEKSKSTGVVSPPQTIRRTQRIKSDGYLKSAAVASPRRRGSGDGHASDSEVA

SEQ ID NO: 221706 - protein, 94 aa, Zea mays
  Clone ID: MRT4577_133787C.1.pep
QPERSERPKLTQILRGADSNKVPDTVCVYGKPQLDYHTLERGEQTKSQLNRIETNTDKTDAKLGQPRLKQQSQDAIEKARHSELCRHKHRTDAR

SEQ ID NO: 221707 - protein, 74 aa, Zea mays
  Clone ID: MRT4577_133788C.1.pep
DYQFFPFGPGRRFCPGINFALPVLELALVSLLPPLEWELPPGVGKGALHVGKAPGIKTPGGIPLVLVPKCRRFV

SEQ ID NO: 221708 - protein, 126 aa, Zea mays
  unsure (1)..(126): unsure at all Xaa locations
  Clone ID: MRT4577_133789C.1.pep
RARNSRADHTLPAKDRIGFXKAFFRTDGFNKGRVFKLVGTFLGQSINFLGPLRARFYNNKVQRWLSKTAFKTIARKLLNSKEGPPTFKQPKITIEKLLKYGHILVADQKNLKRGQFVSRFFNRAFF

SEQ ID NO: 221709 - protein, 203 aa, Zea mays
  unsure (1)..(203): unsure at all Xaa locations
  Clone ID: MRT4577_13378C.1.pep
MDTENGFLAAKLTDDLVVEILSRLPFKSFCRFKCVCKAWLAFSSNPDYCKKLLKIPMGLLYQRRYDEFDNDFDDSAIKLASLPHNDKEFDEALSFLPQYEQLELMDSCNGLVLCKYKSSCTPFGICRFIVCNLATREWKVLPDTPPSDYDPSWSTKFYIFNFQRLSTRYWAFGPRQLQVXSSDLNTRXLDDTSVLSETKVYRL

SEQ ID NO: 221710 - protein, 80 aa, Zea mays
  Clone ID: MRT4577_133790C.1.pep
NRGGSRIFRTSYAPGPDPPDFRGPLWVVRVPALTTTLVSETLTDQAFPPATPPLLFTMKHFIRIEKTHGFVSPILEYVVK

SEQ ID NO: 221711 - protein, 52 aa, Zea mays
  Clone ID: MRT4577_133791C.1.pep
HSKVVELSQHRSWECMLNQARNWHEQSDDLCLSPHVILVGTLMQNFKSYRYR

SEQ ID NO: 221712 - protein, 91 aa, Zea mays
  Clone ID: MRT4577_133792C.1.pep
RLVVVVCGRARRGTAPPDKPQGDASVSHTRHSVVNLGTGPPRVQQRTSPSGFFCRWSAWLPSPTQSRLLSVGSNPANPSPIRPGPLISRIP

SEQ ID NO: 221713 - protein, 52 aa, Zea mays
  Clone ID: MRT4577_133793C.1.pep
ALCTVSLTAVQRIVITPHYNNTDGQRQPIIKVFMYCNIKTTNLRPVIYLTKQ

SEQ ID NO: 221714 - protein, 85 aa, Zea mays
  Clone ID: MRT4577_133794C.1.pep
KGACKNKNRCKFFIFFFPFKQCEIELVAHPQKDCSFVDPSFNGFLAPLEKKLSFPFCPKLSPPLHKKWQVKIKKGLKFFFFFFLF

SEQ ID NO: 221715 - protein, 89 aa, Zea mays
  Clone ID: MRT4577_133795C.1.pep
GRAFYPCPCSGLGLWHEGVRCSFYGRCVHVFWACRPLKGFSDGLLSERGVSCLSPVTHRVLPGGGRLEATMCLISFSYLPQRPRLAAVM

SEQ ID NO: 221716 - protein, 153 aa, Zea mays
  unsure (1)..(153): unsure at all Xaa locations
  Clone ID: MRT4577_133796C.1.pep
XPXXAQXFXAHVRGIXPGAGVHTXHXXCARYTDKRTXPXAIGVHSVQGGGCPHEIWLAYGPKLEHHGSRAASQGYPGQLGIACRAGESPLLPGVRLQDYKKHPAALDXPMHNTTFYARTGRAGLGTQHXRVGDTGHAERRETSSLSSSAPGSC

SEQ ID NO: 221717 - protein, 49 aa, Zea mays
  Clone ID: MRT4577_133797C.1.pep
RLRLLLACSPATSLWLDTFFSFVFRRPFRFGRYLDPDPFVDHILPLQLE

SEQ ID NO: 221718 - protein, 93 aa, Zea mays
  Clone ID: MRT4577_133798C.1.pep
QYFFESNYPLSKGWNFLKAYGKLSHTIMNSRAGRARQMSIKISSEYELESRFTHALLTVYRTTDILSRPKLLYCALNCLFTKEVHPIFWNCSD

SEQ ID NO: 221719 - protein, 70 aa, Zea mays
  Clone ID: MRT4577_133799C.1.pep
FAFFPRQQQEHLAIVLGSPAIHISHPVMGVGAPHIAPPGGQQQPMYRILPIKLSDFPQVPDTDGYYPRYE

SEQ ID NO: 221720 - protein, 58 aa, Zea mays
  Clone ID: MRT4577_13379C.1.pep
IVLDQAALHAGALDHHAGVFDRSFQERLTRIDWGTEVSLWQRKPKRSENRTRAEREHE

SEQ ID NO: 221721 - protein, 46 aa, Zea mays
  Clone ID: MRT4577_1337C.1.pep
GTHAVTHFRVKFPELLKKSDDFSCSYTKRVGVTKSPQVYERVGVRE

SEQ ID NO: 221722 - protein, 98 aa, Zea mays
  Clone ID: MRT4577_133800C.1.pep
ARERERWRSHGGVHVRCRRRRPGVRLDVRVQPLRAAGEARELVQVGRQPCTVGGGGGALRRVHASAAWAGGAETCTAHADSCATTLRAHRSAEALMTY

SEQ ID NO: 221723 - protein, 73 aa, Zea mays
  Clone ID: MRT4577_133801C.1.pep
EQFQRMQPKMSFVHGVGNLVSRSTDLTESICKKLVLELSNIIGSPMGAAADWTAIQPRATGSQLTHCRALCMP

SEQ ID NO: 221724 - protein, 51 aa, Zea mays
  Clone ID: MRT4577_133802C.1.pep
SKHALSLVSRHCTSSLSKSTFVEPILNKQDSLKRCLCMVNTLARETIYISA

SEQ ID NO: 221725 - protein, 278 aa, Zea mays
  unsure (1)..(278): unsure at all Xaa locations
  Clone ID: MRT4577_133803C.1.pep
MTREAGQESGSSERMGGGFAVVLKPDPFNGKNFLIRKAKMKLWLTAMSCFHAVEGKPANLPPEDEAKFKAKDNLFRGAVISALDTKFQKSYIILPTGKELWDALVGKFGVTDAELIGTLDVEERARTKDNGKGVETSTANVVQKRNFRKFNKKKNQNKQENTNKPVQTTQFKKKNNNNNKGKGGCFVCGSDQHWARECPHRKFTQDKKSANVVTTETGDGTSGYGQXRSGALLMGNGSCAYVLGVGTVILKFTSGKTVSVGTLKXVPLVRKMDPGPFG

SEQ ID NO: 221726 - protein, 519 aa, Zea mays
  unsure (1)..(519): unsure at all Xaa locations
  Clone ID: MRT4577_133804C.1.pep
MIHIVMDIFEIMISMINYLLYVIIIMLIYGIKMIWKMPIILTHQKPNVRHFSVSGFAAVLKPDPFDGKNFLIWKAKMVLWLTVMSCFHAAEGKPVNLPPEDEAKFKAEDNLFRGAVISALDTKFQKSYIILPTGKELWNALIGXFGVTDAGSELYLMXQLYDYKMVENRSVVEQAHEFQALAKQLKLFPCPLPHKFVAGGIIAKLPPSWKDFATSLKHKRQEFNVEELIGTLDVEERARTKDSGKGVETSTANVVQKRNFRKFNKKKNQNKQENTNKPVQTAQFKKKKNNNKGKGGCFVCGSDQHWARECPDRKFTHDKKSANVVTTETGDETSGYGNSLPFVLSVCNSPEWWMDSGANIHVCADASMFSSYQVGRSGALLMGNGSHAHVLGVGTVILKFTSGKTVPLKSVQHVPFIKKNLVSASMLCRDGYKVVLESNKCVMSKHGTFVGKGYDCGGLFRLSLHDVCNKMVNSVIRDVPFITHSWMAKFLLCRSVVNSAACFYGLFWTCAFIVSSVCA

SEQ ID NO: 221727 - protein, 397 aa, Zea mays
  Clone ID: MRT4577_133805C.1.pep
MAQNLVIDGNGDGGGVVLEKPILRSKDFRSDFSRGHHVSSQRIRFQRRNRPCRYDIDRFTPNFLSIFESLVPSEEEIANQKQLLTSLSRLINTEWPNSKLYLYGSCANSFGFSNSDIDLCLSIDNKEMSKVDIILKLADIFQAGNLQNIQPLTRARVPIVKLMDPKTGLSCDICVNNLLAVVNTKLLRDYGQIDKRLQQLAFIVKHWAKTRRVNETYQGTLSSYAYVIMCIHLLQLRRILPCLQEMEATYYVKVEEINCAYFDQVDKLNNYGAHNRDTVSRLLWSFFHYWAYEHDYTRDVISIRTGRIISKERKDWTRRVGNDRHLICIEDPFEISHDLGRVVDKFTIKILREEFERAANILQFDPNPSVTLFEPYVPPPSPSLLQEETANAAEIEL

SEQ ID NO: 221728 - protein, 84 aa, Zea mays
  Clone ID: MRT4577_133806C.1.pep
KSNLTSPFFLHNYLFIILHKIKFIYLLFTISIFKKPSLFPTYSPLIIFPLSPFILKFIKSLTLIPFKNYSPHNYNFILLLYLSF

SEQ ID NO: 221729 - protein, 71 aa, Zea mays
  Clone ID: MRT4577_133807C.1.pep
HPVTRQGAQFSWDSKSTVHCLGNRVDIGLVDEGSVLRNHPFAVAVKEVHKAIKLSPKSTSSACEPPTCMAL

SEQ ID NO: 221730 - protein, 121 aa, Zea mays
  unsure (1)..(121): unsure at all Xaa locations
  Clone ID: MRT4577_133808C.1.pep
KPGATHATAKKQXKRRNARKXRKQDKRGGGXAAKPPTGPHKTRESRPPNQSTTNRHKEAQTDSEGKGNPKQRQGREEGKDRTDKTHPAGEKEGNGNPKTKENNRRRDETKGRERQTQTGRR

SEQ ID NO: 221731 - protein, 141 aa, Zea mays
  Clone ID: MRT4577_133809C.1.pep
VHRDRERLLPARLGESSQAAAVARSTVRRWRLARRPQPPHVPSIFILLAFATVTPVQALPLPEATLGRRHPPHPLCTPNLSFRFRSRLLIGVDPQPKHEHRSRQTSSPNSATGAWLPCGLNLGARQQSNQRGELWLWMRGG

SEQ ID NO: 221732 - protein, 240 aa, Zea mays
  Clone ID: MRT4577_13380C.1.pep
MAPSADVAAPAPTPPLAPLIAAQLKFLLTNSSLPIKVVQIWSGCSSGRYADRFTLGIPFCLDYVYWDFLYNAMHPKVAPDVIFGQGDEGFQPLVDYDESGNGGKSCLAHWDYRDPGGLLCLVEELRLLYIEYQKKLVEKVDDARLKFEISTVLAKEGIEVSMVSSTGRSDEVKFAVPLLDLDLKMMVPGCPWKLPQKIHLQAIFPVSSSYLSVPSAPGLKLTSTPDLKSLFSVDGVKLPA

SEQ ID NO: 221733 - protein, 77 aa, Zea mays
  Clone ID: MRT4577_133810C.1.pep
YLQDEPYPEEIQDSYLLNLEWAGFTNEQTKGRSAPAKNFRNGRIWAPPDIYCLEHFFFHLHLLLFFFLYFVSSCYVK

SEQ ID NO: 221734 - protein, 128 aa, Zea mays
  Clone ID: MRT4577_133811C.1.pep
ELKNGGPFPMIKYWNPPYPFQKIGGAMGATFPFGAGFFADPSGPEKTEEKGGDDNEPLVHPPPSVGDKKGPKKALVGGPPKDEKASWGKTPPFLSVCDKKKKKKKKKKKKKKKKKKKKKKKKKKKKKK

SEQ ID NO: 221735 - protein, 42 aa, Zea mays
  Clone ID: MRT4577_133812C.1.pep
GGMVWKLEPDSNITQERGETMRTAGCDRTHDREKLVGLQEPV

SEQ ID NO: 221736 - protein, 99 aa, Zea mays
  Clone ID: MRT4577_133813C.1.pep
GGGGGGEKKKSGGGGSRSVVERRAIEGGGVSMGGRRRNVLGRGEVDVDACSRAAVGALEQPNWARLASTLWKPFPEGIRAPYPYYTADFILEVEAEPWK

SEQ ID NO: 221737 - protein, 37 aa, Zea mays
  Clone ID: MRT4577_133814C.1.pep
TRRLPCPDSCYLKCSTLQPLELEVLFIFLLFKQPVLR

SEQ ID NO: 221738 - protein, 132 aa, Zea mays
  unsure (1)..(132): unsure at all Xaa locations
  Clone ID: MRT4577_133815C.1.pep
HVEAVPSTFCDIYLSAPWRGSSNIVCCTTHSWSGLMKIKDLFIIKGTFQVHDGSQVRFWEENWLELGVLKFRFPLLYNLARRKXKYSTVAFVFSSVPLRLSPATSSIFILYIWLLQSLLKDFILYISFLRQQ

SEQ ID NO: 221739 - protein, 56 aa, Zea mays
  Clone ID: MRT4577_133816C.1.pep
VRGGQIAQQLRGLLGFKKRAPCPYVVAGGVPPWRNFLLWDSPWLASLLGYLGAIFG

SEQ ID NO: 221740 - protein, 50 aa, Zea mays
  Clone ID: MRT4577_133817C.1.pep
DPHTNKRENIPCAKAPPCSFPCTFIPKQITPSHETSPSTMAWRQPNHLFS

SEQ ID NO: 221741 - protein, 211 aa, Zea mays
  unsure (1)..(211): unsure at all Xaa locations
  Clone ID: MRT4577_133818C.1.pep
GGRKQRLRLQWGRTWTRPARAGXWRAAAVAVLAWLALHVAARVADALWWRPRRLEAHFAAQGVRGPPYRFLLGSVKEMVGLMAEASSKPMSPPTSHNALPRVLAFYHYWRKIYGPNFLIWFGPTPRLTVAEPELVREIFLTRAEAFDRYEAHPVVRQLEGDGLVSLHGDKWALHRRVLADAFYPDNLKRLVPHVGRSVGALAEKWRAMASA

SEQ ID NO: 221742 - protein, 66 aa, Zea mays
  Clone ID: MRT4577_133819C.1.pep
RPTRPFFFHITSALDYRRPYVVEQGVPSFIITCTQGVYTISLRLLIENGITPCTLKHIYSGIWIFA

SEQ ID NO: 221743 - protein, 401 aa, Zea mays
  Clone ID: MRT4577_13381C.1.pep
MTIEQMFLMQTQAVQAIGQTLAAMQQVQQQPPLTPTSTSGASLDAQVPRDKRAEFMRGHPPVFAHSADPMDAEDWMRTMEQDVNTDAKRQYHFLRGLVDPLHYQLMNHTFPTFHHLIDRAIMTERKRREMEDRKPTNQNNQAAPAQGGGHACFHCGEQDHWTNYCPKKVAQEQPIPNATVRQNAMQQGGNNRGQPRAQYGKVNHMEADTLQETSGVALVAPMYPPMRVSSIGGRTQTDRFFPSARVQIRGIEFPADLIVMGNQEVNIDEILGMNWITKYQASLSCNKRTVKLVSLSGEEVLVELVLSRPRKGSCHQVTAHVEEIEPSKAINVVSITEPPKVLGPPTDVLVLRTSDNHIDAHNHLTILVLCINIIPPKSASPITQTLHHIGGKNKRKRITIT

SEQ ID NO: 221744 - protein, 306 aa, Zea mays
  Clone ID: MRT4577_133820C.1.pep
MNSLFSSSWKRDGGDIESGGVEMSAPPGAAAGASLDRFFEDVESIKDELRDLERIQRSLHDANEGGKSMHDAAAVRGLRARMDADVAAAIKKAKVVKLRLESLDRANAANRSVPGCGPGSSTDRTRTSVVAGLRKKLRDSMESFSSLRSRVAAEYRDTVARRYFTVTGAQPDEATLDALAESGEGERFLQRAIAEQGQGRGEVLGVVAEIQERHGAVAGLERSLLELQQVFNDMAVLVAAQGEQLDDIEGNVGRARSFVDRGREQLQVARKHQKSTRKWTCIAILILLVIILVIVLPIVLKGVNKN

SEQ ID NO: 221745 - protein, 63 aa, Zea mays
  Clone ID: MRT4577_133821C.1.pep
PFCFVCGTPQSGAQGGETQGQSRCPTKGIEPGTVEAGAVSAASDRSSQSLSFLPLWWGHGLVC

SEQ ID NO: 221746 - protein, 61 aa, Zea mays
  Clone ID: MRT4577_133822C.1.pep
EQTTSPEERGNYSHKNGAPGHYTLKPLYPEINHIRNSPNPINQPQSKGGKPNSKCDTYPNT

SEQ ID NO: 221747 - protein, 90 aa, Zea mays
  unsure (1)..(90): unsure at all Xaa locations
  Clone ID: MRT4577_133823C.1.pep
AASRIPTGARLHAXAAPSKHSEQRLDLADHTGPIPGDSPVSAGGREAPFSDNLGAHLGNKATGENAGRAPTEAKLNGATNRFRPHKHKPP

SEQ ID NO: 221748 - protein, 54 aa, Zea mays
  Clone ID: MRT4577_133824C.1.pep
RVTGDVELVDSQGNAFPANRAFSLCRCGLSKNMPYWNASHKGKFESVVRAPKAE

SEQ ID NO: 221749 - protein, 39 aa, Zea mays
  Clone ID: MRT4577_133825C.1.pep
TTPNVKLTQLRFFRRPNHPGRALFPHLQQHLPPLHEPQH

SEQ ID NO: 221750 - protein, 98 aa, Zea mays
  Clone ID: MRT4577_133826C.1.pep
KQIKDPCVQVIQTTGVPHTKHGSLPGGGGYSCLKNITTGPPGGTTRDKRGNKLNTKVPQTETGLIGKRTPPKGTDPTFQWGRVVKLKRGGTQAFFLVS

SEQ ID NO: 221751 - protein, 68 aa, Zea mays
  Clone ID: MRT4577_133827C.1.pep
RLVDVSQNLVPNGIKVDISTMLEEAVQYVKFLQLQIKLLSSDDMWMFAPIAYNGVNVGLDLKISPPQQ

SEQ ID NO: 221752 - protein, 85 aa, Zea mays
  unsure (1)..(85): unsure at all Xaa locations
  Clone ID: MRT4577_133828C.1.pep
ESKPLSALHPNLTDPGTXVRTYDXPTLENPCTRVHVTLYRNNRLTRLHLEQPNLSRQMMPELVKLKHIQYPNFSXNNIRGTIPAE

SEQ ID NO: 221753 - protein, 118 aa, Zea mays
  Clone ID: MRT4577_133829C.1.pep
ASKPWLKTPDVFKNCSRGILFPSELVYPFEKRVTPPKSLPFYAPFGLKNSLGRHLGDAPFVRVNKLVFQLWTSVFKCPHSCIFSVTLFPPNHVSALFAGRKKDRQKKKKKKKKKKNNN

SEQ ID NO: 221754 - protein, 77 aa, Zea mays
  Clone ID: MRT4577_13382C.1.pep
MAMETCFRAWALHAPAGSKDRLLVGNLVLPSKRALAPLSAGRVATRRPRHVCQTKNTIDYTVTSTHIRTDHQTVMTS

SEQ ID NO: 221755 - protein, 35 aa, Zea mays
  unsure (1)..(35): unsure at all Xaa locations
  Clone ID: MRT4577_133830C.1.pep
CLSLNSVCFKRLPRKXYFHLLNSYNIKRVLGVVYC

SEQ ID NO: 221756 - protein, 108 aa, Zea mays
  Clone ID: MRT4577_133831C.1.pep
ATWIGLGGMRVFLLCLHVFAASCGVVSVEVLEGIGEVDRGAVALVVVRTSRLVRNASDLPARYSARPAVGVPSPSLSLMAHSVTSPLSCPSYEFSRHGRIGLLRCWRG

SEQ ID NO: 221757 - protein, 74 aa, Zea mays
  unsure (1)..(74): unsure at all Xaa locations
  Clone ID: MRT4577_133832C.1.pep
EVHGRFINVPFKKGVFLYPPLXKKIPCFGIFRSKCMGGDLLRKKLVVKKKKKKKKKKKRRKEKKKKKIKKPKQG

SEQ ID NO: 221758 - protein, 37 aa, Zea mays
  Clone ID: MRT4577_133833C.1.pep
KGGAIIHTINTTLNQNNIHLSFHQIQIHSNLISFLIY

SEQ ID NO: 221759 - protein, 110 aa, Zea mays
  Clone ID: MRT4577_133834C.1.pep
MSHCGWNSTVESISHGKPILGWPMHSDQPWDAELVCKYLRAGVLVRPWERPHDVTPAADIRDAIDRVMASEEGAEIRRRAGALGEAVPGAVAEGGLFRQDLEELVAYVTR

SEQ ID NO: 221760 - protein, 80 aa, Zea mays
  Clone ID: MRT4577_133835C.1.pep
SGNGGSTRKNDLMPPGALCTKPPGPFSKCIAKMRGARAISFTSHSKARAHREANPSPLIADPPPPGARGQHLATSPVAGG

SEQ ID NO: 221761 - protein, 75 aa, Zea mays
  unsure (1)..(75): unsure at all Xaa locations
  Clone ID: MRT4577_133836C.1.pep
HASERKGSSSLRDLARRGAGREKKAKKMRMEDDGLGRETGMVRARRGSGGRDSGGRDDQDDXEGDPLXLWDTIAG

SEQ ID NO: 221762 - protein, 436 aa, Zea mays
  Clone ID: MRT4577_133837C.1.pep
MADAIISAILGDVVSRAVSLLIGRFSNNQESAEDKLQRMKRLVIRIHSVVEEAKGRQISNHGTLQWLSDLIDGDYQGCYLLDSVGCGGEADRDDDGKAIPQVSTLSLFNPAKRVRLAASSRRHDDTGGVDEIERVLQRLQVMSGDLREFILLLQGCKPIRRPLATSIFRDGQMFGRHVEKERIINFLLHEDDYRRTTELGVLPIVGDSGVGKTTLVQYACDDARVRAHFPVIMLYSFTSTYDVKNNQGISPSDDPLELIKSSDDSFWDRHRRCLMIFEDVDMCRKQMLEEFLQNHRRSEAAGVVKMIVTTNNRRVANDVGTVEPMVLRPLPCPEFWFFFKAHAFAGRDVEENPRLISAGKAIARKLNGSFFGAKIIGGLLRDHPDPRVWCKVLRSSIGGMSPLGDGVSYISDLAENLLPGHVNMWTVTRSKPDLSS

SEQ ID NO: 221763 - protein, 144 aa, Zea mays
  Clone ID: MRT4577_133838C.1.pep
MASVTRFPAVALVLLLAASAFLASEVAACGGCPKPTPPPSPPPPSPTSTPCPPPPSSSGGKCPKNALKLGVCANVLGLVKVSIGKVPTDSCCPLLDGLADLEAAVCLCTALKANVLGVNLDVPVKLTLLLNYCGKSVPQGFLCA

SEQ ID NO: 221764 - protein, 158 aa, Zea mays
  Clone ID: MRT4577_13383C.1.pep
SEPFLFGGFAAHTFATPRPAASKQPDWVESGKGTEGRFGRKKLHRVDWSSILRTSRLRKLYTRSRTQTRCLLVFTRSRRLAGPAAQARLDEEEKDSWHAPPGGGASFRGNDCRWPRAEARAPRLPQHLDQRLRLGFELGAGGRGLGEGDEGRDGALAG

SEQ ID NO: 221765 - protein, 130 aa, Zea mays
  unsure (1)..(130): unsure at all Xaa locations
  Clone ID: MRT4577_133840C.1.pep
MRQTATSRAQPHRGWDRPEPRTGQLLPHDQPGMDGPQKQPATEEHNTGGILHRSGRSSSSTSEDDGMGGRRKKGITEKIKEKLPGGHKDDQHATATTGGAYGQQGHTGSAYGQXEHTGSAYATGTEGTGQ

SEQ ID NO: 221766 - protein, 41 aa, Zea mays
  Clone ID: MRT4577_133841C.1.pep
AREVAKGPPCCRREGADGCAASLCQQAVRTAVGFLNFILGA

SEQ ID NO: 221767 - protein, 84 aa, Zea mays
  Clone ID: MRT4577_133842C.1.pep
VRETTDLTCCCSSDHMRSLRRTITWTRRRPKPSMETASYLKPTAKYYVFHPYLGTTQPIGPITPHFHSSSQRRLPTSLKTSTSL

SEQ ID NO: 221768 - protein, 179 aa, Zea mays
  Clone ID: MRT4577_133843C.1.pep
LPRTYLHLCFLWFTGTGAKVSQNCVLLHTPLESHDIQACLSKNGFNGNRISLWVLQGLPLSTTTSLEHLLLLISNLAMKGSIVIGELPHFTDCTAPMDMGLEQDKLEKLFFTHGFRVSFVQYDTVAEDIGLDLAITLEQCGTMLFVAEQLRFSDAQMESFRIHFGRIEEGADEEGFEEL

SEQ ID NO: 221769 - protein, 133 aa, Zea mays
  Clone ID: MRT4577_133844C.1.pep
SARAASSPRPQLPQSSLAFVDLCSISFSLRSFSRFDVFSVVRLCKISFLSGSRYPRSQPIGKSSCHLARSNTKPAFNSPGSDYSMIFRALSVGTVRKFPPYFLLSGVCGRKANSLCPKAFPCFEAISSFARWI

SEQ ID NO: 221770 - protein, 132 aa, Zea mays
  Clone ID: MRT4577_133845C.1.pep
RAECVLSQIKSRAIISCHGWLLHKEMSHFVDIRCCGCGIWLAPVIINASARSFRIRARSVSLDYPSRTEQKNETNLVVVRPERRLRDDFVDAGADHGSGRATADFKKAVPSFDANLRNLLDEQLKPGRPLGS

SEQ ID NO: 221771 - protein, 52 aa, Zea mays
  Clone ID: MRT4577_133846C.1.pep
LNKWKNKIDRSAFIIFLKSKKFLFFLYIGRRFGIGKRDACPSSKYVKIFYRY

SEQ ID NO: 221772 - protein, 180 aa, Zea mays
  unsure (1)..(180): unsure at all Xaa locations
  Clone ID: MRT4577_133847C.1.pep
FGTRPHPAAAPEXPPPPRXAPAGAPPLPFDPGSTMQPPMGSERRTPPGRPVSAFVPGAAVPPPPFAAGGPFAPPPRQGVPPPQSGAAAPAFGAAPPAAMGGGFRGPPPSQGPYGAGTLPHGPFASAPPPQGSFTSAPPSXRAPLPPXPPSQSPFTSPPPSQGPFAAGPPPTGPFAATPAP

SEQ ID NO: 221773 - protein, 61 aa, Zea mays
  unsure (1)..(61): unsure at all Xaa locations
  Clone ID: MRT4577_133848C.1.pep
MGKEKYHINIVVIGHVDSGGXTTTGHLIYKLVGVDQRVIERWLKEDLEINKRELVSTCGLV

SEQ ID NO: 221774 - protein, 48 aa, Zea mays
  Clone ID: MRT4577_133849C.1.pep
FNRSRITRLLILNRSIMFLAGLGVNDHVQIVNSFLRQHTLGLHFRCCY

SEQ ID NO: 221775 - protein, 95 aa, Zea mays
  unsure (1)..(95): unsure at all Xaa locations
  Clone ID: MRT4577_13384C.1.pep
ILFTEFSSTKFKVTAANLSAIMSGRGKGGKGLGKGGAKRHRKVLRDNIQASXKPAIPVGERARHASPVIYRTGRPDSSNVIASVLTTAAQLHAGV

SEQ ID NO: 221776 - protein, 74 aa, Zea mays
  Clone ID: MRT4577_133850C.1.pep
RDPAAVPRSPGHIGWCIYCLRCHALFLDNKYSFCCPSPLFIFFMSLARFFWSDVMMCCLLLLHKESISWEDDEQ

SEQ ID NO: 221777 - protein, 95 aa, Zea mays
  Clone ID: MRT4577_133851C.1.pep
GAPTKNHACYYPPKAQGGGQYIFGSATSIEAISPSGQDPTSYNTGEGRGSASIFYSKKASEAYPDQKTKGPPGAAILFFLNGGGDPLRFFLVDEE

SEQ ID NO: 221778 - protein, 50 aa, Zea mays
  Clone ID: MRT4577_133852C.1.pep
MSRRGDWVYENNGGTCVAIAGADYCVVAADTRLSVGYSILTRDHSKICDL

SEQ ID NO: 221779 - protein, 109 aa, Zea mays
  Clone ID: MRT4577_133853C.1.pep
SSLKLRFPRGSGLSFSSFAFPSTSWGAPVPISPYWERIYVGLLAVFLKRPAWENRGVTQFIRFGALSLLSSWLIGEKAWPDRLSQYFSRLNVEGKLHLLNFWQNSGKFF

SEQ ID NO: 221780 - protein, 57 aa, Zea mays
  Clone ID: MRT4577_133854C.1.pep
SFVRHLEEPSSILTSTSGSITSPSMRRGLSHWLYPDAQLPRSRSECASAGNSYAVAR

SEQ ID NO: 221781 - protein, 34 aa, Zea mays
  Clone ID: MRT4577_133855C.1.pep
PTRPPTRTRTRRRTLLKRRLTVRILWLADYHRYI

SEQ ID NO: 221782 - protein, 57 aa, Zea mays
  Clone ID: MRT4577_133856C.1.pep
AFDITVAAVISKVAKLRIGIVEGRTEAEKLEKYNWKYPLLAEGQKAEDPHEWGPLFN

SEQ ID NO: 221783 - protein, 61 aa, Zea mays
  Clone ID: MRT4577_133857C.1.pep
AQLGVFLKRRFVFLCILLSFKASLHRYSKNIPSYLKNSYRRTPFRHLRPKSYMLTTSYSCT

SEQ ID NO: 221784 - protein, 52 aa, Zea mays
  Clone ID: MRT4577_133858C.1.pep
AVRFLCQTGEYSLPSPASLWGKQCCILKNPRLLIYYISVLTSVIDPRTRIPS

SEQ ID NO: 221785 - protein, 81 aa, Zea mays
  Clone ID: MRT4577_133859C.1.pep
HYFITTKLHFFKQLANALNPQTCWYNRYAADTKIYLPANERERSIKEYNHHDDRQHPQSSRPSTTTFFHRNCTDILLCVSY

SEQ ID NO: 221786 - protein, 90 aa, Zea mays
  unsure (1)..(90): unsure at all Xaa locations
  Clone ID: MRT4577_13385C.1.pep
RSRGWCEDGKGAKGKQPTTRETRRLREREREXGNRESNEEEEXMEPHEACTSSLRQCRICHDEEDARRSAMVSPCACSGSLKYAHKGCVQ

SEQ ID NO: 221787 - protein, 72 aa, Zea mays
  Clone ID: MRT4577_133860C.1.pep
GAGGAPRGTGDGGPSQAGWSPPGPRFWGASEFSGLMVWWNRFRGFLALFGFGGFPAGLWGWNAIIWKPGGCF

SEQ ID NO: 221788 - protein, 55 aa, Zea mays
  Clone ID: MRT4577_133861C.1.pep
LSEAHFPRPSPQRLISSLLIPQLATHQCSAGQCHAGACHLTSVLASVFPKETICD

SEQ ID NO: 221789 - protein, 71 aa, Zea mays
  Clone ID: MRT4577_133862C.1.pep
AKVGDFFDPAVNLALKIKVAPTGGTKLRDFVAPLQFEGTQVGIAKFSHDVGEFAKQFPPIGFGKGPFKSKN

SEQ ID NO: 221790 - protein, 38 aa, Zea mays
  Clone ID: MRT4577_133863C.1.pep
SKKINEKYKKYLRNTKILNKGGTTMFMWRYQVLLHANV

SEQ ID NO: 221791 - protein, 40 aa, Zea mays
  Clone ID: MRT4577_133864C.1.pep
ITWVVAMLYMVLGNHLSPLCSILVFILLSSCCYHNVNWNI

SEQ ID NO: 221792 - protein, 63 aa, Zea mays
  Clone ID: MRT4577_133865C.1.pep
WCPLPIPMESICFEPPCVVQFILFCSLIMLLPLSISNQFINSDYYSNLSLLLSLQYSALTDCC

SEQ ID NO: 221793 - protein, 220 aa, Zea mays
  unsure (1)..(220): unsure at all Xaa locations
  Clone ID: MRT4577_133866C.1.pep
RPVRVQSFIDAPNLIDAFLRYLELRKVAPEYADDIAKARAICAQAKVELPKCKMLTVDMPGKFNQACSIYFGDIPTTMDTSWMSEATMKTQKMFSSFFEETVGMTREEAKRIVQSQIKDTTNTKLNHTLNWVPIKVTDIPPIPSNADPESFFKVTFTNYENDQDKYDIVFERKIIDNLILGMTAHATLCXLSNGDWYLEEATRIMPSFFMEDDCLHEEKI

SEQ ID NO: 221794 - protein, 56 aa, Zea mays
  Clone ID: MRT4577_133867C.1.pep
GGHSLDKDVILHAGAIPTRPTQYTSHPPSLGTSQSRHSLHVFVHHSLQWHRHQVSP

SEQ ID NO: 221795 - protein, 78 aa, Zea mays
  Clone ID: MRT4577_133868C.1.pep
DSNRVCRCSSMTPLFSMLAFELEPPLGPAQPHGAVQADAERRERAGERHCRLQLYASQQTELSGLQECFRKYALVGTR

SEQ ID NO: 221796 - protein, 44 aa, Zea mays
  Clone ID: MRT4577_133869C.1.pep
LVQSFTDDDCVDNVLCITIGGSVSVSNHLNYLLECKEKSIVPKY

SEQ ID NO: 221797 - protein, 55 aa, Zea mays
  Clone ID: MRT4577_13386C.1.pep
NYLIKKLIKTQFNHEQTLLNYYSLQILIQAKNFEVGPTVGPYKIDLFGNSQFQQD

SEQ ID NO: 221798 - protein, 101 aa, Zea mays
  Clone ID: MRT4577_133870C.1.pep
MELRKNLDSILQSGLKRMARLHVHFSSGLPSDGEVISGIRQNVNILIHLDVSKALKDGMKLYISDNKVILTEGFGFDGVVPVKYFERIETWPGRAPIPFQR

SEQ ID NO: 221799 - protein, 64 aa, Zea mays
  Clone ID: MRT4577_133871C.1.pep
LSRPEQPLGGVFLLVGELLQFTAGFRPTPPKKTKRSHPTRATRRSHPQEGQKISLRPPDQHLLH

SEQ ID NO: 221800 - protein, 250 aa, Zea mays
  Clone ID: MRT4577_133872C.1.pep
MNPSSSSTSSSGGYHSRAAAFASPQPRGGGGGGGGGRDGSDRIDALGRLLTRVLRHMAAELRLDMRTDGYVRVRDLLKLNLQTFAKVPLKSHTVDEIREAVRRDNKQRFSLLEEDGELLIRANQGHTISTVTSESLLKPILSPDEVSVCVHGTYRKNLDSILQFGLKRMARLHVHFSSGLPSDGEVTSGVRQNVNILIHLDVSKALKGGMKLYISDNKVILTEGFDGVVPVKYFERVETWPGRAPIPFQR

SEQ ID NO: 221801 - protein, 169 aa, Zea mays
  Clone ID: MRT4577_133873C.1.pep
IGISKVVQLLARCKIWDTVKRHVAVLDDLYPGGRAAGERAHRVRTCMAQRDSICASCSLCTCCGNQSYCGTASQSYTSGRWSVSVSKCLSMTEDPGTALGRGPYHGLPDAAAGLALTVVLGIVHAGLTEGGRRRHVRDPAGATPWRRGTMVLLTIATSFVMTLLRIAET

SEQ ID NO: 221802 - protein, 133 aa, Zea mays
  Clone ID: MRT4577_133874C.1.pep
RHRAYSLILTTQPSAQSPTQQYMQVIRRRSQQELTHPGGVLAPGSGYNAGEYSHKSIKVRFDGSPAPSTTPYESTVPVKPWLDCYELPISSHMGDASTLYSTPNPAPRKADTTLPGARTHSCILSSKMMTPCC

SEQ ID NO: 221803 - protein, 66 aa, Zea mays
  Clone ID: MRT4577_133875C.1.pep
NPQPPDSCCSRQPYESTTSCIRSPFPADCAKLAVHPFSRPWTQKSRTWLGLCATARARRYARLCGG

SEQ ID NO: 221804 - protein, 75 aa, Zea mays
  unsure (1)..(75): unsure at all Xaa locations
  Clone ID: MRT4577_133876C.1.pep
SNASDXLDKIRFLSLTDKEVLGEGDTAKLEIQIKLDKEKKILSIRDRGIGMTKEDLIKNLGTIAKSGTSEKAGKS

SEQ ID NO: 221805 - protein, 130 aa, Zea mays
  Clone ID: MRT4577_133877C.1.pep
PEATWAMARTSSRRRAAKLMAKPSGSTMVKGSPDDRISSLPNDILVNILNRLDVRAATRTSVLSRRWSQLPAMVPQLTISARDLLPSETKTSISKVEIVRRATAAVAKDPANAALSNAEFGSEDQCSCCQ

SEQ ID NO: 221806 - protein, 88 aa, Zea mays
  Clone ID: MRT4577_133878C.1.pep
MAMASALPLLLAPRAVFEIAGPASPHLRSRRLALRLPPPTRPADLSGPPAVVQSRKARHVQPHPAKCCKQDPFPDQGGTARDCLFSLA

SEQ ID NO: 221807 - protein, 263 aa, Zea mays
  Clone ID: MRT4577_133879C.1.pep
MRKWALSSALLLLFLLTTLPDPAKKLQVNAEESSDDLANPPKVEEKLGAVPHGLSTDSEVAQREAESISRKTLRSSAEKFEFQAEVSRLMDIIINSLYSNKDIFLRELISNASDALDKIRFLSLTDKEVLGEGDTAKLEIQIKLDKEKKILSIRDRGIGMTKEDLIKNLGTIAKSGTSGTSGTAFSSFQLITALIIFVYECRNRSCSSLLSKLIREGRKELRRWKKRKCICNYTKQWRRWSRSIWRPTRSWTSSSLTSATWSW

SEQ ID NO: 221808 - protein, 157 aa, Zea mays
  unsure (1)..(157): unsure at all Xaa locations
  Clone ID: MRT4577_13387C.1.pep
CFVGADAAIEKLADFFTTAGRNTAVRSGMVPLPSHVKFTISYDXGDEXLYSTCTYVYSVCVHNYRVDXMVSLVXAKRARSPYGTRDLQICVTLXADHAACVSVSHHSISSCRDSLVACYRLVNXMMVHMNQFGXIVEDTSRYYRDALDRILPPFKLC

SEQ ID NO: 221809 - protein, 170 aa, Zea mays
  unsure (1)..(170): unsure at all Xaa locations
  Clone ID: MRT4577_133880C.1.pep
MASAARFLVAVVVACALLASNNCHAARHLADTAAAPAAAGAVPGLPAVPTLPTVQPVPQVALPPMPAVPAVTVPQMTLPPMPAAPKVAVPLPPMPAIPSVLPKLTLPPMPAVVPSVVPKVALPPMPSVPTVNVPMPFAAPPPXVDARGAPAGLRSPCPPCTGGGDRCTRE

SEQ ID NO: 221810 - protein, 180 aa, Zea mays
  unsure (1)..(180): unsure at all Xaa locations
  Clone ID: MRT4577_133881C.1.pep
MLLSSAVLQPTKKLQVNAEESSDDLANPPKVEEKLGAVPHGLSTDSEVAQREAESISKKTLRSSAEKFEFQAEVSRLMDIIINSLYSNKDIFLRELISNASDXLDKIRFLSLTDKEVLGEGDTAKLEIQIKLDKEKKILSIRDRGIGMTKEDLIKNLGTIAKSGTSGTSGTGAARVSCRS

SEQ ID NO: 221811 - protein, 127 aa, Zea mays
  unsure (1)..(127): unsure at all Xaa locations
  Clone ID: MRT4577_133882C.1.pep
RKEVLSKIEEDVAKLSGSAAKFEQEQMKEHALHLLVLSHVFSVXSLKTVCFDQLERGFLAPDNVVDMLQLARLCDAPRLALACVRMVIGDFKTISLTDGWKVMRRANPSMEQELLESLVEADTVSSL

SEQ ID NO: 221812 - protein, 78 aa, Zea mays
  unsure (1)..(78): unsure at all Xaa locations
  Clone ID: MRT4577_133883C.1.pep
PVSAYDELRYRPTWELGPPYKPTVKIRQIWDSYSSGAPKVHKAPLAPTGPSFFFLLSFFLFGPFFFFFFFFXKNNPAR

SEQ ID NO: 221813 - protein, 146 aa, Zea mays
  Clone ID: MRT4577_133884C.1.pep
MASAARFLAVAVVVACALLASNNCHAARHLADTAAAPAAAGAVPGLPAVPTLPTVQPVPQVALPPMPAVPAVTVPQMTLPPMPAAPKVTVSLPPMPAIPSVLPKLTLPPMPAVVPSVVPKVVALPPMPSVPTVNVPMPFAAPPPSA

SEQ ID NO: 221814 - protein, 144 aa, Zea mays
  Clone ID: MRT4577_133885C.1.pep
MASAARFLVVVVVACALLASNNCHAARHLADTAAAPAAAGAVPGLPAVPTLPTVQPVPQVALPPMPAVPAVTVPQMTLPPMPAAPKVAVPLPPMPAIPSVLPKLTLPPMPTVVPSVVPKVALPPMPSVPTVNVPMPFAAPPPSA

SEQ ID NO: 221815 - protein, 163 aa, Zea mays
  Clone ID: MRT4577_133886C.1.pep
MASAARFLAVAVVVACALLASNNCHAARHLADTAAAPAAAAIVPGLPAVPTLPTVQPVPQVALPPMPAVPAVTVPQMTLPPMPAAPKVAVPLPPMPAIPSVLPKLTLPPMPAVVPSVVPKVALPPMPSVPTVPSVVPKVALPPMPPVPTVNVPMPFAAPPPSA

SEQ ID NO: 221816 - protein, 83 aa, Zea mays
  unsure (1)..(83): unsure at all Xaa locations
  Clone ID: MRT4577_133887C.1.pep
IHPXPELFFPHXKTNRPXLXSXKASLNXXXHIYTHXLSHKHGCRPLPLYXLLNKPYPYPTLXIQPSXXHXXXXXXXLPXKHHP

SEQ ID NO: 221817 - protein, 44 aa, Zea mays
  Clone ID: MRT4577_133888C.1.pep
MGPAVGDGDRGPGAAAEHKVNLSARQPFVESVRTCLPETFFPDD

SEQ ID NO: 221818 - protein, 144 aa, Zea mays
  Clone ID: MRT4577_133889C.1.pep
MVSAARFLVAVVVACALLASNNCHAARHLADTAAAPAAAAVVPGLPAVPTLPTVQPVPQVALPPMPAVPAVTVPQMTLPPMPAAPKVTVSLPPMPAIPSVLPKLTLPPMPAVVPSVVPKVALPPMPSVPTVNVPMPFAAPPPSA

SEQ ID NO: 221819 - protein, 139 aa, Zea mays
  Clone ID: MRT4577_13388C.1.pep
MAEADITRYWCHECQQAVEEAMVEELKCPLCDGGFVEEMTVEQVEALTEQGATQWDPLDNPLEQAGSPGDSDDEENSDIGREFEGFIRRHRRASALRRVLDSIHDDLRDDRERDNSVLISAFNQALALQGAALDPDGPR

SEQ ID NO: 221820 - protein, 81 aa, Zea mays
  unsure (1)..(81): unsure at all Xaa locations
  Clone ID: MRT4577_133890C.1.pep
MAKQLQQGMAAVALVVLVELAATAAETASAASCNAGQIAACAPAITDGATPSASCCFNLKAQQGCFXSFVKKPTYGRYINN

SEQ ID NO: 221821 - protein, 142 aa, Zea mays
  Clone ID: MRT4577_133891C.1.pep
MASTERFLVAVVVACALLASNNCHAARYLADTAAAPAAAGVVPGLPAVPTLPTVQPVPQVALPPMPAVPAVTVPQMTLPPMPAAPKVAVPLPPMPTVPSVLPKLTLPPMPVVVPSVVPKVVLPPMPSVPTVPMPFAAPTPSA

SEQ ID NO: 221822 - protein, 117 aa, Zea mays
  Clone ID: MRT4577_133892C.1.pep
MAAAATAIATPSVAPEAGDRKAVAPPVDAVDLELELELEEKHVLAVDDSSVDRAVIAKILRSSKYRVTTVDSATRALELLALGLVPDVNMIITDYWMPGMTGYELLKHVSRLCSRIR

SEQ ID NO: 221823 - protein, 74 aa, Zea mays
  unsure (1)..(74): unsure at all Xaa locations
  Clone ID: MRT4577_133894C.1.pep
PIHGNQLHALGYTTNVCMCTDPHYNTDRNEHGATQDENRHAGDLGNTTXGADGDANINGPDSQIPMTGPNSIIG

SEQ ID NO: 221824 - protein, 90 aa, Zea mays
  Clone ID: MRT4577_133895C.1.pep
KKKKKKKRENKKGIKALHMSPTINSHAFTCLFCLTLYSSVLQISISFTTFLFANSLTLLSSLHFHHFPFLSLALLAISALLSSIFIICSS

SEQ ID NO: 221825 - protein, 39 aa, Zea mays
  Clone ID: MRT4577_133897C.1.pep
PVCRKCPKVPPQEAPVFPTGLRIGCPFRPGGSESMLKFL

SEQ ID NO: 221826 - protein, 98 aa, Zea mays
  unsure (1)..(98): unsure at all Xaa locations
  Clone ID: MRT4577_133898C.1.pep
IRGVGDPREAAVYGPYTQRLPTRDNGIAGIRPIKHDWEPVVVRMNAPTAAANKDQKAVNAARRARSDIHTMTXSNAGTRXAASSGTTLNSTRLYYDTS

SEQ ID NO: 221827 - protein, 76 aa, Zea mays
  Clone ID: MRT4577_133899C.1.pep
LRSPKQLMHTTHNITEEESGYRERGIDDDDCERDVLLKLSIHQAITEPGSNRVPPFLSRTPPHLPNIAQFSRRRDK

SEQ ID NO: 221828 - protein, 316 aa, Zea mays
  unsure (1)..(316): unsure at all Xaa locations
  Clone ID: MRT4577_13389C.1.pep
MGWAPRWLRGLLGGGRKAAVTKPVKEKKRWGFGKSFREKXRASAGAASDASVASRGDASXGFAAAPDEADDEQSKRAIAXAAQAAAAVVRLASSXPPTAGRREAGGVXAAVRIQAAFRGYLARRALKALRGLVKLQALVRGNIVRRQAAETLRCMHALVRVQARARACRAIRSQHVTAHPDPPTPEKYEQAGAPRHGRSGSLKANSSRTPGGERLGRERSESCGRNWLDRWVEERYMDDEKNAKILEVDNGKPRRRYASKRRGGGGGNHHHHHQSPCSTTMGSEQNSRSYATMAESPSKDSTTAQQSVPSPASVGM

SEQ ID NO: 221829 - protein, 67 aa, Zea mays
  Clone ID: MRT4577_1338C.1.pep
TLYHQYLTGVAGLSIQNMHILKVFTLLYGTVYFNAHLPMITDKMPSKLRSRIFVLLVNCNISQLNYH

SEQ ID NO: 221830 - protein, 131 aa, Zea mays
  Clone ID: MRT4577_133900C.1.pep
LCGLSWCIDTREEGTVKYELSYHLSMYHHQCHIRRKEVLYRLLPTRAIFILIRVNCAFQGHMSCKKGRDLVYVECAGLGSEGEHVAVGAGSVSGYADIGVVYVISPSPFRDRWWSEPRQEGHPSSRRDVLV

SEQ ID NO: 221831 - protein, 58 aa, Zea mays
  unsure (1)..(58): unsure at all Xaa locations
  Clone ID: MRT4577_133901C.1.pep
QLANKSLSGCVGVVLSXRERXEMDVHIAKLDFGFMDTSVICRSDSPLFIADLRKPPQT

SEQ ID NO: 221832 - protein, 261 aa, Zea mays
  unsure (1)..(261): unsure at all Xaa locations
  Clone ID: MRT4577_133902C.1.pep
MSCSIAAVVVSLFLSLNQIISCRAAGADDDGAARSLASCLISHGVTNFTLPTSRSYAGVLNSSISNLRFALPDVGKPAAVVLPGSRQDLQRSVLCARSSSLAVRVRSGGHSYEGLSYTSENRVPFVVIDVANLNRVRVDRGSATAWAEAGATLGELYHAVGRSGRSLAFSAGSCSTIGLGGTVSGGGFGLLSRRFGLAADNVLDAVLVDADGRALDRAAMGRDVFWAIRGGGGGSWGVMYAWKLRLVPVPRNVTXALGGAD

SEQ ID NO: 221833 - protein, 538 aa, Zea mays
  Clone ID: MRT4577_133903C.1.pep
MPAPVAPVTSRLKREDCPRTKHDSLFSPWKVLVGPSDWRDHAAGKEGVQRYRIRNLPDNFPGLYELGVACAADEGVRSRRRDARGVVVVYLGQADSVRARLQQYGRSGSHLDTTNSPGSSDRDAANALAEGPGLFREVFSRGYSVVFRCALMDNKQEAEKTEALLLRVFDYAWNKLQNGACRRQEILHKLELRAANHRSLLSRVSDMKQKIFGQKAGINIKGSGPANTSPSIIKSMLPRVRTIVRFRPQLVNPNNSEGGITGIPYANRQAHRRKSKGYQVKKFDVTKRRTVPIHDSNSVCGVLLEDGFCLEHPVHGRKRCSLHKGKRVKGSPKSSPTSHPCQVGIAITEFCLTEDLDSSVPKQESEIRPKNMSTTLKEPQRQSDNLESQKVNTGEASTEDGTQEVSRDACILEEKAFFHADSESQEQQPSGRMWFELLKSQRKPASAHPSRRGLGSQITAMTDNRSCKMVSIAGMERTEKDSGVEVTAASFSRSSGWPCTCGARTSDGSRCMNMPIEGRKRCALHKGQRAAFPPTPSA

SEQ ID NO: 221834 - protein, 90 aa, Zea mays
  unsure (1)..(90): unsure at all Xaa locations
  Clone ID: MRT4577_133904C.1.pep
KKKAPPPLKEFRNFSQKPLGPPDVRFIFKPPKPFWNRGFRSVPRRVFFRFPPKRTXGGSXKEELFSLVPVREIPPEGFKGLGPKVFFKPH

SEQ ID NO: 221835 - protein, 135 aa, Zea mays
  Clone ID: MRT4577_133905C.1.pep
RGAVRVQSELGLVMRPMYSNPPRDGAFIVATMLRVSEIFAEWALEPKAMADRIMNMRRQLFNALKCTGTRGDWNHIIKRIGKFTFPGLNIEQVALQRLEFHINMTSDGRISMAGLSIRIVLHRADAVHDAVSQVK

SEQ ID NO: 221836 - protein, 227 aa, Zea mays
  Clone ID: MRT4577_133906C.1.pep
MVSFTSLITAAVAATGAFAAPATDVAARSSGDLVARQSTPNAEGTHNGCFYSWWTDGGSKVTYTNGAGGSYSVNWGSGGNFVGGKGWNPGSARTVTYSGSYNPNGNSYLAIYGWTRNPLVEYYVVENFGTYDPSSQASNKGTVTADGSSYKIAQSTRTNQPSIDGTRTFQQYWSVRQNKRSSGSVNMKTHFDAWASKGMTLGSHYYQIVATEGYFSTGSASITVNCP

SEQ ID NO: 221837 - protein, 67 aa, Zea mays
  unsure (1)..(67): unsure at all Xaa locations
  Clone ID: MRT4577_133907C.1.pep
MGSNKLHWAGMSWNVTTCATVLXEAGSDYXIMPMYFLTAEYKSPEQLDRNPLGQVPALHDGDLYLFE

SEQ ID NO: 221838 - protein, 40 aa, Zea mays
  Clone ID: MRT4577_133908C.1.pep
NVGIREILRTANPLGYFKNVPLPICAWLLKQLDSGVYDDQ

SEQ ID NO: 221839 - protein, 88 aa, Zea mays
  Clone ID: MRT4577_133909C.1.pep
QIHKAVVICSLQSITHKYDNAQLAGQWVFDAAILKVTYLNVQKETTSVNKSLTGYKKTILKETDPFFMPATEPPFADTTPRAIAPHLP

SEQ ID NO: 221840 - protein, 38 aa, Zea mays
  unsure (1)..(38): unsure at all Xaa locations
  Clone ID: MRT4577_13390C.1.pep
GRTQKGATGSENDEQNSGRSKAKHAXAFSKPAKNIRFS

SEQ ID NO: 221841 - protein, 90 aa, Zea mays
  unsure (1)..(90): unsure at all Xaa locations
  Clone ID: MRT4577_133910C.1.pep
MILPFVPLSLTFDNIKYSVDMPQEMKAQGVQEDRLELLKGVSGSFRPGVLTALMGVXGAGKTTLMDVLAGRKTGGYIEGDIRISGYPKKQ

SEQ ID NO: 221842 - protein, 244 aa, Zea mays
  unsure (1)..(244): unsure at all Xaa locations
  Clone ID: MRT4577_133911C.1.pep
MAAAAAGFTPATARKALFTTTVTLLSSPLSRRASSIRSRNLSCSAAFTAATRLAPQPPDLVRWVQREGGFVHRALRVANHPEHGLGVSVSAAAAYGDIPIGDVLIALPSQLPLRLRRPTSAADDVLVQLAQQVPDELWAMKLGLRLLQERAKSDSFWWPYIANLPETFTVPIFFPGEDIKNLQYAPILHQVNKXRCRFLLEFEKVVQQKLHTVPLVDHPFYGQDVXSSXLGWAMSAASSRAFRL

SEQ ID NO: 221843 - protein, 93 aa, Zea mays
  Clone ID: MRT4577_133912C.1.pep
NLVLLENGQDRHELTVYEFLLSCYLIKVLVQLVFQNFGGHVKPAPASGGTYSCCVAPELVFYIFIVKMLVLNVLSSSSFQFPVFFAYGWLMVQ

SEQ ID NO: 221844 - protein, 60 aa, Zea mays
  Clone ID: MRT4577_133913C.1.pep
MVVGFRRTISFPAPRSGAGPSAANNKSVAYRARSASLPCRFHPLVLQLDDDVADLRALVG

SEQ ID NO: 221845 - protein, 62 aa, Zea mays
  Clone ID: MRT4577_133914C.1.pep
QHIRMQYKDYLSVASNVTRDANIAEICISSNTTPATATDGGRARSQERRRQMQVHNVHRPYH

SEQ ID NO: 221846 - protein, 187 aa, Zea mays
  unsure (1)..(187): unsure at all Xaa locations
  Clone ID: MRT4577_133915C.1.pep
SWRRPTPTVLGPGTIPERGSPRISMLLSKSATKKPSPKAGDPKKHGGSPKEKXSRSTLEKTLVDLLHEHKTADYWGQNGWTTEAWNKIVKEFHQREQYVYFTKTQIQDKERELKRDYRLLKDAKNQSGAHFDEKIGRITADPTLWKNILTSHPKAKKFRNKSFPLYEAQETEKKSLHMVCKESFYSL

SEQ ID NO: 221847 - protein, 541 aa, Zea mays
  Clone ID: MRT4577_133916C.1.pep
MRRFAADRARRAVAASLHGAASRSAAPSPHAPAPRHPASPVGAAAMAAAMVRTMSTTAAGTPPVSVATINPKVLKCEYAVRGEIVTHAQNLQQELQKNPESLPFDEILYCNIGNPQSLGQQPVTYFREVLSLCDHPALLDKSETHALYSSDAIERAWQILEKIPGRATGAYSHSQGIKGLRDEIAAGIAARDGFHASGDNIFLTDGASPAVHMMMQLLISSESDGILCPIPQYPLYSASIALHGGSLVPYFLNEETGWGLDVDELKKQLEEARSKGITVRALVVINPGNPTGQVLVEENQKKIVEFCKNEGLVLLADEVYQENIYVEDKPFHSFKKIARSLGYTDDDLPLVSFQSVSKGYYGECGKRGGYMEITGFSPEVREQIYKVASVNLCSNVSGQILASLVMNPPKAGDESFESFMSERDGILSSLARRAKALEEAFNSLEGITCNKAEGAMYLFPRLHLPQKAIGAAQAVGTAPDAYYAKRLLEATGIVVVPGSGFGQVPGTWHFRCTILPQEDKIPAIVSRLKEFHEKFMDEFRD

SEQ ID NO: 221848 - protein, 52 aa, Zea mays
  Clone ID: MRT4577_133917C.1.pep
ATGMVVVTGSGFGQVPGTWHFRCTILPQEDKIPAIVSRLKEFHEKFMDEFRD

SEQ ID NO: 221849 - protein, 201 aa, Zea mays
  Clone ID: MRT4577_133918C.1.pep
MAAQFAAATGVFLSCLLALAALASCNTEGDILYKQRATWKDPNDVLVSWDPTLANPCTWLHITCNNDNSVIRVDLGNAGLSGTLIPDLGGLQNLQYLMLYGNNLTGPIPESLGNLTSLERLELQRNALSGAIPSSLGNIKTLQFMKLNANMLTGTVPLEVLSLVIAGNLTELNIANNDLAGTVRSSGLRVTAIIQDKLKTT

SEQ ID NO: 221850 - protein, 104 aa, Zea mays
  unsure (1)..(104): unsure at all Xaa locations
  Clone ID: MRT4577_133919C.1.pep
PPPGRLDDVAPEREATALLIWTLHRAETRPPRGAPCRLRSGAWRRRRCDAVRSMQGWRPMTALGRARECVMLISSEVLVSSGKMTGFCYPCVTEVGVGXPARPA

SEQ ID NO: 221851 - protein, 92 aa, Zea mays
  Clone ID: MRT4577_13391C.1.pep
HTVAPRRASGHEQPSSPQTTPGSTSQSSSSSTTRPPLLPPPPPRRASPPPPSFVCGGGILVEKVPPPQVFPTPLSPRMMTLSRVRRREAIGI

SEQ ID NO: 221852 - protein, 50 aa, Zea mays
  Clone ID: MRT4577_133920C.1.pep
HVRYKVPVMASHLMLHPASAVLNYSDQGWRMDMEYSLSVSALKTTTMHLA

SEQ ID NO: 221853 - protein, 93 aa, Zea mays
  Clone ID: MRT4577_133921C.1.pep
RGRGREKKKKKKKKKKKKKKKKKKKKKKKKKKKKKKKKKNSPRLGGPPFPEPGFARREKPRRAPNWGPNVRGPFSPGKEKRSFWHWPPTPRGL

SEQ ID NO: 221854 - protein, 141 aa, Zea mays
  unsure (1)..(141): unsure at all Xaa locations
  Clone ID: MRT4577_133922C.1.pep
PDRRGATSVLKYVDYSGPSRANIQLLPXLILWARSSEXLSLVEPIGYHTSYELGLLHRLYYPSSXRVLLDPXKVIKYNLQAXLHAVVAVVPAVPVLFAESIHQNIQYRRQVPTEAEELEAGVHANAHRFIFGLPVGYQPHV

SEQ ID NO: 221855 - protein, 416 aa, Zea mays
  Clone ID: MRT4577_133923C.1.pep
MSMGLMERIRKRRQEDDDDMMMFFLPALHLLRSSSLKGRRVKKRRHTSKLSGEEHVLELLEGHVKNCRVAFRMEPEIFRALASYLRKERLVRDTRIKVEEKLGFFLYMISHNASFEDLQEEFGHSSDTFHHHIKHFFDIVVPSLAKRFLKPPSPMQVHSKIERNPRFYPYFKNCIGAIDGTHVPITISPDKAAPFRNRKGTLSQNVMVACDFDLNITFMSTGWEGSATDARVLRSAMNNGFHVPPGKFYLVDGGYANTTSFLAPYRGVRYHLKEYGQGHRRPQNYKELFNHRHAILRNHVERTLGVVKKRFPILKAATFHKIRNQVKIPVAAVVLHNIIRSLKGDEEWLDNQPDNISPQNFVDLPDGDQGNDQVNVQGNRPYVALFYILFTVTLLPLLIFGLIHFSLFSILKHNII

SEQ ID NO: 221856 - protein, 152 aa, Zea mays
  unsure (1)..(152): unsure at all Xaa locations
  Clone ID: MRT4577_133924C.1.pep
KLIEYXVRFGDPECQVLMMRLESDLAQVLLSACRGELGKVSLTWSPEIAMVVVMASEGYPGSYKKGTVIKNMDKAEQVSPAVKIFHAGTALDGDGNLVAVGGRVLGVTAKGKDIEEARSRAYDAVDVVDWPEGFFRRDIGWRALKQEQTANY

SEQ ID NO: 221857 - protein, 124 aa, Zea mays
  unsure (1)..(124): unsure at all Xaa locations
  Clone ID: MRT4577_133925C.1.pep
RARCWPPLPISRGAHAAVTHPQSSAYNERSSHMRPRALSCPVPGLTPRLRMWNRRPADRPPSPAGTVSRTLSSLMETQNPPPMCCLTTYLDSPDDPHLKDEYSCHDICPRGYENTSXWLKAYEV

SEQ ID NO: 221858 - protein, 53 aa, Zea mays
  Clone ID: MRT4577_133926C.1.pep
ISHACLGFKHESIVNPPKLAIEQLTICKPQLSRLNSRNHKPGVLRRGAMPYEK

SEQ ID NO: 221859 - protein, 114 aa, Zea mays
  Clone ID: MRT4577_133927C.1.pep
VVLIRLAATVDLPRSQRWVYVSKVPYARICASTCTATHRAADLSRLPVVMHTAHRITASLRSRDTLDVKDELWRASCMNLKLFTVNGRSRIKMLLSGCNVRYARAASSLEVNLG

SEQ ID NO: 221860 - protein, 75 aa, Zea mays
  Clone ID: MRT4577_133928C.1.pep
MARASVVFVVAALLFVAMVVAPMAEAKSADAPSADAPAPAADAPADGPSGPAGAPGPQGVEGLSGNEDDDDDSTN

SEQ ID NO: 221861 - protein, 87 aa, Zea mays
  unsure (1)..(87): unsure at all Xaa locations
  Clone ID: MRT4577_133929C.1.pep
MSLLNDVDLLMPPAELVKLQHVMNRLIQSPNSFFMNVMCQRCFIVTTVFRHSHTVVVXPDCLTVLWQPCGAKXAHLTDVCSFHRKGD

SEQ ID NO: 221862 - protein, 142 aa, Zea mays
  Clone ID: MRT4577_13392C.1.pep
ARQDPPTPEKYEQAGAPRHGRSGSLKASASLSPCVLQGFFVHRDGGDDGCGVVRSVQANSSRTPGGERLGRERSESCGRNWLDRWVEERYMDDEKNAKILEVDNGKPRRRYASKRRGGGGGNHHHHHQSCSTTMGSEQKQPS

SEQ ID NO: 221863 - protein, 59 aa, Zea mays
  Clone ID: MRT4577_133930C.1.pep
LHFQGTHIEFYLGDALYRAFSYFLCLCFEFIPFVCLPFFFFFFFFFFFFFVFFCSQSRV

SEQ ID NO: 221864 - protein, 341 aa, Zea mays
  Clone ID: MRT4577_133931C.1.pep
YYRDNGFMPYARSVLVIHNIAHQGRGPIDDFRYLDLPGHYMDQFKLYDPFGGDHLNIFAAGIRAADRLLTVSHGYAWELKTPDGGWGLHSIINENDWKFQGIVNGIDTADWNPRHDVHLQSDGYTNYSLETVQTGKAQCKEALQKELGLPVRGDVPVIAFIGRLDHQKGVDLIAEAMPWIAGQDVQLIMLGTGRQDLEDTLRRLESQHYDRVRGWVGFSVRLAHRMTAGADILLMPSRFEPCGLNQLYAMMYGTVPVVHAVGGLRDTVQHYNPYEEVGVGWTFEKAEANRMIDALGHCLNTYRNYWSSWEGIQRRGMMQDLSWDNAAKLYEEVLLAAKYQW

SEQ ID NO: 221865 - protein, 77 aa, Zea mays
  unsure (1)..(77): unsure at all Xaa locations
  Clone ID: MRT4577_133932C.1.pep
KGSKLTSAGRQRKSFFMGPPKSNPRAGVXKRGDGKNPGVTQLNGLEENPPFAGGGKTKKAPTNRPSKHLPHLKGKGA

SEQ ID NO: 221866 - protein, 52 aa, Zea mays
  unsure (1)..(52): unsure at all Xaa locations
  Clone ID: MRT4577_133933C.1.pep
GPQSQSHTTTTTSSGPQPLSHRSXPGPWALASPTRQLNSXTHEKTSRNTMDR

SEQ ID NO: 221867 - protein, 107 aa, Zea mays
  unsure (1)..(107): unsure at all Xaa locations
  Clone ID: MRT4577_133934C.1.pep
AAIAFEMQMPCPWAMLQGLNRTGAALTTIIGXGGLYPYWEYLRQPDRIHLWAAPYYPXCGQTSANYQPLRQHCCHQQXRIMNVHSCAQQLHKMMQFERAAAARTSLY

SEQ ID NO: 221868 - protein, 87 aa, Zea mays
  Clone ID: MRT4577_133935C.1.pep
VLSARFGGAGFGAPPPLGPAPHAPAPILEGPKTMPPPPSSPPPFFPPPPPPPLPFSPPLLFPSPPPLPPLLSFPFLSFFLFKLKIYF

SEQ ID NO: 221869 - protein, 92 aa, Zea mays
  Clone ID: MRT4577_133936C.1.pep
METAALTSHSLQRPAAAAAAPAHGQRRRVGAAGLRHRQPRAGGRIRALPSAEVISEILSPKLVPGSPADTGDVSSLVPAVRNRRVGDGGRWW

SEQ ID NO: 221870 - protein, 49 aa, Zea mays
  Clone ID: MRT4577_133937C.1.pep
SDILEHDTLTTNCIAHLMLISTTPLIPPASHVWCYFRSILNQLVMFNIC

SEQ ID NO: 221871 - protein, 72 aa, Zea mays
  Clone ID: MRT4577_133938C.1.pep
GRRARDVWVMNEMGGLYSAGLNFIMDKTDFLPPQLSEPGLTWCGSRRTYKETPARAGSVSLKKKVGVELEPN

SEQ ID NO: 221872 - protein, 92 aa, Zea mays
  Clone ID: MRT4577_133939C.1.pep
RSFQSCSTYFWSTSFAAPETLKKQPRHGVWSYLLTTAKIPVVIRKPFKSGTKLLHPSFEVEQSHAEHALNLFCATFNLRLCLFTMDTYTFHF

SEQ ID NO: 221873 - protein, 457 aa, Zea mays
  unsure (1)..(457): unsure at all Xaa locations
  Clone ID: MRT4577_13393C.1.pep
MGWAPRWLRGLLGGGGRKAAVTRPVKEKKRWGFGKSFREKPPAPVPARPPTPPSHPAATPRRGYAAADEAGDEQSKRAIAVAAATAAVAEAAVAAAQAAAAVVRLTSSGRCAPPAAAKREQWAAVRIQAAFRGYLARRALKALRGLVKLQALVRGNIVRRQAAETLRCMHALVRVQARARACRAIRSQHVTAHPDPPTPEKYDQAGAPRHAXRLSAGKLFQDAGRRXRLGRERSESCGRNWLDRWVEERYTDDEKNAKXRSGQRQARAARFQAARRQPSPVAVLDDDLRAEQPELRDHXRSRRPXDSTTAQQSVPSPSSVGMAAEALSPLRVPADIAELCDSPQFFSATSRPGSSRRGGAFTPAAKSECSRSLFGGYSDCPNYMANTESFRAKARSQSAPKQRPQQQYEKSGSLRXGVGARPRGGAGSGTEVGXSLHAMKAYPGSGRLDRLGMPVRY

SEQ ID NO: 221874 - protein, 353 aa, Zea mays
  unsure (1)..(353): unsure at all Xaa locations
  Clone ID: MRT4577_133940C.1.pep
MALSRAAASGGFALILLACCSLIMLAAASGGGGGGVDDDGVGGDRLMMDRFLSWQATYNRSYPTAEERQRRFQVYRRNIEHIEATNRAGNLTYTLGENQFADLTEEEFLDLYTMXRGCPSAVTPARXANVSSSAAVDAPTSVDWRSKGAVTPIKNQGPSCSSCWAFVTAATIESITKITTGRLVSLSEQELIDCDPYDGGCNLGYFVNGYRWVIQNGGLTTEANYPYQARRYACSRSRAAQHAATISDYVQLPAGEGQLQQAVAQQPVAAAIEMGGSLQFYSGGVFSGQCGTRMNHAITVVGYGADSSSGLKYWLVKNSWGQSWGERGYLRMRRDVGRGGLCGIALDLAYPVV

SEQ ID NO: 221875 - protein, 105 aa, Zea mays
  Clone ID: MRT4577_133941C.1.pep
NAKTGGGVKGKKLLGNLQPTRRSGVDLSYINGLVHPGLFKNKHVTTSFEPAFYYWSMRKKLRLLSHVGICPNYNAWHGHRGANDGHPIKHIHRTGNCEVEVGFYN

SEQ ID NO: 221876 - protein, 79 aa, Zea mays
  Clone ID: MRT4577_133942C.1.pep
FSRACRRAAYHYIKKKNATRTQTPTRTDTYPTLLVPRKGNIFFYVGTMNCRRVCCGTNFYVLEHLHGFCKTTPYFNILA

SEQ ID NO: 221877 - protein, 68 aa, Zea mays
  Clone ID: MRT4577_133943C.1.pep
SLIIVFVLMPLYPPMGLTVLDYAVGSPEFFFHVGFYLPPHRFNFFFGSVFPKFPQSPLGFFIQSPPAP

SEQ ID NO: 221878 - protein, 38 aa, Zea mays
  Clone ID: MRT4577_133944C.1.pep
TTKFNTPNFANHHKLIFTLIQPINYIFNHHIIQFILIS

SEQ ID NO: 221879 - protein, 44 aa, Zea mays
  Clone ID: MRT4577_133945C.1.pep
IRNALGIFMAIKKLSYACIYFVRSIRSGYAALRLVRPAFYRHSF

SEQ ID NO: 221880 - protein, 102 aa, Zea mays
  Clone ID: MRT4577_133946C.1.pep
LSPNFFLQITKNPRFKCSYNKIFQQGPFFVERGGGIKQNNLTKFFPKGPFGCPFAKSKKPNSLLKKKTLAKLLEREKEPEGEKPLLCLWSCQGSLFFKNLPI

SEQ ID NO: 221881 - protein, 131 aa, Zea mays
  Clone ID: MRT4577_133947C.1.pep
MKKKKKKETAQRSLLLREDIERKNSSSETMKSSPHLVLILCLQAALVMGVFAALAKENALVESKAIDINPGQLKCCTNCNFSFSGLYTCDDVKKDCDPVCKKCVVAVHASYSGNNKFRCTDTFLGMCGPKC

SEQ ID NO: 221882 - protein, 94 aa, Zea mays
  Clone ID: MRT4577_133948C.1.pep
TRVALCPECSCKHRRVDCSLEPLDELFLVESSSTHVDTTWGLIMPVVVGGLGLPTAVVCHVGIDMEGCLVSGRRACHSPDSLSELRAVAWVVAR

SEQ ID NO: 221883 - protein, 89 aa, Zea mays
  Clone ID: MRT4577_133949C.1.pep
PNMYKESRDTPLKGVVAQMYNERASRPRVRSPGIQIIKTARVHLNLCKRDNPTQFHNSEIKFPLVSRKVSPPPRKLKPTFKVWRPNLFM

SEQ ID NO: 221884 - protein, 226 aa, Zea mays
  Clone ID: MRT4577_13394C.1.pep
MAAGLQVFGQPASTDVARVLTCLFEKKLEFELVRIDTFKTHHRLPEFIRLRDPNGQVTFKHGDKTLVDSRDICRYVCNQFPNYGNKSLYGSGALERASIEQWLQAEAQNFGPPSSALVFQLAFVPHLSHLGVRQDPAVIAENEDKLKQVLDVYDEILSKNEYLAGDEFTLADLSHLPNSHYIVNTERGRKLFTNKKNVAKWYDRLSKRETWVQVVKMQKEHPGAFK

SEQ ID NO: 221885 - protein, 70 aa, Zea mays
  Clone ID: MRT4577_133950C.1.pep
KKKHSILFIDRVRIGSLDWNRSWRLFFPKNGAPVWDIGAFESINLWRGLVKTKKGVGVWGGQLFRVRGVP

SEQ ID NO: 221886 - protein, 71 aa, Zea mays
  Clone ID: MRT4577_133951C.1.pep
YRSRIPGSTHASADACDGKVAFDDYLDATGSGMKASLSTIGMHRPRSDVSRSNLVIWLQSKPNHEIDMATC

SEQ ID NO: 221887 - protein, 148 aa, Zea mays
  Clone ID: MRT4577_133952C.1.pep
RRIFRRRGASQGGARGHEERLTAAVDLRRPDPWQRWSVVVPAETWYACARPATDAPAPRRGRWDAPCRWSEEVALAFVLHVRCTMAGMQARSSCFLSSVRRSCSSAPACIRWRDVAWTYIIVTTRVVVSSSRLRASPCVCRVQRIALD

SEQ ID NO: 221888 - protein, 162 aa, Zea mays
  Clone ID: MRT4577_133953C.1.pep
ISVTGASSSPSRHARSSSQAARSSSQAARSRPHVIQVSSSRSRHAARRLGVELQAAPRLALQAVRCPGVQLPRPRAPASSHATRSRPRAVQASSSRPRAPAVQPYRPQRLSHITSRRPVAPASQHMISHGIFVLIMKETTQTRLIGWKINRVVMSARTIRLP

SEQ ID NO: 221889 - protein, 67 aa, Zea mays
  Clone ID: MRT4577_133954C.1.pep
MQPPVLSLVRLRCRFRFQSPRPSCSDGRSLLRRDSRLVRQRRFVESERSRWYGQEDSPPPGYRAEDV

SEQ ID NO: 221890 - protein, 160 aa, Zea mays
  Clone ID: MRT4577_133955C.1.pep
MGLHLAPASALRGKSQPTGKRLGNQLCPAPRGPPGAVAAPGVSALNFQTLGAVEAPNSGALAVTVRGGRHCELVTHGLRLTSAFSFLPEKLVHNLETAGYCMPTPVQMQVIPASMSNRSLLVSADTGSGKTASFLIPILLIVTIRSQDAQHQDRGLVLLT

SEQ ID NO: 221891 - protein, 79 aa, Zea mays
  Clone ID: MRT4577_133956C.1.pep
KRPQAGSGIELVISKCLLKRFDRSVPSHPSCLSYLSYLFSNSAPGSPCPRALLASAKLLERPVYTCCLPSSPPISSSTH

SEQ ID NO: 221892 - protein, 33 aa, Zea mays
  Clone ID: MRT4577_133957C.1.pep
NTPGSFSSRTLCVTAPALGVIMTHENGYTVTLN

SEQ ID NO: 221893 - protein, 43 aa, Zea mays
  Clone ID: MRT4577_133958C.1.pep
DSQSPVRAPHFLVSPRSKCAGGQVLMPLSTHLLCIFCFQLGGR

SEQ ID NO: 221894 - protein, 34 aa, Zea mays
  Clone ID: MRT4577_133959C.1.pep
QTTGSQVTSSAASRTCAVNVTAAQFYSAEQEASA

SEQ ID NO: 221895 - protein, 87 aa, Zea mays
  Clone ID: MRT4577_13395C.1.pep
QAAKQTGGGGITAVGRTPPNRITNFRWVKIPPPHEHMPKLEVYIHRKHEEGHKCQLWFGTNQPPADLFHPPPGAAAAAQNPSNYCNK

SEQ ID NO: 221896 - protein, 311 aa, Zea mays
  unsure (1)..(311): unsure at all Xaa locations
  Clone ID: MRT4577_133960C.1.pep
MTMRRCQTGPGPVLAARSPGLGNVDNLHESSSLSRSWDLNRQIDDDRDVLIECRDVHKSFGEKXVLRGVSFXRHGEAVGICGPSGTGKSTILKVMAGLLAPDKGDVIICGKKSXGLVSDEDIEGLRIGLVFQSAALFDSLTVRENVGFLLYENSSLPEDRIGKLVTETLAAVGLKGVEDRMPSELSGGMKKRVALARSIIFDDTKDVVEPEVLLYDEPTAGLDPIASTVVEDLIRSVHMTGRDALGKPGKIASYVVVTHQHSTIRRAVDRLLFLHEGKVVWEGMTHEFTTSANPIVQQFASGSLDGPIKYF

SEQ ID NO: 221897 - protein, 74 aa, Zea mays
  Clone ID: MRT4577_133961C.1.pep
LNIVERRHAERTINKRAATTCIHSGRAFNSQWAGDPYIYYSHGDHCREVRRQGDQGPAKSARSGGTVQQLLTDA

SEQ ID NO: 221898 - protein, 381 aa, Zea mays
  unsure (1)..(381): unsure at all Xaa locations
  Clone ID: MRT4577_133962C.1.pep
MASPSIPAALRHPHLPADGGLLFHSSGDPTARSSLSFRIGDMTMRRCQTGPGPVLAARSPGLGNVDNLHESSSLSRSWDLNRQIDDDRDVLIECRDVHKSFGEKQVLRGVSFKIRHGEAVGIIGPSGTGKSTILKVMAGLLAPDKGDVIICGKKRHGLVSDEDIEGLRIGLVFQSAALFDSLTVRENVGFLLXGTCLPEGHFSVIASVQLSSLIHPSFAXYENSSLPEDRIGKLVTETLAAVGLKGVEDRMPSELSGGMKKRVALARSIIFDDTKDVVEPEVLLYDEPTAGLDPIASTVVEDLIRSVHMTGRDALGKPGKIASYVVVTHQHSTIRRAVDRLLFLHEGKVVWEGMTHEFTTSANPIVQQFASGSLDGPIKYF

SEQ ID NO: 221899 - protein, 81 aa, Zea mays
  unsure (1)..(81): unsure at all Xaa locations
  Clone ID: MRT4577_133963C.1.pep
VHDELHSPNTQLTSRRDRQCLPYSLNSPFSDHMHSVSKHXXDVNIHKYIPCQIXXXXXXXXXXXRSSSMLRFTKIIGAQKG

SEQ ID NO: 221900 - protein, 76 aa, Zea mays
  unsure (1)..(76): unsure at all Xaa locations
  Clone ID: MRT4577_133964C.1.pep
LNFHVYVQQQLLPFNQLAAVSPGAFLSQQQLLPFYLYXAPNVGTLLPVKLLLPFDQHAFTYPTAFYQLPIIGGALF

SEQ ID NO: 221901 - protein, 147 aa, Zea mays
  unsure (1)..(147): unsure at all Xaa locations
  Clone ID: MRT4577_133965C.1.pep
GKGTGPGTQFQRKPPPRPPKKGTGSFFFEKKGAAGGSNNTGNKKKKGQEAGGLHQPKKASFFWKKKLEGGKKKKERGDPNGDPPLGLGKKKPPGGNPKGEXPCQGRTGTPGPPRKKKRGPRGRKKKKGRGRGNGPPPPRGGPRSPQP

SEQ ID NO: 221902 - protein, 101 aa, Zea mays
  unsure (1)..(101): unsure at all Xaa locations
  Clone ID: MRT4577_133966C.1.pep
SSGNNAEYFFFFFFFFFFAKQFWFHFLSLVGLQDLCPAHEDSFESWWKSSSSRASDFLRKGFNSLGILGAPRTLRCYHCLRGNGGGVHXXXXXXXXXXXXX

SEQ ID NO: 221903 - protein, 131 aa, Zea mays
  Clone ID: MRT4577_133967C.1.pep
IVLVRDLWGYAYSSEEEVARYTARMMPVLAVSVMLDGQQCVLSGVVRGCGRQKAGAFINLAAYYLAGIPAALAFAFVRRLAGMGLWFGILCGLVVQMLSLLSVTLCTDWNKEALKAKNRVFSVALPADMET

SEQ ID NO: 221904 - protein, 87 aa, Zea mays
  Clone ID: MRT4577_133968C.1.pep
PKEARKMLGTNHLFPRSTGTAGKQQPPGGHINNAQGAAQNSLPGPTFSGGGGRHTNPTELRSRVLSLSPHLVMGQKPLKLFQTSRGV

SEQ ID NO: 221905 - protein, 94 aa, Zea mays
  Clone ID: MRT4577_133969C.1.pep
KNPFPPLQKGEGQATAQPEKGPFQTAGGGHGQKKPRTVGFCLGFCQGGMEKNGKCVSCRAMLCFIMPNEKKSRFFLLGFPPAPGGNNPIISMGL

SEQ ID NO: 221906 - protein, 59 aa, Zea mays
  Clone ID: MRT4577_13396C.1.pep
PYHRVKAFRFFGHPQFGPWELFRSPGSGPFRNFPWYYIYFGPLDFHVEDFSDKTHGRVM

SEQ ID NO: 221907 - protein, 76 aa, Zea mays
  Clone ID: MRT4577_133970C.1.pep
YSRNQLAFQVTRVLTPNGGDRTPIARGSRRGTGLRSRRARVTTVITSGRRFFIELLDPALECPLISNLTSPGFATY

SEQ ID NO: 221908 - protein, 39 aa, Zea mays
  Clone ID: MRT4577_133971C.1.pep
STLVEQTLNKLFKIFDLIINVINMSDYKRKQFNITSRCR

SEQ ID NO: 221909 - protein, 87 aa, Zea mays
  Clone ID: MRT4577_133972C.1.pep
SQSSLDCLDQCPSAPKDMSWTDTASTSAVGEATAGSTTRSLSSMPSCPTCGPRSSCSTGSPAWPRRARGVLVDGIHTLSTRRFTPTW

SEQ ID NO: 221910 - protein, 270 aa, Zea mays
  unsure (1)..(270): unsure at all Xaa locations
  Clone ID: MRT4577_133973C.1.pep
PRPPNVRGFRNGVQTIGRVRHKNLVSLLGYCSEGACRMLVYEYMXEKSNLDKWLHHDDSETSSLTWDIRMRILLGTARGLAYLHEGLEPKIVHRDIKSSNILLDRQWSAKVSDFGLAKLLCSERSYVTTRVVGTFGYVAPEYAETGMLNERSDVYSFGVLAMEVMTGRTPVDYTRPADEVNLVEWLKRMVADRRVEEVLDPRLPEPPPSKALKRAVLAALRCVDPDGSQRPTMAHVVHMLEDDQILRDEFKLARDLSPRESDSYEREHSR

SEQ ID NO: 221911 - protein, 93 aa, Zea mays
  Clone ID: MRT4577_133974C.1.pep
MEEAMLNLNEESLSRPKRRRRYINRDRESAHDRLHQDYFADDCQAPIVNFMVNGHEHNMGYYLADGIYPSWSVFIKGIPLPQSIHIDVYTTTK

SEQ ID NO: 221912 - protein, 102 aa, Zea mays
  unsure (1)..(102): unsure at all Xaa locations
  Clone ID: MRT4577_133975C.1.pep
DLLELLTTMITGDKKSNLKELILSKADDNTVMEAVDPEVXETSTDMNLXRKAFQIELLDTKXHQGDRPTMHEGTRVLLSVLPTAGKTPESKRGSDLRRDQAT

SEQ ID NO: 221913 - protein, 75 aa, Zea mays
  Clone ID: MRT4577_133976C.1.pep
FIVTYFTIYIWKKSYSHRRAEQTFTRIRLLDQLLEMDLLPLSSLPTTRQVISMSPNLWDPVLHTSFLFRRFILLV

SEQ ID NO: 221914 - protein, 157 aa, Zea mays
  Clone ID: MRT4577_133977C.1.pep
FNSFFFFFFFFFCFLFLFFIFSFFKQRGFLCAGVFFPSSHLISSNLFAFGGGGFFSLYFKKGKPFMHARVLQGLPRKTPVFGIKKKGWDAKPGQEKRVQEYLGEKLRAPLKKAFYSLFPGGGMNQHELGLTSGYINKPPRGFESINGLQGHCFWGPC

SEQ ID NO: 221915 - protein, 49 aa, Zea mays
  Clone ID: MRT4577_133978C.1.pep
SAYHFSSPPELLFTRSMVTDLFVIIFCRHGSMFSKPSKLGNIIVFALIS

SEQ ID NO: 221916 - protein, 118 aa, Zea mays
  Clone ID: MRT4577_133979C.1.pep
HIHKHKRTLALASEVVRPSDGALLKAQADIWRLTLSYLTPVSLRCAEELGIPTAIYRHGGAASAAELDTDLIIPYTKLSFLQQLLRLLAASGVFTDNKQITSEERTHISHAFSLLVDG

SEQ ID NO: 221917 - protein, 38 aa, Zea mays
  Clone ID: MRT4577_13397C.1.pep
VSYQVILAFSGCNDPYSTCSLERVHTVSYQRELEIPVS

SEQ ID NO: 221918 - protein, 134 aa, Zea mays
  Clone ID: MRT4577_133980C.1.pep
QLKAQVVYLTLPRPSRPTSRHKRRTIRGGGGGSHIPTFLCRGDRVQLPYTRVGHPALPGSNTPGGRYFLPRPPGALDLAPGARATGKCPVVPGPGPGPGGGPGDFGPGPGRGPLFPLGRRFLAWPRLGHRGLVG

SEQ ID NO: 221919 - protein, 93 aa, Zea mays
  unsure (1)..(93): unsure at all Xaa locations
  Clone ID: MRT4577_133981C.1.pep
MRGSDHMAEMGSLQQPLQPGTVLRFGSLEFMSLDDSYDMVLLPPQRDNNNDGHQLGRRRXNLXRLPPVAEEQHPGLSLNFCNKXKRKKKKKSG

SEQ ID NO: 221920 - protein, 443 aa, Zea mays
  unsure (1)..(443): unsure at all Xaa locations
  Clone ID: MRT4577_133982C.1.pep
HTITVXFRESSQMGLVSHTWRRLWRSCCRKLVFTSATMFQPGNRSIKHTRTNFAMRVNSFLRQLRTHPTLNKFVIKFGLRRKHTRHVNRWIRFCSVSRARHITINFTPGVKDFFMGPANSKYIFPLNVFSGPEGSSTHVRTLHLGYVCLDTTSSDFMIFANLKKLTLHKISFLGDLQCLMLPECNSLECLSISFCSLPGLSTCQPLQRLRCVRLHYCYLKKIELEAPNLTSFDLTNQPIPFVLGGSLNVMEANIKLLAKDSPYGDNLDYIYTELPAALSHVHKLSITSGLFVYDQLQGFSKTSARFINLRHLTMYLPLYGEPKSISGILRLAYLLELAPALEELELHVNGGGVDVGWALRRNMLPYSHNRLKRVLISGATVWEGLMELAYYILRSANRLESMVLDPKIRIGGPQLDGWMIDIGRETIKNIFEGEEFQSIITIL

SEQ ID NO: 221921 - protein, 46 aa, Zea mays
  Clone ID: MRT4577_133983C.1.pep
VSIPEATGRPATTVDHLHTIYSLKWPTPTHFRTAASYCTPPSLKIM

SEQ ID NO: 221922 - protein, 100 aa, Zea mays
  unsure (1)..(100): unsure at all Xaa locations
  Clone ID: MRT4577_133984C.1.pep
MAAASSSSVLLLLLAAALAGMSAILANFIISNNCRFTVWLAATPVGGGTHLRMGGTWTFNVPAGTISGRMWGRTGCSVNGKSGSCHTGDCXSSLDCTLSG

SEQ ID NO: 221923 - protein, 106 aa, Zea mays
  Clone ID: MRT4577_133985C.1.pep
MYGFVFMAPMFFMAFWLFSYLPLAARVPVVDWGGMRAGVPVEAFHDPGVSISHGPRCKAELSPPPEPYHLEPDSALKGAFDVIKIVNKAVNRVMNKAADKVFKQDD

SEQ ID NO: 221924 - protein, 41 aa, Zea mays
  Clone ID: MRT4577_133986C.1.pep
KKKWQNRTQLVRLLLPWVKKTAFLRTIYPPGRDLENKLNYL

SEQ ID NO: 221925 - protein, 189 aa, Zea mays
  unsure (1)..(189): unsure at all Xaa locations
  Clone ID: MRT4577_133987C.1.pep
FSCSECHQDGCCGLMKTFEKFNPSKGCRFPTYAYWWIRQSIKKSIFKNSRLIRLPXQLTVCYDQLYIRPLFHISPWAPKKSGTALVXESVYALLRKVGKARMECIMDGEQPTNEVVARRAGITIEKLAKLRAKTRKVRSMQDRVWSDDGVTYQEITEDPNIEGPEVSVDRLMMRQQVRSFLXGILSPRE

SEQ ID NO: 221926 - protein, 75 aa, Zea mays
  Clone ID: MRT4577_133988C.1.pep
VFALRDVRLMSVAILQGGRFQVSPGTRTHRLVGEAADQEGTARVGAPRRSKRACSRVRTSTTATSSSICARLRAA

SEQ ID NO: 221927 - protein, 636 aa, Zea mays
  unsure (1)..(636): unsure at all Xaa locations
  Clone ID: MRT4577_133989C.1.pep
MNSSRSLLSSPLFASSSPNFRSSASVSSSPSPSRTTGIYSPCMCFXCRYYCPWALAELIRYHLAAVPMIHDTSSSRASTACHYSPSLVAEEQLHGSKDTLTLKGEKALLELLLGMALDQHVDGRKLITQQEAEDSDFESYLREATSRVLYQPTFMYGASEFISSEEDDDDSISESSSASLAKPAGTLDLGKLTEEPQLDVPQPHRRSVDPNHSYDQVFIRSTRLLERRSKKRNGGHRALDNGVACSGVNSKRKDKFGRVLDPDEPFRLFLRDRETTEFLTAKEEKQMFSQIQDLMKLEEAQRNLQAQCGREPTVEEWAQAVGMSCRELQSCVRTGRRCREKMARSNFRLVIHVARKYEGCGLDIQDLVQDGCCGLMKTFEKFNPSKGCRFPTYAYWWIRQSIKKSIFKNSRLIRLPVXLTVCYDQLYIGPLFHISPWAPKKSGTALVAXSVYALLRKVGKARMECIMDGEQPTNEVVARRAGITIEKLAKLRAKTRKVRSMQDRVWSDDGVTYQXITSCLIMDAFIHHSLHXVDDDLLAXEITEDPNIEGPEVSVDRLMMRQQVRSFLAGILSPREKEIIEHRFGIHDGQPKTLHVIGDMYGLSKERIRQVQNKALDKLRNSISAQGFHVYFDLLT

SEQ ID NO: 221928 - protein, 77 aa, Zea mays
  Clone ID: MRT4577_13398C.1.pep
HVLGLKKMHYKNAKPGSYNCRTFQNTFPVTFPTLGPGTSHYQGFGFFWRFFSSWDALLNMSGASLWMFNFRSATTFI

SEQ ID NO: 221929 - protein, 300 aa, Zea mays
  unsure (1)..(300): unsure at all Xaa locations
  Clone ID: MRT4577_133991C.1.pep
MMPSGPPNPMGPGQPVSGAXSLLRTSSSLLSGGGQPGMAGGGGGGMLSSQCVRSSLVSPLTQFGGNGLLGGASNVSSLLNRTTFRNGGPMPGPGSMQGGGMQMSTLQQRAGLDGASDFISTGGSDPLSFPSSSQVNLVNQMGSDNLQVTSQQQQQMDAVQDMQQQQQLPMSYSQQQLPAQHSQQLQQPQATVKLENGGSMVSIKSEQQMGQPEQNGPAQMMRSAGCVKLEPQQLQAQMMRSXLSSVKMEQQSSDSSAFLQQQQQQQQHHLLQLTXQIRNCPDLVSLGWTKHNCKPSSCCC

SEQ ID NO: 221930 - protein, 110 aa, Zea mays
  Clone ID: MRT4577_133992C.1.pep
CCLAPWAFPPSMGAATILFLGISVPGGQLCIPPSRIPCLGIWSVLNLTRLLALLGQPHLWWSSLSRVFGLPVIYLCDGLFSSPSLLYATPHPVKKKKKKNTPPGGEGPRP

SEQ ID NO: 221931 - protein, 53 aa, Zea mays
  Clone ID: MRT4577_133993C.1.pep
LDRMNMDQVLQTVIQILVMFMALSDDNSEDIMLVAENPRVYAQLMIVSSSGFD

SEQ ID NO: 221932 - protein, 61 aa, Zea mays
  unsure (1)..(61): unsure at all Xaa locations
  Clone ID: MRT4577_133994C.1.pep
XFFFFFFFFFYFFFFFFLDLKGNCVCLFYTKLQNDDTHCFMPYQNGALSGGGEVVGLHFPG

SEQ ID NO: 221933 - protein, 105 aa, Zea mays
  Clone ID: MRT4577_133995C.1.pep
TNPEAWFPDVWGCRCHSAEKDLPLVQPICNKFGGTDTTIYPPAKPDPFLGRLVWCQKISLKSAPRANRLADVFTDATCQEEFGAGFVAQCKNQGYTLCFGEEECY

SEQ ID NO: 221934 - protein, 69 aa, Zea mays
  Clone ID: MRT4577_133996C.1.pep
FGQHGANVNAIDHTGQTALHWSAVRGHVQVAELLLKEGAKVDATDLYGYQVTRGTSCYHCIFYSSSIFS

SEQ ID NO: 221935 - protein, 491 aa, Zea mays
  Clone ID: MRT4577_133997C.1.pep
MSCFVCFGSAAQDEEPRKPAAAGAGKDAAPDRAVARVGSDKSRSQGGPDSKKDLIIHKDGNSQNIAAQTFTFRELAAATKNFRQDCLLGEGGFGRVYKGRLENGQAVAVKQLDRNGLQGNREFLVEVLMLSLLHHTNLVNLIGYCADGDQRLLVYEFMPLGSLEDHLHDLPPDKEPLDWNTRMKIAAGAAKGLEHLHDKASPPVIYRDFKSSNILLGEGFHPKLSDFGLAKLGPVGDKTHVSTRVMGTYGYCAPEYAMTGQLTVKSDVYSFGVVFLELITGRKAIDNTKTQGEQNLVAWARPLFKDRRKFPKMADPMLQGRFPMRGLYQALAVAAMCLQEQAATRPHIGDVVTALSYLASQAYDPNAPVQHVRSNSSTPRARNPAGWNGDQRSVRSPNHHSPDPRRRDAAGASKYGAEVSRTSSTSDSGRRSGLDDMDLTGSQVGSPAQTGRRREAPRGTDRQRAVAEARTWGENSRERTNGHGSFDSTHE

SEQ ID NO: 221936 - protein, 36 aa, Zea mays
  Clone ID: MRT4577_133998C.1.pep
MSGESARSLGKGSALPGPVPEGSIRIYSMRFCPFAE

SEQ ID NO: 221937 - protein, 329 aa, Zea mays
  Clone ID: MRT4577_133999C.1.pep
KVFICVDLPPDKEPLDWNTRMKIAAGAAKGLEYLHDKTSPPVIYRDFKSSNILLGEGFHPKLSDFGLAKLGPVGDKTHVSTRVMGTYGYCAPEYAMTGQLTVKSDVYSFGVVFLELITGRKAIDNTKTQGEQNLVAWARPLFKDRRKFPKMADPMLQGRFPMRGLYQALAVAAMCLQEQAATRPHIGDVVTALSYLASQAYDPNAPVQHVRSNSSTPRARNPAGWNGDQRSVRSPNHHSPDPRRRDAAGASKYGAEVSRTSSTSDSGRRSGLDDMDLTGSQVGSPAQTGRRREAPRGTDRQRAVAEARTWGENSRERTNGHGSFDSTHE

SEQ ID NO: 221938 - protein, 105 aa, Zea mays
  Clone ID: MRT4577_13399C.1.pep
MADVDHQQDTPKLFNRWTFDDVQGNDISLNDYLAVNATKHAMDLADTGGRYSKKRVRKGQWPIGERLTNSVMMHGRNNGKKVMGVRIIKHTLGIIHLVTGANPIQ

SEQ ID NO: 221939 - protein, 66 aa, Zea mays
  Clone ID: MRT4577_1339C.1.pep
MLGISSHRFNKKKWGYRKTLKYAIQIIGFEGNYMEPDLISNPRSGCRCWGKVGIFSFAFQAFCIFT

SEQ ID NO: 221940 - protein, 81 aa, Zea mays
  Clone ID: MRT4577_133C.1.pep
FNPKTIPSENILKCAHCYHYQTIRTVTCCLVKRFTSLNCHYKFLRRLSASTLISVVSICTYVFFLGISLPSLRYATLCSAT

SEQ ID NO: 221941 - protein, 49 aa, Zea mays
  Clone ID: MRT4577_134000C.1.pep
ARYSNSSSIRRRPLTAQWMTHTSDIAVRARSSSAMYVGPWHARAASRGM

SEQ ID NO: 221942 - protein, 65 aa, Zea mays
  Clone ID: MRT4577_134001C.1.pep
RPYARGTREKLGTAAAASWRRGTSFAVQHAATVCSCPSPQALWLVLEAGTSTLSLGTFVFTHQTK

SEQ ID NO: 221943 - protein, 149 aa, Zea mays
  Clone ID: MRT4577_134002C.1.pep
CSDTWAEPAPPRAVVIRRSLTERAYFRKAIGTVITVMADNSLLAGGAMGQEALLDAGHGRLVFKPSQGTGKGGDTITFKNNARFPHKVDLHEDEVPSGVHATKIYQEEYLNAPGETYCVTLTVPGTYGFYCEPHQRARMVGMITANSLR

SEQ ID NO: 221944 - protein, 80 aa, Zea mays
  Clone ID: MRT4577_134003C.1.pep
PFVSVSSLIASLLILPLAVSLPPSVARLLADGRVRLLDLRLWLAGALGCLALGQRIGQDWYHLLRARALLLLAVCAASFP

SEQ ID NO: 221945 - protein, 72 aa, Zea mays
  unsure (1)..(72): unsure at all Xaa locations
  Clone ID: MRT4577_134004C.1.pep
MSSDITKYDIKASGPEAGEFXAKDYTDSPSSPLIDADELTKWSLYRAVIAEFIATLLFLYITAATVIGYNYH

SEQ ID NO: 221946 - protein, 94 aa, Zea mays
  Clone ID: MRT4577_134005C.1.pep
RAELPVFKLFVTTDHLWHNCHRAKCHQFISTSLTLSVRLWMVIFFDILFCRSKTFLVIFIFFMSRSGNVAYFLSSILYLILVLVPLCYAEEPST

SEQ ID NO: 221947 - protein, 66 aa, Zea mays
  unsure (1)..(66): unsure at all Xaa locations
  Clone ID: MRT4577_134006C.1.pep
TPFYLTQPDGQVPGDMTAGHHDDAFSTFFSQTGAGKHVPRAIFDDLXPTVIDEVLTGTYRQLLHPE

SEQ ID NO: 221948 - protein, 107 aa, Zea mays
  Clone ID: MRT4577_134007C.1.pep
VLSGVAVGCGWREFVAYVNSGCYYIVGVPLGAILGFVFKFGVKGIWSGMIGGTFMQTAILLWATLRTDWNKEVEEAQKRLHKWEDQKTTTTTTEPLLAGVVGNGNAN

SEQ ID NO: 221949 - protein, 302 aa, Zea mays
  unsure (1)..(302): unsure at all Xaa locations
  Clone ID: MRT4577_134008C.1.pep
HQTTKLLLRTVPQPPSVHGTRVAEGGKKRYDIGYEKTFSLVVKVATIRIVLSLAVSRGXILRQFNVHNTFLHGILEEEVYMKQPPGGFESTSQLNHVCKLXYGMKQALRAEYXSDKLLHLGFQDSKVDTSXSLFFYRKGNVSIYLLVYVNDIIVASYSSDASDATFQDLSSEFSLKDLGEVXHYILGIEIQKIGDGTHLSRTKXASYLFGRVGMMNYKPTTPLNTSEXKLRIVEGELIELEDAIRYRSIFGALXTLTRSSLSFSIIKVCQFLHAPTNDNWTIVTRILTNVRLTLGYGLKTVK

SEQ ID NO: 221950 - protein, 89 aa, Zea mays
  Clone ID: MRT4577_134009C.1.pep
LASVCTTVAFISSSYIVVGRRLKWAALLVTLIGGVIMAGVLGTMTYYVVKSKRTRKIRRKVKSTRRSGSNSWQHNSEFSDSEIDRIYAI

SEQ ID NO: 221951 - protein, 103 aa, Zea mays
  unsure (1)..(103): unsure at all Xaa locations
  Clone ID: MRT4577_13400C.1.pep
AMHHSFNKVGGVIKIQRSMGVPQLRQQVRHRPQRWYMWLSIIKWYRFSKSWCQCRHSADNFIRCMYSHTDPVLLNDSVCKYIXXQRIILTGRFLSENACLKKK

SEQ ID NO: 221952 - protein, 60 aa, Zea mays
  Clone ID: MRT4577_134010C.1.pep
SAEVLCPLLFLLFFLTTHVSIELCTKSVLRRYNNPSTIINLLLIIIPIHSDRLRPKKCHT

SEQ ID NO: 221953 - protein, 247 aa, Zea mays
  unsure (1)..(247): unsure at all Xaa locations
  Clone ID: MRT4577_134011C.1.pep
IRHEVGVLSLILYTLILIPMVKYVFIVLYADDNGDGGTFALYSLISRHSKVRLIPNQQAEDAMVSNYGIEAPSPELRVAQWLKQKLESSKAAKISLFIITILGTSMVMGDGTLTPSISVLSAVSGIREKVPSLTEXVVWISVPILFALFSVQRYGTDKVGYSFAPIITLWFFLIAGIGMYNLIVHEIGVLRAFNPMYIVDYFRRNGKDGWVSLGGVILCVTGTEXMYADLSHFNIKAIQISXSTVLL

SEQ ID NO: 221954 - protein, 53 aa, Zea mays
  Clone ID: MRT4577_134012C.1.pep
MRRLRSCWSSTNAEFLDQVTEMLQPKHGTTTPLRGTDLSNAQTLLEGSGPLLL

SEQ ID NO: 221955 - protein, 33 aa, Zea mays
  Clone ID: MRT4577_134013C.1.pep
CRRGVVAAPGRRCRQQWPFPTVRTLPASGFGPI

SEQ ID NO: 221956 - protein, 81 aa, Zea mays
  Clone ID: MRT4577_134014C.1.pep
YHRYKEKYTCLMKRKQLSVIITKSHEYKLKMAPFSFMENAGSSALGRFLLMPLTHLCDRPRAFVMLQHKIGRPWPSPILIL

SEQ ID NO: 221957 - protein, 68 aa, Zea mays
  Clone ID: MRT4577_134015C.1.pep
HPLNGKMFVRVKFHSRSIMFFHPFLFPALCMVRWGRGLAFSKTALLVPARDKGNPVGFVDVVSSVYPY

SEQ ID NO: 221958 - protein, 342 aa, Zea mays
  Clone ID: MRT4577_134016C.1.pep
SFSPCGIFYRNERWERFMESEREKSNGECHGGRHASDVMNKRMTNHRGGWRGAGSRGHLRNFRGPRMRNEFADESIGGNRHSFEDEPGHTRGPHRRRHSPPHGCLMRDTDIDEFYGREIPEYRLPARGQIEDLPDSMMDDRFFMPYSHRHRGQGDHGFIHRDRDRSHSPAAQRRVGHVHFHRGRSPEAMRRSPPPVMRTDRTYMPHRHHNGSHDERGAMQRNERRCAMEGDASGFEPPLHPSHLAEFHTVEELVGRRKYRERRPYLHSTVSDEDEMLPYRTEDDMEFAEGGAGPREHNGGFRNRMGHNRARGEQEDGYRHRRGGHQGWRDSDTNDRPKRRRY

SEQ ID NO: 221959 - protein, 73 aa, Zea mays
  Clone ID: MRT4577_134017C.1.pep
ILFVTVDSDICFRSPMVGSPQPPFKGIGLSGELADLAKFASSFPWGSCLIWGHCKTPRGAALLPSRIKASMIQ

SEQ ID NO: 221960 - protein, 58 aa, Zea mays
  unsure (1)..(58): unsure at all Xaa locations
  Clone ID: MRT4577_134018C.1.pep
FFIKSRPIIRKSGITKSPSLKIFMGYKKFCNKERXXFEYNFELCQAIKRKKPKKNYKN

SEQ ID NO: 221961 - protein, 50 aa, Zea mays
  Clone ID: MRT4577_13401C.1.pep
VVCMCRGGDLSESRESYFIDRPSNVVVRVIVCFGVDVCYGWTCGWVGGLL

SEQ ID NO: 221962 - protein, 87 aa, Zea mays
  Clone ID: MRT4577_134020C.1.pep
SPHASRCGSSVASSSAVEPHTGTRRSSAWSSIHPASQPQSGQVAVLLAAQIAQHLTAMCGLQHRLSPYSAAGWPNEETMCCSKPLAS

SEQ ID NO: 221963 - protein, 75 aa, Zea mays
  Clone ID: MRT4577_134021C.1.pep
FLLNIFHLRSKPQELPGLFRCEERGLCSASLGLQPSGGRGQVHSVFVASLSRPPVPSVGPFDDPWVADGCTRRYT

SEQ ID NO: 221964 - protein, 148 aa, Zea mays
  unsure (1)..(148): unsure at all Xaa locations
  Clone ID: MRT4577_134022C.1.pep
KGGFPIFPGAPPPPLXGGGAPVLKKFLKGGGKPGVFFSPPKRGGKPPPRGGGGNPPPPQFGGSXLFPPPGGPPKKKKKTPPPIFPPKTLGGGGGKKFFSSRGGGGPPFKKNFFFLAPPPPKKEVFFFKXKXPPPPAGGFFXSSPPPPP

SEQ ID NO: 221965 - protein, 153 aa, Zea mays
  Clone ID: MRT4577_134023C.1.pep
APSTLANGELLGCPNQGWEPSPWRLRFVHPILAVAWYRWFMGRCDEGFRRSVLASCALRSGGGGLRCENSGSLLLARDTCIFCEMMCTRLCDAFSPGWGFDNRGELGSDQVCSGRLLIGLFQWVLFCYMIPTFQLSCQLQNVQGARSEPSQSL

SEQ ID NO: 221966 - protein, 59 aa, Zea mays
  Clone ID: MRT4577_134024C.1.pep
LLNLQPNLQPVIESNGARQGQGDRCLRSPRRLQQNFLPFLAPGETIGSRTSNQATRPLI

SEQ ID NO: 221967 - protein, 100 aa, Zea mays
  unsure (1)..(100): unsure at all Xaa locations
  Clone ID: MRT4577_134025C.1.pep
HHLPESRIVQANAGADGGRSPPPGGXRPPQKGEEGGSPPPTETALVAPQPPVQILLQRGQGRGRGSRPLLRRTRPAPGRGDHPAGALRNVPTVPPHLTRH

SEQ ID NO: 221968 - protein, 84 aa, Zea mays
  unsure (1)..(84): unsure at all Xaa locations
  Clone ID: MRT4577_134026C.1.pep
FFFSFLWSQGMLSTPSRRHTSTHEQEVRRAMRIIATSPSSHIPGTRWSVKSILRVALLFECHTTSLVHMXGKRVRFPGRRSSGR

SEQ ID NO: 221969 - protein, 79 aa, Zea mays
  Clone ID: MRT4577_134027C.1.pep
GLLPRSITMVPPGDILSVINRHASLMVVIRFPSFLLATRWRGFCDVELHGGVAARARRTRGARPLGGRGGGGARSIEST

SEQ ID NO: 221970 - protein, 474 aa, Zea mays
  Clone ID: MRT4577_134028C.1.pep
MSHGANGRRLLSSLGSRISSAQGDDVLARHQLLDVSPDDETDNAARRNLLSTELESIASTSAEANRQLLAAEELPDELAGKRELLSRTLMGIDEAATEAKRQLDEATTENTMSGDHRVLTTGLIGTFDEIQDGRSGVPPSDFPKWLPATQRRLLQQTQKPNTVVAQDGSGDFKTITEAITAVPNTFEGRFVIYVKAGTYKEYVTVPKNMANIFMYGDGPTQTVVTGDKSNAGGFATFASATFSAEGNGFICKSMGFVNTAGPEGHQAVAMHVQGDKSVFYNCRFEGYQDTLYVHANRQFFRDCEVLGTVDFIFGNSAALFQNCLMTVRKPGDSQSNMVTAQGRTDPNMPTGIVLQGCRIVPEQALFPDRLQIATYLGRPWKEYARTVVMESTIGDLIRPEGWAEWMGDLGLKTLYYAEYANTGPGAGTSKRVNWPGYHVIGQADATAFTAGAFIDGASWLQSTGTPNVMGFTKG

SEQ ID NO: 221971 - protein, 63 aa, Zea mays
  Clone ID: MRT4577_134029C.1.pep
EICPLIVLITRQCSNQAHCDELIYQTTKALQYARHLQDPDSAKNSNTCTKNNIVHKQWRDHNH

SEQ ID NO: 221972 - protein, 54 aa, Zea mays
  Clone ID: MRT4577_13402C.1.pep
RWHMSIYPIAETPTPPVERRSGYPIATCNCLSKCLGSPRKILVHQGPHSWNPKF

SEQ ID NO: 221973 - protein, 30 aa, Zea mays
  Clone ID: MRT4577_134030C.1.pep
TTEFENKLMSMMFLLPDLNDCYFTHLFNHF

SEQ ID NO: 221974 - protein, 52 aa, Zea mays
  Clone ID: MRT4577_134031C.1.pep
IKRIMNLCCFFSPSLYRGAGEPSMGDAVDDIFIGGAGLSWLATALVLHRKGV

SEQ ID NO: 221975 - protein, 72 aa, Zea mays
  Clone ID: MRT4577_134032C.1.pep
HSSASAEASDLCWKVGRAVDCASGPLHGILRAPRGGGCFFSPCLHEALHLWACTASCSGAPIVRRVIPLCVW

SEQ ID NO: 221976 - protein, 54 aa, Zea mays
  Clone ID: MRT4577_134033C.1.pep
CPPPPKIVAVGRVFLFPLINACPKKKKKKKKKKKKKKKKKKKKKKKKKKKKKPN

SEQ ID NO: 221977 - protein, 57 aa, Zea mays
  Clone ID: MRT4577_134034C.1.pep
GFNTIWASAVYTVSRTSWLALSYHSMTICVCLSSLARPHIFSWSHLSTCDGPLVISI

SEQ ID NO: 221978 - protein, 214 aa, Zea mays
  unsure (1)..(214): unsure at all Xaa locations
  Clone ID: MRT4577_134035C.1.pep
MEDHPGHPISNYDFLSGNGCHTKKLVHKNYDQDSSSAKSGRSQQEASATSDSNLNEQHTSRPPSQSDNDNDHGKPDQHMIKPLLSLGNPETVAPPPMIDCSQSFAYVPXAADAYAGIFPGYASHAIVHPQLNAATNSRVPLPIEPAAEEPMFVNAKQYHAILRRRQIRAKLEAQNKLVXARKPYLHEISHRHAMKRARGTGGRFPHTKQLEEQK

SEQ ID NO: 221979 - protein, 60 aa, Zea mays
  Clone ID: MRT4577_134036C.1.pep
CAIGWKYNRQGVSTLCPKKERAGDHTLRPPVGQFPTDLRVHPTTKPRVSRHLNSRKLPAS

SEQ ID NO: 221980 - protein, 145 aa, Zea mays
  unsure (1)..(145): unsure at all Xaa locations
  Clone ID: MRT4577_134037C.1.pep
GYLAPELTRTGKATTXADVFAFGALVLXVVXXRHPIEPRAPPEELVLXEWAWERYAAGEVEKVVDARLAGAFDFAEAAAAVKVGLWCSHPAYSGEVGFDDFVHSYPSSSFERAAAAGGGWDGGTQMSVATFPFSSLSMRSSHVST

SEQ ID NO: 221981 - protein, 99 aa, Zea mays
  unsure (1)..(99): unsure at all Xaa locations
  Clone ID: MRT4577_134038C.1.pep
NEQFVSTLTGSSLLEIAALSTVVPALVVLXKWSSRDNSRKDSAKNNDDQVHPVGKDWMQYFLYXLAVDYLTXVLPIIVGLTALSDCTVGGALLPGGWSF

SEQ ID NO: 221982 - protein, 690 aa, Zea mays
  Clone ID: MRT4577_134039C.1.pep
MSSSRKPKTPILLFFLFLLASLAFSQEFTYKGFSASGRGGSPNLNLNGTSATEILPSGILRLTNETSRLFGHAFYPTPLRFLDQKNGTAVSFSTQFAFTVVPEFPTLGGHGFAFVVAPDPRMSGALPSQYLGLLSAADVGNATNHLFAIEFDTVQDFEFDDVNGNHVGVDLNSLISNASAKADPLNLKSGDTTAWVDYDGAARLLNVSIANGTLGKPTTPLISFRVDLSGIFREQMYVGFSASTGVLASSHYLRGWSFRLGAGAAPALDLSSLPSLPQLKSSKNRTSLILAVAFSAFVALVVLAGAGAYGAYRYKNRDIIEPWELDYGPHRFKYAELRRATRGFREREVLGSGGFGKVYRGVLRKSGETVAVKRVNHESRQGLREFVAEIASIGRLRHRNLVQLQGWCRRRGDLLLVYDYMPNGSLDRHLFGDHLKASRLTWPVRYRILRDVASALLYLHEGWESVVLHRDVKASNVLLDADMSARLGDFGLAKLHERGTNPSTTRVVGTLGYLAPELTRTGKATTAADVFAFGALVLEVVAGRHPIEPRAPPEELVLAEWAWERYAAGEVEKVVDARLAGAYDFAEAAAAVKVGLWCSHPAPATRPTMREVARYLDGGDASEVPEPPPPPPMPPAYSGEVGFDDFVHSYPSSSFERAAAAGGGWDGGTQMSVATFPFSSLSMRSSHVST

SEQ ID NO: 221983 - protein, 113 aa, Zea mays
  Clone ID: MRT4577_13403C.1.pep
PAAAVCKSVAVGGGGAIPRVRGEQTRGSTFFYEACRRSLIRRPSIPLDVWPIRATAARWSSSTTTSSTWRTWSTSWPPTAALSWPASSTSTNLLWPPGWTMPYSCKNCVYMVL

SEQ ID NO: 221984 - protein, 138 aa, Zea mays
  Clone ID: MRT4577_134040C.1.pep
LIQKEAIGIVHNSIATVSRLIWRCQSISRKLIKSSNSTTLNIYILLPPRGLLFKQRISMLNNLGKEKGKVLAVPLEFLKTSYLLRSCTPMLSYQPLQPGNLSNTSLDQETSVNCQAKHQSCSGIAMVVQMVLVRVQVH

SEQ ID NO: 221985 - protein, 51 aa, Zea mays
  Clone ID: MRT4577_134041C.1.pep
QINFLSIVFCPCPDCLANSRIIPMFWFGFRVPLCMKYLLVLILYYINYIII

SEQ ID NO: 221986 - protein, 124 aa, Zea mays
  unsure (1)..(124): unsure at all Xaa locations
  Clone ID: MRT4577_134042C.1.pep
AXKTAPPCHRQPXXXNPNXRATQXPTSNGKPNAXXTTRRHPANXXRGGGKXPPXPXPXPPQPRKPPXREXPGDGEATPDDRSGHGGPPNAPNPATXXPXTRKAAXDEKXPSSPAHXQRPPTPPP

SEQ ID NO: 221987 - protein, 120 aa, Zea mays
  unsure (1)..(120): unsure at all Xaa locations
  Clone ID: MRT4577_134043C.1.pep
LFPPRWLCLPLPFLVDGQGCARLVYKIPGRGLDLSVDLNAASASEQEAAWPTRRPLFLRLYPMAVSSVFFLKCFFFGLVFXXXPXLXFFGVAFSPPACYEPRRPSSXXVPLMGGXXGXXX

SEQ ID NO: 221988 - protein, 82 aa, Zea mays
  Clone ID: MRT4577_134044C.1.pep
SGSLVKQSLHARENEVHYIDWPLAKPSLCRGYIECGCCTSNCRCCMTTSLLGSFCQGLHRAAKRQMLGCVTTALIQNKHGYY

SEQ ID NO: 221989 - protein, 107 aa, Zea mays
  unsure (1)..(107): unsure at all Xaa locations
  Clone ID: MRT4577_134045C.1.pep
PNEVTFLSLLYACCHAGLVHEGRLLFSSMVQQYGIEPKHEHYGCMXVDLLGXGLNXMQEAVSLIESMHLEPNVPIWGSLLAACWMHGDLKLGAFAAKKILQLDPNHV

SEQ ID NO: 221990 - protein, 98 aa, Zea mays
  unsure (1)..(98): unsure at all Xaa locations
  Clone ID: MRT4577_134046C.1.pep
DDVSAVDXTVKLETSVAYDDSKAAVIGTVYGSLQVILRYVDDDLXSTDDDXDSRSSIFHANAHIALTGYSNRLWICYDINWGYSIRVVDVMRHMISTF

SEQ ID NO: 221991 - protein, 58 aa, Zea mays
  Clone ID: MRT4577_134047C.1.pep
GLNCKISGPWFIPYQLMHSGVKENSCNVYTNIYIQFCTVNILILVSMECTHKLMYLPM

SEQ ID NO: 221992 - protein, 100 aa, Zea mays
  unsure (1)..(100): unsure at all Xaa locations
  Clone ID: MRT4577_134048C.1.pep
GFDSFVTAIFFFILLLQPENVLVDRKGNIKISDFGLSALPQHLGXDDMIYSTLFRVYNYSSVYIIYQTTYHNFQNDGLLHTTCGSPNYIAPEVKTDELVI

SEQ ID NO: 221993 - protein, 109 aa, Zea mays
  unsure (1)..(109): unsure at all Xaa locations
  Clone ID: MRT4577_134049C.1.pep
MLAQNMRXQHLQQLVLRNLANYCQQQQFLTFNQLTILNSAAYLQQQLPFNQIAADYPHQLLAFKQLAXLNSAAYLQQPHLPPFNHLTDVSPSAFLTHQQLLPVYLHASP

SEQ ID NO: 221994 - protein, 55 aa, Zea mays
  Clone ID: MRT4577_13404C.1.pep
RGRSPPPCSGSRIETPGGRSAASGGPGGGFLVAGPAPVGLVVARAPRAGAGAPLC

SEQ ID NO: 221995 - protein, 54 aa, Zea mays
  Clone ID: MRT4577_134050C.1.pep
IALLATTQSFHRVSSSMQQSCAVAILARLPLPVHRGLDVLDSLFLAQNGAVAAH

SEQ ID NO: 221996 - protein, 49 aa, Zea mays
  unsure (1)..(49): unsure at all Xaa locations
  Clone ID: MRT4577_134051C.1.pep
NKAKLAQSPEVTEAELRPSCFTPVKLDAVKQEGISSASINXGTCQHSRA

SEQ ID NO: 221997 - protein, 51 aa, Zea mays
  Clone ID: MRT4577_134052C.1.pep
KHLCFKSKKIFVLIRKHCPDNQSFQLVARSEIFILKVASLKIWGPFALQTK

SEQ ID NO: 221998 - protein, 82 aa, Zea mays
  Clone ID: MRT4577_134053C.1.pep
TMNSSGILLPFSCLYVPGAALFIPMDIVQYNNNSITERPVALCLYDRLYPISTLTSVLLAYDSNSFAVFSWFNIGHIIIFYY

SEQ ID NO: 221999 - protein, 87 aa, Zea mays
  Clone ID: MRT4577_134054C.1.pep
TSARHLKAPAGTVPQGIRPRSESRRPLKDMRQRGHCMTQNEGPSAVSSGAIDHPGDVKAPGITSRCAHDCRLCSSPQILSKRVFRII

SEQ ID NO: 222000 - protein, 69 aa, Zea mays
  unsure (1)..(69): unsure at all Xaa locations
  Clone ID: MRT4577_134055C.1.pep
ADNLIKPVALLLLLLNLCMYVILAIIGGWALNVAIDRGFIIGSELRLPAHFHXIFLPIGNFAXGFFVLF

SEQ ID NO: 222001 - protein, 65 aa, Zea mays
  Clone ID: MRT4577_134056C.1.pep
ASSTGTFPSGEVMELTRSVLAWTTTRMSCVLTLRTARWTGRRFPACPPGGGEYSLRSTCGTCPLI

SEQ ID NO: 222002 - protein, 101 aa, Zea mays
  Clone ID: MRT4577_134057C.1.pep
PSFHTVGAPIGWETQRGPKNFFKNWDPPGFGAPPPKGLGKCWPPKGKNGEELPPPLETALGEKKASLFFFKVFGPKDPPPKKLLEWGFRVFPPNSRPPNPQ

SEQ ID NO: 222003 - protein, 313 aa, Zea mays
  Clone ID: MRT4577_134058C.1.pep
MPPPPPLVLLAKPLFPNFAAALEGRYRLVLAGDADAATAAEARVLLVPGLVAVTAELVDRLPALELVAATSVGLDHVDLRACRRRGLAVTNAGAAFSVDSADYAVGLVVAVLRRVAAAEAHLRRGGWATDGEYPLTTKVSGKRVGIVGLGSIGSLVARRLAAMGCRVAYHSRAPKPSCSCPYAFFPTARALALASDVLVLSCALTEETRRVVGREVLEALGQGGVLVNVGRGGLVDEPELVRCLREGVIGGAGLDVFEDEPDVPAELLAMDNVVLSPHRAVLTPESMRGLLDVVAGNLDAFFAGRPLLSPVSL

SEQ ID NO: 222004 - protein, 154 aa, Zea mays
  unsure (1)..(154): unsure at all Xaa locations
  Clone ID: MRT4577_134059C.1.pep
FKPLRXLHDASALCXYLESFYTLRKPVASTINTLAGALYKVFSSSPDKARDEMRQACFDYLSLGGVCSNGPIALLSGLNPRPLSLVAHFFAVAIFGVGRLMLPLPSPKRMWTGARLISGACGIIFPIIKAEGVRQMFFPATVPAYYRAPPEAEF

SEQ ID NO: 222005 - protein, 65 aa, Zea mays
  Clone ID: MRT4577_13405C.1.pep
GALTRPSSKCHKTKPCLETLFYCLLWRKIMRMRKLSFMTTKKTTSNSSNCGVLMLKYTLYWSDTN

SEQ ID NO: 222006 - protein, 457 aa, Zea mays
  Clone ID: MRT4577_134060C.1.pep
WGQHVRHCREGLRERRFWRRTKTTTRGRAATVRVEDAGDGRGLPPPSPATGPYAGGRSRGPRRQGETIAKGHKNYELMLNLQLGIRHAVGKQGPITLDLKSSAFDPKEKVWTRFPPEGSKYTPPHSSCDFKWKDYCPQVFRTLRKLFKVDAADYMLSLCGDQALRELSSPGKSGSFFYLTSNDQYMIKTMKKSEVKIFLKMLRAYYNHVRSFESTLVTKFFGLHCVKLAGANQKKVRFVIMGNLFCSDASIHTRFDLKGSSLGRTTDKPQTEIDEYTTLKDLDLNFIFRLQKHWYQEFQRQVDRDCEFLEQENIMDYSLLVGVHFRDTRDRLLTGGSFDSDCSRGSSPQLSRGDTDPNRLAKIKLGSNMPTRAERTIRKGDCEVQIMGEPTGEFYDVILYFGIIDILQDYDISKKLEHAYKSFQYDPTSISAVDPKQYSRRFRDFVFRAFQEDKFDL

SEQ ID NO: 222007 - protein, 65 aa, Zea mays
  Clone ID: MRT4577_134061C.1.pep
RPGRHPNQHSLARVQAPLSLHSLCLSGPTVVENSLSPPHGSQGVRCFLALQPLCCDVTRACAAEP

SEQ ID NO: 222008 - protein, 45 aa, Zea mays
  Clone ID: MRT4577_134062C.1.pep
IIGWLMARLAPECYTTPAIADTNLPAPHHPINKNCPGRTSLLTQR

SEQ ID NO: 222009 - protein, 95 aa, Zea mays
  Clone ID: MRT4577_134063C.1.pep
TTLYSCSNTQALTMHQPYNFFWKQNSFAELSLGMVGKHFCSHWLLPPSHITVESLYSCSQQQRLTKAAKQTQIWKPQDAAFFVKINLKICNSILK

SEQ ID NO: 222010 - protein, 104 aa, Zea mays
  Clone ID: MRT4577_134064C.1.pep
SLSHIQNAIFLKRKEQYECVSNFKYLPNNKIIKINIYLLHHVGVYCVHLKIIIIKLNRTTLVTRFGFKDLMEILEFGEGQREKILSKKKKKKKKKKSTLRCYHC

SEQ ID NO: 222011 - protein, 174 aa, Zea mays
  Clone ID: MRT4577_134065C.1.pep
MDMAEEAAAGAGGSSSSSGKPVMVVGIDDSDHSYYALNWTLQHFFVAGQPQQYQLVVLTAKPPASSVIGIAGVGSAELLPKVETDLKRSVARVMDKAKKLCTETEVTDVGYEAIEGDARSVICDAVERHHAEILVVGCHAYSKWKRAVLGSVSDYCTHHAHCTVMIVKRPKHKH

SEQ ID NO: 222012 - protein, 81 aa, Zea mays
  unsure (1)..(81): unsure at all Xaa locations
  Clone ID: MRT4577_134066C.1.pep
XTSSSIXGXXLPLXVFEDSAIXXXSFLWRRRXXAEENHXXAFLXVLGSIPAXFISAXLFIAYRXGHLLFDDVIEXXIGQRP

SEQ ID NO: 222013 - protein, 68 aa, Zea mays
  unsure (1)..(68): unsure at all Xaa locations
  Clone ID: MRT4577_134067C.1.pep
RLFWSTTAEKAAEALCVVVNVVETLXEQAFRECSKXGNPSSMATRTGSWTSRSGTSWCGSXWWTMRPA

SEQ ID NO: 222014 - protein, 72 aa, Zea mays
  Clone ID: MRT4577_134068C.1.pep
CFFYELIQHNNTTNSSIRVLSSTKHARPILLHTSPELVRQSVILILLWHMGGQKHYTQALRCSVHHHLPDLV

SEQ ID NO: 222015 - protein, 62 aa, Zea mays
  Clone ID: MRT4577_134069C.1.pep
SRGLQRRVPAVPVVVQVVLENVAMTVADVSAVVTASASTVPSVMSVRTECVKVVAAIVHRAY

SEQ ID NO: 222016 - protein, 92 aa, Zea mays
  unsure (1)..(92): unsure at all Xaa locations
  Clone ID: MRT4577_13406C.1.pep
PPPVKTRFGGLDFKGQGISLFFSPPFGGGGKKGGFLKGFVKSQAEFGMFSVNKGVFFPSPGLCKGPYVKPKCHPVRGAVXPKKKKKKKKKXX

SEQ ID NO: 222017 - protein, 44 aa, Zea mays
  Clone ID: MRT4577_134070C.1.pep
CPILIACLQSSRQDSCMWCPQACGPIISWCHDQCINLTRQLVFW

SEQ ID NO: 222018 - protein, 87 aa, Zea mays
  unsure (1)..(87): unsure at all Xaa locations
  Clone ID: MRT4577_134071C.1.pep
MGGAILLSGQGRALPXSLPLSLRLLLLLCCSGTLXWRWSTCQGGAHRECGFYGKLEALEPRHKVHAEASSLQYFSRIHEPDRELTCA

SEQ ID NO: 222019 - protein, 101 aa, Zea mays
  Clone ID: MRT4577_134072C.1.pep
VPCHTKVHETQCERHLLDRSNIEIGRPDGIPHDKKRELWIWGPRCIKRIGDHQHTKRGAFFQQTTTKELGPCSLRPRQRCLHATCGPSDTISLHMAKPLTK

SEQ ID NO: 222020 - protein, 71 aa, Zea mays
  Clone ID: MRT4577_134073C.1.pep
NQKVNIGCEPQQNGSQRRWLEYGIITSPTPSRNWVLRTLNQTSNKVGICGATIPTKLPSANNGGKRVPTFQ

SEQ ID NO: 222021 - protein, 45 aa, Zea mays
  Clone ID: MRT4577_134074C.1.pep
HASKLMFLSHTALKRLRECNTIQCIPLSCCNTSRPIRRIRNVRYF

SEQ ID NO: 222022 - protein, 71 aa, Zea mays
  Clone ID: MRT4577_134075C.1.pep
IRLEPGRNCDLTHTDHDIRMVFKKTSMEPEREEQTKARLKTNKRLNYTEGPGKFGGKNRKPNKHPQGDQET

SEQ ID NO: 222023 - protein, 103 aa, Zea mays
  Clone ID: MRT4577_134076C.1.pep
MFMSLSYAPTCICSTASFPPSICVDGCTTGRCVSAHACHTAIASVWVQVECDTKDQVKQEQTHETCYQTLRMSAPVPGCGPACEPRIHRPVFLWNEKKHARAG

SEQ ID NO: 222024 - protein, 131 aa, Zea mays
  unsure (1)..(131): unsure at all Xaa locations
  Clone ID: MRT4577_134077C.1.pep
KGGRGKQRRGGKKQEAPREGTTXGPKKGGGEKKKTRGGPRERRETRGQMGGPKTPEQKRGRAPGPPYCEGHKGRGRGGQKTPGHQGGPAAPKLGAPQKKEAPTRAPTRKHPPPEQSREMGSPHGENIPRRD

SEQ ID NO: 222025 - protein, 94 aa, Zea mays
  Clone ID: MRT4577_134078C.1.pep
MRTLISLMSKNQILDDGILFTMNTEEFSIRLKNVRSFATVQSKTDGQHIPANYKIYQYILFPGKDINDLHVNLSTPCEADTIHNDPHIIHAHYP

SEQ ID NO: 222026 - protein, 142 aa, Zea mays
  unsure (1)..(142): unsure at all Xaa locations
  Clone ID: MRT4577_134079C.1.pep
MLLFQLDDSTGRGVARPSEGPQSAEFQSVSEGGGRGGKRIYFPPWHVSLSTDLRRLTARIVGLTRRRQLAQIMAEVEAARCRVRGGGLLNTIVMNVVLEPCVCGGDVDVXSALXLFEEMRGPMGCGVDDVSYGILLKVCSFC

SEQ ID NO: 222027 - protein, 207 aa, Zea mays
  Clone ID: MRT4577_13407C.1.pep
MGAYKYVEELWRKKQSDVLRFLLRVRCWEYRQMPSIVRLTRPTRPDKARRMGYKAKQGYVVYRVRVRRGGRKRPVHKGIVYGKPASQGITQLKPTRNHRNVAEERVGRKCGGLRVLNSYWVNQDSAYKYFEVIMVDPAHAAIRNDARVNWICNPVHKHRELRGLTSAGKKYRGLRTKGHPANKLRPSKRANWKRRNQLSLRRFRTNS

SEQ ID NO: 222028 - protein, 194 aa, Zea mays
  Clone ID: MRT4577_134080C.1.pep
VTRSVSPQSSLITQKRTCYYLVTSTQESNQGNSFSSVGASIMMRSQNKMVCRVQLLGSADPVAIPTRRHARSREPRPAHRRRRRRGSYCAPLPPRLNPSPNPWTMASSKLLSSNGSNPSEEAEAKTCSTTTNNTKVAPNHSPEQLNTGAVVCPPVFQVAVRTRGGARGQRATGRSGRFSLGARRLLEWAWWRCR

SEQ ID NO: 222029 - protein, 61 aa, Zea mays
  Clone ID: MRT4577_134081C.1.pep
KNESRPFKTFLGKIFHCLVTGPLIGPLPGFFGPIYQIGQEILQPKKVPPGVRIPGFFWKFC

SEQ ID NO: 222030 - protein, 62 aa, Zea mays
  unsure (1)..(62): unsure at all Xaa locations
  Clone ID: MRT4577_134082C.1.pep
KRKQENVLRPGPKLQRVPPPKPIQKIAKSKKGKQLKVVPDEFLXGGKKSVANRGMQGPGLEN

SEQ ID NO: 222031 - protein, 115 aa, Zea mays
  Clone ID: MRT4577_134083C.1.pep
VTHTAGSLHAIPWAAPTATSAVAARRGCPPPRSSHRGSRRRRWVRAGEEGVHEEQGPGDVSTQLPRASSLPSSPFIIFLLSDLVVCAWVVYPTLSRDVVNTKPSSYNLTSSELKL

SEQ ID NO: 222032 - protein, 64 aa, Zea mays
  Clone ID: MRT4577_134084C.1.pep
EHGVCPMKIVIFPPHAKEQSDPIPVWGETHPLFSICAQTTLVGGGDYYLGKSYSWCTFTGKPRF

SEQ ID NO: 222033 - protein, 67 aa, Zea mays
  Clone ID: MRT4577_134085C.1.pep
AHQSAAALFFFLVGYMVPDIITRARENFGVVGRRNMSCTWPGVNTANVGRTMNLPTCSERKNRSEQN

SEQ ID NO: 222034 - protein, 69 aa, Zea mays
  unsure (1)..(69): unsure at all Xaa locations
  Clone ID: MRT4577_134086C.1.pep
LLLLAPSLHYVLHDGRCFYGLRVGLHFVGQLFRLARWGGFFQLNPKEGLAIVNGTXVGSALAATVMYDA

SEQ ID NO: 222035 - protein, 57 aa, Zea mays
  Clone ID: MRT4577_134087C.1.pep
LYRARNDTLYQKVIPGTTLYGDIPQCFWTCGRRRSSAPDDMIHTSVGLFIFWVDFMC

SEQ ID NO: 222036 - protein, 62 aa, Zea mays
  Clone ID: MRT4577_134088C.1.pep
QKKRGPFPFRYALCLLVYSYLGDGDALDLSGAWTPRRRLGDAFKTRGVMAIVCLAMFKGNNK

SEQ ID NO: 222037 - protein, 61 aa, Zea mays
  Clone ID: MRT4577_134089C.1.pep
RACEVMVLIGIIMSFCFTPHYFMRQYVLSALITFAFAEVLVRVHLSFLSPVMGVPLYRGPT

SEQ ID NO: 222038 - protein, 130 aa, Zea mays
  Clone ID: MRT4577_13408C.1.pep
KIYPSRENPIFSPGLFSIRAGNQNPPPKQGANWGGKAFSPKFPKKKIFIGKISPRLPSPQKFFWGAPGGGNPGQLENPFSFSPFFFFPNWGNFFPGKNPQKRGQGKFSFQKAGEFFLREAKKKTLGSGGP

SEQ ID NO: 222039 - protein, 84 aa, Zea mays
  unsure (1)..(84): unsure at all Xaa locations
  Clone ID: MRT4577_134090C.1.pep
VPPWLFRLPAPARGSGLLLAPAGALARRRGAAGGRGLVAARGLVGAASXALRLLXVVXPXXAVAGVRVXFGKLLXLLVPLGGVV

SEQ ID NO: 222040 - protein, 81 aa, Zea mays
  Clone ID: MRT4577_134091C.1.pep
GSRSYIGNTITPDAEGGLEIRRETAELDRRIWIRDLRSTDPAHSFSSTPSLRSSTSAYRQSETSAPPARRCCGLQIGIRVR

SEQ ID NO: 222041 - protein, 86 aa, Zea mays
  unsure (1)..(86): unsure at all Xaa locations
  Clone ID: MRT4577_134092C.1.pep
APIQNRGGFKIPEEEFSRPPMNVIKELPLGLALGMWAGLSVPPKFFSGLPPFXEKRIVSFPANLDFMIFPPRGKALPSNSALKLKT

SEQ ID NO: 222042 - protein, 77 aa, Zea mays
  unsure (1)..(77): unsure at all Xaa locations
  Clone ID: MRT4577_134093C.1.pep
GRLKGSNLTNPCLHPNXSFLGAPKFNSGAVISKRPDRKNLGITQLNCLAKNTLFARWHNTQKARTVRPSKQLHFPNG

SEQ ID NO: 222043 - protein, 92 aa, Zea mays
  Clone ID: MRT4577_134094C.1.pep
NTRRTLYTLPKPCVVTASILLNKPCIYKVPHQKKIRLIELAGKSFKKYSMPPPWMTVKTTYFTKLCWFYNFLLGCIVVNLFPRKLRGQSLLK

SEQ ID NO: 222044 - protein, 161 aa, Zea mays
  Clone ID: MRT4577_134095C.1.pep
MVLKTELCRFSGQKIYPGKGIRFIRADSQVFLFANSKCKRYFHNRLKPAKLTWTAMYRKQHKKDIHAEAVKKRRRATKKPYSRSIVGASLEVIQKKRAEKPEVRDAAREAALREIKERIKKTKDEKKAKKAEVSKSQKAQTKGAVQKGSKGPKLGGGGGKR

SEQ ID NO: 222045 - protein, 161 aa, Zea mays
  Clone ID: MRT4577_134096C.1.pep
MGLKTKLCRFSGQKIYPGKGIRFIRADSQVFLFANSKCKRYFHNRLKPAKFTWTAMYRKQHKTDIHAEAVKKRRRATKKPYSRPIGGASLEGIQKKRAEKPEARDAAKEAALREIKERIKKTKDEKKAKKAEVTKSQKAQTKGAVQKGSKGPKLGLCCGKR

SEQ ID NO: 222046 - protein, 69 aa, Zea mays
  Clone ID: MRT4577_134097C.1.pep
HGIFGVFLFSVYSRLASRDLRLQEYGIQYSIHYAPSQPAAYIHAYIFLHAQVVRICMHGYVYIDYRDVE

SEQ ID NO: 222047 - protein, 161 aa, Zea mays
  Clone ID: MRT4577_134098C.1.pep
MVLKTELCRFSGQKIYPGKGIRSIRADSQVFLFANSKCKRYFHNRLKPAKLTWTAMYRKQHKKDIHAEAVKKRRRATKKPYSRSIVGASLEVIQKKRAEKPEVRDAAREAALREIKERIKKTKDEKKAKKAEVSKSQKAQTKGAVQKGSKGPKLGGGGGKR

SEQ ID NO: 222048 - protein, 98 aa, Zea mays
  unsure (1)..(98): unsure at all Xaa locations
  Clone ID: MRT4577_134099C.1.pep
SLEDNNNINHNQTGGQQNQERGGFEPGPESTLQTFKKYADDIREQXTKKEESEDSPPAGEDKEGEDRRIAKKPTEETKGAYGAEKETGTKRKRATKEQ

SEQ ID NO: 222049 - protein, 70 aa, Zea mays
  Clone ID: MRT4577_13409C.1.pep
TAVHFFRFPSSRKSLCVYLYHVHLQDPPGLISLFSAPIAMQLAPVACNIAFSSMFHSRGNVGTPAVFHLK

SEQ ID NO: 222050 - protein, 88 aa, Zea mays
  Clone ID: MRT4577_1340C.1.pep
QASSVTSAPSWHRSCSSYTGCAIKCQLSTHIKRQHVALQGHPKMGFRTGPPPLPSLNASSSPLSKRFSSANTLKKNPEGVRSRSRTRR

SEQ ID NO: 222051 - protein, 161 aa, Zea mays
  Clone ID: MRT4577_134100C.1.pep
MVLKTELCRFSGQKIYPGKGMRFIRADSQVFLFANSKCKRYFHNRLKPAKLTWTAMYRKQHKKDIHAEAVKKRRRATKKPYSRSIVGASLEVIQKKRAEKPEVRDAAREAALREIKERIKKTKDEKKAKKAEVSKSQKAQTKGAVQKGSKGPKLGGGGGKR

SEQ ID NO: 222052 - protein, 871 aa, Zea mays
  unsure (1)..(871): unsure at all Xaa locations
  Clone ID: MRT4577_134101C.1.pep
MSLWKQPSKLAMLVVLLLLLCHAVDKVHCSTHHNNSQDFHSLLEFHKGITSDPNGALSNWNPSIHFCHWHGVNCSSTRPYRVTELNLTGQNLAGQISSSLGNLTFLHTLDLSYNSFSGPLPLLNKLRNLDILFLGSNHLGDVIPDWLTNSSNLVDLDLSENNLTGHIPSNIAFLKKLEGIDLYGNNLSGVIPPTLRNLSTLLLVDLSNNQLNGSIPNEVWQIPNIQMVNLAINNLSGGIPDTFTNLSSLMILGLDHNMLGGTLPSNIGDVLPHLQGLYLGSNLFFGTIPTSLGNASNLEVVDLPNNLFSGTIPSSFGNLSKLQILNLEVNMLEARHSEGWQFFDALAKCRYLVILSVSHNHLHGPIPNSIANLSTSLQQLFMGWNNLSGIVPPTIGKLSGLTKLSLENNNLIGTIKEWVRKMTNLQVLTLQSNNFIGKIPPXIGNLTQLARFSVASNNFFGSIXVTMGSNFYNIRXGLDRIRIGSYYYSFLNXIYLGPYHFVKKHLDXSITTPSSIPSNFCDPKLMTKLDLSHNNXKGAYLFPKSYLELISLNLSSNKFSGEIPKTLXTXEQLKDIQMDQNILTGNIPSTFSSLYSLDLLNLSHNNLSGPLPNFLSGLNLSKLDLSYNNFQGEIPRTGVFDNPTVVSLDGNPGLCGGAMDLHMPPCHDASRRVGRANLLIKILIPIFGFMSLVLLVXVLLLEKRTSRRAYRSEQSYYEHFEKVTYNDLAQATHDFLESNLIGRGSYGSVYQGKLKESRMEVAVNFFDLEIRGAGRSFLSECEALRSIQHWNLLPIIVSCSIVDNVRNVFIDLIYEYMPNGSLDTWLHHKGDEEATKCHGLTQSISIAVNIADALDYLHDNKKKKKKAVVAT

SEQ ID NO: 222053 - protein, 568 aa, Zea mays
  Clone ID: MRT4577_134102C.1.pep
MAASALLTGSPWLRMRLLPDAPARPFRRLYLRRALSARASAATGGAEGNSGPVRVRFAPSPTGNLHVGGARTALFNYLFARSKGGRFVLRVEDTDLERSTRKSEEAVLADLAWLGLEWDEGPDVGGEFGPYRQSERNSLYKKYAEKLLDSGAVYRCFCSNEELEQMKEVAKQRQLPPVYMGKWASASDAEVHQELEKGTPYTYRFHVPKEGSLKINDLIRGEVSWNLDTLGDFVIMRSNGQPVYNFCVTVDDATMQISHVIRAEEHLPNTLRQALIYKALGFAMPSFAHVSLILAPDRSKLSKRHGATSVGQYKEMGYLPQAMVNYLALLGWGDGTENEFFTIDDLVHKFTINRVNKSGAVFDATKLKWMNGQHLRSFPHDELIKAFEDRWKDTGILQESESSFAKEAAELLKDGIDLITDADAALTNLLSYPLHTTLSSEEAKPVVQDKISEVASSLISAYDSGELTQALAEGRDGWQKWVKGFGKSIKRKGKGLFMPLRVLLTGKLHGPDIGGAIALIHKAGVCGAVTPQSNFVTLDERFRVLKEIDWDSLAKEQETPAESAVPAT

SEQ ID NO: 222054 - protein, 161 aa, Zea mays
  Clone ID: MRT4577_134103C.1.pep
MVLKTELCRFSGQKIYPGKGIRFIRADSQVFLFANSKCKRYFHNRLKPAKLTWTAMYRKQHKKDIHAEAVKKRRRATKKPYSRSIVGASLEVIQKKRAEKPEVRDAAREAALREIKERIKKTKDEKKAKKAEVTKSQKAQTKGAVQKGSKGPKLGGGGGKR

SEQ ID NO: 222055 - protein, 161 aa, Zea mays
  Clone ID: MRT4577_134104C.1.pep
MVLKTELCRFSGQKIYPGKGIRFIRADSQVFLFANSKCKRYFHNRLKPAKLTWTAMYRKQHKKDIHAEAVKKRRRATKKPYSRSIVGASLEVIQKKRAEKPEVRDAAREAALREIKERIKKTKDEKKAKKAEVSKSQKTQTKGAVQKGSKGPKLGGGGGKR

SEQ ID NO: 222056 - protein, 161 aa, Zea mays; identical to SEQ ID NO: 222044
  Clone ID: MRT4577_134105C.1.pep

SEQ ID NO: 222057 - protein, 45 aa, Zea mays
  Clone ID: MRT4577_134106C.1.pep
HTPLVRAIQRFNRIWGKEMLVQCFWFVLYTFTTKYLVIGWELPNS

SEQ ID NO: 222058 - protein, 80 aa, Zea mays
  Clone ID: MRT4577_134107C.1.pep
KNLFWVSGFPRLLGYLARPEILFVLTPNKKKYGGVIDLGGEHGKNFFWAMKLAFCQGGGVFPPPFGYSLWQVNFKGNAGS

SEQ ID NO: 222059 - protein, 77 aa, Zea mays
  unsure (1)..(77): unsure at all Xaa locations
  Clone ID: MRT4577_134108C.1.pep
MEQVNELKEKGNKALIVGNIDDALQCYSEAIKLDPHNXVLYSNRSAAYAKKGDYQKAYEDGCKTVDLKPDWXKGYSR

SEQ ID NO: 222060 - protein, 79 aa, Zea mays
  Clone ID: MRT4577_134109C.1.pep
GLSMERGGLKQTEAVLAQHSNRGTTIIGSSQNHTASDSTVRGCMLVRAMDLLVRCSSMHLPLACDFAPMYATTNVIHTL

SEQ ID NO: 222061 - protein, 115 aa, Zea mays
  Clone ID: MRT4577_13410C.1.pep
KKFALLQQQQQQQSHSQQQQLQQPALSGQQSQSSNQLLHQHGKPGVGSLPIDGNLPNSFGFPEQGSKKRKKPVSSSGRANSSGTANTAGPSPSSAPSTPSTHTPGDAMSIPQLQY

SEQ ID NO: 222062 - protein, 129 aa, Zea mays
  Clone ID: MRT4577_134110C.1.pep
FLFFAQHLSTIPGLRRTTSCPHPSGTAPAPPHRRVEIQSTTTQLHAADKRLRVHSRAATRQWIEVLPIRDPQSRRQASPRRRRQTTQCHRSRAPTALVVVLPGRASSSRCRRGPCVVFAGVGRSVVAAG

SEQ ID NO: 222063 - protein, 68 aa, Zea mays
  Clone ID: MRT4577_134111C.1.pep
ADCINQNHKYSVYWDCHALLVTTRTACFTSINHELPVQTKQHPPPLRVIGSQNPWAGKRPALKTQVKT

SEQ ID NO: 222064 - protein, 49 aa, Zea mays
  Clone ID: MRT4577_134112C.1.pep
SLPPTMATGAELVPFRSLNNPVWWKRQAGDPTIPVQGHTHQGVPWPRQG

SEQ ID NO: 222065 - protein, 82 aa, Zea mays
  Clone ID: MRT4577_134113C.1.pep
SIAPFTLLTPLVMLRLVTKAERAGLLSAAERAGLSLSAMERLGLLSKLEELGALSAATDDGGARGQQRERTRGSDREFWTCT

SEQ ID NO: 222066 - protein, 380 aa, Zea mays
  Clone ID: MRT4577_134114C.1.pep
MSSQLLTIPCSIGYLSVRIPLLDCASSPTYASFCPIPSIVGRPRHTGVMVGMGQKDAYVGDEAQSKRGILTLKYPIEHGIVSNWDDMEKIWHHTFYNELRVAPEEHPVLLTEAPLNPKANREKMTQIMFETFNVPAMYVAIQAVLSLYASGRTTGIVPDSGDGVSHTVPIYEGYALPHAILRLDLAGRDLTDSLMKILTERGYSFTTSAEREIVRDIKEKLAYIALDYEQELETAKNSSSVEKSYELPDGQVITIGAERFRCPEVLFQPSMIGMEAAGIHETTYNSIMKCDVDIRKDLYGNIVLSGGSTMFPGIADRMSKEITSLAPSSMKIKVVAPPERKYSVWIGGSILASLSTFQQMWISKEEYDESGPAIVHRKCF

SEQ ID NO: 222067 - protein, 197 aa, Zea mays
  unsure (1)..(197): unsure at all Xaa locations
  Clone ID: MRT4577_134115C.1.pep
MNPLANHSANNSKLQASTSVASPCLNWRETRARKEQGVADPHDDFLDTPLEAVKNTIRNXQLPKKHWHXASPQVMDFDNSDDETQDLNIATQALRHIPNMPVTKQQNTISVHPPKKDFKYRESVRKKADRENLKGVECKQCKKFYDAVLPGGRADGDGAGSTSLRCEHHDGVSRHRYRYAPPLTPEGFWNIGFESEM

SEQ ID NO: 222068 - protein, 46 aa, Zea mays
  Clone ID: MRT4577_134116C.1.pep
TVTISIVCCVCIVSSRLGVRVALRSAWAASASVHACTSAIICSSNA

SEQ ID NO: 222069 - protein, 55 aa, Zea mays
  Clone ID: MRT4577_134117C.1.pep
MICFSCVVSNSSALKLAIVPKFANGMFIFAMHLGQSPSRRCSVLGYENEYHFIRS

SEQ ID NO: 222070 - protein, 45 aa, Zea mays
  Clone ID: MRT4577_134118C.1.pep
SCFSNFLGKYRTSFTQFLEFKREGYVGSINSKDLCLEYKVVSVLV

SEQ ID NO: 222071 - protein, 457 aa, Zea mays
  Clone ID: MRT4577_134119C.1.pep
MDIESRQVSKGDAIAAAVSVDWKGRPCDPLKHGGMKAAVFVLGIQAFEMMAVAAVGNNLITYVFGEMHFPLSQAANIVTNFIGTVFLISLLGGFLSDSYLGSFWTMLIFGFVELSGFILLAVQAHLPQLRPPPCDMMAPGQACEEARGLKAGIFFAALYLVALGSGCLKPNIIAHGADQFRRGSGSDAARRLSSYFNAAYLSFCVGELVALTVLVWVQTRSGMDVGFGVSAAAMAVGLLSLVAGVAFYRNKPPQGSIFTPIAKVFVAAVSKRKQVCPSTASTQAVAGSTVHEMSVNTTDICHINKFRFLDKACMKAQDGPGGSSAGKKSPWIMCTPAEVEQVKLLLCVVPIFACTIIFNTILAQLQTFSVQQGSAMDTRLAASFHVPPASLQAIPYIMLVALVPAYEAAFVPAMRRLTGVPTGITPLQRIGVGLFAVTFSMVAAALVEARRRHAAAT

SEQ ID NO: 222072 - protein, 206 aa, Zea mays
  unsure (1)..(206): unsure at all Xaa locations
  Clone ID: MRT4577_13411C.1.pep
MYGGDEVSAIVIDVGSYSCKAGYAGDDTPKCVFPSVVGSIEQTGDTDEAKPEKEADSGSDPKNGSKPMDVDKAKTKRKFYLGQELEFRREHMEVISPLKDGTIIDWXVVDNIWNHAFRRRLLINPEEHPMLIAEPSTNSGQQREKAAELMFEKYKLPALFLAKNAVLTSFCIWTATILWWXTCGGXSYCGFCWNGKMVLQKSAATS

SEQ ID NO: 222073 - protein, 71 aa, Zea mays
  Clone ID: MRT4577_134120C.1.pep
LGFNKIGAPDVPVGVFNEVWSPVLLKGGGPSPPFGIFGPPIWNRGGAPFLWRLLGESYPLAGRSPHASVAS

SEQ ID NO: 222074 - protein, 41 aa, Zea mays
  Clone ID: MRT4577_134121C.1.pep
PPVGSITCLGLLLLVLPPPPSVKLVEPHSRSSPRVISLNKN

SEQ ID NO: 222075 - protein, 87 aa, Zea mays
  Clone ID: MRT4577_134123C.1.pep
AIPNAPLKIHYNVTEAIFQPCSIALIINTKTIANMILLPSLRETISVCWSWTLHLLHAYMYIMVTASTTNTADVDCMLTSGGYSPSL

SEQ ID NO: 222076 - protein, 64 aa, Zea mays
  Clone ID: MRT4577_134124C.1.pep
WRGASVRRPINLEDYTPPVELLQILPLKSSVRGKDVGPQIGPNNLKFSPVCSCCYRSMANALCM

SEQ ID NO: 222077 - protein, 75 aa, Zea mays
  Clone ID: MRT4577_134125C.1.pep
LRLMLAAAIGDIGGRVSLDQVSRGSWLRDRTGSRRASGSHTGVAETGRAHRTGGSQGASRHGWGHPCAEFLQPGG

SEQ ID NO: 222078 - protein, 104 aa, Zea mays
  unsure (1)..(104): unsure at all Xaa locations
  Clone ID: MRT4577_134126C.1.pep
AARRPTEGEEGSVTNMFTSIVGNVFGFKALRALRLEDLRIPTAYIKTFQGPPHGIQVERDKLNKYGRPLLGCTIKPKXGYPQEYGDCYNVSGDCLQKKKKKKTR

SEQ ID NO: 222079 - protein, 25 aa, Zea mays
  Clone ID: MRT4577_134127C.1.pep
SPFFSLKLSRIVPISAYNMCGQCFA

SEQ ID NO: 222080 - protein, 52 aa, Zea mays
  Clone ID: MRT4577_134128C.1.pep
GAGKPLGWSRTKTGGCSPCGNLFPFLGRAPKPAKGGQNPLFSDLTLLDSLFP

SEQ ID NO: 222081 - protein, 156 aa, Zea mays
  unsure (1)..(156): unsure at all Xaa locations
  Clone ID: MRT4577_134129C.1.pep
KAKIQAANFGPKLFSKMGWREAQGFGNEKKGRPDPVLAXNVKKVHFGFGAVPPGGVPFEDALFEQSKNRILLGSRYRPNPLTNPRKSFFLFGGVCFRGNKCQKVRFSAYFLECPKCKASGGFPKLCSLWRGFTFVDLKVCSNVYLVSANNVLLSWA

SEQ ID NO: 222082 - protein, 70 aa, Zea mays
  Clone ID: MRT4577_13412C.1.pep
DYANASLQRQHPSFLSLAAEYAFVSALVLIHLDRTQLQLLEIEWTTQKDYYIMNNLVNKIRSVIYVFHVH

SEQ ID NO: 222083 - protein, 141 aa, Zea mays
  Clone ID: MRT4577_134130C.1.pep
METVKIFLKAKPTPQQQLYERHMPATDEGRIIDRQIQDVQREEKKEGKDIREDDENTDMRTVKALAKEGVRLRNAVNRLCENKAQINSIFMRLGESVATGTTGSHLDKSTELMKLANSLKKAQRVAATMQECRKEMTNAGV

SEQ ID NO: 222084 - protein, 42 aa, Zea mays
  Clone ID: MRT4577_134131C.1.pep
LFVLTSGYYIQFNVRHDLPALLAKAWLLTHNETWLTAKPRCL

SEQ ID NO: 222085 - protein, 86 aa, Zea mays
  Clone ID: MRT4577_134132C.1.pep
DGVLFCLFQLCVAMRFSEGSIGDRMARLKGGRLPLSDVLRYGADLPLGVLELHYMGIFVQNLQSCNFLLDDNDQEAWFCFIPYIST

SEQ ID NO: 222086 - protein, 71 aa, Zea mays
  Clone ID: MRT4577_134133C.1.pep
GTYGKTIFCFVPVSLAPPMAAIVQGVRYAFGLHAPALLISLCLLTCVSVKSFFACVTAWILKLSNVLLTMI

SEQ ID NO: 222087 - protein, 63 aa, Zea mays
  Clone ID: MRT4577_134134C.1.pep
SSRASGQTLSRELIYPLQPRVSLQSESVKDAISKIVGNAKERIRKFTKTLELQIGLKIKDPQR

SEQ ID NO: 222088 - protein, 229 aa, Zea mays
  Clone ID: MRT4577_134135C.1.pep
MALVGQVATVAQLVGVDAFSLITMIADAAQTARRNRAVCRQLARRVEMIGGLLRRLRDDDDARLLRHAETRGPVEALEETLRRAYLLVRSCQRRGYAFRCLMGARHADELREMQGEIGFYLGLFPLISYVDWARRRGNGKAACGDTRSLQEAPMVRPCLVPFLFLSLLRWMQLLREYLCLGVYICTCSAYQLMFTDVCICEIFLHVSPQGSKDKRVTDLKLCNVLLTMI

SEQ ID NO: 222089 - protein, 200 aa, Zea mays
  Clone ID: MRT4577_134136C.1.pep
MALVGQVATVAQLVGVDAFSLITMIAEAAQTARRNRAVCRQLARRVEMIGSLLRRLREQDDNDDMRLLRHAETRGPVEALEETLRRAYLLVRSCQRRGYAFRCLMGARHADELREMQGEIGFYLGLFPLISYVDWARRRGNGNGKAACGDTRSLQEAPMVRLPCLVPFLFLSLLRWMQLFREYVMPLVCMHLLCLSPYVY

SEQ ID NO: 222090 - protein, 114 aa, Zea mays
  Clone ID: MRT4577_134137C.1.pep
IGSLLRRLREQDDNDDMRLLRHAETRGPVEALEETLRRAYLLVRSCQRRGYAFRCLMGARHADELREMQGEIGFYLDLFPLISYVDWARRRGNGNGKAACGDTRSLQEVPAHNC

SEQ ID NO: 222091 - protein, 54 aa, Zea mays
  Clone ID: MRT4577_134138C.1.pep
EATIHEHVLQLALKVHRLVFVAKHLILLSLVLEPRPCIFSTSNIFNRTSFSVTS

SEQ ID NO: 222092 - protein, 59 aa, Zea mays
  Clone ID: MRT4577_134139C.1.pep
RLHVPGRYYTVDLSVRCWLSKWMCGAYNLQLIKCFCLGLATYYDPPPSYDTNSLHLPAI

SEQ ID NO: 222093 - protein, 44 aa, Zea mays
  Clone ID: MRT4577_13413C.1.pep
MRYPHHFIRTKERLVKHITTELKHTTTNSEIAENGSQHLLLLFF

SEQ ID NO: 222094 - protein, 65 aa, Zea mays
  unsure (1)..(65): unsure at all Xaa locations
  Clone ID: MRT4577_134140C.1.pep
VFRLTKHXXXRGKCTILKSPPPYNHPLTKTHHIISSSQTPPPTPPPQSNPPTSSPHHLITTNFNY

SEQ ID NO: 222095 - protein, 51 aa, Zea mays
  Clone ID: MRT4577_134141C.1.pep
VSFEFQHNVCARSIYAEGTVDAAMFLYSKIQSGVNKKLYDMIDVLREGNMK

SEQ ID NO: 222096 - protein, 84 aa, Zea mays
  Clone ID: MRT4577_134142C.1.pep
FGKSRQPLQNSLRETLFPIQSRELLSFPAVLQVFQIQGQPNRLVFIFKIWWTWTQKRSLRVGAAWKYKGGLKLGKKKKKKRRAA

SEQ ID NO: 222097 - protein, 123 aa, Zea mays
  Clone ID: MRT4577_134143C.1.pep
RFGIFQLHQLQGKIGPGERKSRCIFLGSTLSTLPRLKVLEKSSHGFYLGKANLLLRGPGNFLGKKQFGHFPKFPKARLEVDGGILQKAHFSPLKMLVANNDLALYPRLKVELSIRHPLCIFGD

SEQ ID NO: 222098 - protein, 231 aa, Zea mays
  unsure (1)..(231): unsure at all Xaa locations
  Clone ID: MRT4577_134144C.1.pep
YITLVTSKKKKKKKKKLLSSGLEEDLNFGSDAAKNALAAVRLTVILIFTVHNVNKEPDRQSYAEIVQRRVLLQSAFTAAFDFVGRILRRCSELNDIASSFYLPAILVYIEWLASHPELAVDSEMEEKHANARSFFWSQCISFMNKXLILTNLASVNDDDDEACFSXMSIYREGETGNRFAFGEDLDXEGFLPLLPAHTIXXDFSSKHXFGSTKEEKARVQXRIFAARKVTA

SEQ ID NO: 222099 - protein, 78 aa, Zea mays
  unsure (1)..(78): unsure at all Xaa locations
  Clone ID: MRT4577_134145C.1.pep
QKSLLLLIRELPFQSLVRKIAQYFKLILXFKNHSVLALQEIPEVYLVGLLQGNNLCAIQAKRVSIMPKGIHLARRTPG

SEQ ID NO: 222100 - protein, 1059 aa, Zea mays
  Clone ID: MRT4577_134146C.1.pep
MMTVPMDSASAAPSSTRDLAERLLTRNNELEDQLRKSAQSKVPSDPNIWLQMRDNFEKIILIDHDLSEQRDVEYLLWQLHYKRIEDFRRNISAASSLASQSGKSNTNPDRVKRIKSAFKSFLSEATGFYHDLMLKIKSNWGLPLNYFPDSLDNANNSVRDDMKTVQLKKGLISCHRCLIYLGDLARYKSLNGDGDPASREYTAASSYYKEAASIYPSSGNPHHQLAILASYSGNEVVAVYRYFRSLAADTPFATARDNLIILFEKNRQSYGQLPDNSKVPSTKTLPPRPSGWGRGRGEVRFQPKDVNAETAERERECNNGDTLKTFYIRFVRLNGILFTRTSLETFGELFSSVSNDLQILLSSGLEEDLNFGSDAAENALAAVRLTVILIFTVHNVNKEPDRQSYAEIVQRRVLLQSAFTAAFDFVGRILRRCSELGDITSSFYLPAILVYIEWLASHPELAIDSEMEEQHANARSFFWNQCISFMNKLILTNLASMEDNDDEACFSNMSIYEEGETGNRLALWEDLELRGFLPLLPAHTILDFSSKHTFGNVGSTKEKKARVQRIFAAGKSLLNFVQIDQLRIYFDSSSKKFVMAKNPPVSKTNTPLHESPDALKTSGTEMDYEAARRFDSVSSNMGTLQSKVQFCPDGDDDEEIVFKPTASEKFPKAPSDLLVDGYTHPVPMSTAGWPTNASLVPVQSTGSMSATRLPSNPHATGWPPNGGSNAFPSTASLSAAGNYNINQSLPRSSVGWTDWAVNSEQSVIPSIAPRFELVQSVEEPVSSWTSSGAQHVGPQHKHTGLTFPDVVSEPLVSASMVQCFSSTDYSKFLSEQEMLLMNGLNTVNITGNGYLKQRLQPGLSGLQSMGYSSQIPIEPGGTTANLMHNHVKITGETVPSTLDSVVPSIAPSGGMPIKLTEAPLTASKKNPVSRPSKPVGPPPGFNHVTPKRQDDSIPVEKLQNPQVDDYSWLDSYQQSIDHVHSLRTIYPGVSDTSTAFATPFSFPGRIHTQGTNEKTWQDFHLFEPSKQNMFQTYHQRNLQSGQMDEQEPANSIWSSSYHV

SEQ ID NO: 222101 - protein, 346 aa, Zea mays
  unsure (1)..(346): unsure at all Xaa locations
  Clone ID: MRT4577_134147C.1.pep
MDTQARPVPPRVKLGIQGFEVSKLGFGCMGLTGAYNSPLDDEAGIAVIAHAFSRGVTLFDTSDVYGPLTNEILLGKALKQLPREQVQVATKFGIRHDESGTRTVCGRPEYVRACCEASLRRLGIDCIDLYYQHRIDTTTPIEETIGELKKLVEEGKVKYIGLSEASPDTIRRAHAVHPITAVQMEWSLWSRDIEPEIVPLCRELGIGIVPYSPLGRGFFGGRGVKEQVSAESNLHGIPRFAPENLEKNKQIYLRMEELANKHQCSPAQLALAWVLHQGDDVVPIPGTTXKIKNLDSNIDSLKVKLTDEDLKEMGSQIREEDVAGGRQFTSFAHTTWKYADTPKKQS

SEQ ID NO: 222102 - protein, 49 aa, Zea mays
  Clone ID: MRT4577_134148C.1.pep
PGNNGGELTTFTKLWVVNQTILLIRHTITLLQEQLFVNHGIRAKYWPVC

SEQ ID NO: 222103 - protein, 189 aa, Zea mays
  Clone ID: MRT4577_134149C.1.pep
MVPTHGDTAGPSSSQDDPAASVKKRNSNRPQYHPFTQQQLPACKPILAPQTVIPVLLFVGVVFIVIGLGCIAASNRVVEVVYEYETSCIPRHMLGNKVAYIQNPSIDKTCTWILKVPRDMKHPIYVYYQLDKFYQNHRRYVKSRSDKQLRDPKEANSTQQYCKPEATTEHGSAVVPCGLVAWSLFNDTY

SEQ ID NO: 222104 - protein, 214 aa, Zea mays
  Clone ID: MRT4577_13414C.1.pep
MVIIKKQGNQRYNMKTISYGYQSEFISVFHSTDPIILSASARSTDILLWAEDVKSFGWTIVFKISIGAGITDMCMSDDGNFLAAIVEKRLMIWKYCCVDVHESSCFSKLEEIQYENDDDIKRKKGVSLSKHCENIISLKWSSELDLLTGSSVGTICVHTHPALKENVHISLDTPFEVLYFRWSYVHAHNKSGPVKCVSWIPRKPSMLAVAGMTG

SEQ ID NO: 222105 - protein, 67 aa, Zea mays
  Clone ID: MRT4577_134150C.1.pep
TFRFGGCRQRWENQSEITKCTKQEYERLQNVVPLIVTASLILIFPFEACSLHTPLHKRNHLGLNCQR

SEQ ID NO: 222106 - protein, 76 aa, Zea mays
  Clone ID: MRT4577_134151C.1.pep
FFFLARKNSILFGIVVGLGTGVFFTFLFACLACVGSLHVFYGRMFLACFFFAKMMSYCCAISSLQYKIPPCLMSTV

SEQ ID NO: 222107 - protein, 105 aa, Zea mays
  Clone ID: MRT4577_134152C.1.pep
HKRRLTTHKLGKNIQSIPLSHDYLLWIMPYYYPRAVADGGRPCQRYVPRTDAVHVLRHHRSHCDVHHQHRPVLRHEAAHSSDHRLCSISSSTTASTLWCNTIHIC

SEQ ID NO: 222108 - protein, 93 aa, Zea mays
  unsure (1)..(93): unsure at all Xaa locations
  Clone ID: MRT4577_134153C.1.pep
QKNLPPKATNPPSGTTTKQPTHTSPNRPHSMVNSNASSGNCXNTTACSPPPPQGXGVPTTKRSPPWTLSSSRCAVSACFGSARVRCARPWCAR

SEQ ID NO: 222109 - protein, 90 aa, Zea mays
  unsure (1)..(90): unsure at all Xaa locations
  Clone ID: MRT4577_134154C.1.pep
SRQLQLSTKPXFRLQAGAPPRASSGSPISPPHSAPRDHRASPRPRRSLRAAHEERGATHPARLPWAGPIPDGDGRARVTGGPRGTEKDLF

SEQ ID NO: 222110 - protein, 70 aa, Zea mays
  Clone ID: MRT4577_134155C.1.pep
LPFLRSRRGLARSFPWVIAIVVSSRSCRANVAGHRLVLRGGSYCSFGFGRSGSIRMDRLQAFVIWNHCSA

SEQ ID NO: 222111 - protein, 140 aa, Zea mays
  Clone ID: MRT4577_134156C.1.pep
RSPSLDDHERKFFTADEWAFVIAATARLIPSGGQGPGALEARVAVFIDLQMAGPFGEGADWYMEGPHRPDAPPEQGFQSPLPPAEIYRQAIKVFNAWCQEKYNSIFADLPENQQDEALHALEGGKAGGSNAPKGEVAESS

SEQ ID NO: 222112 - protein, 68 aa, Zea mays
  Clone ID: MRT4577_134157C.1.pep
IRVFFMLLLYHIYELFGLVFFFFCPLSIHRVNRLFGTLVHFIRCGAAYPRSNALFRFWLEQFVLIHRA

SEQ ID NO: 222113 - protein, 78 aa, Zea mays
  unsure (1)..(78): unsure at all Xaa locations
  Clone ID: MRT4577_134158C.1.pep
HRLXXEDTPXLRITXXLGXXVLSXEALPVILXNTSVXRSXXWXEXIEFGWSVPPVVWSTVQMPYYSXSCFELGLIFFQ

SEQ ID NO: 222114 - protein, 250 aa, Zea mays
  unsure (1)..(250): unsure at all Xaa locations
  Clone ID: MRT4577_134159C.1.pep
MDVLLAAVVGELTTRSINFLIRNCLKPTAPDVEDRLRRILLRAEVIVEEAMGRQITNQAMLQQLDVLREAMHRGHYILDTFSYESRSKEEEEEEEEEEEARGHGASKVNPLQGLCSSPSSRNRNTRILEQMRKSVDHLGSLIRDVQELVVFLTGYPRIILHRQPYSMHLLLSNCMFCRQMETELVVDFLLLRARADHAPEXRLDVLPIVGPRKVGKSTLVAHACRDERVRXRFSXTVLAGPNRGGFTGHD

SEQ ID NO: 222115 - protein, 66 aa, Zea mays
  Clone ID: MRT4577_13415C.1.pep
EPPAPKHPPKRKTPPPPRTGPAFPGQPQGPKKKKKKKKKKKKKKKKKKKKKKKKKKKKKKKKKTPN

SEQ ID NO: 222116 - protein, 215 aa, Zea mays
  unsure (1)..(215): unsure at all Xaa locations
  Clone ID: MRT4577_134160C.1.pep
LRKCSIKSYQSSLKMAPFEALYGRRXNWLANQTRRRSRAWTEVRFIKKNLEAAQARQQSYHDKRRKPLQFEVGDHVYLKVSPTKGVQRFGIKGKLAPRYIGAYEIKETCGPVAYQLKLPPHMSAIHDVFHVSQLKKCVGLPTEVLSEPELEIEPDLSYQEQPIKTLDHKERSTRAKSIKMYKIQWSHHSEEEATWETKSFLRSHYPEFLPKEIGT

SEQ ID NO: 222117 - protein, 49 aa, Zea mays
  Clone ID: MRT4577_134161C.1.pep
SSPSSNSPHASRKRATLSYYSCTVDAKRSTHDHASIALTLMDHVDHTNE

SEQ ID NO: 222118 - protein, 111 aa, Zea mays
  Clone ID: MRT4577_134162C.1.pep
GMSLDVMLIEIDERFNALKLLMGSVFRQAKEMLGSVNSSVSDLQSENELQLEVFGAIIGECVNGLQEELERKLYAQMSITNTMSRNWKEAITQFAAVRFLSLPQIFMDIKR

SEQ ID NO: 222119 - protein, 101 aa, Zea mays
  Clone ID: MRT4577_134163C.1.pep
YTRACVYRDSGRTKQVLVRAFYMYKDMAKIGGALSDANNSPRLPALAHQPDQITKMAVKLSSSLMPKRMGLHNSDKHLCDMVPAAATRKGGVVITAFSPGT

SEQ ID NO: 222120 - protein, 103 aa, Zea mays
  Clone ID: MRT4577_134164C.1.pep
TITSTISRGILVVLGAVELFEALRKKPPVYLPVEPAPGALYADHACSLIHSATLDPSVPDGSESNSGRAQIEIVIRVSLISTAGSRDTTECKSFCTRGRTHGR

SEQ ID NO: 222121 - protein, 41 aa, Zea mays
  Clone ID: MRT4577_134165C.1.pep
TLKVVKTNTQKFLPVHNNPKLALEIEKRFLLLMLINLNGLW

SEQ ID NO: 222122 - protein, 458 aa, Zea mays
  Clone ID: MRT4577_134166C.1.pep
MPRSITGSSRIGQLSSSPQAKDLSFSNSDVSDETNFGIFNLAKFSKKSALPCDICMRCDTILDRIFVCSSCKATVHLDCYQSLVYPTGPWKCELCHEMPSDSVTSGEQSDQNGPKACLVQCGLCHGTSGAFRKTVKGQWVHAFCAEWLLETTFRRGQHNPVDGMERLHHKDKDTCSICHRCVGACLKCCTLDCQITFHPSCARDAGLYMNTKRLGNMLQHKAYCCRHSIEQRKAYSQQYGPDEIKGMKQMRVELELLRFLCERIVKREKVKKDLVGCAHDILAARRITAVSSLWTSCYTSGPGASSESATTSVNNKSYGGTIQRSDDVTVRLEDVTVDSTVTKKHTVRFSLHNRDTDRNTADSSTSTISYKRKLDDGESLAFKSHPGTPATALLESRDAEKPIDKKLRDMYQKELVMVTSHQALLKNKTPPERYVYTRRSSMSKRKQCSQHVVQRPGG

SEQ ID NO: 222123 - protein, 255 aa, Zea mays
  Clone ID: MRT4577_134167C.1.pep
MGESRGSIAFFATYRPPVPLDIFSVPISPSSIRDEVHLTDGVSYNYNCRPIPKDALKSLLKRPKLAADGGATDADVDSGRVSGLLFVSERDDGLETLRVALHFKDSGEQACKVFSLADVFGAADFSGVRLEDSGCVGGGYKVGSRTVDHSLIYVSTKEPVQERRSPWTVVYKTNLRTGKTERLTPKGQFDLSPAVSPSGKKVAMATFRPEGWEGEIEDLQTDIFVMNVERPPMRKRLIRNGGWASWASEDVIFFH

SEQ ID NO: 222124 - protein, 98 aa, Zea mays
  Clone ID: MRT4577_134168C.1.pep
MSDALRQSTTDKAASSLKPDSQKSGLEQAGDKVKGAADNLAGSAQPSGEKSATQKASDTVSGSNENASKQGQSVLDSASETVGNAAQSAQDALGLGKK

SEQ ID NO: 222125 - protein, 534 aa, Zea mays
  Clone ID: MRT4577_134169C.1.pep
MALQAAYEYLQQAVGHGAWSSTQTLTLLLIAVPTVLLLLASLAKSTSSSGRGKPPLPPSPPGTLPIVGHLHHIGPQTHISLQELVAKYGHNGFLFLRAGAVPTLIVSSPSAAEAVMRTHDHIFASRPWSMASHILRYNTCDVAFSPLGEYWQQTRKLMNTHLLSNKKVYSFRHGREEEVCLVVDNLREAAAKSPSTAVDMSEVLAAYTNDVVSRSVLGSTHRKKGRNTLFREMTMTNVDLLVGFNLEYYIPRWPLTDLLFRLVCWKVTRHLKRWDALLEEVIHEHVEMRKLSGDKEKESDDFIDIFLSRYEEYGFTMDNVKSLLMNVFEAAIETSYLVLESAMAELMNHRRVMKKLQAEVRAYGAEKKLDMIREDDLSSLPYLKASMKEALRLHPPGPLLLPHYSTADCQIDGYHIPANTRVLVNGWAIGRDPAVWEKPEEFMPERFMRDGWDKSNSYSGQDFRYLPFGSGRRICPGANFALATMEIMLANLMYHFDWEVPNEKEDGGGKVSMDETFGLMLRRNEPLYLVPRAV

SEQ ID NO: 222126 - protein, 48 aa, Zea mays
  unsure (1)..(48): unsure at all Xaa locations
  Clone ID: MRT4577_13416C.1.pep
TKRRICTVRASLETHRGGYAQSGLVWKLIYPRGLGGFEFSNXRLYFLS

SEQ ID NO: 222127 - protein, 616 aa, Zea mays
  unsure (1)..(616): unsure at all Xaa locations
  Clone ID: MRT4577_134170C.1.pep
MPEYPSRSDPSTMALQAAYEYLQQAVGHGAWSSTQTLTLLLIAVPTVLLLLASLAKSTSSSGRGKPPLPPSPPGTLPIVGHLHHIGPQTHISLQELVAKYGHNGFLFLRAGAVPTLIVSSPSAAEAVMRTHDHIFASRPWSMASHILRYNTCDVAFSPLGEYWQQTRKLMNTHLLSNKKVYSFRHGREEEVXIEETKIKGIILRPPRKLKEXLHELIIRAXCLVVDNLREAAAKSPSTAVDMSEVLAAYTNDVVSRSVLGSTHRKKGRNTLFREMTMTNVDLLVGFNLEYYIPRWPLTDLLFRLVCWKVTRHLKRWDALLEEVIHEHVEMRKLSGDKEKESDDFIDIFLSRYEEYGFTMDNVKSLLMXRFHRRPPHYYFGLESMHIYRLRLSTYLTSLRPGRPAXKQNVFEAAIETSYLVLESAMAELMNHRRVMKKLQAEVRAYGAEKKLDMIREDDLSSLPYLKASMKEALRLHPPGPLLLPHYSTADCQIDGYHIPANTRVLVNGWAIGRDPAVWEKPEEFMPERFMRDGWDKSNSYSGQDFRYLPFGSGRRICPGANFALATMEIMLANLMYHFDWEVPNEKEDGGGKVSMDETFGLMLRRNEPLYLVPRAV

SEQ ID NO: 222128 - protein, 110 aa, Zea mays
  Clone ID: MRT4577_134171C.1.pep
PHASNTRTRLATILHSMTSDSQRPALYQEEVTLLDTAKTHSYHFNKLMSKPIKLTHLHLPPFIPHSKNSSSLSDLPHLAYILKTHNDNAKHALDHEPHGHEMHSLPCRLF

SEQ ID NO: 222129 - protein, 87 aa, Zea mays
  unsure (1)..(87): unsure at all Xaa locations
  Clone ID: MRT4577_134172C.1.pep
RHFSVINSYNQNTDDSACPNRDPAINAYMACRMTTIRSDSLTKTQMKKILKNMAGLRTTXNSPHRIPTIPYLADLRTMNTKDITIKR

SEQ ID NO: 222130 - protein, 97 aa, Zea mays
  Clone ID: MRT4577_134173C.1.pep
DCREDGEQKVLLDSILALLRQYLNRLQVATDEGSNEVYLQVDAITIIENGDIKNAHVQHMNCEGGIHASDERNMHVIHESDSQKRISPTESETCPSP

SEQ ID NO: 222131 - protein, 508 aa, Zea mays
  Clone ID: MRT4577_134174C.1.pep
MAMAAEGAASEPELVSIPATPHGLSTPEGAATPTGAGGGGGGRSKGSGTPGRRVVEGLRGYLEDVGHLTRLDPRDAWLPVTESRGGNARYAAFHSLNAGLGFQALLLPLAFPDLGWSWGIISLTIAYFWQLYTLWILVKLHEAVPGRRYNRYVELAQAAFGEKMGMWLALFPTIYLSAGTATALILVGGETMKLFFQIVCGPLCSPNPITTVEWYLVFTSLAVILSQLPNLNSIAGLSLIGGATAIMYCTMSWVLSVSQPRPPTVSYDPVTSNSFGLSLFSILNALGIIAFAFRGHNLALEIQATMPSTFKHPAHVPMWRGAKVAYLLIAMCLFPVAVGGYWAYGNMVPPGGMLAALYAFHSHDISQGVLATTCLLVVLNCLSSFQIYSMPVFDSFEAYYTGRTNRPCSAWVRSGFRVFYGFLSLFISVALPFLSSLAGLLGGLTLPVTFAYPCFMWICVKKPERFSFSWYLNWGLGLLGTAFSLAFSLGGVWSIVNNGMKLKFFKPN

SEQ ID NO: 222132 - protein, 98 aa, Zea mays
  Clone ID: MRT4577_134175C.1.pep
DAGVDAQSSHVDGVIIMIEWYSTTADKEHTCLTNMNRSFKENRGCYGLNDTYRLTGILSEVNGVAANHDLTGIHITTLPIDPQMDSFYVSEKPCVPLC

SEQ ID NO: 222133 - protein, 146 aa, Zea mays
  Clone ID: MRT4577_134176C.1.pep
TFDRPGKIGAALRGLLDLLRGDPYRSCRPNNAVPSFVILAAKRLRRRLYCLIIGVRLLRSNHSVVYSSSITIKKLRRLVRTLKSGQHTRSPHSNLNQNSINLLHIRPPGTHLLLLLPRSSRKTPRLIRDRHRNQHQAHKSAQRSRA

SEQ ID NO: 222134 - protein, 89 aa, Zea mays
  Clone ID: MRT4577_134177C.1.pep
TEMRVLQDANFYSATRRNNLLRLLTILSHYDQERHSGIPLGYHYMSSTGTYLPMLHVQAPVLRILPHLCKLWHLHLIQHLKAPMSTVNL

SEQ ID NO: 222135 - protein, 481 aa, Zea mays
  Clone ID: MRT4577_134178C.1.pep
MSSSSGTTMPLAYQTSASSPEWLNKGDNAWQLTAATLVGLQSFPGLVVLYGGVVKKKWAVNSAFMALYAFAAVWICWVTWAYNMSFGDRLLPLWGKARPALSQGWLVGQAGLPATAHHFASGALETPAAEPLYPMATVVYFQCVFAAITLVLVAGSLLGRMSFAAWMLFVPLWLTFSYTVGAFSVWGGGFLFQWGVIDYCGGYVIHLSAGFAGFTAAYWVGPRAQKDRERFPPNNILFTLTGAGLLWMGWAGFNGGGPYAANVVASMSVLNTNICTAMSLLVWTCLDVVFFKKPSVVGAVQGMITGLVCITPAAGLVQGWAAMVMGVLAGSVPWYTMMILHKRSRLLKHVDDTLGVIHTHGVAGLLGGLLTGLLADPTLCALFLPVTNSKGAFYGDGAQLGKQLAGALFIIGWNVAVTSIICVAINAVVPLRMTQDKLEVGDDAVHGEEAYALWGDGELYDVTEHGPRAAAAVAPVSTPPN

SEQ ID NO: 222136 - protein, 39 aa, Zea mays
  Clone ID: MRT4577_134179C.1.pep
WLTMQPHVGHMFSPWFIILHYRSGTSFVEQPETHIPSLR

SEQ ID NO: 222137 - protein, 690 aa, Zea mays
  Clone ID: MRT4577_13417C.1.pep
MAAAAASPPVPLGPDASDLLDGDLRLKPAVAISWDSEALHSHAERCEIESKVCVIDPSLLPALDDLLQDIYESLQPQPVDYEHRNLMVNVFNKIVGEIFGKNNELPIVEPFGSFTMDLFTPQSDLDLSVNFNTDANDQYPRKNKISAIRKLAHVLFSHQRHGRCYGVSPIVTARVPVLKVIDKGTGVECDISVENKDGMSRSAIFKFISSIDKRFRILCYLMKFWAKVHDVNCPKDRTMSSMAIISLVSFHLQTRCPPILPAFSAVLKDGTDFASIEKNVSLFQGFGHSNKESIAELFVSLMSKLVSVEGLWEQGLCASNFEGTWISKTWAKGVGNLNVEDFLDRSQNFARSVGVKEMQKICECLRASVSDLSKFSKGEIAAPKLKALLFKPLNQVNPVIKPHQKTIKRKRTNPNKTRTNPIQKNAKKKKALEQDKLAISPGQKDGKKTLDQEKSVSSPIQKGAKKTKPLNQDKLVISPGQEDDKKPLVQDEPIVVSPIQKNNNKYVDQEKSLQQEKQIISPGQKDDKKSSKVGPDSACNHVQQKKVKATVSTGRAANTHVSSSRPRSVFIPQAHWPSQPIVDRFAHIPEHLISPSAFSYGLPQPLMHPAYPHPHSHQGLVGQGQGNFLHFNPGIELQHQGQAFFGPPAVYHPMVNGFHPFGINGAQQVQYIDNRMVQRPPYGFGPGFWG

SEQ ID NO: 222138 - protein, 106 aa, Zea mays
  Clone ID: MRT4577_134180C.1.pep
CLFFFRPPGGFLCPPTVVGFASLGGAFLPPWGWTVYFRVPPPPRRVCFFCQCSSRFFTPLFFNNLFFFFPGFFPCLNRPGVHQCPCYAGLPTKTIKINQEENCIFF

SEQ ID NO: 222139 - protein, 208 aa, Zea mays
  unsure (1)..(208): unsure at all Xaa locations
  Clone ID: MRT4577_134181C.1.pep
MLLLSGTSATTFRSPAVQGGVHQATVKIFCKVDEEYCLXVRYPNVVLYPASPXRDEVSIYLRIKRHXASGPQVKDXQVNPAXAAFSDQAAGLAIKHSLSSVPPDVVAPFNPEYXTQTVLCTDIGDVDKGFRCIRMENYIRLNFDVFHGDHGHCEVHDCTTEVLWECDKGDNQSWKILPWGDXGYDGGGSSGVNASRFGXGEPTCRIYC

SEQ ID NO: 222140 - protein, 37 aa, Zea mays
  Clone ID: MRT4577_134182C.1.pep
VKAMVPGKGPIENLFDQVAAPVAKNAWGYPPNFVPGN

SEQ ID NO: 222141 - protein, 66 aa, Zea mays
  unsure (1)..(66): unsure at all Xaa locations
  Clone ID: MRT4577_134183C.1.pep
SFPSLVPSXVRWRLRLPGRXRRPXLXAVGVVXGWFFSAFVFCXSAGCLVRLGPGVWCAAVLGLAPG

SEQ ID NO: 222142 - protein, 44 aa, Zea mays
  Clone ID: MRT4577_134184C.1.pep
GEPIPWFWNFFGEKVKGTPSFGSDSPGKQLGSEILKFYISKDLV

SEQ ID NO: 222143 - protein, 82 aa, Zea mays
  Clone ID: MRT4577_134185C.1.pep
STTSVSFSLWGSTTGGSCSWASTRLMRSCSPTWQRTRACWWCLFGARCPLSCVFGPRTYTCHVCSWISCCTFTLVFLRCFFL

SEQ ID NO: 222144 - protein, 132 aa, Zea mays
  Clone ID: MRT4577_134186C.1.pep
SGFPPRQTAMAETVLLHVAPMDLLALADPCGPTAPASSSTRRPGQRRKGRSACGPQPQIPSLFLLKHHRRHRVIAGRSPLSSISSDGMRWICSTYQDAVDDELGCAFPPVFPTEALDCHASVATGRLRRHLP

SEQ ID NO: 222145 - protein, 127 aa, Zea mays
  unsure (1)..(127): unsure at all Xaa locations
  Clone ID: MRT4577_134187C.1.pep
PSPPRWRRDRGGRRRGGGVPQHPPLIEDDXDDNGIPLPNLNCKMLSKGIKYCYKHLTCAAAAAASPRWPVPTTWVPAPSNEPPAXDDLQKWPAHPAKVDQATVVDHILAAYYVNMXGLLQPTCQTVA

SEQ ID NO: 222146 - protein, 148 aa, Zea mays
  unsure (1)..(148): unsure at all Xaa locations
  Clone ID: MRT4577_134188C.1.pep
HPXRWXXLLTPLXNXSRPXSRXKXXXIPPXPSSGFISLLXXAARXTGRXXLPTTNSPGGEERPXPPWFFRLQGXRHAXXLRQEPFHWXRTXXTLEGXXSFLXXHRLTSKGPRSXDKXVAFPFXTKQLVSFFXXGKAALMDGLHVWPDY

SEQ ID NO: 222147 - protein, 87 aa, Zea mays
  Clone ID: MRT4577_134189C.1.pep
NSMLPSYIVIKSITHYTLRSTRHACGESTETMDYRLCHSAIQIQNRTRRSPGKLSSCAAVCGSGLLLYMLRLRPTPPAARPCLTRFS

SEQ ID NO: 222148 - protein, 83 aa, Zea mays
  Clone ID: MRT4577_13418C.1.pep
RNGLLPFRTLYFGLILPLSLPCVFLPTSLFALRHSPFMRYRPGFFFFNSAQISVVLFFPCSFSSFFQTFTFFCIHCFTISFSP

SEQ ID NO: 222149 - protein, 40 aa, Zea mays
  Clone ID: MRT4577_134190C.1.pep
STVVWSQLSKRQNSIFKHSLNHRGTFNRNTRTYSSQHYGT

SEQ ID NO: 222150 - protein, 374 aa, Zea mays
  unsure (1)..(374): unsure at all Xaa locations
  Clone ID: MRT4577_134191C.1.pep
MDEQQAEEGESARVKRTPEEGSSPLSALADDVLLQILGRLEADPRDWARASCASPRLAALLRAACLPPRLSRALPAELLPAPSPDGAPAAWAALHKLSVCCPGLLRAGVLLEPTDDFGLDLDIGPDXPSTPAPTPPPPRGSRPRPPPATAEPSSRPGARPAPANLPTSPXWSLYDDLYLDAAYDCSSELQIPPAAAAVEPAPPAPVAAIRDVEEATTTNAVSCGVARRGVVAGSRLHPRRWLGTVGAHLASGSWTLSREQGNKLLASRFRGDRLYLCDWPGCVHKEERRKYMVFRGVFHNFARSQVRRALRDTRRPTVAIECAFCGCKETWDLYSAFCLRSFYGYHDDGEPVVRAYVCENGHVAGAWTDRPLYS

SEQ ID NO: 222151 - protein, 132 aa, Zea mays
  unsure (1)..(132): unsure at all Xaa locations
  Clone ID: MRT4577_134192C.1.pep
PXPRGERTFFPGPKQGAKGGKHATITILQKFGDIRATWGFLSIFTHHWVWGVIRHHPPFYPPFTGGCPWGGKRPFSTQGCLLEPRDPGRASVARLGTFFCQLSLFGPTFDRHSFCGTKFGLGGPLILSFPHP

SEQ ID NO: 222152 - protein, 75 aa, Zea mays
  unsure (1)..(75): unsure at all Xaa locations
  Clone ID: MRT4577_134193C.1.pep
KELEKDPQFLKTGNVGMVKMVPPNPMGVGPFSRDPPFGRFPARAMGQPVAVGVLKGXEKKAPPGPKVPKAPPKKK

SEQ ID NO: 222153 - protein, 66 aa, Zea mays
  Clone ID: MRT4577_134194C.1.pep
MVGEMPIPPLDPFLFDGPAAPRIIDDDDDEPATVIVIDDDDEPAPVIVVDDDDDDVPVTVIVVDDD

SEQ ID NO: 222154 - protein, 52 aa, Zea mays
  Clone ID: MRT4577_134195C.1.pep
ASNSSVWHDTAIPFKQVLQEFEDWLGNHNLWKKEQGGSLNRGAFVTCGNWDL

SEQ ID NO: 222155 - protein, 48 aa, Zea mays
  Clone ID: MRT4577_134196C.1.pep
SGRQQMQLIITTEHYLLHSCTGFQNLLLLSYIQCHQEHSSRASTTQLL

SEQ ID NO: 222156 - protein, 65 aa, Zea mays
  unsure (1)..(65): unsure at all Xaa locations
  Clone ID: MRT4577_134197C.1.pep
YNAPVLRGALLEAAHVSCLXDRIALGPQMGXGQLRVIRTCFDLLTGEALDCKSISKGRILFPDDV

SEQ ID NO: 222157 - protein, 89 aa, Zea mays
  Clone ID: MRT4577_134198C.1.pep
GISTLWSLSLLTQMISNEHKSKGGIATHTRARVAATTCTQDKNEHRKEAHRVYNSKKCSNLYHNEPDACMRSIGIIGCSMGAWCAVPFA

SEQ ID NO: 222158 - protein, 60 aa, Zea mays
  Clone ID: MRT4577_134199C.1.pep
RRHRYWITSCYECPSNTFVQQFLLNGACSSNAPSEHTIYWTSKNTPAISATTMPNTSELP

SEQ ID NO: 222159 - protein, 148 aa, Zea mays
  unsure (1)..(148): unsure at all Xaa locations
  Clone ID: MRT4577_13419C.1.pep
ERMSVIIGCPDKSVKLFVKGADSSMFGVIDKTANSDVVQATEKHLHSYSSLGLRTLVIGMRELSQEEFQEWQMAYEXASTALLGRGNQLRNVAANIERNLRLLGATXGIDDKLQDGVPESXXETEESGIKVWVLTXTTKKLVXXIGLF

SEQ ID NO: 222160 - protein, 100 aa, Zea mays
  Clone ID: MRT4577_1341C.1.pep
YQIISSLLLWKNRNDNKLQCTFGSKEGKSTSVTQKQMSSQREQYRSTVHLFIGTGRSPCKITLMPFTFANDSTVIHRGLNSLFPFKSVSFSAVMPKLPCA

SEQ ID NO: 222161 - protein, 53 aa, Zea mays
  unsure (1)..(53): unsure at all Xaa locations
  Clone ID: MRT4577_134200C.1.pep
DEHGRVQGLVPTRDIIPVFSPPGMDSRIDGAPFFXDALEQAQSRVKNGQMFQI

SEQ ID NO: 222162 - protein, 179 aa, Zea mays
  unsure (1)..(179): unsure at all Xaa locations
  Clone ID: MRT4577_134201C.1.pep
FYHRCLGRDNTHFFSLYEIQQAITXGIFPLSPXTANNASALLLQXPQGDELSQSMKTQHLLQLALTNLDIYFQEHQFIPFNPFDLLISAIYLHLLPLPFSHVSRSYLHQYYXFNQLATLNSPAYLHQXQQLLXVNHLDIVNPGTLLIQPTRGRQFYHNAAPNACTLLQLQQLLPFKPLT

SEQ ID NO: 222163 - protein, 209 aa, Zea mays
  unsure (1)..(209): unsure at all Xaa locations
  Clone ID: MRT4577_134202C.1.pep
MVISRDSMLKRRATGGKHNAWRKKLKXELGRQPANTKVSSSNTVRRLRRSVQDXDVKWRALXLDTGNYSWRREAVTRKTRILDEVYNASNNELVRTQTLVKSAIVHVGAAPFKESHLAHYGVDIDKNRHTPLLQRXTCXGQEAEAAXQETKKSDRVTRKLDKRKEGRTLDAHSDEQFASERMLACISSRTGQCARADAYILVARELEST

SEQ ID NO: 222164 - protein, 52 aa, Zea mays
  Clone ID: MRT4577_134203C.1.pep
SLSTHLPRHYLSYPIGFCSQHTSPLEVHSTWSTSPTISYTPHSPSTPLPPIL

SEQ ID NO: 222165 - protein, 245 aa, Zea mays
  Clone ID: MRT4577_134204C.1.pep
LEAGRAIVQDGTVHPLTSYVINYVKFLFDYQSTLKLLFQEFDSGTEAESQLAAVTTRIMQALQNNLDGKSKQYKDPALTHLFLMNNIHYMVRSVRRSEAKDILGDDWIQRHRRIVQQNANQYKRVAWAKILQTLSVQGAGSGGDLTSSSVSRATIKERFKSFNTQFEELHAKQSQWIVPDQELRESLRLAVAEVLLPAYRSFIKRFGNLVDNNKNPQKYVRYSPEAVDQLLGQFFEGQQWAEQKR

SEQ ID NO: 222166 - protein, 634 aa, Zea mays
  Clone ID: MRT4577_134205C.1.pep
MTVAALQAMDALSRRATMLRDSLRRSQGNTDGMVTILGSFDHRLSALEAAMRPTQVRTHAIRTAHENIDRTIKAADGILSQFDLARRAEATILRGPHEDLESYLEAVDVLKGISRFFSSNKNFKSSEGVLNHVNNLLAKSTLKIEEEFKQLMSTYSKPIEPDRLFDCLPKSLRPTKGDHESDGGSHHPSKGLEAAVYRTPTLIPPRILPLMNDIAQQLVQAGNQQTCYKIYRDYRASALEVSLRKLGVEKLTKDDVQKMQWEALEAKIGNWIHFMRIAVKLLLAGERKICDQIFDGVNFNKGHCFAELTANSIITLFSFGDAVAKSKRSPEKLFVLLDMYEVMRELQPEIDEIFEGKPCTEMREAASSLTKRLAQTAQETFADFEEAVEKDASKTIVQDGTVHPLTSYVINYVKFLFDYQSTLKLLFQEFDSGTEAESQLAAVTTRIMQALQNNLDGKSKQYKDPALTHLFLMNNIHYMVRSVRRSEAKDILGDDWIQRHRRIVQQNANQYKRVAWAKILQTLSVQGAGSGGDLTSSSVSRATIKERFKSFNTQFEELHAKQSQWIVPDQELRESLRLAVAEVLLPAYRSFIKRFGNLVDNNKNPQKYVRYSPEAVDQLLGQFFEGQQWAEQKR

SEQ ID NO: 222167 - protein, 75 aa, Zea mays
  Clone ID: MRT4577_134206C.1.pep
MSPTAASSGPEPPFRPREKVLEKQRYFQSVQKPTYLKGRYDVVTSVAVPLALAVSSMYLVGRGIYNMSHGIGKKE

SEQ ID NO: 222168 - protein, 55 aa, Zea mays
  Clone ID: MRT4577_134207C.1.pep
SLMPPQWAKIRPAKGFSGFSPRKALFLLSRVSPKACYHLEVKPFLFFYPCRGVFP

SEQ ID NO: 222169 - protein, 78 aa, Zea mays
  Clone ID: MRT4577_134208C.1.pep
LVLSRAHVADGGVSGPEPPFRPREKVLEKQRYFQSVQKPTYLKGRYDVVTSVAVPLALAVSSMYLVVSSRPRLSLLFI

SEQ ID NO: 222170 - protein, 56 aa, Zea mays
  Clone ID: MRT4577_134209C.1.pep
DLVSGRPSVLCSASLAVHSSIAVTCNVYRDLHHGPCLRRDMHAWQQVRRPGHTQRS

SEQ ID NO: 222171 - protein, 129 aa, Zea mays
  unsure (1)..(129): unsure at all Xaa locations
  Clone ID: MRT4577_13420C.1.pep
PLDAAAASSPSLLPAIEVFTESVVSSDHLRSCLIIANCAAREGSRMSAEADPYEDEHIMLELVCRHFISSLLDEGAXEEFLSALSWSERALQRTPEISFQGAFVLDQRTYLSLPAVAQAHLLLLMSRCT

SEQ ID NO: 222172 - protein, 207 aa, Zea mays
  Clone ID: MRT4577_134210C.1.pep
MAGDEEDHLADAPRVVGVLSALLERVVERNDAVADELAAGTESAAPPSAFRATARPDISVRSYMARIARFAGCSPACYVVAYVYLDRLLRRARSAPAVDSYTVHRLLITAVLAAVKFMDDVCYNNAYFARVGGISLSEMNYLEVDFLFAVGFDLNVSPGTFGHYCTVLRAEMLYLELEGPPPPAASTSLHRCCLSEDDDGSSSTSSS

SEQ ID NO: 222173 - protein, 183 aa, Zea mays
  Clone ID: MRT4577_134211C.1.pep
MSAPPSLKSPATAAFLASPRLTVAPRAAVLGATAQPPRRLNCSAAVGAGARDLEVMSAPLDWAARSVGELEQATDLDTFCMMALSPLDGRYFRFIKDLMPFFSEFGLIRYRVLVEVKWLLKLSQIPEVKEVPPFSEEAQLFLDAIIQDFSINDAKEVKQIEKITNHDVKAVEYYLKQKCSSNP

SEQ ID NO: 222174 - protein, 48 aa, Zea mays
  Clone ID: MRT4577_134212C.1.pep
LSLLRSDRQYKGTPRLPSYLRWPHIQTDQVHGLSLREIGGFTKHCELP

SEQ ID NO: 222175 - protein, 111 aa, Zea mays
  unsure (1)..(111): unsure at all Xaa locations
  Clone ID: MRT4577_134213C.1.pep
MDAEAGVADADPLAWRQHYLNLLLLAYHSFVEVYGDLTTWSVYEAKSAEDRKLIRLLREETGXGTMXLIFWTFTLRXCIXWASCAMHAHNDRERGPLEHVXLLCRHAKIRL

SEQ ID NO: 222176 - protein, 98 aa, Zea mays
  unsure (1)..(98): unsure at all Xaa locations
  Clone ID: MRT4577_134214C.1.pep
HAADARAGRRETQGGRQKGTRAGGGRARGTRGRGRGRRTGGPTNGAAGRRQKGKKKKKKKXKKKKKKKKKKKKXKXXKKKKKKKKKKXKKKKKKKKGG

SEQ ID NO: 222177 - protein, 808 aa, Zea mays
  unsure (1)..(808): unsure at all Xaa locations
  Clone ID: MRT4577_134215C.1.pep
MPLGLAAAAPIGRRLSTAAPTPLSSLTDALLATRLASHLLTTPHLPAALLPTAPLPLPVHLHILRHPALPPASKLSFFLAATPPASPLLESTFPVLLRALAAGSPPLLDALLPFALSASPSTLLPALLSFLLSASRLDAALSLLDSAPPDLLPRLAAAALPSLIASQNLSAAVPAIRRLLPIASHPPPVRETNRLLLALSKENLSDDFRYVFEEMSRRGLPSNVRLYNICIHAFGKWRQMDMSLGLFAAMKAATPPVEPDICTYNSVIRALVVGGRVPDALVIYDEMKSSGIEPDVFTYRAVMNGCCKSFRMDDALRVFHEMRGIIGVSDVVVYNSLLDGLFKVKKLDEACSFFETMVADGIQCSASTHNTVIDGLFNNGRAEAACRQKYELRRKGQLLDGIAYSIMVREFCKEGIGDQVAEAVELVKEMEQQGFSVDLVTITSLLIGFNKSKRWDLEEQIVKFIRDSTVLPDAIRWKSNMMVALRGPHGREKDGTPLFSFDGNMEDVMSLVNHVGHTGTDEEIPNSDPKDDWTLSPHLDHLAKHADSLNSSVVFTMHRGQRMEGMGPKTXLADMINTYLSIFLAKGKLIVACKLFEIFTNLGNKGTSYTYNSLMTSFXRQGALXQVIGTPRSXCVAPVPLLISESVAAVVKARPYPEVISAWSIIGLGVPIASHYNXMPNTLISQLGKXGKVEEAGCLFEQIIRSGMKPDVVTFNTLISINAKAGRLKEAGKYLRRMIREGIAPNHATETILIFLDKEIEKTRESTLFTNPRWSTLTSVSLLHVIRGEIGHRISLCPRDSAMFLRHS

SEQ ID NO: 222178 - protein, 100 aa, Zea mays
  Clone ID: MRT4577_134216C.1.pep
PPPRCIVGQEGVPRRPWGKPQHRKEKSPQPEGVQIVQKRGAIFLKEQKDGAPKAFPAMPKEKPPPKKSRGAAQGVSHSRPKKTRPPGTKNKPPKKRTIWS

SEQ ID NO: 222179 - protein, 227 aa, Zea mays
  Clone ID: MRT4577_134217C.1.pep
MLGARVQLKGWQQAAVAFGSAFGALLDPRRADLIAALGETTGKPAFERVLQRMKNSAEGREVLSERPRVVSSQVSHAWDMPQNTFGAAYAQFMGSRNFSPDDRPPVRFMDTDELAYVATRAREVHDFWHVLFGLPTNLIGETALKVIEFEQMFLPMCMLSVVGGSARFSDKQRALFFQHYFPWATKAGLKCTDLMSVYYEKHFHEDLEEVRRNWGILPCPSPKKSSV

SEQ ID NO: 222180 - protein, 106 aa, Zea mays
  Clone ID: MRT4577_134218C.1.pep
CQFSFEALQVHDVQLEDFERVNRPGEAFYLQIDMEDGIENPDLPICAHSLVLYSDARKDGSPNASILTHLSLRVMPSHMATESDRHRRWRRRRSWRRRGRTLHLPH

SEQ ID NO: 222181 - protein, 68 aa, Zea mays
  Clone ID: MRT4577_134219C.1.pep
EFPVTKSISSRLPIPIAYSNSTRPLFFFFFSETYLGVVGVLQLLTCRNRTMGVDVLYYAQLSLLHLEG

SEQ ID NO: 222182 - protein, 613 aa, Zea mays
  Clone ID: MRT4577_13421C.1.pep
MTALHHLLCRSHFSLEATKINPRVSASNPRPMPDANELEAARRVATFTLAELSISSSTLPPRSNLPALFRRCLQLLPLLNAGDPKLAARCCRGLLASVGAILSRDLSPSLLPAIEVFTESVVSSDHLRSCLIIANCAAREGSRMFAEADPYEDEHIMLELVCRHFISSLLDEGAFEVFLSALSWSGRALQRTPEISFQGAFVLVQRTYLSLPAVVQAHLLLLMSRCTSGQNLNSHMLAFGYAMNLYVRYLPALCVFNITRSAIPPLNYLGKKRSFSCIKDSTDQKLRSQIYRLLSFCELHCGDDLPVNESDIGCIIEMNQHMFLEKFRQECIVFVKGILSSILCCAKQKEVSEPDTEVSDEIICLAAATRVMGSSILYILHNKNYEANCKEYNVICEIISLLGQYGTDELHRYDLLAIIGESVESESASMLMLAHFASLSTCCLRRRLGFLWKGCIIMMMIATNLIAEEQSWGTFHPPMDVSKYSPVFCNTEKGIVEVSARTKEIILRYKSIHKSHNKGRRFYVDGISLGTPEECNSRVGKAAGQRFFECHPEYSRKSWADILDYVECEEGKDYSNALKQLQKFKKFKYRKWFNKRQSKRQCIMDTFGLKSRS

SEQ ID NO: 222183 - protein, 88 aa, Zea mays
  unsure (1)..(88): unsure at all Xaa locations
  Clone ID: MRT4577_134220C.1.pep
ALSLRREAHGRKREGSLPWLAILVWRGRSGRSHARXCPSTXPVPPCGCDISFCTVPSPSSPPMVCVKCAFYLTDFKHSEMSHADFSWE

SEQ ID NO: 222184 - protein, 102 aa, Zea mays
  Clone ID: MRT4577_134221C.1.pep
YYGKKNPKTPFKKKPPKIFFDNKLGAKTNPPQKNISGGYPHRPNKIKKKQKQKNTTTKKKNDPDKKKTQYPQKNLPPKKKKKTFKRENPQSPLWKIKAFFDA

SEQ ID NO: 222185 - protein, 64 aa, Zea mays
  unsure (1)..(64): unsure at all Xaa locations
  Clone ID: MRT4577_134222C.1.pep
QHYDLIIGMDWLLAYSPITVHWANTWLTPSKGNIYVVLYGIKTSADSXAFVQLCSIVDLTDQDQ

SEQ ID NO: 222186 - protein, 105 aa, Zea mays
  Clone ID: MRT4577_134223C.1.pep
RHTLNQLTNFFTHPAHKIFPVLYLKTVPPTTNSIHPLSSTQLMKQPSYAIKHIYPFLLPLLKNYYCFYPNLKHIHHLQYTTPTFWLSSIPPLTKLTSPTPFYLAY

SEQ ID NO: 222187 - protein, 136 aa, Zea mays
  unsure (1)..(136): unsure at all Xaa locations
  Clone ID: MRT4577_134224C.1.pep
PCNLLYALKFPLIYCLRVNFPSKFPLPCDSHITAFLHNFLYSPLLRPRDRPRPSPHPPXPPPPRPPPPPPRLPPPPPRPPPPPPPHLPPSPPPPPXPPPPPPPPPPXPPPPPPPPPHSPPLPPPHPPPPHPNPLPP

SEQ ID NO: 222188 - protein, 49 aa, Zea mays
  unsure (1)..(49): unsure at all Xaa locations
  Clone ID: MRT4577_134225C.1.pep
LKMRVAMGIVRDQRPSASAVEDTSXRIGVAIIHALKTHSQESTKRIYKL

SEQ ID NO: 222189 - protein, 76 aa, Zea mays
  unsure (1)..(76): unsure at all Xaa locations
  Clone ID: MRT4577_134226C.1.pep
SPFSPPSCSXSWWLXPFRCXVVRSRXAXGLSPVPGCLASSPSPAXVFXRLFPLXLAPSCSXCLLCXCPRPAWVAAG

SEQ ID NO: 222190 - protein, 65 aa, Zea mays
  Clone ID: MRT4577_134227C.1.pep
WVKKKKTKPPRGRQNFKNGPLFKKKKKKKKKKKKKKKKKKKKKKKKKKKKKKKKRGRPHRGPSYY

SEQ ID NO: 222191 - protein, 87 aa, Zea mays
  Clone ID: MRT4577_134228C.1.pep
MLGDSQQQRLIRAAVLLGATVAFLRFLLRSRSGGGGLPPTMRLAPLGGGLEKLMRGPIPMIREQAARLGCGFTGPIFVRDITLGGAP

SEQ ID NO: 222192 - protein, 49 aa, Zea mays
  Clone ID: MRT4577_134229C.1.pep
RIGNLVHSRFTPFNRINRLASFALHPCKMTTTFYFTQPTLVHLQLFSKA

SEQ ID NO: 222193 - protein, 75 aa, Zea mays
  unsure (1)..(75): unsure at all Xaa locations
  Clone ID: MRT4577_13422C.1.pep
QTHGRTRGRTRGRTRGPRVKRIERKVRSLTRPSDDLASLDLRKAFFFPTGGGXNCNXTGNTLLIATYFNGDGIHS

SEQ ID NO: 222194 - protein, 51 aa, Zea mays
  Clone ID: MRT4577_134230C.1.pep
MSSIGTSAVQFKFNIHKYGSWISKLTSVQSIGGELRIPSHQHVNLDVRTRK

SEQ ID NO: 222195 - protein, 77 aa, Zea mays
  Clone ID: MRT4577_134231C.1.pep
KGADNQSRWIQTETILYFFGGIPSLTCVVDALLHTRLPRHFTASPHFALVRGRVAVVPTYRRRVWDLRTALRDDNLR

SEQ ID NO: 222196 - protein, 43 aa, Zea mays
  Clone ID: MRT4577_134232C.1.pep
FNRNNTLFLSFKELIHATESSGTDHQGDAQNIITEKSALKGSF

SEQ ID NO: 222197 - protein, 110 aa, Zea mays
  unsure (1)..(110): unsure at all Xaa locations
  Clone ID: MRT4577_134233C.1.pep
VHNVFHISQLKKCLRVSXEQLPTEDLKVQEDLTYIEKPTQILETTDIVTQRNTIRMCKVKWSHHSEEEATSSTVQYNASCHLVHCGSTLSTRRRVTVSRTLHVWPSKEEK

SEQ ID NO: 222198 - protein, 95 aa, Zea mays
  Clone ID: MRT4577_134234C.1.pep
HTVVCIFSFMVHPCFMCIDSSLFPQFFHFDFRQCSCKFLISFSTFKIAILIIVLNFICAPPYIISLSLVFSFILFDTYIVFSLFLLFSFLYIYQS

SEQ ID NO: 222199 - protein, 99 aa, Zea mays
  unsure (1)..(99): unsure at all Xaa locations
  Clone ID: MRT4577_134235C.1.pep
FFXPSXKYYFLFISXTRDRRSFQKAXGXPXIXLFPXXXXXXXXNTITAWCHPFSSSIFPSQXXPEIWEALXIRNPTISXQAVLCNIXPLLYDFILAFKT

SEQ ID NO: 222200 - protein, 144 aa, Zea mays
  Clone ID: MRT4577_134236C.1.pep
GKKKGGFLFAGDPFGGDFGGLLPPGGCCPLFRGAPFPLVGGGKTLGWPTLNTLRGENPLGPPLFSGVAQPPLSSNLVYHPRRAKGPPLTRGFTRWGSGGPPLWGLITRGGGGAPPLATFLFGVAPAPGFSLYALFLGPPLGFPP

SEQ ID NO: 222201 - protein, 100 aa, Zea mays
  Clone ID: MRT4577_134237C.1.pep
MGAKIFGLLGLLDFSTSGDTLNFIAQCSQQYLYTVTDEGFQYPTMPFYIVQEAIQASILRAIALTLQQPYALLQQPYLVHICFQRIGGPQLQQQVVTTIN

SEQ ID NO: 222202 - protein, 72 aa, Zea mays
  Clone ID: MRT4577_134238C.1.pep
GRDANHHLLPTPAPPRLCLGVEKSPRSSCLMKSILFSSRSEPPRGFQIRCLVRSTTTFRAATFRLPGDLDLG

SEQ ID NO: 222203 - protein, 112 aa, Zea mays
  Clone ID: MRT4577_134239C.1.pep
QQIVTPSFLKHADQKHPGTKTMQPCLASSRCVNSAIKRNRSEPAHHHKNKTMRLEQSNNRARLTVVQSDQASDPKDRRRLRSRREEDFISQEERGDFLHKAKARVPRQAEDA

SEQ ID NO: 222204 - protein, 100 aa, Zea mays
  Clone ID: MRT4577_13423C.1.pep
MVLARAMVMEHRKKSNYLVALVLASLLLSAMAGGHRKKLLNKDDASESMETLESTQQLQEDDEMAVVVHERILRQAKMNDYGSYDSSPTMAKPHFKDIPN

SEQ ID NO: 222205 - protein, 108 aa, Zea mays
  Clone ID: MRT4577_134240C.1.pep
CLVSERKGDGKGHQRFTSPSTPRNRPVRQDPDPPEAGTSQLSKSPVSKFQHPGTVKTRMRNLQANKQFSQLMLPTNVPTHPEHERQRNKHIQTYTTPSRSSNTLTEQN

SEQ ID NO: 222206 - protein, 535 aa, Zea mays
  Clone ID: MRT4577_134241C.1.pep
MSLRVLNPNAEVLNKSAALHMNINAAKGLQDVLKTNLGPKGTIKMLVGGAGDLKLTKDGNTLLKEMQIQNPTAIMIARTAVAQDDTSGDGTTSTVLFIGELMKQSERCIDEGTHPRFLVDGFDVAKRACLDFLDKFKTPVVTGDEPDRDTLKMIARTTLRTKLYEGLADQLTDIVVNAVLCIRKPDEPIDLFMVEIMHMRHKFDVDTRLVEGLVLDHGSRHPDMKRRAENCYILTCNVSLEYEKSEINAGFFYSNAEQREKMVAAERRQVDERVKQIIELKNKVCAGGDKNFVVINQKGIDPPSLDLLARAGIIALRRAKRRNMERLVLACGGEAVNSVDELTEDCLGWAGLVYEHVLGEEKYTFVENVKNPRSCTILIKGPNDHTIAQIKDAVRDGLRSVKNTVEDEAVVLGAGAFEVAAKKHLIDNVKKTVKGRAQLGVEAFAEALLVIPKTLAENSGLDTQDVIVSLQNEHDRGLVVGLNHHSGDPIDPQMEGIFDNYSVKRQIINSGPIIASQLLLVDEVIRAGRNMRKPT

SEQ ID NO: 222207 - protein, 58 aa, Zea mays
  Clone ID: MRT4577_134242C.1.pep
KVCIYGEYNGFDNIMATKLNDSQHIALLELQCSKSLDTGLGLSLCYNSKPRDLCCCWI

SEQ ID NO: 222208 - protein, 99 aa, Zea mays
  Clone ID: MRT4577_134243C.1.pep
PRGSETSRHKNHAASSRFELMRRQLINQTKQIGTCTSSQNKTMRFEQSSNRARLTVVRSDQASDPEATRRLRSRREEDFIRQEERGDFSSPRVQGKGGV

SEQ ID NO: 222209 - protein, 83 aa, Zea mays
  Clone ID: MRT4577_134244C.1.pep
TGGGGGGTTKKGGACLASQTYYLTGGIPWAVKKFLGPSKQKQHKGVTSGDYSSTKLGNTIITGDQRLPLGGGDGGPGKNHGIP

SEQ ID NO: 222210 - protein, 123 aa, Zea mays
  Clone ID: MRT4577_134245C.1.pep
DEKTNNTKQGTGTQWAGEPRDEKTIPCAISHPAHKTNIFITMPAMRAHPTWQRPSRCHISLLFHVSFSPLLSRTLPCLQLGTDRRDQHLSDLIIIEISSNNYQYKEISSSRGAERRSSNPAAL

SEQ ID NO: 222211 - protein, 65 aa, Zea mays
  Clone ID: MRT4577_134247C.1.pep
ILSLVWVIQYVLSIIVVVLNTFEIPILDRLTVILVLERAHLIINGHTCRCHVLITLLFFIAIKHS

SEQ ID NO: 222212 - protein, 71 aa, Zea mays
  unsure (1)..(71): unsure at all Xaa locations
  Clone ID: MRT4577_134248C.1.pep
PAALLLLTEAHILSLSHAYLTHNNCMNNSMLTVQNLCSHNLTLTLKPLSNNXHRYSXTYTLHPNIHAQISV

SEQ ID NO: 222213 - protein, 85 aa, Zea mays
  Clone ID: MRT4577_134249C.1.pep
YTGASLYYDASTMAPLNSISLAALNRFRAYKPPAFPLWDKLPARKEPPSWCCCLRIDGVPSESSLLCARPVCALLGPCSAAGRQS

SEQ ID NO: 222214 - protein, 37 aa, Zea mays
  Clone ID: MRT4577_13424C.1.pep
CPVSNLSIIIVTCAYLINLKMHRWKLLGHQLLHVTFS

SEQ ID NO: 222215 - protein, 109 aa, Zea mays
  Clone ID: MRT4577_134250C.1.pep
GTYTGIGGTNRMEQGSRQAIHAQQEHPKLHETSPFPFPRVTVSSQPTGINTDIRNNFLWRSPKIIRAGLNNRTTKKRAKLPMVFFLAGARAHQPFVSHAPPFNLLPHLK

SEQ ID NO: 222216 - protein, 191 aa, Zea mays
  Clone ID: MRT4577_134251C.1.pep
MATTATRRWWRRHDGGDDDPDDLVPMDTQEQEELVRSLEAKQAQQGRRWRRVFAGFLLGYAAFLVYSSFHHAWSPWELRYHAYFMEDLPAPMVIIADWIAALACLFAVKGLLQNSGPSKKWMWYSCYVGILVAIFWTYYILRLPRIRWDVAWLPLGPLMAGALSLYVDHVLLESMQDISTLRSYMYNFKAL

SEQ ID NO: 222217 - protein, 162 aa, Zea mays
  Clone ID: MRT4577_134252C.1.pep
MATTATRRWWRRHDGGDDDPDDLVPMDTQEQEELVRSLEAKQAQQGRRWRRVFAGFLLGYAAFLVYSSFHHAWSPWELQYHAYFMEDLPAPMVIIADWIAALACLFAVKGLLQNSGPSKKWMWYSCYVGILVAIFWTYYILRYIVLVNLSFFFPSHVTQMLC

SEQ ID NO: 222218 - protein, 175 aa, Zea mays
  unsure (1)..(175): unsure at all Xaa locations
  Clone ID: MRT4577_134253C.1.pep
MAGDPPTAAEKETLVSSFLEIAAGQTPETATQFLLMTSWHLEEALQLFYIDGESALTPAHPAAAAGAEXDEVRSTPGGCTGRCNXMDLXGEDDDVRAPLPVKRETLYGEGIVSVMRPNASAASRNFEQEARQSAVWDSDQNATSSSGDNLASLYRPPFSLMFNRPFDQAKLEASS

SEQ ID NO: 222219 - protein, 461 aa, Zea mays
  unsure (1)..(461): unsure at all Xaa locations
  Clone ID: MRT4577_134254C.1.pep
MAGDPPTAAEKETLVSSFLEIAAGQTPETATQFLLMTSWHLEEALQLFYIDGESALTAAHPVAPPPTSAAASALAAAAGAEEAMXSLHPPAAALGDAMLHGFGVGEDDDVRAPLPVKRETLYGEGIVSVMRPNASAAFRNFEQEXKTIWCSMTCAHKLPLXAETPGDSXIADILSFXIFFQIKAKLEASSLDKWLLINLQSTAEFSSHMLNRDTWGNDAVAQLIRSNFIFWQVYYDTSEGRKVCTYYHLVSMPAILLIDPVTGQKMHAWNGMVHPDRLLEDLLPYLDKGPKEHHAAQPQKRPRKVDPEASTGKQGKIAVEDEDEELARAVAASLEESKEVIEASDASDDMVEAEPEEENEPTLNTKPDYPPLPEEPTGSRDLLCRVAIRLPNNRRIQRNFLHTDPIKLLWSFCAPQVEDGERRAFHFVQAIPGASQKLELGSDLTFKEAGLANSMINLLLD

SEQ ID NO: 222220 - protein, 231 aa, Zea mays
  Clone ID: MRT4577_134255C.1.pep
MAGDPPTAAEKETLVSSFLEIAAGQTPETATQFLLTTSWHLEEALQLFYIDGESALTAAHPVAPPPTSAAASALAAAAGAEEAMRFAPPPAAALGDAMLHGFGVGEDDDVRAPLPVKRETLYGEGIVSVMRPNASAAFRNFEQEARQSAVWDSDQNATSSSGDNLASLYRPPFSLMFNGPFDKAKLEASSLDKWLLINLQSTAEFSSHMLNRDTWGNDAVAQLIRSKFIFW

SEQ ID NO: 222221 - protein, 459 aa, Zea mays
  Clone ID: MRT4577_134256C.1.pep
MAGDPPTAAEKETLVSSFIEITAGQTLETATQFLQMTSWHLEEALQLFYIDGEAAHTAAHSVDPSPAAAAPSALAAAAGVEEAMRFAPPPAAALGDAMSHGFGVREDDDVRAPLPVKRETLYGEGIVSVMRPNASAAFRNFEQEARQSAVWDSEQNVASSSGDNLASLYRPPFPLMFNGSFDKAKLEASSLDKWLLINLQSTEEFSSHMLNRDTWGNEAVAQLIRSNFIFWQVYYDTSEGRKVCTYYHLVSMPAILLIDPVTGQKIHAWNGMVHPDRLLEDLLPYLDKGPKGHHAAQPQKRPRKVDPEASTGKQGKIAVEDEDEELARAIAASLEVVIEASDASDDDMAEAEPEEENEPTLNTKPDYPPLPEEPTGSRDLLCRVAIRLPNNQRIQRNFLHTDPIKLLWSFCAPQVEDGEKRAFHFVQAIPGASQKLQFGSDLTFRKAGLANSMINLLWG

SEQ ID NO: 222222 - protein, 66 aa, Zea mays
  unsure (1)..(66): unsure at all Xaa locations
  Clone ID: MRT4577_134257C.1.pep
TRLVILHVSQLFAANKNKPPEVVNILVTNRNKXPGILRFFAGFKIDKEDEQFEADKEHVIKEISAL

SEQ ID NO: 222223 - protein, 48 aa, Zea mays
  Clone ID: MRT4577_134258C.1.pep
RARGLAFARGQHVRIPSHACLLALGLYRCYVRISSCVGFRYTPVASCP

SEQ ID NO: 222224 - protein, 76 aa, Zea mays
  Clone ID: MRT4577_134259C.1.pep
GFFFYIFCLPKLELCFLQPEVVRPTQRITNTKRDIFHTCNDSGHVLAWTSIHTHSLPTTGYYGSFKPCLHYISQNA

SEQ ID NO: 222225 - protein, 101 aa, Zea mays
  Clone ID: MRT4577_13425C.1.pep
VLGASMCAPDAPQIIHGLVRAVECGAHKAVSGRAVLIHPSNDEEVVTMRAVTRRFSLTSKPNVSLVSMWLVSWGNVTLDKSFGFITLVVFTPLELQRCILK

SEQ ID NO: 222226 - protein, 101 aa, Zea mays
  Clone ID: MRT4577_134260C.1.pep
LFFNIHEPCVLLFHIIWGSLSKEITGGSCCLCTTNSKTTIRGLPSVRRRRHSCGDFWEQGTSICGRRERLSRTERTCPPWPRCAPYRQTSARGMVYEVREH

SEQ ID NO: 222227 - protein, 53 aa, Zea mays
  Clone ID: MRT4577_134261C.1.pep
STFSRDRCLPWSGGNDPMQRLQFRSLAICPRPRGNESHMKEPPPVRCTLNRTL

SEQ ID NO: 222228 - protein, 97 aa, Zea mays
  Clone ID: MRT4577_134262C.1.pep
RNPPRGFIGPPRWPNRLYWPKHQFGGEGPIWFRGGRGPSKKPIVPPAGLFFLLSLFFPPPGRFWGAQSHFWERTLFFFNAQGKTVFGPKPQKLLFFP

SEQ ID NO: 222229 - protein, 64 aa, Zea mays
  Clone ID: MRT4577_134263C.1.pep
ARLPFTAAYYYKDDNTARARQAELSSSRHASMVVPSTTPVVRQETPPPSHDGIGIPTVDLSAPG

SEQ ID NO: 222230 - protein, 154 aa, Zea mays
  unsure (1)..(154): unsure at all Xaa locations
  Clone ID: MRT4577_134264C.1.pep
RXXRXRLTPPRAHADPLXXXXGXXXXXAXALRHGPXLAGLLGXXXXXGXXQXQXXXXXXXXRRXXLXGXPAGAXXXXXRXXXGLSXSXLGLXXGXAXSSSXAXXGXGGGGGTPXXGRGFLGAATTVGVWTSAVNIGGDEKXLMXATRXXXGAAS

SEQ ID NO: 222231 - protein, 90 aa, Zea mays
  Clone ID: MRT4577_134265C.1.pep
MGRAPCCGKVGLKKGRWTREEDEILARYIEEHGEGSWRSLPKNAGLLRCGKSCRLRWINYLRAGLKRGNITEEEEDVIVKLHATLGNRAT

SEQ ID NO: 222232 - protein, 56 aa, Zea mays
  Clone ID: MRT4577_134266C.1.pep
FEPPGTTHKPLNFLGEPKQEGIWLVFRTIHFTGWEDIYLITRSGGQYIQGDIIFSL

SEQ ID NO: 222233 - protein, 66 aa, Zea mays
  Clone ID: MRT4577_134267C.1.pep
IFYPHEAVWHFETNLRRLYQWYGATLSLFRASFSFPSYGLSSRVRWISCIVCIVGSLSFLSRIGGL

SEQ ID NO: 222234 - protein, 96 aa, Zea mays
  Clone ID: MRT4577_134268C.1.pep
MKASFVVSLLLSLGVSATPAVDTTTIEDGGFTYTGIDKPLLALRGLEARCDCFPCYSPHADCSPGKCQCAGDYGCWSCGGGRMQCQPGPGSGQCWT

SEQ ID NO: 222235 - protein, 89 aa, Zea mays
  Clone ID: MRT4577_134269C.1.pep
TSEAAGEVPAFAADVKVEGKATLATDVDREGGDTAVSDPLYANESAGMVGAEGHGDEPAEGLEAVNGEEEMLEAGARDLLTETEKNPVL

SEQ ID NO: 222236 - protein, 87 aa, Zea mays
  unsure (1)..(87): unsure at all Xaa locations
  Clone ID: MRT4577_13426C.1.pep
KAFILYEEXIPDSKTQISAIHLIFGTLHPINILRMENIYTLTHKTTRYSSKLLKNPXQFRAYYAFTHIFLTSNQFIIMDFSRFLFLL

SEQ ID NO: 222237 - protein, 217 aa, Zea mays
  Clone ID: MRT4577_134270C.1.pep
MPETIKYKQIPDTGDNHNEGYEKPVERQRPRITALISFLVGLFTMGLIAACFSIIMLPARPVARILPEIRSGSDPVTGLPISWSHGDCGNSPEEARAQGCRYSIVLHAWLPKSCLAEDDEEDTKDMYKGRNWPLQAASGQNLTMEEFSAGNYGHFVTTFDWHVTHCMYVWKRLHRVMLDPTKELDSYTANYHHTSHCVKMIRGDAWGDEGLWYQGFV

SEQ ID NO: 222238 - protein, 623 aa, Zea mays
  Clone ID: MRT4577_134271C.1.pep
MKNKCPSDVMVTSRPAGDDGVTNAGIQLDPLHLSSNVDTHHKPKVTDHHANIKEKATETDSDKDNIMEEAPQTVSEKKPSYSECVTLPDLDFFNFEKVKDINVFEVGQIWALYDNLDGMPRYYARIKHFDASNFEIHSTWLEYVAMDEDEKWTDEELPTACGNFRLGKGTDILEKEMFSHIATWTKGKKRKSYVIYPNKGEVWALYKGWSMEWCSDADNHRSYEYEVVEVVSSMSANGGATVVPLVRINGFVSLFATAKDKPSFVIPSSELLRFSHSIPFYRTKGNEKVGVPRGFLELDNACLPADLDAAFPSLTLDSYMSLGKNESSTFVDVTTDNTSCRMDLGDDQIAQKENDHPISTDNPKDMCPEQNTPLKETTNYAKESGDCSLQSSLSPIIYTYPDSDFHRFGEKRSCEKFERGQVWALYNNIDKLPKFYAWVRKVREEPFRVEVIWLEACPEQDQEKQWLEQDIPISCGTFKIRKWRAEYGTNDTFSHQVNARETGAKWALEILPQVGDIWAVYMNWAPDWVPCGADACEFAICEVVERTAEASTKLAFLAQVGGYRSVFRPDEQRGVLEVPATERTRFSHQIPYFRLAGEGGGGLRGFYELDPASVPDAFLYGDT

SEQ ID NO: 222239 - protein, 85 aa, Zea mays
  Clone ID: MRT4577_134272C.1.pep
KIKEKNIMEVFLPWEGRHSVQQSKLAFLPWEGRQHSSQLLAHYLHCSRKRATQTCHGDENKHESFPPVATTARDRRGRKTRMTRR

SEQ ID NO: 222240 - protein, 120 aa, Zea mays
  Clone ID: MRT4577_134273C.1.pep
SSTADGLSFFFFFVIFCFFFFLREELYKNQCITCLDGKDAETGGTDSAFQAPLDRRTIMPWSFQENGLWNLKREASFVRGHTICSVYCGRAGTNPTHSARGKAFTLFPLSSEGQNSAGNS

SEQ ID NO: 222241 - protein, 80 aa, Zea mays
  Clone ID: MRT4577_134274C.1.pep
HSALLLSHDIREICSIHLCLSIYVIRREDDTHYHARYDQNIWWKVKVRLGMERTGRWTCPGAVKGEFEIYVKWQAAGGCI

SEQ ID NO: 222242 - protein, 68 aa, Zea mays
  unsure (1)..(68): unsure at all Xaa locations
  Clone ID: MRT4577_134275C.1.pep
LKLHKGDITLWTDDCATDAIEKAANERKKGGGGADGAKHQAAGPELVQACRKEPEXKPGDRRPTGEAR

SEQ ID NO: 222243 - protein, 96 aa, Zea mays
  unsure (1)..(96): unsure at all Xaa locations
  Clone ID: MRT4577_134276C.1.pep
RTVCGTRGCRPRACKLTGVGPTTPACLXLAAAVAHSFALFVAVSVGAYISGGHVNPCVTFGAFVGGNIILFRWLLYWVSQLLWSDVACFLLPFSTG

SEQ ID NO: 222244 - protein, 110 aa, Zea mays
  Clone ID: MRT4577_134277C.1.pep
WLWVKMLFVMVTEQLDPKVSSSNQCLLMVKPKKPVDGFGLTSTPSITFLYNASFSFLFCPSRTFVYIVGDCLESSPLPLLLYKRHYRIYNPFVHDSMRHVNTLKLSRFIA

SEQ ID NO: 222245 - protein, 84 aa, Zea mays
  Clone ID: MRT4577_134278C.1.pep
CMRWGVIILPGRPCFLGGGRPKLFLDKMRPVNERHAYHENKPEVSWATWLCYVGEPKMHEAMLELPKEGESMILDFTLLPVAWV

SEQ ID NO: 222246 - protein, 109 aa, Zea mays
  Clone ID: MRT4577_134279C.1.pep
AFQTKHYLWAAFKAKEDKGDAIVEEEVEKGNCVSNQPDKVQSDNASFSSNHGLDRPSMEAPPQSSSSVFGIVVRQAPNLEPEVKRFIQEMERKGALVTVMRGEAIGGGP

SEQ ID NO: 222247 - protein, 161 aa, Zea mays
  unsure (1)..(161): unsure at all Xaa locations
  Clone ID: MRT4577_13427C.1.pep
FFHIYSSRPAAPLPASPPSIASSPVPPPPPRATLSRSPTTSSPDAVSPGSRSSRHPKSKGSSTSGLPRSPTSSSPSWRASTSPAPTSQPSSPMIPDSFAPTWGRPCLSASPSSAASACQATRSARXSSPPRSGSAAPRSSAILNSGLGSSAPSTSSCGSSR

SEQ ID NO: 222248 - protein, 67 aa, Zea mays
  unsure (1)..(67): unsure at all Xaa locations
  Clone ID: MRT4577_134281C.1.pep
FSSSWHSVSVYFGSSSGRLYECCSFSYCSXVAPSICMSPTQYLLSSLQRHEKPQPADHRAPSGGIGL

SEQ ID NO: 222249 - protein, 212 aa, Zea mays
  Clone ID: MRT4577_134282C.1.pep
EPHRPGRVLDADRRLGRRPRPFPAAEDGREEALHVVGDLLLDVRRLEEDARRVPCTRRYRLSLMSRMEGSPMSSVTERGCQSTKTRACLCTARRLTFACGCTTVCRTEQMRPEHRASCHRRRSVDDLRRRSSHGRSSSLPHGPEIGGETGPPPVPLSLGAARSVHKHSHAGGPRNKKPGGPPRLRRPRHQLQGGGRHSWLCLCFCHPCRVRH

SEQ ID NO: 222250 - protein, 93 aa, Zea mays
  Clone ID: MRT4577_134283C.1.pep
SAPQEGDWAPFNKSPPPPPCIGFFQNSPLGCFRPRLGEQSPPSNSKKQRAFGFGFLSAPQEQMPRPPLFIYLLCRIPPPQHAFYFRGAGFFSS

SEQ ID NO: 222251 - protein, 68 aa, Zea mays
  Clone ID: MRT4577_134284C.1.pep
TEQPVCTRGDWFSLPYKVPNIKSLTLVTIDFAGAETFHKDKRPHISLTLCLDFGAIGRGKGSKWFDAP

SEQ ID NO: 222252 - protein, 73 aa, Zea mays
  Clone ID: MRT4577_134285C.1.pep
DRYLLMTGQYKTYYCIIDTTSTEYYNPVKRQKEYNTYHWRTIYCPNGTHSSITRSNTCNDEQITYPGHVTVLS

SEQ ID NO: 222253 - protein, 151 aa, Zea mays
  Clone ID: MRT4577_134286C.1.pep
HVWPSVHGRIITALIVSQLLLLGLLSTKGAGQSTPVLLVLPVVTFYFHKYCNNRYKPTFVKCPLQEAMKKDTLERAREPGFDLKGYLMNAYIHPVFKGDGDDDKFSVADEPEAEQVLVATKRQSRRNTPVPSKYNGSESPSLPEIVNDQRL

SEQ ID NO: 222254 - protein, 768 aa, Zea mays
  Clone ID: MRT4577_134287C.1.pep
MATIQDIGLSAAINIMGAVLFLVAFAFLRLQPINDRVYFPKWYLKGARESPSHGGTFVRKFVNLDMRSYLKFLSWVPAALKMPEDELISHAGLDSAVYLRIYLVGLKIFAPISVLAFIVLVPVNWTNDTLQFSKLEHSNVDKLSISNIPVGSKRFIAHLAMAYVFTFWTCYVLLREYEVVAKMRLRFLSSEKRRPDQFTVLVRNIPPDPDESISELVEHFFLVNHPGHYLTHQVVYNANKLAKLVKEKAKMHNWLDYYQLRFERNASKRPTTKTGFLGCFGTKVDAIEYYTSEIERIENEEAEEREKIVKDPKSIVPAAFVSFRSRWGAAVCAQTQQTSNPTVWLTEWAPEPRDVYWDNLSIPFVSLTVRRLIIAVAFFFLNFFYVFPIAFVQSLANLEGIEKAAPFLKPLIEEHTIKSFIQGFLPGIALKIFLILLPSILMFMSKVEGLTSISSLERRSASKYYIFIFFNVFLASIIAGSALEQLKSYIHQSANEIPRTIGEAIPMKATFFITYTMVDGWAGVAGEILRLKPLVIFHLKNFFLVKTEKDREEAMDPGSIGFDSSEPQIQLYFLLGLVYAAVTPFMLPFVLVFFGFAYVVYRHQIINVYNQEYESAAAFWPSVHGRIITALIVSQLLLLGLLSTKGAGQSTPVLLVLPVVTFYFHKYCNNRYKPTFVKCPLQEAMKKDTLERAREPGFDLKGYLMNAYIHPVFKGDGDDDKFSVADEPEAEQVLVATKRQSRRNTPVPSKYNGSESPSLPEIVNDQRL

SEQ ID NO: 222255 - protein, 68 aa, Zea mays
  Clone ID: MRT4577_134288C.1.pep
YSCNIREHPLSRSCFIYATAGMHAVDASGDKTPVNLLVRMHACARSIGAMVISSGGSVVGLDLPALVV

SEQ ID NO: 222256 - protein, 58 aa, Zea mays
  Clone ID: MRT4577_134289C.1.pep
CKVKRCLYKSVLRSGQDMLLHGNRYGACKCCVCSVSLKEWDGMELVACCSESDSNVIL

SEQ ID NO: 222257 - protein, 63 aa, Zea mays
  Clone ID: MRT4577_13428C.1.pep
SRFKRIQRQIHIQVRNQVKKVVISIHTLIRLFSCIRTCEKPHLYLHPQRTLHLLTYYPNPGIE

SEQ ID NO: 222258 - protein, 48 aa, Zea mays
  Clone ID: MRT4577_134290C.1.pep
RCSNPNRPQTYIMVSYSAITRTSFPSSMSAPPTDPTYTDSLSAFPNSP

SEQ ID NO: 222259 - protein, 111 aa, Zea mays
  unsure (1)..(111): unsure at all Xaa locations
  Clone ID: MRT4577_134291C.1.pep
IGSSGSISFCGTNHQQQGTFLVPHPRRGGGGSMFVDGSNPPPINIFTRWRGTSHVTCPRHVLKIFFYPPSPFFLTFSDKCSPPPLXPIFKQIHPLPPAXFTASTKQLLFYP

SEQ ID NO: 222260 - protein, 118 aa, Zea mays
  Clone ID: MRT4577_134292C.1.pep
ASRPSSNPWRSAPTLHGPGRQHRVCGRRPDSRHSLLGHGNWPPRPCFRLPVLPWSPAPPRTCHVRCRSLISYLPWTAPRRPITAARRGTLVFVVDFRSSPTFVSPSSFGRLASMLAPT

SEQ ID NO: 222261 - protein, 160 aa, Zea mays
  unsure (1)..(160): unsure at all Xaa locations
  Clone ID: MRT4577_134293C.1.pep
VPSKARAFFSKVLISEVGNGYSTLFWSDNWXQGKSISTIAPSLHSIIPKRIAKSRTVHEALLNRRWISDIRGSLTVGVLADYLKLWDCLSEIELHPLTEDRHIFSVAPDGKYSAKTAYKGLFLGSCSFGHYKRVWKTWAPAKCRFFLWLVAHNRCWTADR

SEQ ID NO: 222262 - protein, 103 aa, Zea mays
  unsure (1)..(103): unsure at all Xaa locations
  Clone ID: MRT4577_134294C.1.pep
RPLFXGLVGESGHFAREYLLRIGSRGWGSGXLLILIPIYLSRSRIRILSPRYLMSPIYIISPRGPSPMRRSYSRSPLASPSRSLSRSPALAPPPSKNNNKSPP

SEQ ID NO: 222263 - protein, 73 aa, Zea mays
  Clone ID: MRT4577_134295C.1.pep
SPTRAGAFNFKKNFFLKNPPKADFQQFATTKSAGRFFMKYPGKKRFPCRMGGPLPPRGRPGGRPLGRHLGPPR

SEQ ID NO: 222264 - protein, 92 aa, Zea mays
  unsure (1)..(92): unsure at all Xaa locations
  Clone ID: MRT4577_134296C.1.pep
SVFLIMSIVNGNGSQIQSTRKGTVTKRATQGVLQDELSDIKTGTVLVTFLASCRHASGREIGSVLVALGVAFFGGIICFIVSXLVVIVRVRG

SEQ ID NO: 222265 - protein, 100 aa, Zea mays
  Clone ID: MRT4577_134297C.1.pep
PTRPLVLDREWPFFFFFFFSCFGFFFLASGGPAHFAAQYENKSSRILIELDDQKVAWTIWKKIQLESTVLDSLILTLPNAFQSTILVLDVSIYVHSLIIL

SEQ ID NO: 222266 - protein, 61 aa, Zea mays
  Clone ID: MRT4577_134298C.1.pep
TVLLEGFGSTKGLLERGEFRIFKGDPPISQKVHKKNEKPRVQQNFFIGRVQRNLFHPREGG

SEQ ID NO: 222267 - protein, 238 aa, Zea mays
  unsure (1)..(238): unsure at all Xaa locations
  Clone ID: MRT4577_134299C.1.pep
ASSAPSLAFAKLYXXVNNLXSGPHXRRAGRLGSLQVLQLGYNQLTGSIPTQAGPPKQXTVLALQSNQLSGAIPASLGDLPALARLDLSFNQLFGSIPXKLAEIPRLATLDLRNXTLSGSVPSGLKKLNEGFLYENNPELCGAQFDSLKACPNDGNDDSRTPRKPESTSVKPQQIQKTADLNQNCGDGGCSKPSTLSTGAVVAGTVVIVAGAAACGLSAFSWHRRQKQKVGSSSVEHLE

SEQ ID NO: 222268 - protein, 55 aa, Zea mays
  Clone ID: MRT4577_13429C.1.pep
YPFLVICSLQIKKATKRKKNIVDIYLYLKFMFHELQLQDSGILHAILHQIWDDGS

SEQ ID NO: 222269 - protein, 73 aa, Zea mays
  Clone ID: MRT4577_1342C.1.pep
VFFIHPDIKAFLVVSICNPNGTPMDIECALSSVNQLGWYWYWYQTGAHDSDAPPLSSLAASSFPMTQAWLAIS

SEQ ID NO: 222270 - protein, 53 aa, Zea mays
  Clone ID: MRT4577_134300C.1.pep
PARQARFLGGFPDSLGPPRVSPGLGSFWIALLPKFNGSLGIKISPRLNMKPNM

SEQ ID NO: 222271 - protein, 97 aa, Zea mays
  Clone ID: MRT4577_134301C.1.pep
ASEGTLSRPAPPTGSVGFRSQLFFLEISIQRVTTLFLKQEADKEIHPFLSLSPPHWPSILFSQETGLIPPESLLAHKLKFIQISMKTILQDIKKFFK

SEQ ID NO: 222272 - protein, 224 aa, Zea mays
  Clone ID: MRT4577_134302C.1.pep
MASLFGARRRRSPEYDGEDDRSGGGRAKRRRLSPEEAAASPAEPGAATGTSHGWLSGFVSGAKRAISSVLLSSSPEETGSGEDGEVEEEDDDVYEEGIDLNENEDIHDIHGEIVPYSESKLAIEQMVMKETFSRDECDRMVELIKSRVRDSTPETHEYGKQEEIPSRNAGIAHDFTGTCRSLSRDRNFTESVPFSSMRMRPGHSSPGFPLQASPQLCTAAVREA

SEQ ID NO: 222273 - protein, 58 aa, Zea mays
  Clone ID: MRT4577_134303C.1.pep
HYWQKKKTLMDVQSNPKTRAPCDCLSESLTLSSSTLRTYPMELFKTRVTILKDVYQNV

SEQ ID NO: 222274 - protein, 602 aa, Zea mays
  Clone ID: MRT4577_134304C.1.pep
RPGYLYDRVRRLFGCFAPLTGWKHHLSSLSDFLENGYSQYLQHLQDSQEGGTPSFFSYARKRFAVIYMELRRCFNDLLLHVPKSSILEVNYNSILLLLKMLEEFNRTMCRYSGDEIRKVFLYSNDEPDQTNSSVVTLGKMRIKCLEKLSTLLSCLKLPLTSSKPTIRDFCIKSASIVFCTVSSSTKITANKKVEFLVVDEAAQLKECETLIPLRLWTLKHAVLIGDECQLPATVKSKVCTDALFGRSLFERLSSLGHEKHLLNMQYRMHPSISIFPNTSFYEGRISDATNVMEKEHRRMYLPGSMFGPYSFINIEDGREERDELGHSKRNFVEAAVIEEILYRLRRACFKTKRKVTVGVICPYNAQVVAIQGKIEKMRFDPLQVKTNSVDGFQGGEEDIIILSTVRSNSVGKVGFLSNAQRANVCLTRARHCLWILGNATTLASSGSIWSDLVRDAKDRRCFFNASSDNVISRVIAKQRRDLDRVNVEKSIHISSSKNCRVWVETRSPNDLNEQGTSSTSVSHYAGIPSSDIVVVSEFQRPSNKNEDVEDITVIPNKENDKDINAMPVIPDKGNVVDGNHILAIPCAMLSNLARWCIRSFRS

SEQ ID NO: 222275 - protein, 120 aa, Zea mays
  unsure (1)..(120): unsure at all Xaa locations
  Clone ID: MRT4577_134305C.1.pep
GGFPSPPPKRPGKGIPPXGKNKKGGAPPFCRGGPPPXRPGVKPPGCVGRASFPGGGGAPPSFFSPPRGIIPPGFNGSPPPPPWRGAQKLKKGSLPRRGSTPQKIFQLVILTGRKIVFFGG

SEQ ID NO: 222276 - protein, 163 aa, Zea mays
  Clone ID: MRT4577_134306C.1.pep
PVAASSTPPDPWRSPPCPSIPPPRWAPGFPTRPSSAGWRVCRRTGTRPPPSAAPRTAKPWRCPSGSSTRRASPTSPSTAPASSTSTTPGSSAPRTPSSSSASSSGAPPASSSTRPGSSPCGCSQTPTMPTSAGSSLASCLVVTPTAGTLPWPSSTSSGISKTM

SEQ ID NO: 222277 - protein, 49 aa, Zea mays
  unsure (1)..(49): unsure at all Xaa locations
  Clone ID: MRT4577_134307C.1.pep
MAGFMIHKYQGVGCALPTTSDQHPKIYRLKLWANYEVXAKSMYWFFLWK

SEQ ID NO: 222278 - protein, 86 aa, Zea mays
  Clone ID: MRT4577_134308C.1.pep
IPNNSNFLRIFSNPIQSMCIGNNQTRPKRFTGCGCGWLALVQFPGTSNGVVGGWLLFKASCHHPQGYKTCFLSKVLSEFFSSRKPI

SEQ ID NO: 222279 - protein, 104 aa, Zea mays
  Clone ID: MRT4577_134309C.1.pep
LPRCKCKIQHAVTAMRPPPPPQALSPEHSTSTKPSSAAKRAFTSRTALSTKGHEAPPERKKRKTPPPDSGGGEALDATEPASKKKLVLFGRACRLGGGARGPPP

SEQ ID NO: 222280 - protein, 77 aa, Zea mays
  Clone ID: MRT4577_13430C.1.pep
RPPASLSTALHSRNLQSSSTLRPLQTSRGTTHTMAPRKLAADEALAATLLLATTSNTKLGPLPLGPPAPPDYPLRAP

SEQ ID NO: 222281 - protein, 116 aa, Zea mays
  Clone ID: MRT4577_134310C.1.pep
APGRAEWLGGNRARRAPALGGLPRNSADLSASETPGFLRAWGFCNPPLGPGRDPFMYRGDPGFCSLECRHQPIPIEEWKEKWALAPPPTAPGSDPVVPLPPNGGGSDKPGTLPPAS

SEQ ID NO: 222282 - protein, 188 aa, Zea mays
  Clone ID: MRT4577_134311C.1.pep
RYFFDFNLNHHTLYCSEHQTRLFPGNHRSSSTQPYAACPGCKAYQPRPNQTPTRHLLPRPTALASTPAVLALVSPRLQLASRALPARPAISSPPWPLHQPSPSPCQLQARRASFPWPSAASPMVSSLQCPKVSNGRPSLIFLPKLSSPSPSLLPGFSPRQQPWHLLPLLALPLCPASSLFFRGAVALL

SEQ ID NO: 222283 - protein, 119 aa, Zea mays
  Clone ID: MRT4577_134312C.1.pep
FTPSAEDLPGAFEHIEGEINDLDEVIAGHGDFCSLAASRGTAVAFLKSGCEHGKIVNRPNFSLSPADLDNIPSLARSIANRFIKLVWTKGGRSKAGDEARSHLKLVTKSYLMLTFSFEF

SEQ ID NO: 222284 - protein, 333 aa, Zea mays
  unsure (1)..(333): unsure at all Xaa locations
  Clone ID: MRT4577_134313C.1.pep
MARVRSTARVDREGDETEAVETIPISEAMKRSGLVTSEDVPAAGAEQVDVEETDSEDDYSSAVPSKPSHLDFGKSTVSKGDLPKMLKLGYFNEEKKELIRFGGEETTPKPGKDEIVVFKSFFKAGLRFPLNKMIADVLKKFGIHFHQLTPNAIVRLSVYIWALRSQGVEPFSEGFCRVHELHYQTKARKDGLHENFGCYNFAYRNTTKFPVISYRSKWPAGWKSEWFYVKVDDDKEKLVQSPLELIFGETRPQCNMTPEGPTQTALAEFRIIAEHIGTRDLVQEFLAFKVFPTMKEWAMPKLERXELIRLPYHYKFKRHFKVPCQEWLDTIEV

SEQ ID NO: 222285 - protein, 80 aa, Zea mays
  Clone ID: MRT4577_134314C.1.pep
MLHFGSGARQSAHILHRPFVMRSVTAAALPTTGLSPHDVVLVISSTHNCGTNMVNAQNLVQLRLVECMRCHSDRLPPGLP

SEQ ID NO: 222286 - protein, 114 aa, Zea mays
  Clone ID: MRT4577_134315C.1.pep
IAHASAHASAHASAHASAHASATNEPGALMNLVEESTADDADDDDTKDCKGLFKNLKFYLSREVPRESLLFIIPAFGGTVSWEGEGAPFKEIDEDITHQVDSICNNLLHQSLTI

SEQ ID NO: 222287 - protein, 1175 aa, Zea mays
  unsure (1)..(1175): unsure at all Xaa locations
  Clone ID: MRT4577_134316C.1.pep
MDPKGKGMVINDKEKETLSIDELKRDKPTDSCSNNKRKDGKKKRDAYTIGRHLSIKDGLGFQKGTKKLTSQRASDLIKEKGKAPLASSSHSFHDKKKCVYLYAHVKNASDIAHHDGCYDHTVLPIRHGAVFDSHVMFASYSSSYVHGRSRTRRCVHHVVSHAPRNASNGPTMLYRTYDPSCVLICKNDKVVARNLGPKCKRGKTCIWFPKSYVTNLVGPNKSWVYASGDTSWIIDSGCTTHLLRKEKGFPRYDYLLKWESWQGQRFGRSDGSLAFKGVLDDKLYLVDFTKENADLDACLIAKTNLGWLSHHRLSHVGIKNLHKLLKGEHVLGLTDVCFEKDRPCAACQAGKRDKSETQSTLKHFLRRAQNEFELKVGKADPTVFTKTCNCDMFVCQIYVDDIIFGSTNQKHCEEFSSIMMQKFKMSMMGELNNFLGFHVKQLKEGTFISQTKYTHDLFKRFGMKDAKPAKTPIGTDRHLDLDKGGPWCLGALRNKHLLPYPLLRPNMLSQTNMTNEQRYMKQIELEEDIVQIYMVQVKSHSRSLIIVLKRSVAFDSASSQEEKLRENQKSQQQKFQEIHNQMARVRFTARVDREGDETEATETVPISEAMKRSGLVTSEDVPTAEAEQADAEETESEDDYSSAVPSKPSHLDFGKSTISEGDLAKMLKLGYLSEEKKELTKARGDGLHENFGCYNFAYRKTTKFPVISYRSKWPAGWKSEWFYVKVDDDKEKLVQSPLELIFGETRPPCNMTPEGPTQIALAEFRVIAEHIGTRDLVQEFLAFKVFPTMKEWAMPKLEGKKKEVELIRLPYHYKFKIHFKVPCQEWLDTIEXEGTSATPSATEVEEILKXGQELTKAEKEELKEYAISCGYRPGALLFGGIDDERLGCVRDQTGAKVIGTLSKSIGFPKLEADISRYRRQHIVGSLFYSNFKSMLLSKALKMQQDLEDKKHEVIIENLENTIKKQSVAIKKKDFELQTTEGLLAEAEAKITELNSKLLSQSANFEQEKLKLNAKLEAEVQKSSELKKSLTSLQNKCLEFSYRCIQQLKQVFYFVGASSEKFTPSAEDLPSAFEHIEGEIDDLDVVIAGHGYFCALVASRGTTVAFLKSGCEHRKVFNRPNFSLSPADLDNIPNLARSIANRFIKLVWTKGGRSKAGDEARSHLKPDDEAEAEATE

SEQ ID NO: 222288 - protein, 74 aa, Zea mays
  unsure (1)..(74): unsure at all Xaa locations
  Clone ID: MRT4577_134317C.1.pep
MANKGPSYGMSREVQSKIEKKYDEELEERLVEWIIVQCGPDVGRPDRGRLGFQVWLKNGVILSKLVNSLXPDGS

SEQ ID NO: 222289 - protein, 127 aa, Zea mays
  Clone ID: MRT4577_134318C.1.pep
VIFDEVHYVNDAERGVVWEEVIIMLPKHINIVLLSATVPNTVEFADWIGRTKQKKIRVTSTNKRPVPLEHCLFYSGEVYKICERDMFLAQGFKEAKDAFKKKNLNKFGVKPGPKSGTPAVRAGTQGK

SEQ ID NO: 222290 - protein, 41 aa, Zea mays
  Clone ID: MRT4577_134319C.1.pep
LFGHDASRRHIRTMPAMFWPKRTPKIHYSTLYHHANTCRMT

SEQ ID NO: 222291 - protein, 109 aa, Zea mays
  unsure (1)..(109): unsure at all Xaa locations
  Clone ID: MRT4577_13431C.1.pep
KIAPHPVPIGGVAPALVNAPPDQQRFMLGENLYPFVXHLEREQAPKVPGMLLEMDQPEVFPLLESPNALKPKVAEPMEVLRFAQHFQQSNVFFEHQRGNLSLNEGVVPS

SEQ ID NO: 222292 - protein, 257 aa, Zea mays
  unsure (1)..(257): unsure at all Xaa locations
  Clone ID: MRT4577_134320C.1.pep
MAPAFSAQVPALRRGALRVRWVTAALFSSGILAGNKPILVRDFVRSALYDPNHGYFSKRAGPVGVLDASIRFNQLEGRSAYIQHLDKLYKKHDIAWFTPVELFKPWYAYTIAASILRTANLSVPLKIYEIGGGSGTCAKCILDYMMLNAPPKVYNDMKYIXEISSSLAEKQLETVGEVQSHLSKFTVEHRDAINRPGWGRTDPHPCWVLMLEVLDNLPHDLVYSPDQVSPWMXEVWIEKVKGSSQASEVYXPLQDPL

SEQ ID NO: 222293 - protein, 131 aa, Zea mays
  Clone ID: MRT4577_134321C.1.pep
LITDKVIDNMVNGGGQMQRRCQTRVQPRWRQPTGRKKRWRRMKHGRTVLGWETRQWMDEGHGVRAIDRSARAQTFSPCRCASATDDAGLRQARSPRRSGARRRRVGEKTGALASWAVAARQRHVGRAPTEP

SEQ ID NO: 222294 - protein, 476 aa, Zea mays
  unsure (1)..(476): unsure at all Xaa locations
  Clone ID: MRT4577_134322C.1.pep
MAPAFSAQVPALRRGALRVRWVTAALFSSGILAGNKPILVRDFVRSALYDPNHGYFSKRAGPVGVLDASIRFNQLEGRSAYIQHLDKLYKKHDIAWFTPVELFKXFSALAVEENEVLSVWSLMHRFPSMVQPWYAYTIAASILRTANLSVPLKIYEIGGGSGTCAKCILDYMMLNAPPKVYNDMKYIXEISSSLAEKQLETVGEVQSHLSKFTVEHRDAINRPGWGRTDPHPCWVLMLEVLDNLPHDLVYSPDQVSPWMGVWIEKVXSSQASEVYKPLQDPLISRCVDIIGMNEDKASVSEKLTFAAKGVLSKVFPKPRRAWLPTGCLKLMDTLHQALPSMSLIASDFSYLPDVSIPGDRAPLVSSKKDGKTSDHRNYFDAQGDADIFFPTDFRLLEQIDHNCAGFSKEQKNPGAFKPVKKRRTIILDTAAFMEEFGMPLKTRTKDGYNPLLDDFKNTKFYLSVPTHNVPTHSRRN

SEQ ID NO: 222295 - protein, 279 aa, Zea mays
  unsure (1)..(279): unsure at all Xaa locations
  Clone ID: MRT4577_134323C.1.pep
MTMMAPHPQPLPLAQPPAFGDTTLTKVFVGGLAWETHEGALRGHFERYGDILEAVIISDKLTGRSKGYGFVTFKEADAAKKACEDATPVINGRRANCNLASLGAKPRPQPLQHVLRPSPPHAHALPSPHQPTPAIAVGSRSVSPVPWYYHPSTTRPPPPPAAHQQYHGVLPFYPAAATYGYSPNYVTDLSYNTKVGQXRQLPARRPGPTYSYRGTWRTRRRQLRAAXPVYPFYHYPYHASHSQGLGVPAAHFLPPVSAAAVVSSKPTVVATPKAVEWSG

SEQ ID NO: 222296 - protein, 161 aa, Zea mays
  Clone ID: MRT4577_134324C.1.pep
EKYFIITWFIFMTLSNGWWGCTYNFLLKEEQEECSSISNARKEQENEDLSPLSVLEPTTSLSESCWSSECSDSSGGGKVYPSLFDVKNGQGNFLINPASVDIEAKTTDSASSASADTSDVSDITQCSKRSRHTELEYSSDVLRSVNLTHSDLGSLRCNQDR

SEQ ID NO: 222297 - protein, 79 aa, Zea mays
  unsure (1)..(79): unsure at all Xaa locations
  Clone ID: MRT4577_134325C.1.pep
YTKVDRQGLEELLTSMGQIQARNDRSYSLSERTGLARPMVYLPGLAMAKGGGGPFLISSAXPLXLALSMSPYSPVVFPY

SEQ ID NO: 222298 - protein, 259 aa, Zea mays
  unsure (1)..(259): unsure at all Xaa locations
  Clone ID: MRT4577_134326C.1.pep
MTMMAPHPQPLPLPQPPAPFGDTTLTKVFVGGLAWETHKDALREHFERYGDILEAVIISDKLTGRSKGYGFVSPPFPLPFPAPSSACLLLLLFFFLHLDERGRPICETSPTXCLHARQVTFKEADAAKKACEDATPVINGRRANCNLAALGAKPRPPPHILRPSPPATPAPHAPALPSQHQPTPAIAVGSRGVSPVPWYYHPSTTPPPPAAHHYAHGAHQQYHGVLPFYPAAAATYGYVHARRSQLRIPIPRPRQGTFR

SEQ ID NO: 222299 - protein, 162 aa, Zea mays
  unsure (1)..(162): unsure at all Xaa locations
  Clone ID: MRT4577_134327C.1.pep
RAGRGNPRCTLFVFLLSEFPNRTLLFLDLPTPFHPAHGCPHAPALHGGDAARGGTTNAGNIAGNWGQKGKEGSLADACNSGIYAYVNIAILTTFGNGQTPELNQHEHCDPGSGSFIGQSSDIQTXQSMGIKVLNSIGEDSGRYGLSSTDDDKKVXEYMRDNF

SEQ ID NO: 222300 - protein, 83 aa, Zea mays
  unsure (1)..(83): unsure at all Xaa locations
  Clone ID: MRT4577_134328C.1.pep
RXQHAARWEXSFXAXRRCASAGRAEPXARALGGRERPNVGRXXXRAEAPVAXLDSXLEAFSXNPSXGXFAPXAFQPSAMTNCV

SEQ ID NO: 222301 - protein, 115 aa, Zea mays
  unsure (1)..(115): unsure at all Xaa locations
  Clone ID: MRT4577_134329C.1.pep
MEAIHCKRTLPLWVTIVSATTACAHQRPTRLGNSDMHSSTDPMIGSAVIASGLTLFEGRFYVAVASKLCSAHXNGFLAAIRNEWXYWLIAPWTLPVIRVAVYLHWLXSXKMFKHA

SEQ ID NO: 222302 - protein, 584 aa, Zea mays
  unsure (1)..(584): unsure at all Xaa locations
  Clone ID: MRT4577_13432C.1.pep
GGEGGDLRDRFQHSIAPGGLAGDRRGVVPASGFSFSSQXFQFCQVIKENKDLDLPAHKVMVATVRCEETGNEXVGSFIADEEWQQFEEAVQHDFVTGFGKKLSSLLDRCLSEYDMEAIYFDEGVRSSKRQQLESKLLQLVNPAYQSLLGHLRTRTLEAFNESFDKALEKEGFAAAARNCTQTFLEKFDKGSEDAAIQQVNWDTSKVKDKLRRDIEAHVASVRAAKLSELCAKYEAQLTKALAEPVESLLDSASEDTWPAIRKLLQRETKTAVSGLQSAVSAFELDEATEKELLVKLEKHGRSVVESKAKEEAGRVLIRMKDRFSMLFSRDADSMPRVWTGKEDIKAITKTARSASMKLLSTMAAIRLEEDGDNIENTLSVALVDTSKPGTTDRSIQLTDPLASSSWERVAEEKTLITPVQCKNLWRQFKAETEYTVTQALAARKGYLRSNLXLPLCSAKICGGNSKLKLNIQSLXIAAQEANKRNNNWLPPPWAXLQFGREFQHGFLPAILSLSTKFVPTVMNILKRLADEGQAPAAAPERQREMELQPKPTRNGSSYTNATSAGSSSVTTSEIGPEYSSPVAQ

SEQ ID NO: 222303 - protein, 56 aa, Zea mays
  Clone ID: MRT4577_134330C.1.pep
TLNYNGANEHYCNIKPPLFFIIHLNTFYKGYCEGIILSIYFEVMFKKTLTSNQIVN

SEQ ID NO: 222304 - protein, 93 aa, Zea mays
  Clone ID: MRT4577_134331C.1.pep
SNAVFYGTHMCSIQMDHQVAGMFFRQIIPFFLFCCSIESNWIGNAHANYTTRTLDHVVFGQIILFFRSKFLPLSLTGFKCDIRNHQGTNHGGI

SEQ ID NO: 222305 - protein, 221 aa, Zea mays
  unsure (1)..(221): unsure at all Xaa locations
  Clone ID: MRT4577_134333C.1.pep
GCHFLNWAFLMFSTHIGYYSCTIVINDHTFRTCIXHAASCICGTAHRKASTCLGTLLQTIYTKIXDPYQEXLKPSTGLINXLGLYXSFTQLTHRYISQXHKXTALETMRAPADPGLHLLPTRCTTVRGIGITCNYIXQGLESKAXLETTXISHGALXSFIYLTNNLPRTVTATIXTCALLLTTMSSITXYFKDIIGXRHQRSCGFEHLYYIVMAFITSKLL

SEQ ID NO: 222306 - protein, 120 aa, Zea mays
  Clone ID: MRT4577_134334C.1.pep
STEKAGAGQLAMIQMNMKQPLVLPGHRGNVVGSRLASSPSAAAASRRRGVVSSPRSRLQRHMRLPRISCSATEEASGARVGRHRGEDADGDGLGAGGAGIGQMYFQRALDDAGDLFARRC

SEQ ID NO: 222307 - protein, 51 aa, Zea mays
  unsure (1)..(51): unsure at all Xaa locations
  Clone ID: MRT4577_134335C.1.pep
MPSHKRXRIKKKLAKKMRQKRPIPYWIRMRTENTIRXNAKRWHWRRTILGF

SEQ ID NO: 222308 - protein, 85 aa, Zea mays
  Clone ID: MRT4577_134336C.1.pep
MGGEMSRGSGAGFDRFFTMLCLEGGVYQVEDAFKAVETAVGTWIGVCGSVSACVDAQNKVLDQLMVQNMVTHLLPITLFVSLLAT

SEQ ID NO: 222309 - protein, 74 aa, Zea mays
  Clone ID: MRT4577_134337C.1.pep
KRKQNTQEPKPWSEAQKRNVKWHEEIEEYLVEISCSHGPYHQRSPSCACPTHQLAGCHLPLASSAGKGTGGVEP

SEQ ID NO: 222310 - protein, 222 aa, Zea mays
  unsure (1)..(222): unsure at all Xaa locations
  Clone ID: MRT4577_134338C.1.pep
MAVNVRTMWSSMGAQVAMVVTLMFLVSGAWCGPPKVPPGENITATYGKDXLDAKATXYGKPTAAGPDDDDGGXSYXDGNNPPFNSMGECANILIFXDVLGCAFCFQIKCDKSAKCSDKPVMAHITDMNYEPIAAHHFDFIRHGVFAPCAIIVEEDKLAEGXIIDLQFPRVKCQYDSKVTFHLDKECGPYYLLLLVQYLHCNRDIGPVNFIDKASDTYEPLNY

SEQ ID NO: 222311 - protein, 198 aa, Zea mays
  Clone ID: MRT4577_134339C.1.pep
MEADTGCRLEVDDVLSFADDLVVVLRRSDDADANAQVIAGAGLLRTACRSESDHLHLQLKDYQQKICSCKDKTDKAKAETIAADELSVLQNKMEENLQEDKQLREELRATHNDLENLDHQRASIQDRKNAIKKKDENMRKATYKLSMCVSVTNIIPNLEDRDKISSYTVDKNGKKIQKFEFEKTTPPVEICNTLWKTI

SEQ ID NO: 222312 - protein, 451 aa, Zea mays
  Clone ID: MRT4577_13433C.1.pep
MGDACFSTQLIDGDGVFNVSGLENFMKDVRLGECGLSYAVVSIMGPQSSGKSTLLNHLFGTNFREMDAFRGRSQTTKGIWLAKAQNIEPCTLVMDLEGTDGRERGEDDTAFEKQSALFALAVSDIVLINMWCHDIGREQAANKPLLKTVFQVMMRLFSPRKTTLLFVIRDKSRTPLENLEPILREDIQKIWDAVPKPHAHKETPLSEFFDVQVVALSSYEEKEELFKQQVSDLRDRFQYSIAPGGLAGDRRGVVPASGFSFSSQQFWKVIKENKDLDLPAHKVMVATVRCEEIGNEKVGSFTSDEEWQQLEEAVQHDFVPGFGKNISSLLDRCLSEYDMEAIYFDEGVRSSKRQQLESKLLQLVNPAYQSLLGHLRTRTLEAFNESFDKALEKEGFAAAARNCTQTFLEKFDKGSEDAAIQQVNWDTSKVKDKLRRDIEAHVASVRAAKLS

SEQ ID NO: 222313 - protein, 64 aa, Zea mays
  Clone ID: MRT4577_134340C.1.pep
GPHPTRLILMDCLPHDKHQYIHFLRYCGGPVQRRQPQMETRPGLRRTPCLQQRRRLRMGIQANL

SEQ ID NO: 222314 - protein, 82 aa, Zea mays
  Clone ID: MRT4577_134341C.1.pep
KVWLAILFHWIIWLFLKIFLPKQSHFFLKLYWCSLRSKAGILLFCKIAKMHTFGTFPKLCLRATKKLMLIYFHFFKRRKFFG

SEQ ID NO: 222315 - protein, 79 aa, Zea mays
  Clone ID: MRT4577_134342C.1.pep
FQRAIFLCHRCRSSWACVRGGKCPGTCSVDSCPEVQLLCMNTRLDLHHLFSRSLSGGKGTLSTGCPGEISGTRSKREQC

SEQ ID NO: 222316 - protein, 49 aa, Zea mays
  Clone ID: MRT4577_134343C.1.pep
PVVHSGFVFFWFVNNGPSLLIMTRVLLWPQPRENICCFPYKVVSNVGSF

SEQ ID NO: 222317 - protein, 109 aa, Zea mays
  Clone ID: MRT4577_134344C.1.pep
ANLPLPHARSRRKIRRHEPAARQPTTSLRPPARPQSCHRRDLAACPPQSSHPAATAPCMPQPLRSARPPQSARPPQSGRPPAVTGEIRCSGKCRCRGRRQCPRCCGVWV

SEQ ID NO: 222318 - protein, 266 aa, Zea mays
  Clone ID: MRT4577_134345C.1.pep
MGSGSLTMKQKKRVKHAKNKYLKPGALAQIRYSRSTSRDIGKKRILLNAKDELELPPQPEVLLESSTTILSPARLNFKPFGSNKGQILPKTPKTPDASAFDGDSNLESLPLDLLVKIMCCLHHDELKVVFHVSKRIRKAVELARQYHFNYTTPDRSRQELLLNSTPLPTEHWPFLRIDGKDVRVSTPRTPRAPKHASRLSRLRLVDVKPITAVLFQESPTLFPSKRLRCSMPPPRLARPACKAAPSPRVLRYEEELCEAVAQNKLL

SEQ ID NO: 222319 - protein, 93 aa, Zea mays
  Clone ID: MRT4577_134346C.1.pep
KKAWLAPSFFSLGWAFLSLVNFTGGWFKVFPSTVLFQRDRACFWFVPFQGARKRQKNGLALVSPKPDFFGGFECWILLARLFRNPSNCLRVLF

SEQ ID NO: 222320 - protein, 124 aa, Zea mays
  Clone ID: MRT4577_134347C.1.pep
PPLFFFFFSSDLKIVRCGGARHGGAEHCTVTRPCPERSVTRQERVWYSRQQYPFTVLAPKNSYEPCYLGAVGLAAAPSRPASEACFLATLAKQTGEGGAAPRVKLSDGRKSRKYQLRLAGWLVP

SEQ ID NO: 222321 - protein, 59 aa, Zea mays
  Clone ID: MRT4577_134348C.1.pep
QSVIEHEKYSTSHRDLEKPKCCQFSAFTPPLGPKSLMFWHHLSFEKPGYSMECQNYTPS

SEQ ID NO: 222322 - protein, 430 aa, Zea mays
  unsure (1)..(430): unsure at all Xaa locations
  Clone ID: MRT4577_134349C.1.pep
AGCKPRGTGCTGVEEAVALFAEMAEKGLRLSEKTFAALMPGLCDDQGRVAEARKAVDDMAERRLTPKDKSVFLRLVTTLCKAGDLDGALEVHRKSGQFKHVLVDLRQYGVLMEGLCXAATTYDRVLEALYAEEKTLPAYSMLXRSTSVYNPVIEFLCSNGSTGXAETFFRQLMKKGVDDKAAFNSLIRGHAKEGVPEAALKILAIMTRPVVPTDPESHALLVDSFLKNEPADAKTALDSMMQQGHLPSPALFKSVMEALFNDGRVQTASRVMKSMIEKGVTENMDVAHKILEALFTRGHVEEAIGRVNLMVENGCMPDLDKLLVGLCDNGRVMEAQKLADFALDRDFDVSFSTYDRVLEALYAEEKTLPAYSMLCKIKNKGGVVSQKGCDDLMESLKSEGYSKQADILSRILAENAQSTPKRGRRVAMGA

SEQ ID NO: 222323 - protein, 184 aa, Zea mays
  Clone ID: MRT4577_13434C.1.pep
GDGIHEQVGEEKTLITPVQCKNLWRQFKAETEYTVTQALAAQEANKRNNNWLPPPWALAAMAILGFNEFMTLLRNPLYLFAIFVIYLVGKAIWVQSEIGREFQHGFLPAILSLSTKFVPTVMNILKRLADEGQAPAAAPERQREMELQPKPTRNGSSYTNATSAGSSSVTTSEIGPEYSSPVAQ

SEQ ID NO: 222324 - protein, 48 aa, Zea mays
  Clone ID: MRT4577_134350C.1.pep
HPRRPGSVLRSGCPSRCFFSFSFWIYIAVVLLLKTEVGRRSVSSSGTL

SEQ ID NO: 222325 - protein, 54 aa, Zea mays
  unsure (1)..(54): unsure at all Xaa locations
  Clone ID: MRT4577_134351C.1.pep
KIMTLSGNFTSHFNSSELSWTPGTRLFKQTNFRISLRDFFSELTXDSVNQTVCF

SEQ ID NO: 222326 - protein, 56 aa, Zea mays
  Clone ID: MRT4577_134352C.1.pep
IYYVNVNVLCFLNHCIQFLMSRIMDSFCQVTTNNAPSFYYFLKQGWILKIKILETL

SEQ ID NO: 222327 - protein, 89 aa, Zea mays
  Clone ID: MRT4577_134353C.1.pep
SLPESRAQLLYTAGVRRNRHEGIARTMTQEGKLACSPILNLNWGKLEGRKAGVERSYKLALHQLISSWLRSGLSLFFLEGCYAMRSPKS

SEQ ID NO: 222328 - protein, 141 aa, Zea mays
  unsure (1)..(141): unsure at all Xaa locations
  Clone ID: MRT4577_134354C.1.pep
LKKFLFSPLRGGKAPRDLQQKVVQQIGPALTQQSGGNPGAYLKKVVPFNQRGGAKFGGGPQKGQKVFXPLGGGNPLGGTFLEKKKKMVPKNQFFFKNPALEKPHGGGAPFLITNERGPAKGPPNPKGVPKKKQKIGWDFSR

SEQ ID NO: 222329 - protein, 114 aa, Zea mays
  Clone ID: MRT4577_134355C.1.pep
GSSFKHMIYILCFAPRGVPAGPPRRVLHTVAPGYSWPVQQWRACACVCMWAALLPPPVRSVSITGSIKRRGLRTWQINKQRRLRLSGGKQVLCPCPCRAYWDVLVLPCPSVRVT

SEQ ID NO: 222330 - protein, 53 aa, Zea mays
  Clone ID: MRT4577_134356C.1.pep
FLLGYNLPSKYFYLSTFTLYLILDSISSIHNYFPKHLHLYQFKLHSDHLIYYL

SEQ ID NO: 222331 - protein, 186 aa, Zea mays
  unsure (1)..(186): unsure at all Xaa locations
  Clone ID: MRT4577_134357C.1.pep
TRLLQDLVPGCNKVVGKAVMLDEIINYVQSLQRQVEFLSMKLATVNPQLDFNNLPNLLPKDMHQSCGPLQNSHFPLETSGAPLPYLNQGNPLIGCGLPNGMDNSQSSMHPLDPAFCRPMSSQQHPFLNGVSDAASXRSGLSGKMXLQSVVHXWIWGSRASRRWLPPPPTATTXFVANSAHENGALT

SEQ ID NO: 222332 - protein, 74 aa, Zea mays
  Clone ID: MRT4577_134358C.1.pep
KLNAFKGQVETVDNFNGLGIDTIRYSYAVYTRPSCSSCLFLQTNTNHSHIHICADSVALSLSPARIVTVLHPRC

SEQ ID NO: 222333 - protein, 220 aa, Zea mays
  unsure (1)..(220): unsure at all Xaa locations
  Clone ID: MRT4577_134359C.1.pep
GEDSQRMKLLQDLVPGCNKVVGKAVMLDEIINYVQSLQRQVEXIHFPLSIHSWNDCETAGFFSLSCCCRLRTEQSWMRSIXPSPSLPRPSCLQFLSMKLATVNPQLDFNNLPNLLPKDVSTRRRYMIVRIAMSGSSWXEGTLSSSYSPFCLVCDQMHQSCGPLQNSHFPLETSGAPLPYLNQGNPLXGCGLPNGMDNSQSSMHPLDPAFCRPMSSHXHPF

SEQ ID NO: 222334 - protein, 100 aa, Zea mays
  unsure (1)..(100): unsure at all Xaa locations
  Clone ID: MRT4577_13435C.1.pep
AYAPGETYYPQRYQAEPGYGPVAEXRPVIMRPLPCCGLGLCWRMVITVFFLLAIPWFIGALVIICVRVHDQRXETXYVACTLAVVAVDVAILLGVTKGTH

SEQ ID NO: 222335 - protein, 119 aa, Zea mays
  unsure (1)..(119): unsure at all Xaa locations
  Clone ID: MRT4577_134360C.1.pep
GGLRGGEEEVGLRPAPIEREAAILPRLRHRHVMRLREILATRKKVHFVLDLAAGGELFSLLDAYGRMTEDLARHYYRQLISAVRNCHSRGGYHRDIKAENLLLDDAGXDSRVADFGLRR

SEQ ID NO: 222336 - protein, 155 aa, Zea mays
  unsure (1)..(155): unsure at all Xaa locations
  Clone ID: MRT4577_134361C.1.pep
LPVTYATLSAASRRAGSAFLLSPAHXTSSTTCPANHQEVWRITSALENHKYEIADWDLGAGIYIDFYVLKNSMQERNAMDDSDSLEEMSESCRSFFGRLNDSLLVWGSKLPVESRACYSKMAEELCALLVDTPSETLNLPXGCLLTMLNAPVPDE

SEQ ID NO: 222337 - protein, 182 aa, Zea mays
  unsure (1)..(182): unsure at all Xaa locations
  Clone ID: MRT4577_134362C.1.pep
RTSRRFLRFSAGLGIPPSLEVLSQYCESWSRDDAQRQYIVELGIPEEWMHEALXNHQEVWRITSALENHKYEIADWDLGAGIYIDFYVLKNSMQERNAMDDSGSLEEMSESCRSFFGRLNESLXVWGSKLPVESRACYSKMVEELCALLVDTPSETLNLPMGCLLMMLNAPVPDEKAVVVPA

SEQ ID NO: 222338 - protein, 52 aa, Zea mays
  unsure (1)..(52): unsure at all Xaa locations
  Clone ID: MRT4577_134363C.1.pep
TNLAKSALFSKHLXIKDWPKNYHFKIFKMEIENKFLIDWFGGPKPISPSQYL

SEQ ID NO: 222339 - protein, 85 aa, Zea mays
  unsure (1)..(85): unsure at all Xaa locations
  Clone ID: MRT4577_134364C.1.pep
GRCFHACRVQLLILLVNHEPNTQSDKTRHGILVLDDIYKLQIIKKSDLEEXRELGSGTIGTADHGKXLGSDVAILRIIERSYAGK

SEQ ID NO: 222340 - protein, 155 aa, Zea mays
  Clone ID: MRT4577_134365C.1.pep
ICSHFIRCYFGSANHQEVWRITSALENHKYEIADWDLGAGIYVDFYVLKNSMQERNAMDDSGSLEEMSESCRSFFGRLNESLLVWGSKLPVESRACYSKMAEELCALLVDTPSETLNLPMGCLLTMLNAPVPDDSRSSYLQDTLSVFTKILCSDP

SEQ ID NO: 222341 - protein, 155 aa, Zea mays
  Clone ID: MRT4577_134366C.1.pep
ICSHFIRCYFGSANHQEVWRITSALENHKYEIADWDLGAGIYIDFYILKNSMQERNAMDDSDSLEEMSESCRSFFGRLNESLLVWGSKLPVESRACYSKMAEELCALLVDTPSETLNLPMGCLLTMLNAPVPDESRSSYLQDALSVFTEILCSDP

SEQ ID NO: 222342 - protein, 214 aa, Zea mays
  Clone ID: MRT4577_134367C.1.pep
MLYGHYQHRPRRDVPETDIIRSAVELYEAGIRFRKSVSDSLHDIRFRHGVLSMPAVTVDDSTEYMFLNMMAFERLHVGAGNDVTAYVFFMDNIIDSAKDVALLSSRGVIQNAVGSDKAVAKLFNSISKDVVLEPESALDAVHREVNAYCRKPWNMWRANLIHTYFRSPWAFLSLAAAVFLLVMTVMQTVYTVMQFYQGGGSGSDGGSSAAPAPA

SEQ ID NO: 222343 - protein, 146 aa, Zea mays
  unsure (1)..(146): unsure at all Xaa locations
  Clone ID: MRT4577_134368C.1.pep
SADANHQEVWRIXSALENHKYEIADWDLGAGIYIDFYVLKNSMQERNAMDDSGSLEEMSESCRSFFGRLNESLLVWGSKLPVESRACYSKMAEELCALLVDTPSETLNLLMGCLLTMLNAPVPDESRSSYLQDTLSVFTEILCSDP

SEQ ID NO: 222344 - protein, 101 aa, Zea mays
  Clone ID: MRT4577_134369C.1.pep
EPHHRCITPSSCPNLEKSCGDLLNGAKGKDALGLGPREDAIPRCSTSPPGSLPVDDGPTPAIAFEMRIHKQGDRSPQDTRRVASRSPRSLLKQAWRLRCTI

SEQ ID NO: 222345 - protein, 244 aa, Zea mays
  unsure (1)..(244): unsure at all Xaa locations
  Clone ID: MRT4577_13436C.1.pep
IPVVEELLXQLHGALFFTKLDLRSGYHQVRMHAADVEKTASRTHHGHFEFLVMAFGLCNAPSTFQALMNEVLSKFLRKFVLVFFDDILVYSPSWEDHLQHLSSVLAQLRHHQLYLKQSKCAFAQATVGYLGHVISAKGVEADPNKIQDVERWPIPMSVAERRSFLGLAGYYRRFIHHYASIAEPLPTRLRRQKFHWSDEAAAAFQRLKHALQTAPVLRLPDFNILFVVECDASSTGIGAVPRAE

SEQ ID NO: 222346 - protein, 118 aa, Zea mays
  unsure (1)..(118): unsure at all Xaa locations
  Clone ID: MRT4577_134370C.1.pep
NXNNTRSRKRIFNPLKNKKGTGDTKRKIFXHAELKLFTSTRPSCQLQHDRSICXXXTMGIETRNPRRAQVVPAAALFGRXMFLRFGFNGLGFFXXHLGCSAXHXPXLCLLEIIXHMDL

SEQ ID NO: 222347 - protein, 483 aa, Zea mays
  unsure (1)..(483): unsure at all Xaa locations
  Clone ID: MRT4577_134371C.1.pep
PAGKKKKKKKKKKKKKKKKKKKKKKKKSVKTFGGHLYRHIRDKNVYEIHQMYEGGFQRLSDRLFRDVPWPSGEAVSPYCDGDHVFLLLYRELWYRHAHARLSPFTAGHRAESWTNYCDLFSVVLHGVVNMQLPNQGLWDMVDEFVYQFQSFCQYRAKLKTKTEDELNQLKQFDKAWNVYGVLNYLQALVEKSMITQILEKEKEVXFHCXLTKFSIGVEFFXLNQQGVYTIVIGSHISAIYHYGFANLMMRRYVEATREFNKILLYILKYKQYHQNSPQYDQILKKNEQMYALLAICLSLCPQNKLIDENVSTQLKEKYNDKMTKMQRYDDEAYAAYDELFSYACPKFITPSPPILDQPLTNYNQDAYRLQLKLFLYEVKQQQLLSGIRSYLKLYSTITISKLAQYMEVDEATLRSMVMTHKTKMHAVDSEGKIVSSADFDFYIVEDVIHVVESKPTKRHGDYFLRQILKFEEMIGELEKVQLD

SEQ ID NO: 222348 - protein, 393 aa, Zea mays
  Clone ID: MRT4577_134372C.1.pep
LLAGNVQAAFLDLPIEGERYLGLIMWYQLSPDTPLDIIIRSYDQLLVEGKVPYPVPVYIDEGPLDEAPQWSPGDHFDISFYLMLLHANKDEKFGLLKTMFSAFSSSFDPLDYHFIWHQRSILEAVGAFSSKDLHLLDLSFVYQLLCLGRCHWAIYVILHMPYLDDAPYIHEKLIREVLSQYCESWSRDDAQRQYIVELGIPEEWMHEALALYHEYYGDKQGALENLIQCGNWKKAHTIFVTSVAHSMFLSSNHQEVWRITSALENHKYEIADWDLGAGIYIDFYVLKNSMQERNAMDDSDSLEEMSESCRSFFGRLNDSLLVWGSKLPVESRACYSKMAEELCALLVDTPSETLNLPMGCLLTMLNAPVPDESRSSYLQDALSVFTEILCSDP

SEQ ID NO: 222349 - protein, 247 aa, Zea mays
  Clone ID: MRT4577_134373C.1.pep
LGRCHWAIYVILHMPYLDDAPYIHEKLIREVLSQYCESWSRDDAQRQYIVELGIPEEWMHEALALYHEYYGDKQGALENLIQCGNWKKAHTIFVTSVAHSMFLSSNHQEVWRITSALENHKYEIADWDLGAGIYIDFYVLKNSMQERNAMDDSDSLEEMSESCRSFFGRLNESLLVWGSKLPVESRACYSKMAEELCALLVDTPSETLNLPMGCLLTMLNAPVPDESRSSYLQDALSVFTEILCSDP

SEQ ID NO: 222350 - protein, 57 aa, Zea mays
  unsure (1)..(57): unsure at all Xaa locations
  Clone ID: MRT4577_134374C.1.pep
LNIHILYNNQHPQTIISXTYTTITPSINLHYHPFQLPPLLHQFHHPYFLHHPITYLQ

SEQ ID NO: 222351 - protein, 96 aa, Zea mays
  Clone ID: MRT4577_134375C.1.pep
PFQLLPLPAWHLFNLSSLSLSLSLSLSFCYSHFTDDNSANWSISHIFKYIYIYGANTGEVVGVVVIMHKLTVAATWIGEGDRSTENGIICQVHVRT

SEQ ID NO: 222352 - protein, 173 aa, Zea mays
  unsure (1)..(173): unsure at all Xaa locations
  Clone ID: MRT4577_134376C.1.pep
GALENLIQCXQWKKAHIIFVTSVAHSMFLSSNHQEVWRITSALENHKYEIADWDLGAGIYVDFYVLKNSMQERNAMDDSGSLEEMSKSCRSFFGRLNESLLVWGSKLPVESRACYSKMAEELCALLVDTPSETLNLPMGCLLTMLNAPVPDESRSSYLQDALSVFTEILCSDP

SEQ ID NO: 222353 - protein, 688 aa, Zea mays
  Clone ID: MRT4577_134377C.1.pep
NTYTGCVVDAALFMGRSFRVGWGPNGLLVHSGSLVNSPGTVLSSVIHIEKVASDKVVRDDKDKIKDDLTELCFSAPMDLHKSLDHDFLETESDSFRLKLQKVMTNRLVLPDICRSYIDIIERQLEVNDLSMSSRVLLMHQVTVWELIRVLFSEKATGSQLDSVGDDDQEGMVLDKKEGSVDIDPEALPLFRRADFSNWLQDSVCHRVQGEVGSLNDARYLENILVLLTGRQLDTATEIAASRGDVRLAILLSQAGGSMSNRSDLAQTLDQWKMNGLDFDYIEEDWLKVYRLLAGNIQAAFLDLPIDWKRYLGLIMWYQLSPDTPLDIIIRSYDQLLGEGKVPYPVPVYIDEGPLDEAPQWSPGDHFDISFYLMLLHANKDEKFGLLKTMFSAFSSSFDPLDYHFIWHQRSILEAVGAFSSNDLHLLDLSFVYQLLCLGRCHWAIYVILHMPYLDDAPYIHEKLIREVLSQYCESWSRDDAQRQYIVELGVPEEWMHEALALYHEYYGDKQGALENLIQCGNWKKAHTIFVTSVAHSMFLSSNHQEVWRITSALENHKYEIADWDLGAGIYIDFYVLKNSMQERNAMDDSGSLEEMSESCRSFFGRLNESLLVWGSKLPVESSVVFDRACYSKMVEELCALLVDTPSETLNLPMGCLLMMLNAPVPDESRSSYLQDALSVFTEILCSDP

SEQ ID NO: 222354 - protein, 137 aa, Zea mays
  Clone ID: MRT4577_134378C.1.pep
FPYFPYPIQITFSPSFSFHYLLMLHLTLTYIYSYTYLQQLLLPHFLTSHLSFYFILYKYKLIILPLCFPISFYSFPFLVMKPYFVPTTVLPFLTCKVAHPSIPLLVLYLPILSHLHLIFSYSFHIPCHSYLIPLAYL

SEQ ID NO: 222355 - protein, 58 aa, Zea mays
  Clone ID: MRT4577_134379C.1.pep
MARTKVYELRGKSKTDLQAQLKELKSELSLLRVAKVNGGAPNNLSQIQVPRTSHRTRA

SEQ ID NO: 222356 - protein, 33 aa, Zea mays
  Clone ID: MRT4577_13437C.1.pep
KGGGKYNYLTILPSIITINTIEPTAVVTYEMSI

SEQ ID NO: 222357 - protein, 74 aa, Zea mays
  Clone ID: MRT4577_134380C.1.pep
GQDSLPSAGARGWRLALSWLCHRPWRVSTPRRTSTTLAGIRLPHPALTATAVVPMSPSPSPQSVLGTLPPARLS

SEQ ID NO: 222358 - protein, 51 aa, Zea mays
  Clone ID: MRT4577_134381C.1.pep
SKFRVEVQLSRLSLSLVHNRAFWKLVQVHINSILFLLIILSYLSCFSSFSF

SEQ ID NO: 222359 - protein, 85 aa, Zea mays
  unsure (1)..(85): unsure at all Xaa locations
  Clone ID: MRT4577_134382C.1.pep
LSDPTGGNVRPVTNLAAIGAVCCCTMCNVLCYCHDRVKYLGSFCSQTHSNLTXMFPGDYRWDTGSLSTNPXAFAQNKTTEVIQCR

SEQ ID NO: 222360 - protein, 52 aa, Zea mays
  unsure (1)..(52): unsure at all Xaa locations
  Clone ID: MRT4577_134383C.1.pep
MFFLLLFVCMQLHSGDTDTAVPLSATRRXSSLAALXGLPVKTSWYPWYIVVA

SEQ ID NO: 222361 - protein, 82 aa, Zea mays
  unsure (1)..(82): unsure at all Xaa locations
  Clone ID: MRT4577_134384C.1.pep
ELTPFVVLVTKTDLXPSNDQNSFVSGGWFNPPREHFNLNMPAFFQIAQEKVGIVPIFYRMVACTKHGGILYTISXTMYFNML

SEQ ID NO: 222362 - protein, 89 aa, Zea mays
  Clone ID: MRT4577_134385C.1.pep
TGGISGFFPFFFLTPRGQGPLGPLVAPFFCPGPFPGSLGPPRFGWPNFWPPLILGLCRVFWPPCSVFSLFNLVFGGGKLINVGAGLLGP

SEQ ID NO: 222363 - protein, 51 aa, Zea mays
  unsure (1)..(51): unsure at all Xaa locations
  Clone ID: MRT4577_134386C.1.pep
MSFRVXTIDXSAVDSTVRLEKSASYDEIKAAAKAEAXGSLKGILGYVDEDL

SEQ ID NO: 222364 - protein, 66 aa, Zea mays
  Clone ID: MRT4577_134387C.1.pep
PAHLVGWVYKMYLSFYCNLQLCTLTTLQTLNIVYISPSLAFQMGLKREKMAPLHCYNDLIINQAEI

SEQ ID NO: 222365 - protein, 70 aa, Zea mays
  Clone ID: MRT4577_134388C.1.pep
NAGSINISSILTGKCLAKINPGNSSKQKKAWRFQNTVSEALEDITALYYDEDRDEIYTGNRHGLVHVWSN

SEQ ID NO: 222366 - protein, 69 aa, Zea mays
  Clone ID: MRT4577_134389C.1.pep
WGNARCSPGGISGLVAFDHYRLTMGRLFSPLTRVSTWVLRFHPGSKRVSLFPEPIHLKRALGFRPWVYG

SEQ ID NO: 222367 - protein, 223 aa, Zea mays
  Clone ID: MRT4577_13438C.1.pep
LVATEKELLVKLEKHGRSVVESKAKEEAGRVLIRMKDRFSTLFSRDADSMPRVWTGKEDIKAITKTARSASVKLLSTMAAIRLEEDGDNIENTLSLALVDTSRHGTTDRSIQLSDPLASSSWERVAEEKTLITPVQCKNLWRQFKAETEYTVTQAIAAQEANKRNNNWLPPPWALAAMAILGFNEFMTLLRNPLYLFAIFVIYLVGKALWVQSEIGREFQHGF

SEQ ID NO: 222368 - protein, 82 aa, Zea mays
  Clone ID: MRT4577_134390C.1.pep
QYLSLFQPFFLIQLSLLRAGSTNTIQPATCTQPRTIIGIKPTDRIALYCIYTARTTNYHFVHLLVRAPLPNRHNHILLSFYH

SEQ ID NO: 222369 - protein, 117 aa, Zea mays
  Clone ID: MRT4577_134391C.1.pep
GGGGCFFFFFFFFFFFFFFFFFFFFFFFTLKRGDLNKPNSQKGMTVFRTNRGGGFFFFFFGSHGTHTYMDHGVHTCFHAHARVRAPPGRFFLVAPSGRQVALRHHPVVGRFYSDHHR

SEQ ID NO: 222370 - protein, 90 aa, Zea mays
  unsure (1)..(90): unsure at all Xaa locations
  Clone ID: MRT4577_134392C.1.pep
KKQIKLKLKPTNIKXLTKIITIFXFHPTHCHTFPYIHSHGFIQLVYLQLITLYNNNSQISKPHYAPCSISFLTHLISPISNIPFSPDLIH

SEQ ID NO: 222371 - protein, 39 aa, Zea mays
  Clone ID: MRT4577_134393C.1.pep
QMLSDVLLIDITNYFLFVTLTYIDKHVADACADVCADAC

SEQ ID NO: 222372 - protein, 114 aa, Zea mays
  Clone ID: MRT4577_134394C.1.pep
PSLSQPITSRSPKLLPLCFSSWPARTNNFHVKRPRIDKIHIRQLNVKMRTTRIISLTNFCVASSALAFQVFVLYPWHHQLQHDFEDLKNEHIRVLKTISAHSVASRAQQASSQT

SEQ ID NO: 222373 - protein, 74 aa, Zea mays
  unsure (1)..(74): unsure at all Xaa locations
  Clone ID: MRT4577_134395C.1.pep
GTLWYMIRVVKNXHFIGHRYITRGIPXLQXXLIVSISTNQFDPMLHTSAQKTIQHLLLELPSLHANTKATLKPF

SEQ ID NO: 222374 - protein, 60 aa, Zea mays
  Clone ID: MRT4577_134396C.1.pep
TNFGIDPSRKTRLLPYSTMRGYMITDMQIIEHTDKGWGGEDVYIIFTRSINILKQHELKP

SEQ ID NO: 222375 - protein, 46 aa, Zea mays
  Clone ID: MRT4577_134397C.1.pep
FLSSISQRLKLTAYLVLAADFVSREDIQPLVGECVELAWSSGVFAG

SEQ ID NO: 222376 - protein, 84 aa, Zea mays
  Clone ID: MRT4577_134398C.1.pep
RISAQQVVRQVSISRSQHRQVSSSLVGWSLVLGGSGSQHRYRYRVYMYHRVVFHVLSIMFINYKLVCTEYTSIPWHTCIRLSPI

SEQ ID NO: 222377 - protein, 119 aa, Zea mays
  Clone ID: MRT4577_134399C.1.pep
VLSIYWPRGWDDRFTGPFDRFTAGAAFTPHRSYPPHACLPLAVHRGWGPRPLMLFAWTEELGSALSRPHGGFASGPSPVLGGFREPEPSRRSRLALGRWPLFVAREPSGMTVAGAGAPQ

SEQ ID NO: 222378 - protein, 50 aa, Zea mays
  unsure (1)..(50): unsure at all Xaa locations
  Clone ID: MRT4577_13439C.1.pep
REXEEVLEIITGEXKXXXXXTLPSCIQTTMNNIIQYYRPGLKYTHLTDFG

SEQ ID NO: 222379 - protein, 136 aa, Zea mays
  unsure (1)..(136): unsure at all Xaa locations
  Clone ID: MRT4577_1343C.1.pep
ADMFLIRFASPKWNPHGSAPSMGTLTMQPIGPTPAPAAQEDQRNGENLPTVDATDLSDIDSGGVILKNSDIVSGDLAVVVVSGGQGXGSSAIPSWARWVLGGVVYTVVPFYFSSWAFGRRDRGVCGDCCGGCGAYS

SEQ ID NO: 222380 - protein, 102 aa, Zea mays
  unsure (1)..(102): unsure at all Xaa locations
  Clone ID: MRT4577_134400C.1.pep
METTMVTLLMLLAMPTCVANATVNPTCSHARIAALIAPYLPSIIASVCENPAVQPYRLQHAIAAGNIPXRPXLCQQSPALSSVQSLVQTMMAQQLQQLVLPV

SEQ ID NO: 222381 - protein, 440 aa, Zea mays
  Clone ID: MRT4577_134401C.1.pep
MAITVRRSTMVRPARETPRQRLWNSNLDLVVPRFHTPSVYFYRRDGPVPAAEGFFDGERMRRALAEALVPFYPMAGRLARDEDGRVEIDCNGEGVLFVEADAPDASVDDYGDFAPTMELKRLIPTVDYTDDISAFPLLVLQVTYFKCGGVSLGVGMQHHAADGMSGLHFINSWSDLCRGAQISVMPFIDRTLLRARDPPTPSFQHIEYQSAPAMLSSTTQFLASKSKPPATAVDIFKLTRSDLGRLRSQLPAGEGAPRFSTYAVLAAHVWKCVSLARSLPPEQPTKLYCATDGRQRLQPPLPDGYFGNVIFTATPLAEAGKVTSELAEGAAVIQGALDRMDNDYCRSALDYLELQPDLSALVRGAHTFRCPNLGLTSWVRLPIHDADFGWGRPVFMGPGGIAYEGLAFVLPSANGDGSLSIAISLQAEHMEKFRKLIGEA

SEQ ID NO: 222382 - protein, 161 aa, Zea mays
  Clone ID: MRT4577_134402C.1.pep
MARLGLLALAVAVLALASGVASQAPGPAPSADCASALAGLMGCLPYVQQGSTQGKPDRECCAGVKAALKSPATVVCLCAAVGQNYGMPVNLTRGAGLPAACGEDPAALSKCNKPTASGTAPAVPSPGSSKSSSSSAAAAIRSPGSAFAVVVAATLLSHCLL

SEQ ID NO: 222383 - protein, 110 aa, Zea mays
  unsure (1)..(110): unsure at all Xaa locations
  Clone ID: MRT4577_134403C.1.pep
KAQLGGSVNPVHQEETENKVVVSEKQDPILVFKFIWMEKNIGKALDQLVFGYGSIPLSPXXFWPRKNAWEELKAKLEKKKWIFQKQMIIFFNQAPDIINLWQQGGGNLST

SEQ ID NO: 222384 - protein, 60 aa, Zea mays
  Clone ID: MRT4577_134404C.1.pep
VITVAPAYGGAFSHGGADPYHCNCRVRMQPQLHMMARLCLASTTDYITDPSECAGILLFA

SEQ ID NO: 222385 - protein, 156 aa, Zea mays
  unsure (1)..(156): unsure at all Xaa locations
  Clone ID: MRT4577_134405C.1.pep
PASTDAFDPVLNPVQNLSQWKEVKSXGPTSAXKMLDKENVNSVADVGPSHDCNYASHTRMNPSLSSKKENSLDASLSTWLVSSENSALDNVQSKSPCSISSVNLKQSSTPSPQRSPRTNREGSPMLGTVGSYWYCTEYDNEHCSSRSNSTTGIPNS

SEQ ID NO: 222386 - protein, 409 aa, Zea mays
  unsure (1)..(409): unsure at all Xaa locations
  Clone ID: MRT4577_134406C.1.pep
MYRAKRAALSPKVKRRVGKYELGRTIGEGTFAKVRFAKNTENGEPVAIKILDKEKVKRHRLVEQIKREICIMKLVRHPNVVRLFEVMGSKARIFIVLEYVTGGELFEIIATNGRLKEDEARKYFQQLINAVDYCHSRGVYHRDLKLENLLLDAAGNLKVSDFGLSALTEQVKADGLLHTTCGTPNYVAPEVIEDGGYDGATADIWSCGVILFXVLLEFTSCAEITISQILEHPWFKKGYKPPVFDEKYQTSLDDVDAAFGDSEDRHVKEETEDQPTSMNAFELISLNQALNLENLFEAKEEYKRETRFTSQCPPKEIITKIEEAAKPLGFDVQKKKYKMRMENPKAGRKGNLNVATEVFQIAPSLHVVELKKAKGDTLEFQKFYRSLSTQLKDVVWKCDGEVDGNSAAA

SEQ ID NO: 222387 - protein, 408 aa, Zea mays
  unsure (1)..(408): unsure at all Xaa locations
  Clone ID: MRT4577_134407C.1.pep
MYRAKRAALSPKVKRRVGKYELGRTIGEGTFAKVRFAKNTENGEPVAIKILDKEKVKRRRLVEQIKPQIWARGRERTCSSSVGRVRHARDAGRSRQEAKKASREPSRQSNKWRVELVAPPPPPPPPPPPVVSSSLLVISPPAPQKSAPCFATGDCSLQKQLAMAAAAFDAYTDKNAIFRRLKAKPENKMCFDCNAKNPTWASVTYGIFLCLDCSAVHRSLGVHITFVRSTNLDSWTPDQLKMMAFGGNNRAHAFFKQHGWTDGGKVEAKYTSRAAELYRQMLNKEVAKSAITDNALPSSPVTVSEASKPSDDFPEFKLSDAPAPPAENLNGKHEPKSPKSAPRSPKAATHPTFATSVKKPLXAKKVGGKTPGRDNRKLRTSCNESWYEHSEKNPRCGWRTRKQVERAI

SEQ ID NO: 222388 - protein, 86 aa, Zea mays
  Clone ID: MRT4577_134408C.1.pep
ESRGAGRFLAAAGKRKRGRHGHGGKELLLLPLRRGCCCSPIGSERQGESLPGRLWASVEGGGMDTMAAGLLPAGRRGEPGRKNLTP

SEQ ID NO: 222389 - protein, 48 aa, Zea mays
  Clone ID: MRT4577_13440C.1.pep
ALPLFKGLLLKYNFRSDITHLQAQTSIIPTLYDTLCCSDGTHHMSHIK

SEQ ID NO: 222390 - protein, 36 aa, Zea mays
  Clone ID: MRT4577_134411C.1.pep
VPSWSRGQIVQLCITFLQREATTGLGYHNGKRGDTH

SEQ ID NO: 222391 - protein, 39 aa, Zea mays
  Clone ID: MRT4577_134412C.1.pep
IFFKLFNIFDVLSNFDENFINCFESINQYFLSLFFCFYV

SEQ ID NO: 222392 - protein, 168 aa, Zea mays
  unsure (1)..(168): unsure at all Xaa locations
  Clone ID: MRT4577_134414C.1.pep
LDSRVSSSSNSGSFRVEIGSVSNRRSSAAGDDRRTYSLGSFDYRVDEEVEAVVSRITRPAVSAAAKSETQAAPGEALXRRQPGPAAGCASTWTASXSASSLSGRWSARWSQGHHSARWSQGHHSRSHSNRQEDSLWWDPEAAAGAAMHRAPDEEEPGFVALYRWIVGV

SEQ ID NO: 222393 - protein, 118 aa, Zea mays
  unsure (1)..(118): unsure at all Xaa locations
  Clone ID: MRT4577_134415C.1.pep
MGSRVSGPYMDSPPPPRPPSPPRHPPHPQGERHGGGEMPYQDADHRLRALVGSVEGFGRHAIGGLYGAIHRVTSLQDTXPGSLREACRAEEPLXSVFEVSGTXHLHFYLRVSSYKDID

SEQ ID NO: 222394 - protein, 211 aa, Zea mays
  unsure (1)..(211): unsure at all Xaa locations
  Clone ID: MRT4577_134416C.1.pep
MAGRGKAIGSGAAKKAMSRSSKAGLQFPVGRIARFLKAGKYAERVGAGAPVYLAAVLEYLAAEVKKTSNFAVVVFDLVLSTRNFGSCGFLSWKLPGLLXTTGGISDDDLDFGDCYASSLWNQXDFDRLNRWDSLPARSCXLELAGNAARDNKKTRIVPRHIQLAVRNDEELSRLLGTVTIASGGVMPNIHNLLLPKKSGGGSAKAAAGDED

SEQ ID NO: 222395 - protein, 148 aa, Zea mays
  unsure (1)..(148): unsure at all Xaa locations
  Clone ID: MRT4577_134417C.1.pep
ANLDDPPPPPPSFLPSRCGSASPPTPLSRVPLHRGEGSGGGGGGSAPALGLRAEGVRAPPLPSGPRTSPSSCPCPRSDSSSLPPCRRIWPGSPVGSVVGGDRRGAPPPPAAXGXVPRLCSMGSRVSGPYMDSPPPPRPSSPPRHPPHP

SEQ ID NO: 222396 - protein, 77 aa, Zea mays
  Clone ID: MRT4577_134418C.1.pep
MPEKAGDREDVVAGSISSEGDAFLNGALPCLIDNPGSVFRPEEYYQQWTMEPASPALKDIIQLCAGWQPVPRPPDDR

SEQ ID NO: 222397 - protein, 89 aa, Zea mays
  Clone ID: MRT4577_134419C.1.pep
CTPPQFIEGIICEFRKQTKKAIAVYPNSGEVWDGRAKRWLPVECLGHKSFDALAKRWQEAGASLIGGCCRTTPSTIRAVSKILKGRTGH

SEQ ID NO: 222398 - protein, 53 aa, Zea mays
  Clone ID: MRT4577_13441C.1.pep
VDPPSAQTAFPAHVFFADFSFPRTKLLSPSVGRRFPPLFMKTARTASTYTSNL

SEQ ID NO: 222399 - protein, 53 aa, Zea mays
  unsure (1)..(53): unsure at all Xaa locations
  Clone ID: MRT4577_134420C.1.pep
RYHRSSYLLLRRRHAEFEISXXPRVVPVLLRDRACERPPALTSTNIIRRIKAN

SEQ ID NO: 222400 - protein, 93 aa, Zea mays
  Clone ID: MRT4577_134421C.1.pep
KSHIIFTHKDLKEHCICRLTLTHLRRGILKDGTIYILADGGTIYILAYGGTQSSGISTLKFDNYYYIVIAVAGKNKLKITRKITSSFTNGLRI

SEQ ID NO: 222401 - protein, 366 aa, Zea mays
  Clone ID: MRT4577_134422C.1.pep
MGSRVSGPYMDSPPPPPPRPPSPPRHPPHPQGERHVGGEMPYQDTDHRLRALVGSAEGFGRHAIGGLYGAIHRVTSLQDDGPGSLREACRAEEPLWIVFEVSGTIHLHSYLRVSSYKTIDGRGQRVVLTGKGLRLKSCHHVIICNLVLEGGRGHDVDGIQVKPDSTNIWIDRCTLADYDDGLIDITRQSTDITVSRCHFMRHDKTMLIGADPTHVGDRCIRVTIHHCFFDGTRQRHPRLRFGKVHLYNNYTRSWGIYAVCAGVEAQIVSQCNIYEAGGGPPKKTTVFKYMPEKAGDREDVVAGSISSEGDAFLNGALPCLIDNPGSVFRPEEYYQQWTMEPASPALKDIIQLCAGWQPVPRPPDDR

SEQ ID NO: 222402 - protein, 59 aa, Zea mays
  Clone ID: MRT4577_134424C.1.pep
EVRRRRRGLREELSFMVKGPPTLELVQLEVGSSGRKSTVNREVSGAPQVAIENPEEGIQ

SEQ ID NO: 222403 - protein, 82 aa, Zea mays
  Clone ID: MRT4577_134425C.1.pep
DKIGTIQRRLAWPLRKDDTHKSRNGPNFSDDKMFYNGVVESFDSVSKRHKVAYDDGDVEVLLLRDEKWEFISEVCTDAQMIL

SEQ ID NO: 222404 - protein, 61 aa, Zea mays
  Clone ID: MRT4577_134426C.1.pep
KTNPFGKFFIKYKGFFPFPGGKAVGYRNFFSIPWQKFLAHYTLFFLDGILPFTTQLSIKPP

SEQ ID NO: 222405 - protein, 98 aa, Zea mays
  Clone ID: MRT4577_134427C.1.pep
LYLIRIFMLNNRSLYTLGDGCPRVTKLNINGCSNFIDTSFIYLTCRCKNLKCLNLFGFVKAVTYIAFQVLFLLLNFANHLSSIKLLLNFYIFCAGYCS

SEQ ID NO: 222406 - protein, 85 aa, Zea mays
  Clone ID: MRT4577_134428C.1.pep
ASELMISGPLQGPSPNDDGVNTLLILASTCLEQSQSQSQAQRSTDSHAAGTITLHKDQDLTAGRTSHKDQGREPLLGLRLNPEST

SEQ ID NO: 222407 - protein, 48 aa, Zea mays
  Clone ID: MRT4577_134429C.1.pep
LIFLVTQIPIGVWGSHTYMYSLPLDLTGLCLHPLSSLHAGRAITHVYT

SEQ ID NO: 222408 - protein, 61 aa, Zea mays
  Clone ID: MRT4577_13442C.1.pep
MSLVPRSGKSPASDEDRELSALEKMERLDACIPEMEAGSDEVFRSILHTRVALLNIRTQTC

SEQ ID NO: 222409 - protein, 71 aa, Zea mays
  Clone ID: MRT4577_134430C.1.pep
LFFRPILLFVFSFYCLVFFLFFWFWLCLSVLLIWFRLLIVITVFVFSPLSFFWYGFKKSVVQPGFQHRFLW

SEQ ID NO: 222410 - protein, 65 aa, Zea mays
  Clone ID: MRT4577_134431C.1.pep
AFKNRHFIGIPATCKTALQGTTLTGQLLRETVFDGQTHGGHTLTKGNTPYSSGTHPENAGPTSWM

SEQ ID NO: 222411 - protein, 62 aa, Zea mays
  Clone ID: MRT4577_134432C.1.pep
AAPFFFFFFEINQLVINYMYIYSFTLRVSPITIYVLSPRSSNNQSIVQNPINQTADEVSPPK

SEQ ID NO: 222412 - protein, 121 aa, Zea mays
  Clone ID: MRT4577_134433C.1.pep
ENKPVLYGYFKSSATWRVRIALELKGVDYEQRFINLLKKEQLSEEYKKVNPTQKVPSFITKEGKLLTQSQAIIEYLDKAYPNEPFLPKDPTEEALVREICQIIACDIHPLQNLGVLQRVAG

SEQ ID NO: 222413 - protein, 96 aa, Zea mays
  Clone ID: MRT4577_134434C.1.pep
GPLRSQPSPAMATATRRLLPTLLKTGGHYYLMRERDGHHLTYAAIARHHGALTHPKHRIPTPQHRRDDQHHEALPLDQTPDPERTLPRPHQLHDHP

SEQ ID NO: 222414 - protein, 132 aa, Zea mays
  unsure (1)..(132): unsure at all Xaa locations
  Clone ID: MRT4577_134435C.1.pep
MGPSLLAAXXASPFLLPGRSRRPLGAAPTRRAELRGAALKNNPAKGAPQNNRGLVRLQKIPEKSAGGELLPKSAVKFERNLMGEILSVGADVREVEAGKKVLFSNINAYKGDLDTDEKHCFCRKSNLLAVAK

SEQ ID NO: 222415 - protein, 76 aa, Zea mays
  unsure (1)..(76): unsure at all Xaa locations
  Clone ID: MRT4577_134436C.1.pep
MDATGTGAGGKAKKGAAGRKAGGPRKKSVTRSVKAGLQFPVGRIGRYLKKGRYAHXVGSGAPSPRGVWSTRAEAWS

SEQ ID NO: 222416 - protein, 120 aa, Zea mays
  unsure (1)..(120): unsure at all Xaa locations
  Clone ID: MRT4577_134437C.1.pep
MPHLDRYICLTPSCLRPPGXIDSRLMRKPKGCTLLPNIAYASDXNTRHYXLPSLFRKFVVHYVSDLDLLLMHHKTYCAEIAHYEASHKCKKIDXCAAQMNILVTNKLATLHFQDDNRPVA

SEQ ID NO: 222417 - protein, 89 aa, Zea mays
  unsure (1)..(89): unsure at all Xaa locations
  Clone ID: MRT4577_134438C.1.pep
QRSTXXPSGVLNDQXGXVPREXPGNLLRHNARPRXXRQXNYLPRHPTLPFFRGXXMLKVLCVWLPLLTNWNCNPFAQFPSFVNTSATSD

SEQ ID NO: 222418 - protein, 60 aa, Zea mays
  Clone ID: MRT4577_134439C.1.pep
LILFNDISWDHYVIWLSPAVLVLHILFQTSPVSLTKHTYIDAHGLGPCYETVSKFTTIIS

SEQ ID NO: 222419 - protein, 89 aa, Zea mays
  Clone ID: MRT4577_13443C.1.pep
MSLQIPARSRGLRRLLLLGGESGIRRSYSTGDRRRRVIREARDEEEDEAFLRTLNFGADPENNPLPPPPRRGGGAPDPSAAGAFPADIL

SEQ ID NO: 222420 - protein, 68 aa, Zea mays
  Clone ID: MRT4577_134440C.1.pep
NFLFITDNNHYLARPTLLGLAGLPLSPPSQHGPPTPFWTAPASTSLLWLVIPWSWPWLATGRCWLVAA

SEQ ID NO: 222421 - protein, 417 aa, Zea mays
  Clone ID: MRT4577_134441C.1.pep
MLNLGLGKQALKNINSLALFSNIQVNPRPDETKEGGIVVEIKLKKLEPKSAEVSTEWSIVPGREGRPTLASIQPGGTVSFEHRNIYGLNRSIVGSVTSSNLLNPQDDLSFKLEYVHPYLDGVDDRSKNRTFKTSCFNTRKLSPVFVAGPNMDEAPPVWIDRVGFKANITESFTRQSKFTYGLVVEEITTRDETNTICTHGSRAMPSGGLSMDGPPTTLSGTGVDRMAFLQANITRDNTEFVNGAIVGDRYIFQLDQGLGIGSKNPFFNRHQLTLTKFINLNKQEKGAGKPLPAVLVLHSHYAGCVGDLPSYDAFALGGPYSVRGFSNGELGASRNILELATELRVPIRNTHVYAFAEHGTDLGSSKDVKGNPTEFFRRVGHGSSYGVGVKLGLVRGEYIVDHNAGTGTIFFRFGERF

SEQ ID NO: 222422 - protein, 53 aa, Zea mays
  Clone ID: MRT4577_134442C.1.pep
ALCFLQSNRAVGTSRPVKDKSASPAERSSRSVLSVSRNARPGPWRTRGRTRGS

SEQ ID NO: 222423 - protein, 809 aa, Zea mays
  unsure (1)..(809): unsure at all Xaa locations
  Clone ID: MRT4577_134443C.1.pep
MALTSQASPSVPRQRGPAATAGGGPLPCPPPRPRASWGSPTRGKPYPSRPSGMNPPLAHHGGGGGSGWGAGGGGAGGGGGGDFWYRLISSGAAHADDKSSGDWDAHGLPVNMTVPLTKLSGLKRYKLSELKFFDRAAASGGAYTGPEDSFFEMVTLQPGGVYTKSQLLKELETLVSCGMFERVDLEVKPKPDNTIGLTVSFVESVWSSAKQFKCINVGLMSQSGQVDFDQDMTEREKMDYLRKQERDYQQRVRGANPCILPENVRGEVLGMMKKQEKVSARMLQKIRDHVQKWYHNEGFVCAQVVNFGNLNTNEVVCEVVEGDITKVEYQFQDKLGNIVEGNTQLAIIDRELPQQLRPGHIFNIGAGKQALKNINSLALFSNIEVNPRPDETKEGGIVVEIKLKELEPKSAEVSTEWSIVPGREGRPTLASIQPGGTVSFEHRNIYGLNRSIVGSVTSSNLLNPQDDLSFKLEYVHPYLDGVDDRSKNRTFKTSCFNTRKLSPVFVAGPNMDEAPPVWIDRVGFKANITEVCMISSHFFLLXKYCSRNICNXWKYYLDSQSFTRQSKFTYGLVVEEITTRDETNTICTHGSRAMPSGGLSMDGPPTTLSGTGVDRMAFLQANITRDNTEFVNGAIVGDRYIFQLDQGLGIGSKNPFFNRHQLTLTKFINLNKQEKGAGKPLPXVLVLHSHYAGXCVGDLPSYDAFALGGPYSVRGFSNGELGASRNILELAXELRVPIRNTHVYAFAEHGTXDLGSSKDVKGNPTEFFRRVGHGSSYGVGVKLGLVRGEYIVDHNAGTGTIFFRFGERF

SEQ ID NO: 222424 - protein, 123 aa, Zea mays
  unsure (1)..(123): unsure at all Xaa locations
  Clone ID: MRT4577_134444C.1.pep
MARTQSAAAVAXEAAVLLLAAGATTXTAAITCGQASSDIAPWLYYARRTGTGPSDYCCSGIRNLKSAVSTVANRXATWNWLKNADRGSEXLNASYAASIPYMGRVSIPYTIXSTLTDXCSRVN

SEQ ID NO: 222425 - protein, 107 aa, Zea mays
  Clone ID: MRT4577_134445C.1.pep
ECLSMKPLKRLPPHYLSCLDWQQYCCGRSRKEGERHGITGARLSRYPSQRAQRKDLQWSQRVSDPSMRVGNLDLIGEDRRTGCPFAHSGLMCPLLPEECGSGRGAEG

SEQ ID NO: 222426 - protein, 63 aa, Zea mays
  Clone ID: MRT4577_134446C.1.pep
QTPSTPRTCNRKLIKPRFKSRPLKNKTPKGTSIGPAKVLLFCNQTMNLFQATCSIHFFAKQCK

SEQ ID NO: 222427 - protein, 41 aa, Zea mays
  Clone ID: MRT4577_134447C.1.pep
KDRGVLIFIKEGQAKYAPYPVPGDQVPFFKAADLVFSLGVM

SEQ ID NO: 222428 - protein, 67 aa, Zea mays
  Clone ID: MRT4577_134448C.1.pep
KPAAQLDANSVRAKLELAKNAKLEATKRKLQEGYQESDNGMRAAAAAMGIGYPSFIVLVVHALCCAA

SEQ ID NO: 222429 - protein, 87 aa, Zea mays
  Clone ID: MRT4577_134449C.1.pep
SFPYYSPQEVQSLQPSTYSVLTHVFRLSKDALNRDECCDLIDSDLSVEYSAEKPPLSLCSLLLQLQGRVRIQEVSEYQDRTVQLLLN

SEQ ID NO: 222430 - protein, 155 aa, Zea mays
  Clone ID: MRT4577_13444C.1.pep
MAEPYNLAPHGVPSCHKEICNKPASSSTLHLDAEGPLYELSSLLDELPIRKGLSNYYQGKAQSFTSISDATSVQDLAKKVSYSKRMRASKSYSVGLDMNQRTIIVSRPCNKMIAKRPSNGSFARVMPGTSNTSNLNISTKSYAHQNKRVATHIDL

SEQ ID NO: 222431 - protein, 59 aa, Zea mays
  Clone ID: MRT4577_134450C.1.pep
SVELWQGHPARPQYPWGHALGVVPLEVPVVLTVTAIDGLDIICINKPVCVVWVYGRLVL

SEQ ID NO: 222432 - protein, 66 aa, Zea mays
  Clone ID: MRT4577_134451C.1.pep
YRNSRQTAFTTSQSLAVLAASLEGSPETRDHFSQDTSGHGRPPVISRESLDTLTPGGRMHHSSAAC

SEQ ID NO: 222433 - protein, 99 aa, Zea mays
  Clone ID: MRT4577_134452C.1.pep
ASVASCTHIEGDNHMRLRSRPPRPDLWRGGDRRGIAMALRAFHVSHGTAAAPLPPFARRMMAQFVVVVIVDNINIVKLCKEPYTPSREVHCQITHVLPP

SEQ ID NO: 222434 - protein, 50 aa, Zea mays
  Clone ID: MRT4577_134453C.1.pep
DLHSPASDMILYPRSLSAMSPCKSPISEWKNLVQQSHLDLTRCRLKRCAA

SEQ ID NO: 222435 - protein, 132 aa, Zea mays
  unsure (1)..(132): unsure at all Xaa locations
  Clone ID: MRT4577_134454C.1.pep
HSGGKPTTRIWKSWAPNKCCLFIWLVEYIRCWTTDKLTRRGLQHPECCPLCDXQQETINHXVSCVFSRQVWFELLRRAKLQELMPQPKEQNFGEWWRNSFLKVQGQTRRGFNSPVILGAWMVWKHRNQCGFQ

SEQ ID NO: 222436 - protein, 214 aa, Zea mays
  Clone ID: MRT4577_134455C.1.pep
MGKDCGKHGDDDLRRSCRRLLATIVVLALTVGVVALIVYLVLRPTHPRFYLQDASLRQLDLSNATTSTSTSTLLSTAIQVTLASRNPNERVGVYYDRLDVYASYKYQQLTVAASLPPAYQGHGDVGVWSPVLAGPNVPLAPYLADALRQDCQAGYLVLQVKVDGRVRWKVGSWVSNHYHLFVTCPAFLVTAGGNGAPGAAGFRFQTTTYCHVEV

SEQ ID NO: 222437 - protein, 81 aa, Zea mays
  unsure (1)..(81): unsure at all Xaa locations
  Clone ID: MRT4577_134456C.1.pep
GALNVDVNEFQTNLVPXPRIHFMLSSYAPVISAEKAYHEQLSVGEIXNSAFEXTSMIAKCDPXHGKYXACCXMYRVMCPNE

SEQ ID NO: 222438 - protein, 180 aa, Zea mays
  Clone ID: MRT4577_134457C.1.pep
MASADARLAGIASSIRVIPDFPKPGIMFQDITTLLLDPKAFRDTIDLFVERYKDQGITVVAGVEARGFIFGPPIALAIGAKFVPLRKPKKLPGEVISEEYSLEYGTDKIEMHVGAVQANDRALVVDDLIATGGTLCAAVKLIERVGAKVVECACVIELPELKGRDKLGDRPVFVLVEADA

SEQ ID NO: 222439 - protein, 49 aa, Zea mays
  unsure (1)..(49): unsure at all Xaa locations
  Clone ID: MRT4577_134458C.1.pep
QDFMTDLRFQSFXTAVLHEAXESYLVGLFEDTNLCAIHAERVTIMLKDI

SEQ ID NO: 222440 - protein, 135 aa, Zea mays
  Clone ID: MRT4577_134459C.1.pep
MASADARLAGIASSIRVIPDFPKPGIMFQDITVVAGVEARGFIFGPPIALAIGAKFVPLRKPKKLPGEVISEEYSLEYGTDKIEMHVGAVQANDRALVVDDLIATGGTLCAAVKLIERVGAKVGECACVIELPEL

SEQ ID NO: 222441 - protein, 44 aa, Zea mays
  Clone ID: MRT4577_13445C.1.pep
SKKWTSVTYLDKKKKKKKKKKKKKKKKKKKKKKKKKKKKKKKGG

SEQ ID NO: 222442 - protein, 180 aa, Zea mays; identical to SEQ ID NO: 222438
  Clone ID: MRT4577_134460C.1.pep

SEQ ID NO: 222443 - protein, 264 aa, Zea mays
  Clone ID: MRT4577_134461C.1.pep
MKNVAKCDTWCELQNPANHRVFERKLRPKPSGGGHVCLGVTRCQPRVSSPSPSASAPPFRPRVGVAAPLGVRVTGGRRGQAVVAMASADARLAGIASSIRVIPDFPKPGIMFQDITTLLLDPKAFRDTIDLFVERYKDQGITVVAGVEARGFIFGPPIALAIGAKFVPLRKPKKLPGEVISEEYSLEYGTDKIEMHVGAVQANDRALVVDDLIATGGTLCAAVKLIERVGAKVVECACVIELAELKGRDKLGDRPVFVLVEADA

SEQ ID NO: 222444 - protein, 180 aa, Zea mays; identical to SEQ ID NO: 222438
  Clone ID: MRT4577_134462C.1.pep

SEQ ID NO: 222445 - protein, 208 aa, Zea mays
  unsure (1)..(208): unsure at all Xaa locations
  Clone ID: MRT4577_134463C.1.pep
MEQRDATQPEAAAEERDQERPSIIPPPKENEDKDLKLPSRVVSLLFGGDISTSAQTFEKWLSLVRKRSGAFRPSGFPHRGSRIEVMPSGSFSLFGSGDLSEHLIREAPTRKDPLDCDQSPEMSLWERLGNSSALDIESSEFSWXVLLSLHHTEHSSSSEQTEDEMNKALEVTVNSGXGVVFFXALFSFQXNIXSPEAHPVIKFSSSRC

SEQ ID NO: 222446 - protein, 227 aa, Zea mays
  Clone ID: MRT4577_134464C.1.pep
MLFLRCQPRVSSPSASASAPPFRPRVGVAAPLGVRVTGGRRGQAVVAMASADARLAGIASSIRVIPDFPKPGIMFQDITTLLLDPKAFRDTIDLFVERYKDQGITVVAGVEARGFIFGPPIALAIGAKFVPLRKPKKLPGEVISEEYSLEYGTDKIEMHVGAVQANDRALVVDDLIATGGTLCAAVKLIERVGAKVVECACVIELAELKGRDKLGDRPVFVLVEADA

SEQ ID NO: 222447 - protein, 183 aa, Zea mays
  Clone ID: MRT4577_134465C.1.pep
CALGGDGSPWLLVFASSIRVIPDFPKPGIMFQDITTLLLDPKAFRDTIDLFVERYKDQGITVVAGVEARGFIFGPPIALAIGAKFVPLRKPKKLPGEVISEEYSLEYGTDKIEMHVGAVQANDRALVVDDLIATGGTLCAAVKLIERVGAKVVECACVIELPELKGRDKLGDRPVFVLVEADA

SEQ ID NO: 222448 - protein, 30 aa, Zea mays
  Clone ID: MRT4577_134466C.1.pep
VGFLNAAYHSVYEPILKLRNGNVRSVGVRD

SEQ ID NO: 222449 - protein, 195 aa, Zea mays
  Clone ID: MRT4577_134467C.1.pep
DAKPANSVVYVSFGSLTTVAREHLEELLRGLEESGRPYLCVIRKDNKAALADAETKVDEELKNGIVVEWCDQVRVLSHAAVGCFVTHCGWNSVLESLAAGVPMVCVPRMSDQRTNAQLVVREWRVGVRAQVDDGGVLRAAEVRRCIDEAMGNLEAAAEVRRMAAEWKQVVTKAMGKGGSSDRNLMTFVDGARNAV

SEQ ID NO: 222450 - protein, 127 aa, Zea mays
  Clone ID: MRT4577_134468C.1.pep
SARAAGATCFGATVALIDAAVYSNGEGSAPTLRGSLLPMFGPPPEPLPASLEDKLRRVSEDNRRLAAVLDAILGDRSTVRALATLSSDGGTAVAATQPSRSRDRTVRARAKPSDADANHLRDCYQWR

SEQ ID NO: 222451 - protein, 45 aa, Zea mays
  Clone ID: MRT4577_134469C.1.pep
LKSVQDKNVSRLLISISVAGSADVVFRRSYRYILTTSVIVWIVFF

SEQ ID NO: 222452 - protein, 397 aa, Zea mays
  unsure (1)..(397): unsure at all Xaa locations
  Clone ID: MRT4577_13446C.1.pep
PEILLYADVDKYASIEVSVLLCDDDFIRKLNKEWRDEDHATDVLSMSQHIPELDIPILQLGDIVISVDTARRQAEERGHTLVDEIRILMVHGLLHLLGFDHEVSKVAEEEMEKEEEHILNTLEWRGKGLIKSAYDIATVMEHLQNSVEADSXRESDPTRXHQHKLSHIICDIDGTIMDHEGGLHEKSIGSLREAIAKGVNVIMVTGKSRASTIRTFKLLDFCEKGDFISETSPGVFLQGSLIYGRDGKKVHRAELDLDVCKEALLYSLKHRIPLVAYCEEQCLTLFEHPFVELLHTVHNENKVKVMHSIEDLLEYSSIQKLLLFDSTKEDSSVLRQHFSELSRGKAHVIKMHSNTIDIVPLNASKSGGLRILLDHLGITKDCDLDSIGDYTRWLSNK

SEQ ID NO: 222453 - protein, 50 aa, Zea mays
  unsure (1)..(50): unsure at all Xaa locations
  Clone ID: MRT4577_134470C.1.pep
PESARARSCVREGGCRCELIGQAQEENGDGERRRESQDVVRVVAXRGSTC

SEQ ID NO: 222454 - protein, 57 aa, Zea mays
  unsure (1)..(57): unsure at all Xaa locations
  Clone ID: MRT4577_134471C.1.pep
CSSFFFFFFFHXXRKAXGRNXXRGXXASCKYIDPLGVEMETATLEGGRESXARADIH

SEQ ID NO: 222455 - protein, 86 aa, Zea mays
  Clone ID: MRT4577_134472C.1.pep
MSRTLVQPVGQKRLTNVAVVRLRKGGQRFEIACFPNKVVNWRDRVEKDLDEVLQSHNVYSNVSKGVLAKSKDLITIFATDDLLQIC

SEQ ID NO: 222456 - protein, 209 aa, Zea mays
  unsure (1)..(209): unsure at all Xaa locations
  Clone ID: MRT4577_134473C.1.pep
MSRTLVQPVGQKRLTNVAVVRLRKGGQRFEIACFPNKVVNWRDRVEKDLDEVLQSHNVYSNVSKGVLAKSKDLIRIFGTDDLVEICVEILEKGELQVSGEEREAQLSAQFRDIATIVMEKTISTETRRPYTMNMIERIMHEIHFAVDPNLTSKEQALRVIKKLIENPEYKIKRAPFXVRFIAPKSNLAGLMEKLDGWDAIVLSKDESAD

SEQ ID NO: 222457 - protein, 92 aa, Zea mays
  Clone ID: MRT4577_134474C.1.pep
TFYFLPPGEFSSPSFVKSRTSVIPVYSVPRVWYRLENFLGTLTVSILVVVSPLVNMGTLETSLFSIDYKSLPAVHVSLVTRSTRDYSTHSIM

SEQ ID NO: 222458 - protein, 61 aa, Zea mays
  Clone ID: MRT4577_134475C.1.pep
NNLTGLSPPQLTPKLVAKASYVVLMPEQAISPQQHWALTPPKFSPPFVERCSQQITPRSCG

SEQ ID NO: 222459 - protein, 53 aa, Zea mays
  Clone ID: MRT4577_134476C.1.pep
MAPDPVAAETAAQGPTPRYFTWDEVAQRSGCEERWLVIDRKVYNISEFTRRHP

SEQ ID NO: 222460 - protein, 77 aa, Zea mays
  Clone ID: MRT4577_134477C.1.pep
LFTARAWLDSRNWKPHYLVVMLCDTRSTKVVLNNMTAHAAERIFRDLKMSASAVLYCASLALTVHRYLTCINDRASI

SEQ ID NO: 222461 - protein, 81 aa, Zea mays
  Clone ID: MRT4577_134478C.1.pep
FPLFSLMQMLCSFNVKMLVLSAIPELVSTWVSGFGFKPIEDAERKQLHNVNLMLFPGTSLLTKRLDGFIMATKPGSLPVCL

SEQ ID NO: 222462 - protein, 111 aa, Zea mays
  unsure (1)..(111): unsure at all Xaa locations
  Clone ID: MRT4577_134479C.1.pep
LDVHPSLHCAGLIENRKEGQCFSPNXAYAPSDFMRTGRITAESVLYRFGTLVTDVLRGKHMPPSHALDLIRDRNFSMLXDTXIEGXFLNEEGTQMDLLDARGLYYKPSERP

SEQ ID NO: 222463 - protein, 156 aa, Zea mays
  Clone ID: MRT4577_13447C.1.pep
MHNPNVRNFRVYGVQDVIEDHTVLLVARALRNRRKFALEIWPGVMFEKGSEEFMALIGSPIGKTIAGFLITHKPWLGLKYITHVIVVCDGNDQDRCTRGMGKMHLFFTIDDVHFENEQGSDQSDGNGETGQVESYVFQVRDDGKHVIREHKVTANL

SEQ ID NO: 222464 - protein, 57 aa, Zea mays
  Clone ID: MRT4577_134480C.1.pep
FWLFAPLPLWRLPLGVRPAFLYPPSWVPFHVPALPLCSFSRWPGPLMTSVSYCFFVF

SEQ ID NO: 222465 - protein, 46 aa, Zea mays
  Clone ID: MRT4577_134481C.1.pep
KGVWALKNIPKKFLEGGWPLQEIILRPAYFWGGTNGALSLFSPPQR

SEQ ID NO: 222466 - protein, 47 aa, Zea mays
  Clone ID: MRT4577_134482C.1.pep
PFQGSNIRTQIASHEASLSSIYPSPSVVLSARTRFFDLKKKEKGKER

SEQ ID NO: 222467 - protein, 354 aa, Zea mays
  unsure (1)..(354): unsure at all Xaa locations
  Clone ID: MRT4577_134483C.1.pep
MMASSSPQRAAGAAVAGVLLVAAAALCSCGAMAQLTADYYDCTCPDAYNIVKQVLIEAHKSDVRIYASLTRLHFHDCFVXAWGISLLYACLQXGCDGSVLLDAVPGVANSTEKLAPANNNSARGFPVVDKVKAALXDACPGVVSCADILALAAEISVELSGGPKWAVLLGRLDSKKADFKSAENLPSPFDNLTVLEQKFAAVGLHTVXDLVALSGAHTFGRVQCQFVTGRLYNFSGTNRPDPTLNSGYRAFLAQRCPQNGSPSALNDLDPTTPNLFDNHYYTNLEVNRGFLGSDXELKLGPPGPGVPGPRLQQFRTSQAAFFSSFAQSMINMGNIQPLTDPAKGEVCCAQWGGY

SEQ ID NO: 222468 - protein, 269 aa, Zea mays
  unsure (1)..(269): unsure at all Xaa locations
  Clone ID: MRT4577_134484C.1.pep
MMASSSPQRAAVAAVAGVLLVAAAALCSCGAMAQLTADYYDCTCPDAYNIVKQVLIEAHKSDVRIYASLTRHKRFHIYNCSNEYITLLVHLANKPCISCQNICYDDKNTGPRIHAPNLLVHMQCMXIESIIGLIIIQITWRAHMXQSGGPKWAVLLGRLDSKKADFKSAENLPSPFDNLTVLEQKFAAVGLHTVDLVALSGAHTFGRVQCQFVTGRLYNFSGTNRPDPTLNSGYRAFLAQRCPQNGSPSALNDLDPTTPNLFDNHYYTN

SEQ ID NO: 222469 - protein, 343 aa, Zea mays
  unsure (1)..(343): unsure at all Xaa locations
  Clone ID: MRT4577_134485C.1.pep
MMASSSPQRAAGAAVAGVLLVAAAALCSCGAMAQLTADYYDCTCPDAYNIVKQVLIEAHKSDVRIYASLTRLHFHDCFVQXGCDGSVLLDAVPGVANSTEKLAPANNNSARGFPVVDKVKAALEDACPGVVSCADILALAAEISVELSGGPKWAVLLGRLDSKKADFKSAENLPSPFDNLTVLEQKFAAVGLHTVDLVALSGAHTFGRVQCQFVTGRLYNFSGTNRPDPTLNSGYRAFLAQRCPQNGSPSALNDLDPTTPNLFDNHYYTNLEVNRGFLGSDQELKSAPQAQGVTAPVVDQFATSQAAFFSSFAQSMINMGNIQPLTDPAKGEVRCDCRVANDD

SEQ ID NO: 222470 - protein, 73 aa, Zea mays
  Clone ID: MRT4577_134486C.1.pep
ALWGYVAVGARPESRFFISEKLTRSPPRQFLINPRSPGFPPKKKKKKKKKKKKKKKKKKKKKKKKKKKKKKGR

SEQ ID NO: 222471 - protein, 73 aa, Zea mays
  unsure (1)..(73): unsure at all Xaa locations
  Clone ID: MRT4577_134487C.1.pep
PXXGXPGATHSVRLLPLHRPRLFRLLAHQSPAGGASHNRARHQIQLGRSGAMAALASFPYASHRPPEVRTRHL

SEQ ID NO: 222472 - protein, 342 aa, Zea mays
  Clone ID: MRT4577_134488C.1.pep
MMASSSPQRAAGAAVAGVLLVAAAALCSCGAMAQLTADYYDCTCPDAYNIVKQVLIEAHKSDVRIYASLTRLHFHDCFVQGCDGSVLLDAVPGVANSTEKLAPANNNSARGFPVVDKVKAALEDACPGVVSCADILALAAEISVELSGGPKWAVLLGRLDSKKADFKSAENLPSPFDNLTVLEQKFAAVGLHTVDLVALSGAHTFGRVQCQFVTGRLYNFSGTNRPDPTLNSGYRAFLAQRCPQNGSPLALNDLDPTTPNLFDNPYYTNLEVNRGFLGSDQELKLAPQAQGVPAPVVDQFATSQAAFFSSFAQSMINMGNIQPLTDPAKGKVPCDCRVANYD

SEQ ID NO: 222473 - protein, 73 aa, Zea mays
  Clone ID: MRT4577_134489C.1.pep
KNKQYFINKKKKKIKKANIKQQQLLKTILHQKPKIILPTILHQLAPPFVPLLPNYLQPVTSFLLAPHSALGAL

SEQ ID NO: 222474 - protein, 63 aa, Zea mays
  Clone ID: MRT4577_13448C.1.pep
AFRVFFFSFQPKFLWFKGRVLIFQNPFYKGFFFPKLPEFGGPCFLLGQPVLYQWGPLGKIILT

SEQ ID NO: 222475 - protein, 64 aa, Zea mays
  Clone ID: MRT4577_134490C.1.pep
FSQSSRCKLGASKINLGGPIQEVVSWMHEYEPPDPFRSPALFFFFFFFFFFFFFFFSDAWADAW

SEQ ID NO: 222476 - protein, 183 aa, Zea mays
  unsure (1)..(183): unsure at all Xaa locations
  Clone ID: MRT4577_134491C.1.pep
GAGDGDGDGVWXRRRRRRGSRTRRSRVYSPYSLSPRPRRRRSRRPSSXASSSCXGRARRRRRAAAXAPTPSTRPXGAPRVGLALAPVAPGAAAVRAXLAPHHRRRPAPRWRRGLLLVLGLHAADASDGGTRRPLHSVRHDAAAAAAARGLLLPRILTHLPIDHARPVALLVCYCRPACGAVPW

SEQ ID NO: 222477 - protein, 53 aa, Zea mays
  Clone ID: MRT4577_134492C.1.pep
SYDDSDKHLVTIHYQHFSFSFNNSENYIMKGIINLQEKQMKNFTIHYADGNLL

SEQ ID NO: 222478 - protein, 36 aa, Zea mays
  Clone ID: MRT4577_134493C.1.pep
SHSDGFTQELDGSPMDKSNYHTTHIQALKSHINCIL

SEQ ID NO: 222479 - protein, 46 aa, Zea mays
  unsure (1)..(46): unsure at all Xaa locations
  Clone ID: MRT4577_134494C.1.pep
SCVGESPYKTGLPIDLDHVTDAILGRLKXLHYLHVALIRENMTRCA

SEQ ID NO: 222480 - protein, 68 aa, Zea mays
  Clone ID: MRT4577_134495C.1.pep
EFLFQDYRNGDPLLPTEVHLQCEIIVSPMLLLDCKFCTDFLRPYWKDIVHLFWFLLPIYLINKQTFFS

SEQ ID NO: 222481 - protein, 176 aa, Zea mays
  unsure (1)..(176): unsure at all Xaa locations
  Clone ID: MRT4577_134496C.1.pep
MCRLRLLLRPISWPHLHPLPPPMCRLRLLLTFFLLLRPIPHAFQPGRHSPALQCALNYTELLPFLAPPLPRDDASRCAGATQSDAFLLSLHLAATXNFVLPPDASYCLYPIRAELSYPVPTSDCGLXGLNTALASPACGNAYTVVDFDALVPPSSSVDIDXRCDRELSAVPDWTAC

SEQ ID NO: 222482 - protein, 182 aa, Zea mays
  unsure (1)..(182): unsure at all Xaa locations
  Clone ID: MRT4577_134497C.1.pep
AAPLRPLFYNVPPGFVWPVLFLDQPGPAAYHIFLSQGGPAFSPFVPPKRPLSFPPLAAFSPPSLSPPVAPFFLALLWAGASVVCPLFPPPGGPLFSPLFSPPGFLFFYKNFPPHFFFFIPPPPWPFFFYSRISFFFFLVAFWMELFFFLPKKNPLILYKNPKKKKKKKKKKKKKKKKKKKKX

SEQ ID NO: 222483 - protein, 1080 aa, Zea mays
  Clone ID: MRT4577_134498C.1.pep
YWITGCGLFGKKKKKKKKVGSTAKSSGIQCFKCGGRGHVIKECPNNRVILVTDDGEYTSASEEEAEAGNEDDIDKSEEHTGCEFEHGTTLVVTQILSVQMKEAEIGQRHNLFQTRAKVQDKVVKVIIDGGSCHNLASREMVEKLDIKIGYKVKVSFKIGEYVDTVECDVAPMSVCHMLLGRPWQYDRYSQHCGRTNQYTLDLKGRKFVLKPMTPQQIMVEHLQKKTEISAASRGGEEQNKLSAIHNSDFEDVFPQETPAGLPPIRGIEHQIDLILGAALPNRPPYRTNPEETKEIQRQVQELLNKGFVRESLSPCVVPVILVPKKDGSWRMCVDCRAINNITVRYPIPQLDDMLDELSGSTFFTKIDLRSGYHQIRMKTGDEWKTAFKTKFGLYEWLVMPFGLTNAPSTFMRLMNHVLRTFIGKFVVVYFDDILIYSKSFDEHVKHIRQVLDERRKEKLFANLEKCSFCTDHVVFLSFVVSAKGIEVDESKVKAIKDWPAPTNVSQVRSFHGLAGFYRRFVRDFSTIASPLNELTKKCVEFKWGNSQEDAFQELKKRLTEAPVLILPDFTKTFEVECDASGIGIGGVLMQQGKPIAYFSEKLGGAQLNYSVYDKELYALVRALETWQHYLWPKEFVIHSDHEALKYLKGQAKLNRRHAKWVEFIETFPYIVKYKKGKDNVVADALSRRNVLLNQLEESHGGGLTGHFGQKKTYEMLSDHFYWPKMRRDVIRFVERCVTCHKAKFSKMAHFIPCNKSDNASHVANLFFREILRLHGVPKTIVSDRDVKFVSYFWKTMWAKLGTKLLFSTTCHPQTDGQTEVVNRTLSMLLRTMVKKNLKDWEECLPHVEFAYNRAVHSTTNLCTFEIVYGFKSIAPIDLLPLPLQERTNIEASKCAAYIKKIHEKTKEAIELKAVRKATSMNKHRKKVLFEPGDLVWIHLRKERFPEQRKSKLMPRGDGLFRVFAKINDNAYKIDLPPSYGVSNTFNVADLLPYTSEDTSESRTTPFHGEEDDTTTTLRNTLQPPRHTTSTQVPSTSRIRAKMLYSTSKDRIKYELDGFHYETQATDPSEVDIEVLREWAH

SEQ ID NO: 222484 - protein, 747 aa, Zea mays
  unsure (1)..(747): unsure at all Xaa locations
  Clone ID: MRT4577_134499C.1.pep
MPKFDGRSDPEDYFTWELKVEKIFRLHNYLEEKKLAMASLEFEGYALIWWEQLLSDREEDGDDPIITWQEMRREMRIRFVTKHYRRDLFDKLQNLSQGSFSVEENYKEMEKAMIRANVYEDEEQTIASTKAERQLQQDAKSTKPLSYGARTMTGGSKSISRFTAASSATKGSIGGLQSNIQGNSSAKNGVAPNTSYKPAASTSTSVGSIAKSSGIQCFKCGGHGHVIKECPNNRVILVNDDGEYTSASEEEAEAGNHCGRTNQYTLXEREKVCTQAYXPQQIMAEPLQKKTEISAASRGGEEQNKLSAIHNSVSECYKPNSRDKRKEEGEHLVMLATKSELREVRNNPYQVLFVLVNKDALISPNDITSLPSVVADLLQDFEDVFPQETPAVLPPIRGIEHQIDLIPGAALPNRPPYRTNPKETKEIQRQVQELLDKGFIRESLSHCAVPVILVPKKDGSWRMCVDYRAINNITVRYHHPIPRLDDMLDELSGSTIFTKIDLRSGYHQIRMKTGDEWKTAFKTKFGLYEWLVMPFGLTNAPSIFMRLMNHVLRTFIGKFVVVYFDDILIYSKSFDEHVKHIRQVLDELRKEKLFANIEKCNFCTDHVVFLGFVVSAKGIEVDESKVKAVKDWPAPTNVSQVRSFQGLAGFYRRFVRDFSTIASPLNELTKKGVEFKWGNSQEDAFQELKKRLTEAHVLILPDFTKTFEVECDASGIGIGGVLMQQGKPIAYFSEKLGGAQCNTSGVT

SEQ ID NO: 222485 - protein, 212 aa, Zea mays
  unsure (1)..(212): unsure at all Xaa locations
  Clone ID: MRT4577_13449C.1.pep
HWVPRGRPGDIQSKDAIASSSPLSRAYAYIRRTDQRLTTPARGDVCYLTTTTWARRRISDRDGEDLLNPCYISLGPNHVQSIPIRCRNGLDWIAFSYRDHRGKLHTDAPCVGNXANDRXTETITLEASYYVTXVCXTTRPIMIMNVDRCITSIKAVSKLLSYLPFSHSVNSTHHRLPVIDSITILMFTRALYLLEPIRFYIIPYALTAIEST

SEQ ID NO: 222486 - protein, 960 aa, Zea mays
  Clone ID: MRT4577_1344C.1.pep
AAPSRWPPACYAQHRNSEITEEMMQEMDYNADRAWYDCEEHTTMFDGDHSMYLGDDNSYKKREAEMPKKLTRRDGSLMTLAQSKKMSQMTADNAQWEDRQLLRSGAVKGTEVQTEFDDEEERKVILLVHDTKPPFLDGRVVFTKQAEPVMPLKDPTSDMAIIARKGSSLVREIREKQSMNKSRQRFWELAGSKLGNILGVEKTAEQVDADTAVVGDQGEINFKEEAKFSQHLKDKAEAVSDFAKSKSLSQQRQYLPIFTVRDDLLQVVRENQVVVVVGETGSGKTTQLTQYLHEDGYTTTGVVGCTQPRRVAAMSVAKRVSEEMETDLGDKVGYAIRFEDVTGPNTIIKNILWACLQYMTDGVLLRETLKDADLDKYRVVVMDEAHERSLNTDVLFGILKKVVARRRDFKLIVTSATLNADKFSKFFGGVPVFHIPGRTFPVNIMFSKTPCEDYVEAAVRQAMTIHITSGLGDILIFMTGQEEIEATCYALAERMEQLISSSTKTIPKLEILPIYSQLPADLQAKIFQKAEEGARKCIVATNIAETSLTVDGIFYVIDTGYGKMKVYNPRMGMDALQVFPVSRAAADQRAGRAGRTGPGTCYRLFTESAYQNEMLPNPVPEIQRTNLGNVVLLLKSLRVENLLDFDFMDPPPQENILNSMYQLWVLGALNNVGGLTEIGWKMVEFPLDPTLAKMLLMGEQLECLDEVLTIVSMLSVPSVFFRPKDRAEESDAAREKFFVPESDHLTLLNVYLQWKSNQYRGDWCNDHFLHVKGLRKAREVRSQLLDILKTLKIPLTSCHMEWDVVRKAICSAYFHNSARLKGIGEYVNCRNGMPCHLHPSSALYGLGYTPDYVVYHELVLTTKEYMQCVTAVDPQWLAEMGPMFFSVKETDTSLLDHKKRQKEEKTAMEEEMEKLRRQQAEAARMEKEKEREKRAKQQQQVAMPGLKKGATYLRPKRMGL

SEQ ID NO: 222487 - protein, 145 aa, Zea mays
  Clone ID: MRT4577_134500C.1.pep
MAFMRSHSNASSGMGVAPNIRETFVELQMKKAYRYVIFKIEEKQKQVVVEKTGATTESYDDFLASLPENDCRYALYDFDFVTGENVQKSKIFFIAWSPSTSRIRAKMLYSTSKDRIKHELDGFHYEIQATDPTEVDIEVLRERAH

SEQ ID NO: 222488 - protein, 468 aa, Zea mays
  Clone ID: MRT4577_134501C.1.pep
SPAPRRPPALPLLARLHPRPPPPCGPRRLLASTAPRVTPFMHRLVLEHGRTSMSWFGPSPKVTIVDPDLAKDVLSNKFGHFEKLKVPALSKMLGSGVASHEGEKWVKHRRILNHAFHLEKLKRMLPAFSTCCEELVSRWAAESLGSDGSCELDVWPELQNLTGDIISRTVFSSSYSEGRRIFQLQVEQASLVMTNIRKIMIPGYMYLPTANNRKMRRNNREVESILREIIGKRIQAMEQGEGTKDDLVGLLLETNMRDDMGMTIEDVIEECKVFYFVGMETTLVLLMWTMVVLSMHPEWQDRAREEVTALFGRDDKPEYDGLSRLKVVTMVLYEVLRLYPPATSVVRQTYKEMEVGGVTYPAGVILELPVLLIHHDPDIWGGDAREFRPDRFSEGVSRASKDPGAFLPFGWSPRICIGQNFALLEAKMALCMILQRFEFGLAPSYAHAPHTMITLHPMHGAQLKLRAI

SEQ ID NO: 222489 - protein, 293 aa, Zea mays
  Clone ID: MRT4577_134502C.1.pep
MPRNMVNRQFCHTQLNYSVYDKELYALVRALETWQHYLWPKEFVIHFDHEALKYLKGQAKLNRRHAKWVEFIETFPYIVKYKKGKDNVVADALSRRYVLLNQLEESNGGGLTGHFGQKKTYEMLTDHFYWPKMRRDVIRFVERCVTYHKAKSKLNPHGLYTPLPTPKIPWEDISMDFVLGLPMTRKKRDSIFVVVDRFSKMAHFIPCNKSDDASHVANLFFREILRLHGVPKTIVSDRDVKFVSYFWKTLWAKLGTKLLFSTTCHPQTDGQTEVVNRTLSMLVRTMVKKNLKD

SEQ ID NO: 222490 - protein, 241 aa, Zea mays
  Clone ID: MRT4577_134503C.1.pep
VVTGGNRGMGLEICRQLAGHGLAVVLTARDDKRGAEAAETLREEGLSDVAFHQLEISEPASAARLAAFVKKKFGKLDILVNNAGVLGVTTDVGDPATLQETLAGKDGMERAEWLRQRTTQTTQDAEDCLRINYHGNKTVTEALLPLLRSSSDGRIVNVTSAWGLLRYFSGDELRRELDDVANLTTQRLDEMSDLFLEDLGKGNGALERRGWPADPVYAAYMASKALVCAYTRVIAREEGAA

SEQ ID NO: 222491 - protein, 99 aa, Zea mays
  Clone ID: MRT4577_134504C.1.pep
LLNKDVLISPNDITSLPSVVANLLQDFEDVFPQETPTGLPPIRGIEHQSDLIPGAALPNRPPYRTNPEETKEIQRQVQELLDKGFVRESLSPCVVPMIL

SEQ ID NO: 222492 - protein, 49 aa, Zea mays
  Clone ID: MRT4577_134505C.1.pep
FCNNPDNFQVEAVTLFSFFRFVMFGDPRFEIFFRLFPVLIRITSTAFPG

SEQ ID NO: 222493 - protein, 145 aa, Zea mays
  Clone ID: MRT4577_134506C.1.pep
MAFMRSRSNASSGMGVAPNIRETFVELQMKKAFRYVIFKIEEKQKQVVVEKTGATTESYDDFLASLPENDCRYALYDFDFVTGENVQKSKIFFIAWSPSTSRIRAKMLYSTSKDRIKYELDGFHYEIQATDPSEVDIEVLRERAH

SEQ ID NO: 222494 - protein, 210 aa, Zea mays
  Clone ID: MRT4577_134507C.1.pep
MGNSKPGRDPPKPASINKKKKRKPPLPATEEEGVPSPWLRCASLLSACVQSTQRRGRSHHHNHDPMAFMRSRSNASSGMGVAPNIRETFVELQMKKAFRYVIFKIEEKQKQVVVEKTGATTESYDDFLASLPENDCRYALYDFDFVTGENVQKSKIFFIAWSPSTSRIRAKMLYSTSKDRIKYELDGFHYEIQATDPSEVDIEVLRERAH

SEQ ID NO: 222495 - protein, 145 aa, Zea mays; identical to SEQ ID NO: 222493
  Clone ID: MRT4577_134508C.1.pep

SEQ ID NO: 222496 - protein, 116 aa, Zea mays
  Clone ID: MRT4577_134509C.1.pep
EQTCKVCRSTCSRTRDLVLDAQNEPLTLRICSIRFGSACFFLDLERMFKSMVYFVNISIGEVEVWPKGQASAGLAVAAWARDIRVDRLSPPSERCPPLAVMHTVAVAGRCLVMESR

SEQ ID NO: 222497 - protein, 34 aa, Zea mays
  Clone ID: MRT4577_13450C.1.pep
IQVYGGAFSSYGRVLSIQYFMTHTDFSCLLYYYV

SEQ ID NO: 222498 - protein, 110 aa, Zea mays
  Clone ID: MRT4577_134510C.1.pep
IGPARHWAPKVKRGGPPPGGLNIKTGPRKKNPFNCPPHYPWWLAPRLGFLVLGFVLRPPRFPPGDPPPLDPVLLGPDLILDLKGCFFWVFPQKKKKKKKEKKRKKRKKIK

SEQ ID NO: 222499 - protein, 99 aa, Zea mays
  unsure (1)..(99): unsure at all Xaa locations
  Clone ID: MRT4577_134511C.1.pep
VPLSRGFSSGSCCLGGVLVSPVGVVVGGPVGLCLCLVVGRLGLGXCLFRPPPPCFXPVGPALVFAFLLVRGVSGGGRFGWVGLGCLRCCCCGPSLXPWL

SEQ ID NO: 222500 - protein, 129 aa, Zea mays
  unsure (1)..(129): unsure at all Xaa locations
  Clone ID: MRT4577_134512C.1.pep
FVVVSXFVSFRCSGXGRWVLTLLGPLVXPPACRRSLXXCSRWVVRLLVPGVRPSVPGSAAGPSVXXSSLVXVSPXLAPFCGVSPAXCSGWGGWLSAPVRWCCRACPSAGAPGAGWRPPRRWVGGRRASV

SEQ ID NO: 222501 - protein, 50 aa, Zea mays
  Clone ID: MRT4577_134513C.1.pep
GIGPPRERRQLNGWPVVSGVLNLGSTRPMFQPAWPVEQWMLLLLSGFVLS

SEQ ID NO: 222502 - protein, 48 aa, Zea mays
  Clone ID: MRT4577_134514C.1.pep
PESQAQSMHFLNRVAFVQKIVSFDGLGNLRMDMVFTGWLLPDCVVDPV

SEQ ID NO: 222503 - protein, 338 aa, Zea mays
  Clone ID: MRT4577_134515C.1.pep
MAMPSGWRGILGFHYGIVQAPLGPDISGPELVAAVANAGAIGLLRLPDWPAPDHVRELIRKTRSLTSKPFGAAIVLAFPHEENLRVVLEEKLDVLQVYWGDFPNHRVQEAHRAGVKVLHQVGSLEEAAKAKEAGVDGIIVQGREAGGHVIGQEGLFPLLPRVVDLVSDSSIPVIAAGGIVDGRGYVAALALGAQGVCLGTRFVATEESFAHPIYKQKLIEMSHTDYTNIFGRARWPDAPQRVLETPFYDEWKNNFPDQETEEDQPIIGHSIIHGVHKDIRRFAGTVPNATATGDIDIMAMYSGQGVGLITEIIPAAQVVKSLVAEAKEVIREKLSGYQ

SEQ ID NO: 222504 - protein, 54 aa, Zea mays
  Clone ID: MRT4577_134516C.1.pep
NPPPSIIPGSSLSSSVSQGRRVYVWIHGRFVFVSHPWPYVPFIYKQDFSPLWNN

SEQ ID NO: 222505 - protein, 101 aa, Zea mays
  unsure (1)..(101): unsure at all Xaa locations
  Clone ID: MRT4577_134517C.1.pep
RVGDNRSGRNIINNVAPNRRSDPSRIDIKGLYASNLERGDEVXAAASARIHGTDLAXMPIIGTRGKNRHQGKRRRLRHGIELALGSLNGQKPGESGVTERE

SEQ ID NO: 222506 - protein, 63 aa, Zea mays
  Clone ID: MRT4577_134518C.1.pep
MALRGLYNEIRRRKLPYASFYLNAPLRCDNAKKRLDPVRAIATSKSTSMLCQRTLSTFLESEK

SEQ ID NO: 222507 - protein, 107 aa, Zea mays
  Clone ID: MRT4577_134519C.1.pep
MSESGSKSSQPLASKQEKDGTEKRGRGRPRKQPPVSPGTALVGSQKEPSEVPTPKRPRGRPKGSKNKGAAKTRKVTTAPGRKPRGRPKKLEKEEEEGISQESSEEEQ

SEQ ID NO: 222508 - protein, 89 aa, Zea mays
  Clone ID: MRT4577_13451C.1.pep
PTQREDKLFTGCKTPGPSTGPHFSEPKGGRTLGPHAPKGVFPNFKPLVEQGYLGVFHPHFFFPGENGYFKTRNNGHAPFFLLECLPALF

SEQ ID NO: 222509 - protein, 108 aa, Zea mays
  Clone ID: MRT4577_134520C.1.pep
MGYEKGDAKKGAGLFKTRCAQCHTLKEGEGNKIGPELHGLFGRKSGQVAGYSYTDANKQKGVTWDENSLFDYLENPKKFIPGTKMAFGGLKKPKDRNDLITFLQNETK

SEQ ID NO: 222510 - protein, 171 aa, Zea mays
  Clone ID: MRT4577_134521C.1.pep
MSVQDRAQAHLSQLDKELSKYPALNNFEKQTSVPKAYAVLGLAGLYFFLIFFNIAGEFLVNIAGFVIPGYYSLNALFSASKVDDTQWLTYWVVFAFLTVFESAVSAVYWFPFYYTFKFVLILWMALPQTSGAQIVFRSFLQPVFSRYFSESGSTAADLRAKVDSAGKSHAS

SEQ ID NO: 222511 - protein, 63 aa, Zea mays
  Clone ID: MRT4577_134522C.1.pep
CRIKRMIMSAKRNNALIRKKSTQIMGPLFLYMFLNVIHFNYFFSLFPFFFFFFFFFFLYVFFF

SEQ ID NO: 222512 - protein, 73 aa, Zea mays
  Clone ID: MRT4577_134523C.1.pep
DQIRYHRQANLTSSTIAHSKLYGRDGSCSTEAELIQRGQSREYTILRYVLRRSRSAGLSQQRTSGSVHAPSGP

SEQ ID NO: 222513 - protein, 76 aa, Zea mays
  Clone ID: MRT4577_134524C.1.pep
YVMEYFIFGGPGGDMFCFMFEFPPPPKICLVSSNYFRNKKLFWGGLKKKKKKKKKKKKKKKKKKKKKKNLKKNPPP

SEQ ID NO: 222514 - protein, 85 aa, Zea mays
  Clone ID: MRT4577_134525C.1.pep
TILNPNKHTNLFSLPTISHPIVRFFILGEHPSHFPNHYNLHHHHQKPLISLSPKTHFPQDFPRLKTLLSQPHTIPFYTKNSHLPL

SEQ ID NO: 222515 - protein, 82 aa, Zea mays
  unsure (1)..(82): unsure at all Xaa locations
  Clone ID: MRT4577_134526C.1.pep
GRRAGRSTTAPPSRTILTVXVVLMFLAXAVGAARAKPPPAPAXXXLXEKKKTPPPPARSAXXLKKRLRARPACFSTTIRRLT

SEQ ID NO: 222516 - protein, 33 aa, Zea mays
  Clone ID: MRT4577_134527C.1.pep
TNQVKQKGVESIFVAARIIVKNSPISALGIRIS

SEQ ID NO: 222517 - protein, 289 aa, Zea mays
  unsure (1)..(289): unsure at all Xaa locations
  Clone ID: MRT4577_134528C.1.pep
VASPFTRREFDTLPPGPSVPVVAPGGPPRPGARPPTHFAVDPHTGSCPTGDRYXPGYRPLPSPHPGRPLLSRRRLPSGRCSPVAGSRSAARAPRERRLAASRWRRTASPRPCGTTRVSGTCCSDAASWVPRTASPTCDLWRRGPPRWGRRQLQVRHQPATHLGSRIFCHQSARAAGGSRAGDGAVLVLLPVPKAALLGSPPTDQLVPRPQLLLQSVPILIVEDLLCLLWCLESAFRERPLPQAKKSWGSEIASSGGRSSSDVSTPYATTFCASTPDATIDKLRKKGXNX

SEQ ID NO: 222518 - protein, 106 aa, Zea mays
  unsure (1)..(106): unsure at all Xaa locations
  Clone ID: MRT4577_134529C.1.pep
MQQSGKKGPKTQGQENEKKKGTQRKKAKGQRRXQKEGPRKKGMNPRKARRGPQKKPRGKKXRQEGKGRGEGKPGKRGRKGGKKGRKWKRGGGKKGGGAKRKGPRGA

SEQ ID NO: 222519 - protein, 111 aa, Zea mays
  unsure (1)..(111): unsure at all Xaa locations
  Clone ID: MRT4577_13452C.1.pep
CAPGXKYXGPGPLQISXNFXYGPPGRDIGLKGLAGPTRVAQYPVIAFKRALWFCINKVPRLIPQGFGATIRAIRGALESXGTNPAQMNGRVGXSNQSCQQLRVAPGPNLPC

SEQ ID NO: 222520 - protein, 143 aa, Zea mays
  unsure (1)..(143): unsure at all Xaa locations
  Clone ID: MRT4577_134530C.1.pep
WSSASNCRRPLPVTGFKGTASPTLPXVTSRARVPIRVLQTRGLSKSNRLVQQVLVEWSGLPLELATWENQEALRQCFPFAPAWGQAGFEGSRSVTNQGDVAEPGTSYKQDGATLDGIQHTTKQNGAARRIRRPNRRVCGPEWL

SEQ ID NO: 222521 - protein, 75 aa, Zea mays
  Clone ID: MRT4577_134531C.1.pep
NKFYFFSIYNLTCFLFSTHKHTYFFFLGNKKKLPFLKKRGAKTFLLAQPITIGQKTYGPQMVGPLQPNLSNWRHN

SEQ ID NO: 222522 - protein, 130 aa, Zea mays
  unsure (1)..(130): unsure at all Xaa locations
  Clone ID: MRT4577_134532C.1.pep
HGQNLFVHDFHREXGTLHDLTPLFQIEHTQPLXSRNSLIKITLXLGRAVHDLHDIXLHSIIHKNFTDXNISRCXQFNPHXSDAXLASFIPDAEFQARKLSDGYTAPERDMTGQYTLKRDVYRFVDLMLEL

SEQ ID NO: 222523 - protein, 96 aa, Zea mays
  unsure (1)..(96): unsure at all Xaa locations
  Clone ID: MRT4577_134533C.1.pep
ALXXRPAAGEGPTITSTLMKAMRAXFGXXKKKXXKKKTQKXKKKKKKKHLRPANHPLRAEIPSNTWAGLFLGGSAELRVTKPVAVYHWSISLVSLW

SEQ ID NO: 222524 - protein, 53 aa, Zea mays
  Clone ID: MRT4577_134534C.1.pep
GLRLLRFCRLLFHFGLRSGKFKLRLQPWVRRSFTSTLWILATYTLLCFHPPYI

SEQ ID NO: 222525 - protein, 74 aa, Zea mays
  Clone ID: MRT4577_134535C.1.pep
GSIAPMFVLVALPHWPGSIEDSSRTTVLKVRKGMWKQSRRQPRVVLYGTSWSQFLLCHSLFPLRLLPVLLSFAG

SEQ ID NO: 222526 - protein, 83 aa, Zea mays
  unsure (1)..(83): unsure at all Xaa locations
  Clone ID: MRT4577_134536C.1.pep
QRPAEEKTEVLYWHSEKLAIAFALLSSEPNTXDKXLXKNLRMCLDCHNAIKLISRLYGREVVVRDRTRFHHFRHGFCSCKDYW

SEQ ID NO: 222527 - protein, 30 aa, Zea mays
  Clone ID: MRT4577_134537C.1.pep
PLPHYTAFPPCNPICLLIFIPPTLMKKWKT

SEQ ID NO: 222528 - protein, 535 aa, Zea mays
  unsure (1)..(535): unsure at all Xaa locations
  Clone ID: MRT4577_134538C.1.pep
MRSPALLAAALAAVALLAAGAGVAVAATEEAYVTLLYGDEFVLGARVLGKSLRDTGTRRDMVVLVSDGVSEYSRKLLQADGWIVNRITLLANPNQFRPKRFWGVYTKLKIFNMTSYKKVVYLDADTIVVKSIEDLFKCGKFCGNLKHSERMNSGVMVVEPSETLFNDMIKKMGQLPSYTGGDQXFLNSYYSDFANSRVYEPDSPLTPEPATQRLSTLYNADVGLYMLANKWMVDEKELRIIHYTLGPLKPWDWFTAWLVKPVETWQDIRQKLEESLPGTGGGRNPHDQLVXKILFILPFCLLLFGYYQSXSDRPGXVSIRSLCAFARRARHKYKSEESLPSYSVVGSSSAFGISSQRLSNGHLKLPSYFGAIAVLVCFVSAGFSLAFAFAIIPRQVMPWTGLLLMLEWTFVAFFLLFGSYLRFVYRWGSISANHVGFSNSDSSENHMGPGHQRNMSDCDMDATFYWIGMASIATITVLLPTILGITALFTKLGLMVAGGIVLASFMTYAAEHLAISVFNKGQKYRNASRTRSFCF

SEQ ID NO: 222529 - protein, 117 aa, Zea mays
  unsure (1)..(117): unsure at all Xaa locations
  Clone ID: MRT4577_134539C.1.pep
CGGESQGAVELYSELRNMYPSLGYNHHTFLALLVAGAQLMDRELARQFHCHLVVLGFLSDVKIASSLLDVYRKCHCVDDARNLFGECXIKDVRMSTTVVCDCAEDGXLGTARQLFDQ

SEQ ID NO: 222530 - protein, 74 aa, Zea mays
  Clone ID: MRT4577_13453C.1.pep
LCFFFYMFFYLCFLKGTKQDSIYFHMYLPSFMEGTWTPETEICLLSIAVFLLRINSFDLYTRHREPMARRILFF

SEQ ID NO: 222531 - protein, 124 aa, Zea mays
  unsure (1)..(124): unsure at all Xaa locations
  Clone ID: MRT4577_134540C.1.pep
FKYYPKKEHWRHDKNIKEEHEDLYVEAXIREEMYQTDTSKLDERFFYLGEETTQVLHANTSSLEAXHSENDKALSLSSEENKKLKEKLALLETAHFIEDGQPELXLMKQDSEEMILRDTEMEAP

SEQ ID NO: 222532 - protein, 122 aa, Zea mays
  unsure (1)..(122): unsure at all Xaa locations
  Clone ID: MRT4577_134541C.1.pep
MSFRGGSRGRGGSGFGGRGGGRGGFQQRDMGPPAQILEMGKFMHACEGEMVCESINPKVPHFNAQIFLENKTAVXKVDEVLXPINQVFFTIKXTEGIQXTSFKEGDKFYIXSEKXLALDKFL

SEQ ID NO: 222533 - protein, 74 aa, Zea mays
  Clone ID: MRT4577_134542C.1.pep
VTAQVAERYSTNSNAGGSSWHHSVTRVLITRMGVVKAKWFWSFCLCMDAWLPTEQQFQFPTDPPSCPASALVVA

SEQ ID NO: 222534 - protein, 57 aa, Zea mays
  unsure (1)..(57): unsure at all Xaa locations
  Clone ID: MRT4577_134543C.1.pep
MGKRQINKSEDSTKDDIDLDALAAELEGAGAAKEQEPQKSKXEKNKEKKKQDFDEDD

SEQ ID NO: 222535 - protein, 40 aa, Zea mays
  Clone ID: MRT4577_134544C.1.pep
ACIVAKQAFDQAMSELESLGEDSNKDIPLINRPIRDNLTI

SEQ ID NO: 222536 - protein, 424 aa, Zea mays
  Clone ID: MRT4577_134545C.1.pep
MAFKYICEDCRTKFSGSLDGLFQIYHIAISGVGGYKVSSEDSLHLVEALSVIITTLPPESASRALELICQPVINPLQEFIQQGDQVLQRVPARHLTVHIDRLSSIFSNVKQPEVVAEAVYRYWPTLKSIFDQRAWDTRTMESICRSCKFAVRTCGRVMGMTIGAMLEEIQTLYQQHKQSCFLYLSSEVIKIFGSDPSCAGYLTNLIQILFSHTVQLLRTIQDFTARPDIADDCYLLASRCIRYCPDLFIPTETFQRLVDCAMAGITIHHREACKSILSFLSDVIDLPNSSDGGQYRKVINTIILHRGATLTRIMIAALTGALPSGRLEEVSYVLLSLSRVFGENMLNWARESINLIPPQALTDAERLRFFNTISDAASGSSLHTITDRFGEISDVCRRNKTVQDLVQSALRPQDLTVTVVRQQM

SEQ ID NO: 222537 - protein, 663 aa, Zea mays
  unsure (1)..(663): unsure at all Xaa locations
  Clone ID: MRT4577_134546C.1.pep
GRVVGSRENALSAVKGRTSPLSRTPIPTDATARSLPEKQEPARGCRPSRGISGDPSPRTACAASPSTXREYVTSECHRPVVLHKRGPDILHDPWFNRGTAFSMTERDRLGLRGLLPPNVVSSQQQIDRFMLDLKRLQRYARDGPSDTYPLAKWRILNRLHDRNETMYYKVLIDNIEEYAPIVYTPTVGLVCQNYSGLFRRPRGMYFSAEDRGEMMSMVYNWPADQVDMIVVTDGSRILGLGDLGVHGIGIAIGKLDLYVAAAGINPQRVLPVMIDVGTNNEKLLKDPLYLGLQEHRLEGDEYVSVIDEFMEAVFTRWPNVIVQFEDFQSKWAFRLLQRYRKTYRMFNDDVQGTAGVAIAGLLGAVRAQGRPMIDFPKQRIVVAGAGSAGIGVVNAASRTMARMLGNNDVAFESARSQFWIVDAHGLITEDREDIDPDARPFARRKSELGHQGLSEGASLVEVVKKVKPDVILGLSAVGGLFSKEVLEALKDSSSSRPAIFAMSNPTKNAECTPGEAFSILGEKVIFASGSPFHDVDLGDGKIGHSNQGNNMYLFPGIGLGTLLSGARVISDGMLQAAAERLASYMKEEEVLEGIIYPPISRIRDITKEVAAAVVREAVAEDLAEGYRDMDARELARLSEEETNEYVKTNMWSPVYPTIIYKKD

SEQ ID NO: 222538 - protein, 101 aa, Zea mays
  Clone ID: MRT4577_134547C.1.pep
DPECNDPVFVPMGGVVLPRRGFSELGGDTRGRGGPPPPVRAQGPRCVPQRPGLGGQLGLFAGDPPGVQAEIGKVRVAKGAFSPKEGAPKRGSRGRVLVLFL

SEQ ID NO: 222539 - protein, 244 aa, Zea mays
  unsure (1)..(244): unsure at all Xaa locations
  Clone ID: MRT4577_134548C.1.pep
MYRAFVSSVTTAGLTTMLQTCSLGSGQHDTKVLEALKDSSSSRPAIFAMSNPTKNAECTPGEAFSILGEKVIFASGSPFHDVDLGDGKIGHSNQGNNMYLFPGIGLGTLLSGARVISDGMLQAAAERXSLDLLPLNLVTQKHNRAITYIFNCKIYCVTFYXLASYMKEEEVLEGIIYPPISRIRDITKEVAAAVVREAVAEDLAEGYRDMDARELARLSEEETNEYVKTNMWSPVYPTIIYKKD

SEQ ID NO: 222540 - protein, 57 aa, Zea mays
  Clone ID: MRT4577_134549C.1.pep
HHLCKQINALVKLPNIAGMLMFEGTNYKKWLIYRYKIFCAPLRYLQKVEFHKFLRPQ

SEQ ID NO: 222541 - protein, 85 aa, Zea mays
  Clone ID: MRT4577_13454C.1.pep
MNDHDNTYWAPTAEDGRRTRNWFKMRRRPGARARAFNVVRIQKHVALGQRSGTSTRVYVNGAPVANGTTVGHKRLHRKPCPVAGT

SEQ ID NO: 222542 - protein, 54 aa, Zea mays
  Clone ID: MRT4577_134550C.1.pep
YNSGYECKPCCVVILSISSLLGAHLVSMLILYSERLNVNYWSIRFIRLLNWNAL

SEQ ID NO: 222543 - protein, 87 aa, Zea mays
  Clone ID: MRT4577_134551C.1.pep
VGFFFLFLFSETRPNQKQSGFLTLERPGGPLPRPGVWGSPNNFQHGRGDKKPSLGWDLWANLSRGGFGASHPPGGGGATPGSRGGAR

SEQ ID NO: 222544 - protein, 88 aa, Zea mays
  Clone ID: MRT4577_134552C.1.pep
LGSYFFSCFFIFFLFFLRQKNIQNKPGLVGLKPAPARFIPNWGPRPARAQFRGFGGGTKNAGACFSPPLCGDPPQAYCYPLWAPRNVP

SEQ ID NO: 222545 - protein, 63 aa, Zea mays
  Clone ID: MRT4577_134553C.1.pep
TLWHVIPNCSDSRSAYTRGQGRKLIIAATRGLSARQCTHLGYREAGSVCVSSRRLCYSSNGIS

SEQ ID NO: 222546 - protein, 75 aa, Zea mays
  Clone ID: MRT4577_134554C.1.pep
ARAKQAVKQVGQKDAADGEQDGVAPARAHRLLRRRVRFGRPRHLHLARPAPSVRPAFLCSVRPLALKQARREGKG

SEQ ID NO: 222547 - protein, 66 aa, Zea mays
  Clone ID: MRT4577_134555C.1.pep
LFFQSNNACLLLLLVMQSSFVYPCLPGCPAPVGVLYNKWPPSKICFPFPLPKNITRVSLEGCLVCP

SEQ ID NO: 222548 - protein, 117 aa, Zea mays
  Clone ID: MRT4577_134556C.1.pep
GKQPPRRPPPASPGPPPLFKVPVPGCPARGRRLKPTHRWHVCWVLVSFSQNFVSRWFPWPRPVCSIKVDRVPLPVSVPPFLGRGPSGLFFGPKPKVPAGLDFVSLGLFNYNPLRVVF

SEQ ID NO: 222549 - protein, 61 aa, Zea mays
  Clone ID: MRT4577_134557C.1.pep
TFAFISKLTKKKNFSLQQNNKLRKELALPRREAPHPKGGFPFVVVGALALLGMLLGYILKR

SEQ ID NO: 222550 - protein, 193 aa, Zea mays
  unsure (1)..(193): unsure at all Xaa locations
  Clone ID: MRT4577_134558C.1.pep
EAGPGLGNSEIHVKEXWRRIKFKNLKRGTWSQDEYQNLFDLVNLHMRVKAHQNINTGHRHIRDNISWEAISEKLTTRRAEECCTKWYGQLASPLVKQGIWADTDDYMLVEALQNVDAVCAEDVDWENLLEHRSGELCRHRWNQMIRLMGDHRYRPFIEQVEVLARRYCPEMLAYRKPVAGGSSADEPAGASDL

SEQ ID NO: 222551 - protein, 46 aa, Zea mays
  Clone ID: MRT4577_134559C.1.pep
MRGRPCWLSVVSPLWGIPVGWSSLCLPSGCCAGAPCVVTFFVVGVS

SEQ ID NO: 222552 - protein, 255 aa, Zea mays
  Clone ID: MRT4577_13455C.1.pep
MAKRSLGMVLTEYSEKKKKEGKDSIETIMSLIEFPLLDQTSSNSVISTTLNDLSNWSRLSSLWPLLYGTSCCFIEFASLIGSRFDFDRYGLVPRSSPRQADLILTAGTVTMKMAPSLVRLYEQMPEPKYVIAMGACTITGGMFSTDSYSTVRGVDKLIPVDVYLPGCPPKPEAVIDALTKLRKKIAREIIEDRTLCQSQKKNRSFTTRHKLYVRRSTHTGTYEQELLYQSPSTLDISSETFFKSKSSVSSYKLVN

SEQ ID NO: 222553 - protein, 70 aa, Zea mays
  Clone ID: MRT4577_134560C.1.pep
CVTFTHDSSLLSIITLLISDKKKNDLPTRVQLGMDSRTVFRLQHPHANVPQIETDFVRRIFNSQSSSCFI

SEQ ID NO: 222554 - protein, 293 aa, Zea mays
  unsure (1)..(293): unsure at all Xaa locations
  Clone ID: MRT4577_134561C.1.pep
MMGGGLINTWKKWEIQVLVLLSFTLQLILLAFARIRRRKGSAPLRVLLWLAYLMADSTAIYTLGHLSLRASSGEKQVVALWAPLLLLHLGGPDTITAYAFEDNQLWLRHLLNLAVQAMGAAYVLYQSVATQTHQRALVTASMLMFVTGLVKYGERTWALKRANIDSIRGGLDLQDDRDRRQPYDGRAGTAELELDSEEVLLGAHYVFNACKSFFTDDLITSGAEREAISRGIQFNGGRYTHELIEMQLSLMYDIMYXKAAVIYTWYGICIRLMSPAAPXASXFLFRLSSSRGH

SEQ ID NO: 222555 - protein, 128 aa, Zea mays
  unsure (1)..(128): unsure at all Xaa locations
  Clone ID: MRT4577_134562C.1.pep
MRASPPHCHTFWGGGGGRPPQFPPRKRPXPQGQTPEGPKREXQKLGGQNKKPTHQKKNPPPHPPQKKKPRAQKGKTRGPPQGGKPXLPGGPPTADFPTKKTPEXSSKKKPPPPREKGQKXPPQGGPPC

SEQ ID NO: 222556 - protein, 48 aa, Zea mays
  Clone ID: MRT4577_134563C.1.pep
KYFSCYQKSHTQTYSSRSCLNHAFTAYNVPLFSYNTQNPTLHIYLLQL

SEQ ID NO: 222557 - protein, 47 aa, Zea mays
  Clone ID: MRT4577_134564C.1.pep
LINLIEPSDNNTSNATSYSSASTSTTASRTITMNHSLPSTFLQITFS

SEQ ID NO: 222558 - protein, 40 aa, Zea mays
  Clone ID: MRT4577_134565C.1.pep
ISHRGTATRYPMVGPDVIEVTFCNDRIYTTVTYSDHAVER

SEQ ID NO: 222559 - protein, 66 aa, Zea mays
  Clone ID: MRT4577_134566C.1.pep
HTRPPGLVSSVQLARLTFSLGARGTVAMLMQGPLLVTDCTPTGVGWLSSSGRGRLGPAVGPTGKRG

SEQ ID NO: 222560 - protein, 141 aa, Zea mays
  Clone ID: MRT4577_134567C.1.pep
HKTGPSIHHRSPPREVCRCRSRVGKVDVVAGGRRQRTPLHGACLRDSPSCVLLQDLSLLLLKPIAPHVTTVTTGPRVRHRRSSGSGGTSVLARCHTWISGHQDPGANIITRCAGTKSHTYDESWHRIECHIFTIYQEFYTK

SEQ ID NO: 222561 - protein, 83 aa, Zea mays
  Clone ID: MRT4577_134568C.1.pep
ATPSVDHLLPSTKPATPASVPHPSTTHRTTPTPSRTTTLTTPSQSPSTASDFSMSNSRITVADTDPGPNPLPTMAVAMDLALD

SEQ ID NO: 222562 - protein, 125 aa, Zea mays
  Clone ID: MRT4577_134569C.1.pep
SVPNIFVSPFVCCDTPLLLVVNSRRVRDVSVDSDDLSSSCAPLVLSSEAPYRARPWRPLTRQHPLRRRKIPRVWIKQQILCGAHHVLDVMAESEIVVVLVALKNAFFKKKLSSLSLFVLVFLSAS

SEQ ID NO: 222563 - protein, 94 aa, Zea mays
  Clone ID: MRT4577_13456C.1.pep
AHRQRSDPPLLILPHQPAPWGRSPEREGPATQATKTPLRADLMRRKATLGTGRSPTIRVTIETQATPPPTNRRTRGTRTSRNTKGAGQRHLPKP

SEQ ID NO: 222564 - protein, 60 aa, Zea mays
  Clone ID: MRT4577_134570C.1.pep
SCHGVDGDHRRAVGHDHAGLRHRDRLAPLAYAGARQGCAPDCRAPAGHDGPTHATAERDA

SEQ ID NO: 222565 - protein, 78 aa, Zea mays
  Clone ID: MRT4577_134571C.1.pep
GPHSGMAYLAWQGVMDFGFERGILGAYSKEAQFSNNNISCSSHSNHLQVKRIVPSINPLPLERHKTCLFLCFHFVSVA

SEQ ID NO: 222566 - protein, 92 aa, Zea mays
  Clone ID: MRT4577_134572C.1.pep
KFEFLASSLCCFWLSDHTGQNQLNWPMGAVEPVLRTSSTAYIYWTLHFSSPTPSTLALVASQHLEPSLSHTSTGSQFQNLFNHGASSQSFRD

SEQ ID NO: 222567 - protein, 68 aa, Zea mays
  Clone ID: MRT4577_134573C.1.pep
MAKPDAQKSSYLKWVSKNSRPMAVNLSQVTDNADPFLVLSDYTWVNSHGSKNHNKKSSKSKKGKTKET

SEQ ID NO: 222568 - protein, 64 aa, Zea mays
  Clone ID: MRT4577_134574C.1.pep
GPATAAIDSHLTPSSSPFSAGPAGRSLLIFLRRLLLSPACFESLFSAPPSLLSYMTVSSKKHDL

SEQ ID NO: 222569 - protein, 98 aa, Zea mays
  Clone ID: MRT4577_134575C.1.pep
RLAVIVTVYQVAQLNALEQYGVSMHPTAPQLENQFSCEQACVLCESSWANFGYDYPLFTRDINLVIPLLETYLCLHSVSPCTVATLPERISTPAAVVD

SEQ ID NO: 222570 - protein, 87 aa, Zea mays
  unsure (1)..(87): unsure at all Xaa locations
  Clone ID: MRT4577_134576C.1.pep
SLDVVSWSGADQTKFPQVLTRDALFLFNEILDSKVAPPNQNTFFNILTSFNHXRIVDEGLRYYXELLMINIXLSPTIKHFTFFFYLF

SEQ ID NO: 222571 - protein, 203 aa, Zea mays
  unsure (1)..(203): unsure at all Xaa locations
  Clone ID: MRT4577_134577C.1.pep
MRGSPDQGYQHWVEPPQAPVKGEFEHYSTYARAFKQYLSLCIDYSQFCKGNFANPKRKRKEKLTEFKRRGKPNKPLANHSKALPDSGLEEQQPTMGINGSAIPDEKFGELKDELCQELVDNGAFEDVVEAEIAVHHAQVEVEAEIPEEEVFIRQPDGTSVAKSDVTLFDPPPDVQDRIVKRHLDDVXQNPTMGAGFGLARTMS

SEQ ID NO: 222572 - protein, 64 aa, Zea mays
  Clone ID: MRT4577_134578C.1.pep
KSLTLLSKGRCMTLFTSVRLALGGLLVMFMFLLLFWEVVAFPYIVISGHFHTTQACNNHYFGIL

SEQ ID NO: 222573 - protein, 157 aa, Zea mays
  unsure (1)..(157): unsure at all Xaa locations
  Clone ID: MRT4577_134579C.1.pep
SETVATSPSFSFTQSLIDVVPLRPTKSHVDTYRKNIQKEKGLEPSXIVDCCVHSFFDLDNSHQXELKKHLKDLHINCGMQTNVTXXRKGAGVHCPXYRRPHDFQKIPVRLMKQLQKTFXDEDALNVDTSRIXRHPRXGSHVLHPRTRSLTAGDYDIL

SEQ ID NO: 222574 - protein, 80 aa, Zea mays
  Clone ID: MRT4577_13457C.1.pep
SVRRLGDVRRPTRLTPAPKVSGRGQRRLLQSAVRRLFHQQRVWLISSISRAEPAPKSPYHRRNSNRERSTCGRGEASRGQ

SEQ ID NO: 222575 - protein, 110 aa, Zea mays
  Clone ID: MRT4577_134580C.1.pep
LQQPDHQPPAHGSAAGRGIAAAAAGATQHQHQQQAGGSSGAAQHEAGGGGAGNPYFLDEEALFETPQYLRNMAAGMMMSPPRFGRNSSDDSPDHPSSSDAGDSLWNYRDP

SEQ ID NO: 222576 - protein, 251 aa, Zea mays
  Clone ID: MRT4577_134581C.1.pep
APLAPVRVCAAEPLPHLSVKDTPIETSSAQYILQQYLAASGGHKLLASLRSTYAMGKVRMVATEFETAGRLTKNRSAGRGGEPGRFVLWQMAPEMWYIELAVRGSKVHAGCNGKLVWRHTPWLGAHSAKGPVRPLRRALQGLDPLTAASMFARARCIGERKVNGEDCFILKLSTDPETLKARSEGHAEIIRHVTFGYFSQRTGLLVHIEDSHLTRIQSAAGGDAVYWETTISSSMEDYRPVDGIVVAHSGR

SEQ ID NO: 222577 - protein, 92 aa, Zea mays
  Clone ID: MRT4577_134582C.1.pep
VVFFISFWGFSFFSFFFSFFPLGKRVFLGTLNLSARGNPPLFSRPPFSLKIFNQNPVWGPSSAGRGTFLFKIFILPPFPPPPKRGAYPPWGP

SEQ ID NO: 222578 - protein, 59 aa, Zea mays
  Clone ID: MRT4577_134583C.1.pep
IPVAHASAHHILPYRILIYLQNLHGTVPIRPLNLLVILTLHDNHCIIFFLTNIIYRLLS

SEQ ID NO: 222579 - protein, 150 aa, Zea mays
  unsure (1)..(150): unsure at all Xaa locations
  Clone ID: MRT4577_134584C.1.pep
PLFILNPAAFLQHQQLLPFSQLGIAFFQQQXFFPFNQLAALTPSVYFHQQILLPFGQLVTPSPASFFTQQQVLPFSHQFVANPPPLFQLHQLLPFVPLAFPNPPPFSPQPLLGGAPFRLLFSCNPIMNFLADVCAPQNKKLFSHSSVLWS

SEQ ID NO: 222580 - protein, 138 aa, Zea mays
  Clone ID: MRT4577_134585C.1.pep
VATTWRLAFVLTLVQIIHLPVRPSTSSCGLARAWGRLGSSSASRDQLSYHIDHNFAQTARFLRRPFSEHPASTTRDLLLYPNSRDRSMTQGMSTSWRLVRSSTTRSSEGRHKQHEIRNQIIRVDEHVGGTTWVDDEVH

SEQ ID NO: 222581 - protein, 42 aa, Zea mays
  Clone ID: MRT4577_134586C.1.pep
LCLGIDHHDVKLVMSLARVLGSRHGRHNSNHALLVLPSVLNR

SEQ ID NO: 222582 - protein, 42 aa, Zea mays
  Clone ID: MRT4577_134587C.1.pep
NRHNIILTSVIRLLLPLMKMVPADNLKKLKKTTHSSSISETL

SEQ ID NO: 222583 - protein, 203 aa, Zea mays
  unsure (1)..(203): unsure at all Xaa locations
  Clone ID: MRT4577_134588C.1.pep
CSAYARSYTSSNTTPTTRCAAASPRCRCPPRPPTFASSSSRPPRGSRSPGAPCTASSRTFPPSTAAPAPAPATATATATAEAVGSHTPQPLPPASXRXPSPGTSTSSTPRSSHCPAASSPPRHSAPPCEGSLPPARSXGSRAXRSSPSATALGSSRSSPTSRARSRAGSLTSRKRRSSAPSTGTASRARAGAATCWSLRTAGR

SEQ ID NO: 222584 - protein, 61 aa, Zea mays
  Clone ID: MRT4577_134589C.1.pep
LYSSRKEQQLGSHIRDRPKIGFLLHCLLLVLQLEHVLLKSWKQNMGVKLEPATRFTNWPEG

SEQ ID NO: 222585 - protein, 136 aa, Zea mays
  unsure (1)..(136): unsure at all Xaa locations
  Clone ID: MRT4577_13458C.1.pep
PAKTGGGEEKKKKWSKGNEKENVNNAVLFDLDTYYKLVSEVPXYKQITPSVLSECLKDNVSMXRKDIKGLMVKGLIRMVSVHSIHEIYTRATQDSEGCFATCRRDLVQTTRCGYYMKTILLVVRIDPTDVLNAQYV

SEQ ID NO: 222586 - protein, 76 aa, Zea mays
  unsure (1)..(76): unsure at all Xaa locations
  Clone ID: MRT4577_134590C.1.pep
LLPKGKFVVPQGAGDALVGGFLSQLVLGKGFXDWVRAGCFPAKVIIRGRGCTYREKPAFNWCKIGAGHERVCYRPL

SEQ ID NO: 222587 - protein, 91 aa, Zea mays
  unsure (1)..(91): unsure at all Xaa locations
  Clone ID: MRT4577_134591C.1.pep
VDERTLKRDGVCAASLPTTMGVDAGLLVQNSLNCLLKFGQAASYWACNVLKDXFPPTVVVGTNCTVPARWCVLRQKDCLLGRPCLHWVPLC

SEQ ID NO: 222588 - protein, 146 aa, Zea mays
  unsure (1)..(146): unsure at all Xaa locations
  Clone ID: MRT4577_134592C.1.pep
NPSRRRQDTEGGNGATARETETGATQAENNQRHTAXTNTANANKESDXRERTANPXEAPDKNGGGRXXDXSKRDAQPERXSHQXPDKATNTHGSKDXGSGXTKNDRGNNXGTSARGGTKENREAGXDXAEGHRRGQNGGGNNTAQP

SEQ ID NO: 222589 - protein, 93 aa, Zea mays
  unsure (1)..(93): unsure at all Xaa locations
  Clone ID: MRT4577_134593C.1.pep
MELQKDIDLLNPPRELEKLXSMKXRVVQAANSLFMDVKCHGXLSIATVISHSQTVVECPGCQTALSQPTGGKGMLTEGCSFRRRATRACVLLP

SEQ ID NO: 222590 - protein, 128 aa, Zea mays
  unsure (1)..(128): unsure at all Xaa locations
  Clone ID: MRT4577_134594C.1.pep
KRRDGENLGVPQFNRFGENPLLAGGGNTKRARPVGLSKHLPTLIGKGPXPCRGPLSGGGGGVTPRGPVTLARALAPVLLVFFLSFLARLAGFPGKVLNGGLLLGSQLRVLGALAPKKLVWGEGSRRGP

SEQ ID NO: 222591 - protein, 51 aa, Zea mays
  Clone ID: MRT4577_134595C.1.pep
NFHKVYQAMLLQKSLGCNKKDTTGSFKRTKPPPRIHDTQHHMMFIETTTSI

SEQ ID NO: 222592 - protein, 64 aa, Zea mays
  Clone ID: MRT4577_134596C.1.pep
PPGFAALEALSTLNLSNNRLSGRIPAGNQLRTLVDPSIYGNNLGLCGFPLEECANAAKHNDGKS

SEQ ID NO: 222593 - protein, 145 aa, Zea mays
  Clone ID: MRT4577_134597C.1.pep
MLSAAASAIPRLRLASGPRLRRPSARTHWPRPLSSSSHVTPVAAAGAGELEPPDLTRLANAARISLSPQEAEDFEPKIRQVVDWFGQLQAVDLESIEPSLRAGTTADISLREDKPETFDNRDAIKEAIPSYDDPYIKVPRVLNKE

SEQ ID NO: 222594 - protein, 117 aa, Zea mays
  unsure (1)..(117): unsure at all Xaa locations
  Clone ID: MRT4577_134598C.1.pep
MARPPTETAGGGEGDEGWRPLPNEGTALQHGYYGHPPLFPRCNLCDTPRXSRCLLVGANRSGKTTLLKMLAPKHMDGGRDVDRALKGSPYXDTQLLCNGDLSYLGGSXTRTIGSTRG

SEQ ID NO: 222595 - protein, 74 aa, Zea mays
  Clone ID: MRT4577_134599C.1.pep
SSLIPNGRGFLTLSRLLIKNTQGKKTWKNLQTITNRVLFTVGPNDLFFERDVNALVWPSRRGRWMRRPTGLRTH

SEQ ID NO: 222596 - protein, 110 aa, Zea mays
  unsure (1)..(110): unsure at all Xaa locations
  Clone ID: MRT4577_13459C.1.pep
REEHETHQAKPPSNDGTARASKXXAXRAQXAXGGSATKASXRAQGXQAPRANXPQEXRPGXTRGXEHRAGQAXRQQQAXAXERQQQPXNQRQQQGGAQXTXQTXATQQRQ

SEQ ID NO: 222597 - protein, 110 aa, Zea mays
  Clone ID: MRT4577_1345C.1.pep
MSVAGAVTTAAVPSRAPMSSASVDEARCGGGATAAAGAGGSPLPAPPHECAVCLSELPAGAEAAVPVRRRTLPACGHAFHADCIGRWLPLRPECPLCRRPVLLAGGGGQR

SEQ ID NO: 222598 - protein, 70 aa, Zea mays
  Clone ID: MRT4577_134600C.1.pep
AVGHLTCSCTCVIASSGPLWCTSICKSSSNQHMWFVCHESWLRLRWFNGPVVSSVCCPHSSSAAAWKKPK

SEQ ID NO: 222599 - protein, 65 aa, Zea mays
  Clone ID: MRT4577_134601C.1.pep
KNRAMLIVNDEDIVGVNEVRVAVLDVSGSTLGNDVHGVASEVEALCVESGMIMMTNEWEERNVEW

SEQ ID NO: 222600 - protein, 102 aa, Zea mays
  Clone ID: MRT4577_134602C.1.pep
DVIFFLLVVNKNLGGPIPGGSKVAIMLMIRHISSFHEKATTFLIRLAAPKLKIKKALFSFKIANLNPHPGEDPRNNFFQPKAPKKGPNNLAPPSKCTTWAES

SEQ ID NO: 222601 - protein, 118 aa, Zea mays
  Clone ID: MRT4577_134603C.1.pep
APPTKSPPYSTRPTKVTPSIGSVVEGPLGGKKLYPENYWNGESGSPAPPAVNRARDGSLETGVKDPQRRAGEHTGPLLSVRAGFLGGGTVLFFRARGAPRDFRAGPWGGPRFPFGGGS

SEQ ID NO: 222602 - protein, 97 aa, Zea mays
  Clone ID: MRT4577_134604C.1.pep
PGVARLLPSVKSYANKGSVIQWLLALSPPDNWVPLAFNFLNVHQCSFVLQVFSLGRVNEGIVIFQHMRERESVNAEGLSFDWHVVQEYALCAPCITF

SEQ ID NO: 222603 - protein, 72 aa, Zea mays
  Clone ID: MRT4577_134605C.1.pep
HTGPSRLFSPQPGREAALVFPSWKQTTKNQREATAAAAATSAATYEATTRRSAWRTSGFTSPGHFCYYYIKF

SEQ ID NO: 222604 - protein, 57 aa, Zea mays
  Clone ID: MRT4577_134606C.1.pep
RGGLSYITAHFFSCENVNQGLRGHGAWGPATYWFLFGRGRLQCRFLPFSLHGSVISR

SEQ ID NO: 222605 - protein, 54 aa, Zea mays
  Clone ID: MRT4577_134607C.1.pep
IFLNQTILSFTKFIKNNIYNTKEFIETKIEEYKLQDIYYINTKEFIETLYKLQD

SEQ ID NO: 222606 - protein, 62 aa, Zea mays
  Clone ID: MRT4577_134608C.1.pep
KLGNLRMEQGSYIEGFLILGCICIYFIFIFSFIFSFFYFFLFFVFFFVFFFVWFVRTRRSET

SEQ ID NO: 222607 - protein, 67 aa, Zea mays
  Clone ID: MRT4577_134609C.1.pep
MDTKTPVKLARVTKVLGRTGSRGGDTQVRVEFMDDTNRSIIRNVKGPVRENDILCLLESEREARRLR

SEQ ID NO: 222608 - protein, 88 aa, Zea mays
  Clone ID: MRT4577_13460C.1.pep
KPIWSLESFFNTVGYKAQLVDPLGPNIFNIGPFETLPVKTFGAFVVFLRGFLFVDRLRGANIPPTLKASLPPSWCNWKLGPEGIKIFP

SEQ ID NO: 222609 - protein, 72 aa, Zea mays
  Clone ID: MRT4577_134610C.1.pep
RSSAAAPRSFSVVCSKKKIKTDKPYGIGGGLTVDVDANGRNGKGKGVYHFVDKYGSNFYGYSPIYNEDNWSP

SEQ ID NO: 222610 - protein, 80 aa, Zea mays
  Clone ID: MRT4577_134611C.1.pep
IATGALSFFLLRISKVIFFKHRYKSRSRDIVFSTHNQRLNNSCKFNTGSTKLALAMEPQQCQETTLSGLFGLLAQTTRRS

SEQ ID NO: 222611 - protein, 174 aa, Zea mays
  Clone ID: MRT4577_134612C.1.pep
MADTARLFMLVAVATAALAGRSDGAWCVCRSDLADSALQKTLDYACGGGADCKPILQSGACFAPDTVKAHCSYAANSFYQRNGQNPQACVFSGTAALSNVDPSANGCTYPATPSAAATTSSSSGSAGVYSPPAMGPSALNDNSAAAGVVLPMAGAGRLLILACCSLVALYYLGA

SEQ ID NO: 222612 - protein, 55 aa, Zea mays
  Clone ID: MRT4577_134613C.1.pep
HMLSFEAFTFVNIYHWPSLFLGTNSLLCQLTYCHAMPGNGGHLLCQGGRNQLCIL

SEQ ID NO: 222613 - protein, 99 aa, Zea mays
  Clone ID: MRT4577_134614C.1.pep
RVQGCGDGVTQGEGGVGDGASEEVEARPSLVSLRVRAGNPNVTADPAPAFQSVTTLATVIYSRKILASRPPSSSSPTQSRAPRNTMTRKRKWSSLSQRS

SEQ ID NO: 222614 - protein, 88 aa, Zea mays
  unsure (1)..(88): unsure at all Xaa locations
  Clone ID: MRT4577_134615C.1.pep
FTNIHXKHSIXNQLXFFPLVQNYANFLRKLMKCTXXRESQYALYNVKSGLRTQVWRLKVSFLFHASHKVQLVLILLSNIEENTNEYIN

SEQ ID NO: 222615 - protein, 61 aa, Zea mays
  Clone ID: MRT4577_134616C.1.pep
LNQSIFSNPTEDEGRVDSFTPRLAAGLAAAGVACLEASAGLLCRADMRRLRAPRRRSRERL

SEQ ID NO: 222616 - protein, 56 aa, Zea mays
  unsure (1)..(56): unsure at all Xaa locations
  Clone ID: MRT4577_134617C.1.pep
TKNAFLKQQXMLPFYPPDVANNVAFLQPHQLLPFKHLALANPPPLMQQPPIGGAIF

SEQ ID NO: 222617 - protein, 299 aa, Zea mays
  Clone ID: MRT4577_134618C.1.pep
LGTSRPASSAGPAKRVGLLLGRYELGRLLGHGTFAKVYHARQADTGETVAIKVLDKEKALRNGLVPHIKREIAILRRVRHPNIVRLFEVMATKSKIYFVMEFVRGGELFARVAKGRLKEDTARRYFQQLISAVGFCHARGVFHRDLKPENLLVDERGDLKVSDFGLSAVADQFHPDGLLHTFCGTPSYVAPEVLARRGYDGAKADIWSCGVILFVLMAGYLPFHDQNLMAMYRKIYRGEFRCPRWFSKDLSCLMNQLLDTNPETRITVARRAHAHLPRSAPVLHRSGIQNSQTRLLPLR

SEQ ID NO: 222618 - protein, 485 aa, Zea mays
  unsure (1)..(485): unsure at all Xaa locations
  Clone ID: MRT4577_134619C.1.pep
MAATVAVDNLNPKVLKCEYAVRGEIVIHAQRLQQQLQTQPGSLPFDEILYCNIGNPQSLGQQPVTFFREVLALCDHPDLLKKEEIKTLFSADSISRAKQILALIPGRATGAYSHSQGIKGLRDAIASGIASRDGFPANADDIFLTDGASPGVHLMMQLLIRNEKDGILVPIPQYPLYSASIALHGGSLVPYYLNESTGWGLEISDVKKQLEDARSRGIDVRALVVINPGNPTGQVLAEENQYDIVKFCKNEGLVLLADEVYQENIYVDNKKFHSFKKIVRSLGYGEEDLPLVSYQSVSKGYYGECGKRGGYMEITGFSAPVREQIYKIASVNLCSNITGQILASLVMNPPKASDESYASYKAEKDGILASLARRAKALEAAFSKLEGITCNKAEGAMYLFPQICLPQKAIEAAKAANKAPDAFYALRLLESTGIVVVPXGSGFGQVPGTWHFRCTILPXXEEXIPAIISXXFTVFHEAFMAEYRD

SEQ ID NO: 222619 - protein, 41 aa, Zea mays
  Clone ID: MRT4577_13461C.1.pep
HSPKGQTKPFLEPNQTAFLMTRYVPLGLLRFENTGGRAVAF

SEQ ID NO: 222620 - protein, 111 aa, Zea mays
  unsure (1)..(111): unsure at all Xaa locations
  Clone ID: MRT4577_134620C.1.pep
GVPIELMMALMLRLKVFQPVLLAMLFTFNDIDMGIHVRSRVQTSQIYAIRYAVGKGLVNXYQKYFDKAVNKDVKDVFTDFDRTLVGTDLMRYEPNXVXGHGARARFQKCYH

SEQ ID NO: 222621 - protein, 174 aa, Zea mays
  Clone ID: MRT4577_134621C.1.pep
FFFSLRLISSFRRSASNKSHRRCLVLIRSATLMKIPPRCPSSALNRSPCSPRMLLPRRALGSFHGRRLYPWARPCFPMPCSSSSPMALAPARELRGLPARRPVLRAQAPPSPMRRDPQAVTDTVQECEEGDSTASEIGNVHGPTAGLASSSKVPRMSSRIRKPNVRVAGPEWRM

SEQ ID NO: 222622 - protein, 396 aa, Zea mays
  unsure (1)..(396): unsure at all Xaa locations
  Clone ID: MRT4577_134622C.1.pep
MAATVAVDNLNPKVLKCEYAVRGEIVIHAQRLQEQLKTQPGSLPFDEILYCNIGNPQSLGQQPVTFFREVLALCDHPDLLQKEEIKTLFSSDSISRAKQILAMIPGRATGAYSHSQGIKGLRDAIASGIASRDGFPANADDIFLTDGASPGVHLMMQLLIRNEKDGILVPIPQYPLYSASIALHGGSLVPYYLNESTGWGLEISDVKKQLEDARSGGIDVRXALVVINPGNPTGQVLAEENNMDIVKFCKNEGLVLLADEVYQENIYADNKKFHSFKKIVRSLGYGEEDLPLVSYQSVSKGYYGECGKRGGYMEITGFSAPVREQIYKIASVNLCSNITGQILASLVMNPPKASDESYASYKAEKDGILASLARRAKXALXXAFSKLEGITCNKAE

SEQ ID NO: 222623 - protein, 73 aa, Zea mays
  Clone ID: MRT4577_134623C.1.pep
DLERRRNSRGSQREATNKILPRRLTADDSLTSPTQGRRDQRRRTTSKRRGGSMQKRRKQRSRSLPITSKGISC

SEQ ID NO: 222624 - protein, 57 aa, Zea mays
  unsure (1)..(57): unsure at all Xaa locations
  Clone ID: MRT4577_134624C.1.pep
VILALCSSENATFTTSSTYLTIXLKTLNPSPSLATAITFVSFPATHHSFLVASSDYR

SEQ ID NO: 222625 - protein, 149 aa, Zea mays
  Clone ID: MRT4577_134625C.1.pep
AYTELLRYLYGLERWSNMYKFRTFLDEGVTVSIGMDGLACQCRCQHKPLEHIESGHTRQLAGEPDAAVFPDIAERLSIPQLIAAYTIHGAYQLGMEHEIGSLTPGKRADLVVLENDLFEVGQYDIGRIDVALTMMDGDVTHVGDDFGAR

SEQ ID NO: 222626 - protein, 62 aa, Zea mays
  Clone ID: MRT4577_134626C.1.pep
MSVSEKVVLSSSVSSSSDLDPLLKGLTEKKLSFRRNVVSLAAELKDVRSKLASQEHLFVRES

SEQ ID NO: 222627 - protein, 58 aa, Zea mays
  Clone ID: MRT4577_134627C.1.pep
NNKKFPTNLFFLAGISQKTLAAHNESYGRISFVILCIVDPHLLQSDETSLNRGPDRDR

SEQ ID NO: 222628 - protein, 32 aa, Zea mays
  Clone ID: MRT4577_134628C.1.pep
QNNDYKTPPRPLMHLITNHSGHTRTKKVSHNH

SEQ ID NO: 222629 - protein, 146 aa, Zea mays
  Clone ID: MRT4577_134629C.1.pep
MQPAAMNSLFSSSWKRGVGDGGDIESGGVEMSALLPGAAAGASLDRLFEDVESIKDELRDLERIQRSLHDANEGGKSLHAAAAVRNLRTRMDADVAAAIEKAKVVKHRLESLQVARKHHTSTRKWICIAILILLLVILVIVLPIVS

SEQ ID NO: 222630 - protein, 264 aa, Zea mays
  unsure (1)..(264): unsure at all Xaa locations
  Clone ID: MRT4577_13462C.1.pep
HWVPRGRPGVGTLLMKQSSDTLKKLSFELGGNAPFIVFDDADLESAVTGAITSKFRSSGQTCVCANRIYVQSGIYDEFCTKFTEKVQSFKVGGGYEEGITHGPLIHDRAVSKVDAHVQDAVKNGAKVLHGGQKLPDLGANFYQPTVLRDMTKDMQLAKDETFGPVAGLFPFKTEADVVKLANEADVGLAGYFFSRDIQRVYRVAEALEVGMVGVNTGLISDVASPFGGVKESGYGRERXHMGIDEYVVTKTITMGGNGQPLQGE

SEQ ID NO: 222631 - protein, 65 aa, Zea mays
  Clone ID: MRT4577_134630C.1.pep
PNGLPDTTAETLMRGRIRTRRWAQPLPHMHVHTYVQIHGERDLFYREREADTSAGCNSNTSTLLL

SEQ ID NO: 222632 - protein, 154 aa, Zea mays
  unsure (1)..(154): unsure at all Xaa locations
  Clone ID: MRT4577_134631C.1.pep
MPRKVLRGAMTTLFENNREKRGHMSAGHGRIGKHRKHPGCRVNAGGMRHHRILFDKYHPGYFAKAGMRYFHKLRNKFYCPEXHIERLXSMVPADEVADAGGDKAPQIDVTQXGYFKELGKGVLPPKSIVVKVKLMSKVAENNIKAAGGAIVLTA

SEQ ID NO: 222633 - protein, 125 aa, Zea mays
  unsure (1)..(125): unsure at all Xaa locations
  Clone ID: MRT4577_134632C.1.pep
LHSLXKQXXASXQFXTKKKKFXXXSXGXGFFQFXFXXSIXEGSHTKIPLXLXXCPINHFHSSXVQALPXNAXRTPPNXEXLNNGLXCFLCFKTTXFQXFLXXIFLXRKPXIXKXSYNXXKLIXLQ

SEQ ID NO: 222634 - protein, 55 aa, Zea mays
  Clone ID: MRT4577_134633C.1.pep
AVEGQGCITPLSLKRMLARLGSHQDVAECTAMICRFDLDGDGVLSFEEFRVMMDA

SEQ ID NO: 222635 - protein, 121 aa, Zea mays
  Clone ID: MRT4577_134634C.1.pep
LFDQYASIVRLTGTLLGAAIGIIFVVSSVLLGSLATGAVVAMTVVMIVVDIIGTMAIAGVSLNAVSLVNLVICAGIGVEFCAHIARAFMFPSRNMLEKSPKLRGKDARVWAALINVGGSVF

SEQ ID NO: 222636 - protein, 129 aa, Zea mays
  unsure (1)..(129): unsure at all Xaa locations
  Clone ID: MRT4577_134635C.1.pep
FSGFGPSVFFGFPWRLPVCVCVSRLPFRLLLSVPVVWLCRPRSVPRFWLNNLWVRSSGCFGSVAVALSPGFSLPRGVCLVLVGSFSFGPLFFFLSVCVCFVSSFGVPFPPSFCVAPCPYGLLXXXXETV

SEQ ID NO: 222637 - protein, 48 aa, Zea mays
  unsure (1)..(48): unsure at all Xaa locations
  Clone ID: MRT4577_134636C.1.pep
YLVSGYVQRYRYFRKHGRKXGDPPGPPRPPKEPGPPDKGGPGLPLPPL

SEQ ID NO: 222638 - protein, 146 aa, Zea mays
  unsure (1)..(146): unsure at all Xaa locations
  Clone ID: MRT4577_134637C.1.pep
GAFFFFFFLFFFFFFFFFFFFFFFFFFFFFWPPKGKKRGKNPQTYPPVRGNRINKQPIPGPRTPFGKQEPPKIFPPPGGXQPPRKPPPPPKGEQFPRGPPGPPGPGAGPKNPEGGETGGPXGPPXPGGDQPGPPDLARDPPPPGFG

SEQ ID NO: 222639 - protein, 58 aa, Zea mays
  Clone ID: MRT4577_134638C.1.pep
IYNDAIIDQLLQTCPSLTLKYYRLSRSGPNTNTLILIASSFILSARLQHGTYTDMPYQ

SEQ ID NO: 222640 - protein, 117 aa, Zea mays
  Clone ID: MRT4577_134639C.1.pep
SLRGRDSGSLSVSRSLELFSVLPLCLFQVLLLVFGRFLGWPPCGPVVCCCPSPSLCRFSSEFAIVPLKFVTLCRLCGLSAMSCEAFPTPPRGPVLAASASSPPSCFPPAFGSGFGAK

SEQ ID NO: 222641 - protein, 118 aa, Zea mays
  unsure (1)..(118): unsure at all Xaa locations
  Clone ID: MRT4577_13463C.1.pep
FGSSHQRQSLAMETCFRAWGLYAPVGGKDRLLVGNLQELPSKRALAPLSGGRVTTRRPMYVRQSKNAVDEVVVADEKNWDGSVMACETPXLVEFWAPWCVSCLIIAPVIDELVKVYAG

SEQ ID NO: 222642 - protein, 100 aa, Zea mays
  unsure (1)..(100): unsure at all Xaa locations
  Clone ID: MRT4577_134640C.1.pep
LNRPWLSQSYLISYDAWENKEYYMVMLERNKYPNXRLMVDEATKDDNYGVFVYPGTMERLQILLGDTDLVTGKKIKDSILVCAADETWEEPKWHMNKARR

SEQ ID NO: 222643 - protein, 102 aa, Zea mays
  Clone ID: MRT4577_134641C.1.pep
EWNHFITLHLVPQSNTPQDHPCTLYTPSINTIKHEIEFYIHRECMNLGNLAYLFSTYIIRLAVTPNRVICLGQSMFSLHHTIYNYYVMQVTTNLHVVPISLK

SEQ ID NO: 222644 - protein, 143 aa, Zea mays
  Clone ID: MRT4577_134642C.1.pep
RASRPGWGLGLYGLGKIVAGALGLGEVDWDAWVLAACSFFGAGGHVFFFGTAALHVFFFFWPGPAASLGSVSWYGLESPLFFLVGVAVFRFGTPGLVRVGVFVAFCRVQLVLVLVVYVGLACVWARLAFVSAAPWPSFFYQIL

SEQ ID NO: 222645 - protein, 99 aa, Zea mays
  Clone ID: MRT4577_134643C.1.pep
TMTSGAAVHGRSGADALVGRAVRTTSDESARAWGGGAILHGPPQRSGIYKLAKALLTTTMCSRRSIPRLRGLLRTTVPPTVRFAGRHHGSRTPLRYLNC

SEQ ID NO: 222646 - protein, 49 aa, Zea mays
  unsure (1)..(49): unsure at all Xaa locations
  Clone ID: MRT4577_134644C.1.pep
IPEASQPSSINQXPTTTTTLPFSHIFIRXKFLSLKATXXXFIXFTVAPS

SEQ ID NO: 222647 - protein, 114 aa, Zea mays
  Clone ID: MRT4577_134645C.1.pep
MAEKVPKAGLWYNKFLGFRVIGGERGVKFVFDKIDPQRPEKEYSFRVSPRSQFIDSDPHVKDIDELAKDLDLNEHLFEFVRMAREKFQSPFMNETLPVSPDASAAPLPSPMVVS

SEQ ID NO: 222648 - protein, 269 aa, Zea mays
  Clone ID: MRT4577_134646C.1.pep
MSSSSDLEQQVATALRRVTPVAAAPAVDRGGAPDLAAAIQRRMASQRARGADAFYAKFASARSLADQTFSRRRVQLKGLKDQLRDLQSQLRESLTLQSCKEWKYRIATEPMSEATATNERLRSWVADFRDKRNKGAAIVFEQLQAVESLEANSNEDAEMAEKVPKAVLWYNKFLGFRVIGGERGVKFVFDKIDPQRPEKEYSFRVSPRSQFIDSDPHVKDIDELAKDLDLNEHLFEFVRMAREKFQSPFMNGNQQFLYSFYDNVTKYHT

SEQ ID NO: 222649 - protein, 52 aa, Zea mays
  Clone ID: MRT4577_134647C.1.pep
NLSVDVEGFINRMVSSVPDDYVDEAAVLIFRRRHLDPLTYETEPLCTLRTRT

SEQ ID NO: 222650 - protein, 227 aa, Zea mays
  Clone ID: MRT4577_134648C.1.pep
VPSVSAGLSAIEDVLKQKKDRANLRRVSSIEALHSATKALPPDFVRLDQDILSPRAGKKELYTYQTLDFWEQIKTPGMSLRCSGLYLSQFRHTSPHLLASGDGKRTATIVGDVYIHPSAKVHPTSKIGPNVSISANARVGAGARLINCIILDDVEIMENAVVIYSIVGWKSSIGKWSRVQGEGDHNAKLGITILGEAVDVEDEVVVVNSIVLPNKTLNVSVQEEIIL

SEQ ID NO: 222651 - protein, 108 aa, Zea mays
  unsure (1)..(108): unsure at all Xaa locations
  Clone ID: MRT4577_134649C.1.pep
QAXEXAARAAHXPYSKCPSGFAVADGDGRIYAGGCLESAAYNPTLGPVQAAIIAMVAAGGGPAGDVVAAALVEKEQASVAQEATARIFLDAVAPHASFHVYNYRPSDA

SEQ ID NO: 222652 - protein, 415 aa, Zea mays
  Clone ID: MRT4577_134650C.1.pep
MAGYEQRVVAVIMVGGPTKGTRFRPLSLNVPKPLFPIAGQPMVHHPISACSRIPNLAQIYLIGFYDEREFALYVSSISNELRIPVRYLREDKPHGSAGGLYIFRDYIMEDSPSHIVLLNCDVCSSFPLPDMLEAHKKYGGMGTLLVNKVSAESANQFGELVADPETNELLHYTEKPETFVSDLINCGVYIFTPNIFSAIEDVLKQKKDRANLRRVSSFEALHSATKALPPDFVRLDQDILSPRAGKKELYTYQTLDFWEQIKTPGMSLRCSGLYLSRFRRTSPHLLASGDGKRTATIVGDVYIHPSAKVHPTSKIGPNVSISANARVGAGARLINCIILDGVEIMENAVVIHSIVGWKSSIGKWSRVQGEGDQNAKLGITILGEAVDVEDEVVIVNSIVLPNKTLNVSVQEEIIL

SEQ ID NO: 222653 - protein, 57 aa, Zea mays
  Clone ID: MRT4577_134652C.1.pep
TDRTLSLMLCPGWSSASWRGQGDRGVSRTHGLCDLGKWCVRTVLARTTDVRELDCIQ

SEQ ID NO: 222654 - protein, 96 aa, Zea mays
  Clone ID: MRT4577_134653C.1.pep
MKDLAGLGHLFVVSFLFHFASFMVIPAVTDVTMEAACPGRDECSVAIYLSGFQNAVTGMGALVVTPIVGNLSDRYGRKALMTLPVTVAIAPLFILA

SEQ ID NO: 222655 - protein, 148 aa, Zea mays
  unsure (1)..(148): unsure at all Xaa locations
  Clone ID: MRT4577_134654C.1.pep
MEEESVAASRYYCHMCSLIIRPELGIEEVKCPHCHTGFVEEMAGDRQGSDDAATRGRPPGGEASANASDAALEREVSLWAPVLMDFIAAXRPPRPRRPRRGPRGFGAKAVPQHRPPAAAQRAPGRRHRCRARAGRAHEPRGRARHAYG

SEQ ID NO: 222656 - protein, 92 aa, Zea mays
  unsure (1)..(92): unsure at all Xaa locations
  Clone ID: MRT4577_134655C.1.pep
ASVIRSRLAEGGRGIFSEFESXVLRDPPKTAVPGGTVHPLTRXSARLAAEGNELAPSLADLELPELENQLPLASHIVWIIVILEHNLEGEMN

SEQ ID NO: 222657 - protein, 78 aa, Zea mays
  Clone ID: MRT4577_134656C.1.pep
NMKKWKHCCYLCTCLCSQPENKNLKIDGIHWTAFSVLDYSCFYGTRGRYVTVKNQLLSLTATKQRLGDSFQISGRKLS

SEQ ID NO: 222658 - protein, 77 aa, Zea mays
  Clone ID: MRT4577_134657C.1.pep
QQAQEHIAMSQNVTTRSILKREQVQVDERIEHYQPREAYASPRTITCTLYTITKSDSSSSVLEREQEQATKGKTTAN

SEQ ID NO: 222659 - protein, 49 aa, Zea mays
  unsure (1)..(49): unsure at all Xaa locations
  Clone ID: MRT4577_134658C.1.pep
NAYRGTIVTDKLTKEAPAKHRLFTVEIWDTDDLQRLXTLTVASYRGADG

SEQ ID NO: 222660 - protein, 56 aa, Zea mays
  Clone ID: MRT4577_134659C.1.pep
SLAHALYAFPPVLRSLGLALRCLFPLLMRREREGEAAQRADKKAMSRSCRGELQLR

SEQ ID NO: 222661 - protein, 119 aa, Zea mays
  Clone ID: MRT4577_13465C.1.pep
MGISKVTGIAATALLVSSLALRQAGVRAAATAPILATSCVAYVVTVASHTAVNVPWILGKTPSGRFPLWSSVLFGPFLMLARTYAKVKRFLRKENVYDEIAQGLYLGGWPFMAKHLPPG

SEQ ID NO: 222662 - protein, 40 aa, Zea mays
  Clone ID: MRT4577_134660C.1.pep
ASHCCIFRHRQGIELSVGSRSYHTPSSFVRWVLHVFAQLL

SEQ ID NO: 222663 - protein, 45 aa, Zea mays
  Clone ID: MRT4577_134661C.1.pep
QLQHFVTEQLVSSCIQNSAKRKPEPIGCDSPCFAGCSVHLGITKK

SEQ ID NO: 222664 - protein, 260 aa, Zea mays
  unsure (1)..(260): unsure at all Xaa locations
  Clone ID: MRT4577_134662C.1.pep
IGYLEAGREDGQIADVDVTTEAPSGIQTPVEINLDISDVIPDTTDGNTETDKLVKTEGVIHPEKKESFPEDTSTAEPTEEVANVEDQQSQRADAMDADVVDEEVPKSEHADEPATDALEVLNQDYAEETNDPVNEKTEETGNQSNMPPSEETTPEYDTTTREPPVNIQAQNQESLEEREATVEESEVAEAVDTEAPVQQSSVALEDAVPEDQYNLIATNNTVQEDTQEAIGQTKEGQQYHDLGPENATENTEPASMANTX

SEQ ID NO: 222665 - protein, 62 aa, Zea mays
  Clone ID: MRT4577_134663C.1.pep
LAIRLVPSNIKQIAAIPDAMHRWQHWRFLPTSVVFEQSPLRRLCSSPIDKKKKKKKRAPLAI

SEQ ID NO: 222666 - protein, 125 aa, Zea mays
  Clone ID: MRT4577_134664C.1.pep
GKNQQGGHMGKKKKWQAWPGFKNQFFRGPPKNPMGPLKRDTKNPPKKAFGKDTNPPKFWNGIHPLKMAWKAKPSRDKPPAWKGKTSRGPFPSPIKRGEAIMTPWTPGGTTPPQRGGRGPSPHQGG

SEQ ID NO: 222667 - protein, 77 aa, Zea mays
  unsure (1)..(77): unsure at all Xaa locations
  Clone ID: MRT4577_134665C.1.pep
VPSPAPPSPPSVPFXIWFLXLFIXGTPLLKPCAPFFPWFFCNHLEVIKSPAVXNGLLRGPPPPLCSVPCFFPSQWGG

SEQ ID NO: 222668 - protein, 92 aa, Zea mays
  Clone ID: MRT4577_134666C.1.pep
IIYSSMCAFSGWAREVINGTSYGSGRSQVVEVYGPENATQRASWEWKPKSSCARRQIVRQTRTRRCRRAGAIGGLQAPGTGPWMLSRVRLGA

SEQ ID NO: 222669 - protein, 38 aa, Zea mays
  Clone ID: MRT4577_134667C.1.pep
DFKQLESWGFIMDCKNQKQWAQPTKIRLVARAQTHIGE

SEQ ID NO: 222670 - protein, 115 aa, Zea mays
  unsure (1)..(115): unsure at all Xaa locations
  Clone ID: MRT4577_134668C.1.pep
KTLQWTQPGSTGIPRRQGEPKAKAKGHQGPPVGRLARCPGGCFITTGRSGKPRRVPLQKTSSWXSFVGFQSWASFSATSKFVFGGTSKYFKPFLIKLSFNGGSTWLITFIKDWIL

SEQ ID NO: 222671 - protein, 53 aa, Zea mays
  Clone ID: MRT4577_134669C.1.pep
FPVDRTRTPTLPPLHRARLFLQMTSLCASIFQCNHPPYKNLAIVSSIIKPEYP

SEQ ID NO: 222672 - protein, 216 aa, Zea mays
  Clone ID: MRT4577_13466C.1.pep
MDITQILLAAQSPDGNLRSAAEGNIKQFQEQNLPNFLLSLSVELSNDERPPESRRLAGIILKNSLDAKDSAKKELLIQQWVSLDPSIKLQIKESLLITLGSSVGDARQTSSQVIAKIASIEIPRREWQDLIAKLLSNMTQPGASAPLKQATLEALGYVCEEIPPEHLEQDQVNAVLTAVVQGMNQTELSSEVRLAAVKALYNALDFAESNFANEME

SEQ ID NO: 222673 - protein, 42 aa, Zea mays
  Clone ID: MRT4577_134670C.1.pep
YALQASSFKLLEWWQHLICVASTIRCLNRMQQHLICVASGIY

SEQ ID NO: 222674 - protein, 115 aa, Zea mays
  unsure (1)..(115): unsure at all Xaa locations
  Clone ID: MRT4577_134671C.1.pep
SVSWVKIGINGFGRIGRLVARVALQSDDVXLVAVYDPFIITDYMTYMFKFYTVHGQWXFHYVLVYDFITLLFVEIVVACFFLFFLSCNSLYFFFSFFLFFFFIFLYFVLYVFLFI

SEQ ID NO: 222675 - protein, 66 aa, Zea mays
  Clone ID: MRT4577_134672C.1.pep
PPLEGYSFIRVAHWKYNGAGDSSSSRQFRSLQHVHVLIDCIHLTWVVQRWYKQSAHRPVFFICQGV

SEQ ID NO: 222676 - protein, 194 aa, Zea mays
  Clone ID: MRT4577_134673C.1.pep
HLGWQRGEVFTLAEGAADNSRFGDEHQAAQVKYSKPLRHHSVPPSHVGADSAVQLRPRERAGDAAAEAKAHSSQSEHTGRSAGSRTAPQIRADRSHIQPTQRRSRRRPPHRRRRRVEVTPPPIRSDAQAHGSTTPNTTPAHHGEQPVDASEAWHAEAANPTRTRFLTSTRGAALCGKGQPHLLFASTPGRPRGT

SEQ ID NO: 222677 - protein, 115 aa, Zea mays
  Clone ID: MRT4577_134674C.1.pep
SRTHCSHQGRLKAERGYSSSTPPPRWWSCFSCMAAPSWLRLSRPTPAVPERRPTCRSVTRGCPLTGAYTNHLMRNDERRRKILQLGDQSLDIPRIGCACRTKWWPEALHGNLQPG

SEQ ID NO: 222678 - protein, 104 aa, Zea mays
  Clone ID: MRT4577_134675C.1.pep
SQMRKLHARAQRTATQRSRAVSHGSRGNAGELAVGTEQREQTSMQESSTGAVSSRACVLWRPGEGARLGVGAGRRAHGGGGRAMEGAGDGRAEGREMEQAQGSY

SEQ ID NO: 222679 - protein, 128 aa, Zea mays
  Clone ID: MRT4577_134676C.1.pep
MLAVYQCLHGVDVFKIDTGSGLLDRVKNLGSRAIFVGERRCLAVDADKFASVEANCIYYVMDEPWYDVCVYRLKDETGVRAGGAIDSFNSSFLCDDPPFSDVQLLCYYTFEVWKMFPQLQLNCFFSQT

SEQ ID NO: 222680 - protein, 169 aa, Zea mays
  unsure (1)..(169): unsure at all Xaa locations
  Clone ID: MRT4577_134677C.1.pep
PVAGKAKAQKTAETTGTPPPXQKTRKPTSPCEPKKQRTTRRRRTTRSPSXSERXSPPTGRRRTPSQSLSSXPAPARARPGSGQXEQPXRQLEEPQPRNSRSARSRTSSRPPPSKXXNAXTTRCSVSPTETNPPTRNRRTDPHTKKEARAQGTXRKKKKKTQGGRXRGPK

SEQ ID NO: 222681 - protein, 95 aa, Zea mays
  unsure (1)..(95): unsure at all Xaa locations
  Clone ID: MRT4577_134678C.1.pep
MNNNIDASTISEYPVPDRNPVFAKVAXKFSELDYVRISTISDVSDTDEYLSTYRTGIRVPXMCTIGLIEVMEHLMDANQNSAVRLMLFFPNDTHV

SEQ ID NO: 222682 - protein, 70 aa, Zea mays
  Clone ID: MRT4577_134679C.1.pep
TESSMCCMTWTVSFLLLRTNIAELILLTSSCLGASSTFMFRIAFVVRYHLLSWYMSSGLLSWSRQTAQSH

SEQ ID NO: 222683 - protein, 75 aa, Zea mays
  unsure (1)..(75): unsure at all Xaa locations
  Clone ID: MRT4577_13467C.1.pep
TFLAKISLLIQTTNLRXSVAQLAANQTCPKSITRLGRFPCTRLSNHTACPTTWDRADMWGPFAASHSRAAWDVVH

SEQ ID NO: 222684 - protein, 60 aa, Zea mays
  unsure (1)..(60): unsure at all Xaa locations
  Clone ID: MRT4577_134680C.1.pep
CEKISEVIXVRDWLVCLAKQQNGILAQKVXSKINTDVQLDSQALIGVHGELFQEDDPCRI

SEQ ID NO: 222685 - protein, 99 aa, Zea mays
  Clone ID: MRT4577_134681C.1.pep
KRWNNTETHQTESSMCCMTWTVSFLLLRTSIAELILLTSSCLGASSTFMFRIAFVVGYHLLSWYMSSVSVCSLGADKQLRVLCWLVKCLQDLVVGYMGV

SEQ ID NO: 222686 - protein, 45 aa, Zea mays
  Clone ID: MRT4577_134682C.1.pep
RSSGGRRSSGGFLAGGPAPSIQSSITNPRTHGHKLFRAKISLFAQ

SEQ ID NO: 222687 - protein, 72 aa, Zea mays
  Clone ID: MRT4577_134683C.1.pep
KVFKMVVGKYDFISVLSVVGIRKDVHVVIWLRDVRLLNAPNIGHVHVWIKILQNNLKVSGKIKVRMNIDIIN

SEQ ID NO: 222688 - protein, 41 aa, Zea mays
  Clone ID: MRT4577_134684C.1.pep
SALLHRLLISGGRGASYQSNSRYGRILKSSWLKAARTCKHY

SEQ ID NO: 222689 - protein, 100 aa, Zea mays
  Clone ID: MRT4577_134685C.1.pep
LGAWATHMARRFVERARREARRRPLARVSTGSRMRLRSAILSTGTLSNTHGASMLGGCGEDLVARGFRRGVRCSYRGLGAEASSMPLRSLLQRGSREEKQ

SEQ ID NO: 222690 - protein, 49 aa, Zea mays
  unsure (1)..(49): unsure at all Xaa locations
  Clone ID: MRT4577_134686C.1.pep
GASTASENDIRFRIGRGLVHLRCXFFIRFINHITSIRTCIRWQVSWSTN

SEQ ID NO: 222691 - protein, 58 aa, Zea mays
  Clone ID: MRT4577_134687C.1.pep
ILKGPCPNCGTENLSFFGTILSVSSGGTTNKVKCANCSTGVRYDSKSRVITLPEASNA

SEQ ID NO: 222692 - protein, 156 aa, Zea mays
  Clone ID: MRT4577_134688C.1.pep
EMEKKHMKMAILRQEQTFRQQVHELHRVYEVQKRLMKEMQAVKMSPAQAREDTRPEPMLDTDRPQWHINSGEKTARFTEDFNLELTLATGGDTRKQEMTSNSESGATVTSSTSAESESGQRFPKSNVDLRFQHESKRHDDQLTQSPWLYQCLSQMA

SEQ ID NO: 222693 - protein, 49 aa, Zea mays
  unsure (1)..(49): unsure at all Xaa locations
  Clone ID: MRT4577_134689C.1.pep
GVDGFFLGGHDDPPIAPSGGPPQWPLCHFXKLLGELFAIVGVAKGKKPF

SEQ ID NO: 222694 - protein, 128 aa, Zea mays
  Clone ID: MRT4577_13468C.1.pep
KKKNFFLFWIISFSIGPSFWSERSNIPLFLLILTDCIPYGIRGEQKHSTTCQGAVKKKRKLFLEFTLFLFLFRTPTKVDSKTSHFNYPFKFYSIFCLSLFHLVKFRARSLVKKVRPNPTNNTRINYEL

SEQ ID NO: 222695 - protein, 322 aa, Zea mays
  Clone ID: MRT4577_134690C.1.pep
MASEVWLSPASRLPSLSNAPPRLRSKPATTTASLLSPCPRPARALPVLRVRRRRRLRATEQQGQVQEQDDEVVDRNILPYCSIDRKQKKTLGEMEQEFLQALQAFYYDQKAIMSNEEFDNLKEELMWEGSSVVMLNEDEQKLLEASLAYTSGNPIMSDAEFDELKLKLKTDGSVIVKEGPRCSLRTHKVYSDLNVDYLKMFLLNVPATTVALGLFFFIDELTGFEINVFQLPEPFGFIFTWFAALPLILFLAQSLTKAIVQDFLILKGPCPNCGTENLSFFGTILSVSSGGTTNKVKCANCSTELEYDSKSRVITLPEASNA

SEQ ID NO: 222696 - protein, 65 aa, Zea mays
  Clone ID: MRT4577_134691C.1.pep
PSLFFFFPGKGNLVAFKIYQMGFPFPDGLFQGALCGLGGKKLGFKKWPANSSFGLKRGLVLGKNV

SEQ ID NO: 222697 - protein, 234 aa, Zea mays
  unsure (1)..(234): unsure at all Xaa locations
  Clone ID: MRT4577_134692C.1.pep
MATAVASHTLLSSAFAPRHYHRRLTRTASVGPCRAAPVGLAVRCEKSDKQKRQPLAALVPREQRFMFEGDELCGPDIWNTTWYPKAADHVTTEKTWYVVDATDKXILGRLASTXIAVHIRGKNEPTYTPSVDMGAFVIVVNADKVAVSGKKRSQKLYRRHSGRPGGMKEETFDQLQKRIPERIIEHAVRGMLPKGRLGRRLFTHLKVYKGTEHPHEAQKPVPLPIRDKRIQKTG

SEQ ID NO: 222698 - protein, 80 aa, Zea mays
  Clone ID: MRT4577_134693C.1.pep
KEARRGGSPGAAPPPVAEEGRGSARCGRADLGTGKEDHGSRSVRGSSVSNPIQEGRERKVGRGPRGSVGDVDDDGEGEDR

SEQ ID NO: 222699 - protein, 69 aa, Zea mays
  Clone ID: MRT4577_134694C.1.pep
IPGLTSSNTAAALCFFFWYTFLGGSGRPPKEKQAWDDTALLKGLCMRRHYKTLDELVTFKGNTWTKTYL

SEQ ID NO: 222700 - protein, 58 aa, Zea mays
  Clone ID: MRT4577_134695C.1.pep
MELIPVVLFKKKGKKKKKKKKKKKKKKKKKKKKKKKKNKKKNKTKKTKQNNTTITKLK

SEQ ID NO: 222701 - protein, 198 aa, Zea mays
  Clone ID: MRT4577_134696C.1.pep
MNTVSGTKRAPRRQSQDGSGDKLVVIVEASSRGVGSRRGPHTPIPGALNSPIDVEAIEDEVQAVSPSRVPLPRRNRRTRREPITVVDLEVEASREGSKRQRVEPVGRHLYPDWGARSSLQSNAVQTSKEPAKEVPEEPSFTCPICWNKMEEPSTTTCGHVFCDTCIKQAIKVQKKCPTCRKGLKMNSVHRIYLPNGSS

SEQ ID NO: 222702 - protein, 249 aa, Zea mays
  Clone ID: MRT4577_134697C.1.pep
MDKSGRGERTFASEFGRGFAPPFLNSSARSNSVPIRQVHCEVEVGGISIEESMSTASGTRRAPRRQSQDGSADKVVVIIEATSPVVGSRRGPPTPVPGAQNSPIDVEAIEDEVQAVSPSRVPPPRRDRRTRREPITVVDLEVDASQEGSKRQRVVAVDHLSPDWGARSSLQSNGVQTSKEPAKEVPEEPSFTCPICWNKMEEPSTTTCGHVFCDTCIKQAIKVQKKCPTCRKGLKMNSVHRIYLPNGSS

SEQ ID NO: 222703 - protein, 198 aa, Zea mays
  Clone ID: MRT4577_134698C.1.pep
MNTVSGTKRAPRRQSQDGSGDKLVVIVEASSRGVGSRRGPHTPIPGALNSPIDVEAIEDEVQAVSPSRVPLPRRNRRTRREPITVVDLEVEASREGSKRQRVEPVGRHLYPDWGARSSLQSNGVQTGKEPAKEVPKEPSFTCPICWNKMEEPSTTTCGHIFCDTCIKQAIKVQKKCPTCRKGLKMNSVHRIFLPNASS

SEQ ID NO: 222704 - protein, 46 aa, Zea mays
  unsure (1)..(46): unsure at all Xaa locations
  Clone ID: MRT4577_134699C.1.pep
IGYLEAGRLCSAIVTGKXPLENLLDHLDNPVANNAWVYATKFAPGS

SEQ ID NO: 222705 - protein, 91 aa, Zea mays
  Clone ID: MRT4577_13469C.1.pep
MASIITGDFAEAYVRKNACEEETRKAEASTAGGVAAAATPGDKKADASASSEKKVAKEAAAGSNKGEGGSLFGLLKKKVHPKVGGSSGAYS

SEQ ID NO: 222706 - protein, 48 aa, Zea mays
  Clone ID: MRT4577_1346C.1.pep
LPGCRDAYKPTSRRLLLTLRDTSVIMIYISTDASSVRVMFNGIYGCCC

SEQ ID NO: 222707 - protein, 197 aa, Zea mays
  Clone ID: MRT4577_134700C.1.pep
MSTASGTRRAPRRQSQDGSADKVVVIIEATSPVVGSRRGPPTPVPGAQNSPIDVEAIEDEVQAVSPSRVPPPRRDRRTRREPITVVDLEVDASQEGNKRQRVVAVDHLSPDWGAGSSLQPNGVQTGKEPAKEVPKEPSFTCPICWNKMEEPSTTTCGHIFCDTCIKQAIKVQKKCPTCRKGLKMNSVHRIFLPNASS

SEQ ID NO: 222708 - protein, 59 aa, Zea mays
  unsure (1)..(59): unsure at all Xaa locations
  Clone ID: MRT4577_134701C.1.pep
TATLGDHXKLQNQRCLYIKGQGTVHTMYDEEGVPPRTPVRQARRTPGREGHDLGAFGPK

SEQ ID NO: 222709 - protein, 41 aa, Zea mays
  Clone ID: MRT4577_134702C.1.pep
HRRQSRTPTIVVIWFFLQAAIFSLVWVSTDSFIPKAKGPIL

SEQ ID NO: 222710 - protein, 52 aa, Zea mays
  unsure (1)..(52): unsure at all Xaa locations
  Clone ID: MRT4577_134703C.1.pep
EDVDIQTERAXAKQMTSFQNKKRVLLAETGKEKIARYYXSIGLGFKTPKKAI

SEQ ID NO: 222711 - protein, 70 aa, Zea mays
  Clone ID: MRT4577_134704C.1.pep
AVAVGEMQHCLDVRFLYKHAAKHLARALRLLVLHHLLGQYVQLLEVHYGQSLVDLLFSSILFKHQYIYKC

SEQ ID NO: 222712 - protein, 87 aa, Zea mays
  Clone ID: MRT4577_134705C.1.pep
MSTSYAITKGLREQGIHGPSYKFFKGWDEQTRSMKEKTDGLVLVVSEHKYLHAIAPHYLKWRAQGRQPFLYRYGAQAPICIFDYELS

SEQ ID NO: 222713 - protein, 85 aa, Zea mays
  Clone ID: MRT4577_134706C.1.pep
TTTLPQSLPIFRQILLSSWSYRYQYHHYTTLITCYNFHYTTIPLTSYFNNASNTYLSNPTNYTKHLNRPFNIIKLTNSTTNTRIT

SEQ ID NO: 222714 - protein, 70 aa, Zea mays
  Clone ID: MRT4577_134707C.1.pep
MHSRQPLSPASFTSSVGATTINLISPTRSLDCDARFRQAGTDIKTSTELLKVLNRIWSLEEQHAADVSAM

SEQ ID NO: 222715 - protein, 103 aa, Zea mays
  Clone ID: MRT4577_134708C.1.pep
AGAASGSAAAGSASGSAATGSGSAGAAGSSTTLVSSAGAASSGTAGSASAGAGAASSGTTAGAGVSTTGASSVATTVGVWTSAVAIGDDEKADDDYTKDWLAG

SEQ ID NO: 222716 - protein, 60 aa, Zea mays
  Clone ID: MRT4577_134709C.1.pep
IKKKKKIKQKKKKGAALLKNPNLRPPPFNIISFFYCHLNLIHFPPFYNLFTCKNPSFTQL

SEQ ID NO: 222717 - protein, 360 aa, Zea mays
  unsure (1)..(360): unsure at all Xaa locations
  Clone ID: MRT4577_13470C.1.pep
PRCRSSTSXLLAARGLRLTVVTTPANLQLLSSLLAAHPTAVRAATFPFPSHPSLPPGLENTKGCSPVQFPAFVHALAELRGPILAWVKAQPDXPSVRQNFMWNLHDSWGFVFNSFRALEGRYLEQPLEDLGFKRAWAVGPVAPEADAAVARGGQATVELADLSAWLDAFPEGSVVYVCFGSQAVLSPAVAAALAEALERSAVPFMWAVGDAVVPDGFEARAAASGRGSVVRGWAPQVALLRHPAVGWFVTHCGWNSTLEAVAAGVPMLAWPLTGDQFFDARLLVDEARVAVRACKGGLGFVPDAGELASVLADATGEKGHDVRTRAKALAAEAARAMKPGGTSYADLELLVQEIRNRKLS

SEQ ID NO: 222718 - protein, 47 aa, Zea mays
  Clone ID: MRT4577_134710C.1.pep
NCHHKFFVSKSPFMFLLVKKQQTFEIKRTRRIRSDFERSVIARFFYR

SEQ ID NO: 222719 - protein, 73 aa, Zea mays
  unsure (1)..(73): unsure at all Xaa locations
  Clone ID: MRT4577_134711C.1.pep
PRSVRRPTVKSXSALRRGDQLYCLHARRIPYCRARVLAPSPRGRARSQRREGNPRGTVQPSAASAHPRSFGSA

SEQ ID NO: 222720 - protein, 165 aa, Zea mays
  unsure (1)..(165): unsure at all Xaa locations
  Clone ID: MRT4577_134712C.1.pep
MWRGGWLANSMANPRVFFDMTVGGALADRXIEMELDPNKVPKTGENFPALCAGGRGREQVPXTLYYXGCTFHRVMRQFMYXGGDFTPGNETICEYIYREKIPDQKFMRKHTVSMVLSMANXGPTTTASRXFICTGVTRWLDGXTLVFGQVDEGMDIDKVITKVGS

SEQ ID NO: 222721 - protein, 110 aa, Zea mays
  Clone ID: MRT4577_134713C.1.pep
QISPYQAEGITNWVKEPLPEPAVVVMRHPVRGETTAVTSLRRGIAIGPHDFAPVISPYTFYVPFSSPQTSGSGWVGGLGRDRLRWRPPDRTTSATELSRCHEYLRWRDGI

SEQ ID NO: 222722 - protein, 95 aa, Zea mays
  Clone ID: MRT4577_134714C.1.pep
PECYFNSLPKELEVKRDRMVRLLESVGLKPIVPDGGYFIIADVSLLDPDLSDMKNNEPYDYKFVKWMTKHKKLSAIPVSAFCPSETKSQFEKFVR

SEQ ID NO: 222723 - protein, 364 aa, Zea mays
  unsure (1)..(364): unsure at all Xaa locations
  Clone ID: MRT4577_134715C.1.pep
MATNSAVIVLLLVAAAVLACAGGARGFYLPGVAPAGFLKKDPLAVKVNQLSSIKTQLPYSYYSLPFCRPGTIVDSAENLGEVLRGDRIENSLYVFEMMEPRLCQIVCKIAPTQDEAKDLKEKIEDEYRINMILDNLPLVVPIKRLDQEAPTVYQQGVHIGIKGQYSGSKEEKHFIHNHFTFLVKYHKDDTGLARIVAFEVKPYSIKHEFDGDWKGNATLLKTCDPHSRRLVVDSDSPQEVDANKEIIFTYDINFEVSFNYFSSXLFVYXTLMHYDRSLHCKPTDRWYVFSLRISXHFLVRFLSGMVAMIMLRTLYRDISKIGRRSVSPFPAGASGTPQFTNKTDASSGDTNSCQDDQSSLHGGS

SEQ ID NO: 222724 - protein, 71 aa, Zea mays
  Clone ID: MRT4577_134716C.1.pep
VYKKKKKKKTKKKKKKKKKKKKKKKKKKKKKKKKKKKKKKKKKKKKKGGAVLRFPVFFPRAGGGKLFFSGP

SEQ ID NO: 222725 - protein, 173 aa, Zea mays
  unsure (1)..(173): unsure at all Xaa locations
  Clone ID: MRT4577_134717C.1.pep
MDKAYVAVLSFAFLFVIHYLVGRAGRKGNGKGKGTQRLPPSPPAVPFLGHLHLVKTPFHEALAGLAARHGPVFSMRMGSRRALVVSSPECAKECFTEHDVVFANRPRFATQDLVSFGGAALAAASYGPYWRNLRRVATVQLLSAHRVACMSXVVAXEVRAMARRMGRAGRRRP

SEQ ID NO: 222726 - protein, 56 aa, Zea mays
  Clone ID: MRT4577_134718C.1.pep
HMVYHWNSPADKYPVPVEQNKKAVAISPQSDKACGVSPRRPGKSHNSLHPRLTSIG

SEQ ID NO: 222727 - protein, 122 aa, Zea mays
  Clone ID: MRT4577_134719C.1.pep
LSYRLWPRTESDQLRKHGIPPVTQSSHTESSTDVVSHVHIPAVDFNEWYQIWLKAETEPEESQTGGVLFSTKYLTLWQVVEFPQTCGDHYNVPAPYQGAVDCFLRKLQKHMHCRAIPSTLPL

SEQ ID NO: 222728 - protein, 51 aa, Zea mays
  Clone ID: MRT4577_13471C.1.pep
DRPDHSETIDIFTGADKGHCTISESAVRPVKREPAITEGAYPMQNRSGRFS

SEQ ID NO: 222729 - protein, 125 aa, Zea mays
  Clone ID: MRT4577_134720C.1.pep
NCTRRGSRGCWRTSSPSRLTLGPPMLDVRASRLKRHTNITHVFYFALHYILLLCGGVIYSLWPVCYVVPAKGRAGRRCLRKLCCQHQPPRRARMQAEPQLVTASARQQVSQCQFRWNGSATHVLL

SEQ ID NO: 222730 - protein, 71 aa, Zea mays
  Clone ID: MRT4577_134721C.1.pep
LTEQSISLLDGSNHITISAGGSARLRSSRRPTGGAASNTTDDDDEDSDDDPEYTCCSSQRGGKKCSSAGVT

SEQ ID NO: 222731 - protein, 93 aa, Zea mays
  Clone ID: MRT4577_134722C.1.pep
EDAYYAIHHVQNIQPKFPRMGAMKCCHSELNALMLSQLYAFTNSHSPLTTSCSMNLTTQTFKPTGSTTGSYLTFCSTTSLLLLTSYTFRIQTP

SEQ ID NO: 222732 - protein, 68 aa, Zea mays
  unsure (1)..(68): unsure at all Xaa locations
  Clone ID: MRT4577_134723C.1.pep
NINYAQSDRELISFHDDQNIEHCSKRNHEGNXKLTASKDHIIKLYDIRSMKELQSFRNHTKDGTDIGE

SEQ ID NO: 222733 - protein, 80 aa, Zea mays
  Clone ID: MRT4577_134724C.1.pep
PSGRGVNRMQICSVFVDCCGMVCFFAATLRVTQQCKSKMKKKRERERDNYAPAALILFLRFTSELSFYFLLDPLLKPLKF

SEQ ID NO: 222734 - protein, 101 aa, Zea mays
  Clone ID: MRT4577_134725C.1.pep
PTRVWNYQWGKTRTVVVLTCLGTMTYVIRRRADTSHLENSTAAIKIIPIELTGTRKEYDANAKANTIVKGIVLVHTSEDVPREKTHSHDIFQNSTRQHIAD

SEQ ID NO: 222735 - protein, 49 aa, Zea mays
  Clone ID: MRT4577_134726C.1.pep
TMRPPWIFYTKFFCSLGRGPPPPPLKKPVYVESQDNNTCIKYACLDKQD

SEQ ID NO: 222736 - protein, 52 aa, Zea mays
  Clone ID: MRT4577_134727C.1.pep
DQSEKGIQQSGGIMVNYLYRLENIEEYALSYSSTGLIHSSPSLSEYLEPKDL

SEQ ID NO: 222737 - protein, 368 aa, Zea mays
  unsure (1)..(368): unsure at all Xaa locations
  Clone ID: MRT4577_134728C.1.pep
MASAASTAAGAPLRLLSSSSNRISKPFLPRPHRLTLSSPISFQRLTARSAASPSPSTATSSPSGSVDPAQLPPALRDIVGLFQSVPDARTRYKQLLAYAARLPPMDPALKTDANRVRGCVSQVWVHAEPDEGDAGRRSVRFHADSDAQLTKGLAALLVLGLSGAPAADVARVPVDFIELLGIRQSLSPSRNSGLLNMLSLMKRKALEIAGGDSTSSQQSVQEVTRPRLVNGKEPEFAAFEVQEKEKERPQDAERRDEDEQLGQLLPLDAEVNGAAGGGRKERIRESLERALSPVELEIEDISHLHKGHAGVAGTNGETHFNVRVVSKEFEGKSLLKRHRAVYDLLQEELKTGLHALSIDAXTPSEVRY

SEQ ID NO: 222738 - protein, 82 aa, Zea mays
  Clone ID: MRT4577_134729C.1.pep
PRGSPTHTTYVALKPRICQLTHRATHRPERGPANRELSTPPCRLTPGGYTTLSACMHSHGGPALQKLLRSRLIIPMTRHEDR

SEQ ID NO: 222739 - protein, 510 aa, Zea mays
  unsure (1)..(510): unsure at all Xaa locations
  Clone ID: MRT4577_13472C.1.pep
LGTSRPAGISSVSPLAHRPEPIPRPLRHSPHRPQPWRRPQPPSRGRTCLSSPSPRKATRCRSSTSXLLAARGLRLTVVTTPANLQLLSSLLAAHPTAVRAATFPFPSHPSLPPGLENTKGCSPVQFPAFVHALAELRGPILAWVKAQPDPVVAVVADFFCGWAQPLAREIGAAGIVFSPSGVLGTAVPHSTFRRLVRRPAECDGDDEFSVSFPAIPGEPSYQWRELLMMYRNYMAGALDEQVGASVRQNFMWNLHDSWGFVFNSFRALEGRYLEQPLEDLGFKRAWAVGPVAPEADAAVARGGQATVELADLSAWLDAFPEGSVVYVCFGSQAVLSPAVAAALAEALERSAVPFMWAVGDAVVPDGFEARAAASGRGSVVRGWAPQVALLRHPAVGWFVTHCGWNSTLEAVAAGVPMLAWPLTGDQFFDARLLVDEARVAVRACKGGLGFVPDAGELASVLADATGEKGHDVRTRAKALAAEAARAMKPGGTSYADLELLVQEIRNRKLS

SEQ ID NO: 222740 - protein, 68 aa, Zea mays
  Clone ID: MRT4577_134730C.1.pep
MARASVVFVIAALLFVAMVVAPMAEAKSADAPVADAPADGPSGPAAAPGPQGVEGLSGNEDDDDDSTN

SEQ ID NO: 222741 - protein, 131 aa, Zea mays
  Clone ID: MRT4577_134731C.1.pep
MRPTTSCHRFPLLLVLLLFLLAGEGRSQPAAGGGPSDRDTLLAVKKAWGSPPQLKSWDPAAAPDHCNWTGVTCATGGVGVVTELILSRQKLTGSVPAPVCALASLTHLDLSYNNLTGAFPGAALYACARLT

SEQ ID NO: 222742 - protein, 68 aa, Zea mays; identical to SEQ ID NO: 222740
  Clone ID: MRT4577_134732C.1.pep

SEQ ID NO: 222743 - protein, 68 aa, Zea mays; identical to SEQ ID NO: 222740
  Clone ID: MRT4577_134733C.1.pep

SEQ ID NO: 222744 - protein, 68 aa, Zea mays; identical to SEQ ID NO: 222740
  Clone ID: MRT4577_134734C.1.pep

SEQ ID NO: 222745 - protein, 67 aa, Zea mays
  Clone ID: MRT4577_134735C.1.pep
IVLSARCVRFCCSPVEMSAEHYSIFLFMLRLRDKKGVFFRPCNQSSGCRIFFSVFVNQSFLQVRYCF

SEQ ID NO: 222746 - protein, 94 aa, Zea mays
  Clone ID: MRT4577_134736C.1.pep
AAEIIIRCSIAAYWVAYNIITATEFHLTNTTLVLQISCNNHPTHDAHNSVYNSRLKNPNITQPNLHASHQAFASYRRPNTPTPTPRPNITAPRI

SEQ ID NO: 222747 - protein, 59 aa, Zea mays
  Clone ID: MRT4577_134737C.1.pep
ARAHTRIVTDLTDPHDIRVCVRGIRRYLSLASGNGGKSSLTVKLRTCCPIALAWPMHSV

SEQ ID NO: 222748 - protein, 137 aa, Zea mays
  unsure (1)..(137): unsure at all Xaa locations
  Clone ID: MRT4577_134738C.1.pep
IIDKLTXAIFMFQVVVVLVLGYFGNTWKDTQGLKQWYLMYPMEVEGPWYDFLIIPLRFELLCSIMIPISIKVTLDLAKGSYAKFIDWDEQMFDWETNTPAHSANTAISEDLGQIEYILSDKTGTLTENKMIFKQCCI

SEQ ID NO: 222749 - protein, 121 aa, Zea mays
  Clone ID: MRT4577_134739C.1.pep
QQHRREKHETSHHRNLKRKHNDRTHAGYAYTARSLPKRPAVSSTPGTACALDSSTLNAKRSSRPITISSATRESHTKCREYRFATNFKVGHEEQGATPHLRKPCPRDPSCPPRKKNPYAPG

SEQ ID NO: 222750 - protein, 37 aa, Zea mays
  Clone ID: MRT4577_13473C.1.pep
ETAVALASRFGCRRSIAFIGRGLFQPCRYYIQRDDHS

SEQ ID NO: 222751 - protein, 82 aa, Zea mays
  Clone ID: MRT4577_134740C.1.pep
SAEKAISSGPPALSSLDGIWKMPVSISVLASSVASVHTCESASTAQRSCVLSTHRLGWILVCIRREGRQDRSKLHRRVALYL

SEQ ID NO: 222752 - protein, 149 aa, Zea mays
  unsure (1)..(149): unsure at all Xaa locations
  Clone ID: MRT4577_134741C.1.pep
FKACLRKFPVAKDVYLHAFAKDPQGFNGANFPEIFQRGCKYALRGNLQKALHRERPRKDHPXALEENQVGPLSEIMAAPFQGSLKYAPPSVSYSDIPKFQAFAQTLQQFRGFGNKFRFFPQPPATSGAAHPFGSPTGVFDFSPLTALFF

SEQ ID NO: 222753 - protein, 56 aa, Zea mays
  Clone ID: MRT4577_134742C.1.pep
RPERPIYLSVFAFAAVLQVRSATQGWVILAAPDYMMRCNHSSCRILEIYPTYPNKI

SEQ ID NO: 222754 - protein, 110 aa, Zea mays
  Clone ID: MRT4577_134743C.1.pep
EGQRWRRMRKAYRDSIKVLEADIQHANTLSLARAHVLLVSPSASVIERVLGGFGGAASRRRRLLGLLPGLRNAAAREGDRLTDRAPVRPPPSGSVVVVALSVHARVAKRQ

SEQ ID NO: 222755 - protein, 150 aa, Zea mays
  unsure (1)..(150): unsure at all Xaa locations
  Clone ID: MRT4577_134744C.1.pep
FLGNPSLFHAQSILALWGCQVVLIGPLQGFPIPGGPLGEVVDPLFPGGSFDPLGVPDDPEGFPELKVKEIKNGPLPMFSMFGFFVQALVPGKGPLXNLPDPLADPVNNKAWAFASNFVPGKLGRAYTYLYGWSVNIRFCFCSAGNVPVFF

SEQ ID NO: 222756 - protein, 111 aa, Zea mays
  Clone ID: MRT4577_134745C.1.pep
LSSAPKSMAPSLVPSRRHDVRVMPAQHVPRRHSLWRRAVLPRRHSLWRRAKGTKMTLKNFLGSKRDFFPRKGQNAKKMQAGGRAHPHRIRPSVKNPVANILSSFPKPRRIR

SEQ ID NO: 222757 - protein, 52 aa, Zea mays
  Clone ID: MRT4577_134746C.1.pep
GYPSEPPRPCTVVSAHPCVPCPSFSFPLGIRLPTSAAYWIGNPSAPHGTLLS

SEQ ID NO: 222758 - protein, 61 aa, Zea mays
  Clone ID: MRT4577_134747C.1.pep
KHIGKTTFKFLSNQQKIKPLILFRVTPLLHLLDFFRYSKVLLRIRFTCIKFRRKDTSKFKA

SEQ ID NO: 222759 - protein, 55 aa, Zea mays
  unsure (1)..(55): unsure at all Xaa locations
  Clone ID: MRT4577_134748C.1.pep
PFPXPXSKXLKPNFTNPISQXIPIFLXSKPPPPXXNYKKKFFFYFFFFFFLKTNR

SEQ ID NO: 222760 - protein, 85 aa, Zea mays
  Clone ID: MRT4577_134749C.1.pep
PRSLNRKPYRQSATCTFRNGVRPLRGQKRHNYSLPFRLYTSLLYYNVTNWTTGAASSETLSSPIRLEPVQKLPYPFTTTHWGSND

SEQ ID NO: 222761 - protein, 88 aa, Zea mays
  Clone ID: MRT4577_13474C.1.pep
SAPHANNEVSQVPAPNEVSARNTVRAHCRPATTPWQRPCKPGATVSRRCPRRAPRPASPSSERMRRSHARWRPDRRRGASQASAVPPG

SEQ ID NO: 222762 - protein, 66 aa, Zea mays
  Clone ID: MRT4577_134750C.1.pep
NLEKLSEYIHIQSKTTLGALAIATVINHYHADKQGHLIIHPYSSTACFPPLAFLFTCPTRRCLLPC

SEQ ID NO: 222763 - protein, 76 aa, Zea mays
  Clone ID: MRT4577_134751C.1.pep
YKNSFGTCSHIDNSIVICRGLNSLFIFKSVSLFVVAPKLSCSHLRRCINLRITLVYCDADLDPKIPVHTVFLEYNV

SEQ ID NO: 222764 - protein, 468 aa, Zea mays
  unsure (1)..(468): unsure at all Xaa locations
  Clone ID: MRT4577_134752C.1.pep
MAPRGHHLAEVALLASASADLAAAGAGEREGWLDDPAILPSLGPRARSLAVASAAHSVLVIVXWREVEAAXVTVEPALGPDEGRISAVEWVPFAGEDDAEGEEGVSVVIGTDAGWLLFYSLAGDLLHKQSIYPAKILKLNFRERKENAWEDSGSDELSVVFPGVIARFDGADLQNVLKKAFQDVKSRLWKDKFEEQDAEDEETFGRIPFQIWNVNKFSSCADAAIGRVMPPPLLAVQSSQRHYCAITVGEDAVVSAYRLSEDRTRSIVGAILSRGVAATFSTISSLSKILWRSEPSPPKKSRPKPQSFAKTSPLTCLKDSPRKGERLTLSPSGTLAAITDSLGRILLLDTHALVAVRLWKGYRDASCLFVEMLLNKDKASSGSMHIEYTKSDYCLCLAIHAPRKGIIEVWKMRTGSRLLTIPCPKGSRILQPSARLSTSSFSPSYSPLEVYLFNGDSGQLSVLNRHIG

SEQ ID NO: 222765 - protein, 214 aa, Zea mays
  Clone ID: MRT4577_134753C.1.pep
MAARSLWQLEDAIIARLRTCATFRDLLRAHGLAVRLCLSQSSYVATQIVHICNAHGRAAHAARVFAQIPAPNLHLHNAMIKAYAQNHLHRDAVEVYVRMLRCLPHPSTAGFSVGDRFTYPFLLKACGALAASRLGRQVHAHVARSGCESHAVVQNSLIEMYTRCGDLSTARKAFDGMREKDVVSWNTLISAHARMGQMRRARELFYSMPDKTVV

SEQ ID NO: 222766 - protein, 106 aa, Zea mays
  Clone ID: MRT4577_134754C.1.pep
LGVLPSCLRSALPVCFGFFPGGRFCVCPRAIRCLFSSLSCCARLSLLSGRWCVSCLFPSGVFLVPFWSIVFVWGGPFHFIPPLGAFARWVNKKAVMWAAALEVPRF

SEQ ID NO: 222767 - protein, 109 aa, Zea mays
  Clone ID: MRT4577_134755C.1.pep
YTHVWDDAEGEEGVSVVIGTDAGWLLFYSLAGDLLHKQSIYPAKILKLNFRERKENAWEDSGSDELSVVFPGVIARFDGADLQAFCACSRIRTEFLVAHRTFLKKHFKM

SEQ ID NO: 222768 - protein, 71 aa, Zea mays
  Clone ID: MRT4577_134756C.1.pep
GEGSRAGPERGEDGGVVQPPHPSRRRLQLRGPPKQRRGGPPSARWWPRGAIEMDGGEPRSRPSFRQQRNSS

SEQ ID NO: 222769 - protein, 105 aa, Zea mays
  Clone ID: MRT4577_134757C.1.pep
SIRPIDHAKTNPNLSPSIPTFSRSYSFGCCTPKACALQRDFSLTFSNNPSLLRRRRRIRRFEFLLSASPCSCSIGSLGSPRSMPTAMPWALWTSKMRLLICWRRK

SEQ ID NO: 222770 - protein, 52 aa, Zea mays
  Clone ID: MRT4577_134758C.1.pep
SSTIYHYIQLSFADIKIISPFITPLIFTFISIHFLPATQNTQIFKLPFIFSQ

SEQ ID NO: 222771 - protein, 253 aa, Zea mays
  Clone ID: MRT4577_134759C.1.pep
MEMLFSSLFCDSASSENFSGHPGVERCPFLRNINGATTFSFSSALPVAARGGKGPIFEDGPGFESAFKLFHGQDGIVPLSGRSYVPDENRSESTDVKPEPALPFNPLAARAATISLSAFGPFGFNFFNGKGKKQNKKPNNLDQSHKKPDKPDQNSMKQKGGNPPSHEAMSDEWLENGQCPLARSYRAMSGVLPLVAKALQPPAGMELKCPPAIVAARAALARTTLVKSLRPQLLPAKMVAIAMLGMAATSPLG

SEQ ID NO: 222772 - protein, 63 aa, Zea mays
  Clone ID: MRT4577_13475C.1.pep
DNMNTHGKQGDGANIPRASKSKNSQFKMKTFRTLSVYNSRPYLIYNVIELNYMEQLHDNVPVI

SEQ ID NO: 222773 - protein, 122 aa, Zea mays
  Clone ID: MRT4577_134760C.1.pep
AQPRETAPAKPPRNDRTKGAQPSTGGGHRARTAAADRAPAEAQAQAGRRAEHGPAATGTEGGDKPQAAHAETDKTNKSGAPPPPAGGHPGTQQPDQARDNERPQKERTHPKPPPTAHAPPRA

SEQ ID NO: 222774 - protein, 371 aa, Zea mays
  unsure (1)..(371): unsure at all Xaa locations
  Clone ID: MRT4577_134761C.1.pep
MEMLFSSLFCDSASSENFSGHPGVEKCPFLRNINGATTFSFSSALPVAAQGGKGPIFEDGPGFESAFKLFHGQDGIVPLSGRSYVPDENRSESTDVKPEPALPFNPLAARAATISLSAFGPFGFNFFNGKGKKQNKKPNNLDQSQKKPNKPDQSSMKQKGGNPPSHEAFSDEWLENGQCPLARSYRAMSGVLPLVAKALQPPAGMKLKCPPAVVAVRAALARTALVKSLRPQPLPSKMVAIALLGMAANIPLGVWREHTKKFSPQWFAAVHAAVPFIAMLRKSVVMPRTAMAFTIAASIVGQTIGSRXAERIRLRNQAANGTGDSSTHTAMYPNKNGHCSDTEGKAWDPLATKITGSTARGSPAPTPSVCF

SEQ ID NO: 222775 - protein, 60 aa, Zea mays
  Clone ID: MRT4577_134762C.1.pep
STTDIPQLPDYHILLAGHSTAAGPHNCTTVGVHDGGLSRPHGVHRAINTRILRIFRNSRS

SEQ ID NO: 222776 - protein, 60 aa, Zea mays
  Clone ID: MRT4577_134763C.1.pep
KKASLVGPPFHPLTTVRWFYIFPGPKGQLILVARMERKVTRLFCHPKMQTKNPLKLSGNV

SEQ ID NO: 222777 - protein, 83 aa, Zea mays
  Clone ID: MRT4577_134764C.1.pep
VVTGQEVTLHQGVMSGERCLVPASQEPAGHEKGFSGTSPSRRKAREASSPQRVSKAASQRQTKMCYVPAPSIKWAVCDALRLG

SEQ ID NO: 222778 - protein, 104 aa, Zea mays
  unsure (1)..(104): unsure at all Xaa locations
  Clone ID: MRT4577_134765C.1.pep
MCTLVFHASEPVVCWVPASKKEFVMASKLILKELKDPDKYPETSFCATACDEDMSHXDETIMGPHHISYAGGVLLPYIHFAADDPLKPAKVCFKTKVLDANINS

SEQ ID NO: 222779 - protein, 51 aa, Zea mays
  Clone ID: MRT4577_134766C.1.pep
FRLAIQTFCFDSDCAFFKLGPENVAVLSPLSGPFTAALPTTLDIRASQHVH

SEQ ID NO: 222780 - protein, 163 aa, Zea mays
  Clone ID: MRT4577_134767C.1.pep
MSGHWEVFFVMGDWVLRQAGLMFYGPFRMLEKIGEVSYRLELPPRSQILNVFHVLFLKKFVGNPPTAVPLLPPIKHGRVLPVPLKVLRSRLNRGDWDILVHWMGHPAAEATWGRVSVFAEEYHSFHFEDKLFHREGGSVIYAFVGWTYQRQPKKKQPVPLGLV

SEQ ID NO: 222781 - protein, 234 aa, Zea mays
  Clone ID: MRT4577_134768C.1.pep
RPDVIIFKGFSLSIQPGKSTALVGQSGSGKSTIIGLIERFYDPLRGVVKIDGKDIKTYNLRALRRHIGLVSQEPTLFAGTIRENIVYGTETATEAEIENAARSANAHDFISNLKDGYDTWCGERGVQLSGGQKQRIAIARAILKNPAILLLDEATSALDSQSEKVVQEALDRVMVGRTSIVVAHRLSTIQNCDQITVLEKGIVVEKGTHASLMAKGPSGTYFGLVSLQQGGNQH

SEQ ID NO: 222782 - protein, 30 aa, Zea mays
  Clone ID: MRT4577_134769C.1.pep
KRRGFYSKLEENFMLVRLNLGLFLPSCLVL

SEQ ID NO: 222783 - protein, 155 aa, Zea mays
  Clone ID: MRT4577_13476C.1.pep
HSIRRRKLTKTLRGLVTLSLRTKPAARAVLRSKSITTHTRTVRKKLIRILMPTTTAVIIKANAHQLTVPYHFDIWPILTVNNHSILTEKSFKEATPYTTRRRKRHRGRHGLYPRQQPRNSRVRDRILPEIDPPINSPHKHAHNHNHITKPKGSKP

SEQ ID NO: 222784 - protein, 77 aa, Zea mays
  Clone ID: MRT4577_134770C.1.pep
HKLLTGGNKIHKNNTGTLETLIYQPGNFPQGYTPTPGPIPQPPDPVPFSGGPGGIETWPRCPVQPERPPLTRVPPLC

SEQ ID NO: 222785 - protein, 74 aa, Zea mays
  Clone ID: MRT4577_134771C.1.pep
KYNIKNGCPLEPALFRGQILPISITFGGHWDFLLKGPNWQKAGVIQINWLGFKTFWPGKTLGEQNLIGLPYKQF

SEQ ID NO: 222786 - protein, 38 aa, Zea mays
  Clone ID: MRT4577_134772C.1.pep
ISLLHMLLERFFMILDSLCTSKHSSMQPTPQRVMDMHP

SEQ ID NO: 222787 - protein, 47 aa, Zea mays
  Clone ID: MRT4577_134773C.1.pep
HAHLKRHTVLNTTPSRAGSMFSILLLLASICNLHSSQPFVLNANKLL

SEQ ID NO: 222788 - protein, 98 aa, Zea mays
  Clone ID: MRT4577_134774C.1.pep
NVVEALRPPQNGSASALKKELVNSAPKTATAPQQNSGHFAPHGQFFTAKGDMEIHGLFVGSKVVKKGIPPNHYVYCGQNVPFFLLPQKKPPPALGCYC

SEQ ID NO: 222789 - protein, 91 aa, Zea mays
  Clone ID: MRT4577_134775C.1.pep
PSAHSDQCPGDGSVEVIAMLIMAPFWRSHSQDPGVVERIWPHLVYGQEVEGSLGARGDRHLCLVQTPPWCQRPWGRAPVGVICLEPNSELT

SEQ ID NO: 222790 - protein, 69 aa, Zea mays
  Clone ID: MRT4577_134776C.1.pep
SERGKGPQGMEPPPPRGCWIDAPSARLHGCAVAPLLVLVRWPLLLTAAGPPRSLRGGCVSGQRNGVGGF

SEQ ID NO: 222791 - protein, 55 aa, Zea mays
  Clone ID: MRT4577_134777C.1.pep
VCVLLPLCDPPCKAFFCNLLCARKLVDVLIKFFLPVKVNLNLLIMSEIMMLFPLP

SEQ ID NO: 222792 - protein, 61 aa, Zea mays
  Clone ID: MRT4577_134778C.1.pep
SFIDCMHGMVYSARAREVVHTFLFLRCGRTGGLTVCTFTLFFFCYWIAFGCLYMSENFSGI

SEQ ID NO: 222793 - protein, 58 aa, Zea mays
  Clone ID: MRT4577_134779C.1.pep
FLLLTLQICCSPGDSTQGSALVVELCTVTKTTFCNRAIKCTIFELCTVAICCEQIRLL

SEQ ID NO: 222794 - protein, 48 aa, Zea mays
  Clone ID: MRT4577_13477C.1.pep
SKLRAQEPKTKSSNRRFSGSENQESFYLWGGKSLTTPTERLFISSRLV

SEQ ID NO: 222795 - protein, 158 aa, Zea mays
  Clone ID: MRT4577_134780C.1.pep
MTGSSSSWSVPPASGECSLQNGERYEITKALLKCKMAEGSSVSQHLVKLVGYMWRLEALGSAIPAWLCTDLILLSLPPSFNGFIMNYMMYKMDKSVNELLGMLKNAEFWIQKDTNHVTKKTTSFKKKGKVKNGKGVSKTDTKGKPKRGPTKETECFFC

SEQ ID NO: 222796 - protein, 114 aa, Zea mays
  Clone ID: MRT4577_134781C.1.pep
RSAPLRSCSAPALSLSRRRLGDRRRLPQVFAGPVAGDEHPPGQVLLDNVDIKTLQLKRLRDQIGLVNQEPTLFATTILENILFGKPEATKAEVGSTTTSAGAEPRWWQGWKQGC

SEQ ID NO: 222797 - protein, 78 aa, Zea mays
  Clone ID: MRT4577_134782C.1.pep
QFTDRSCACWFEQQLIDGVAGAGYQLQGRDGVHMTGLLPINEGLGGHRSVGFKEDDSAQRVELGPDHACHRQWQTPPR

SEQ ID NO: 222798 - protein, 39 aa, Zea mays
  Clone ID: MRT4577_134783C.1.pep
SVRIPGSTPRVRPHIRTQVQFYHNRTIILLGNYNLFYSF

SEQ ID NO: 222799 - protein, 111 aa, Zea mays
  Clone ID: MRT4577_134784C.1.pep
YPPLLRLDSIWSITLLNQFGLHALSRRFICQGHLPRWIVSCQCLWVMVQPSIALLSAWQDQMLVSSSGVLHFIHTANGVVLWGNRTPLMWSPGSLASISVSNKHRGPLEPN

SEQ ID NO: 222800 - protein, 60 aa, Zea mays
  Clone ID: MRT4577_134785C.1.pep
LASSSQPAQTVQCALASSGGRQRAQSPQACVRRRPPCVHWHARRTGLPARASRAFDRDAV

SEQ ID NO: 222801 - protein, 63 aa, Zea mays
  Clone ID: MRT4577_134786C.1.pep
AKSVHKDGVTASVKGADKHVHVLLPMSLPDYSLGQGHISVAVVIVDQFQITVVEYGTRSTARI

SEQ ID NO: 222802 - protein, 393 aa, Zea mays
  Clone ID: MRT4577_134787C.1.pep
VPYRIAGSTQATRRSGIVALDRAEAVIEITEWVEVPKKILTLESNITNLNSSSEVGAANSTTDSKENLSSGSNTNSSTPIDESNAQEIITEKVLNKSAFRVAQEIITKKTLKKRTFRVPLKVVEKTTGAGTILSKELYSEAKNRLEALDKKDAERRKTAELKNNLESYIYSMKEKLEESADILTVSTEQERESFAEKLSEVQDWLYMDGEDAQANEFKERLDQLKAIGDPILFRLSELKTRPTACENARLYLDELQKIVKNWETNKPWLPQKRVDEVVSQAEKVKAWLKEKENLQKNTPVYSSPVFTSEQVYEKVLDLQDKVSSVNRIPKPKPKVEKKTAEEEPASKGKTTSSESAPNEGEYTETSQEPKAREGDHSASANSSDLDPESHDEL

SEQ ID NO: 222803 - protein, 69 aa, Zea mays
  Clone ID: MRT4577_134788C.1.pep
GLKTGFVFFGKKTSCPTPFPVASSRLTPIVSLLSPSSPVFFTPFYFPCMRGPFNPGSTELITYKSLPVF

SEQ ID NO: 222804 - protein, 89 aa, Zea mays
  Clone ID: MRT4577_134789C.1.pep
FPVRPTRQKKKKKKKKKKKKKKKKKKKKKKKKKKKKQKRKKKRKQEKKKKKNKKKKGGAPLGVQSFDRRFSQGKALQKGPQIYLQGRSF

SEQ ID NO: 222805 - protein, 56 aa, Zea mays
  Clone ID: MRT4577_13478C.1.pep
FQDCADGPACCLFGADHTWNYTFHLMFMRVLLNMGDGVAPTHQSNRIKQWLHDSTL

SEQ ID NO: 222806 - protein, 223 aa, Zea mays
  Clone ID: MRT4577_134790C.1.pep
MLAINNVSSSNYASCFANIAQHSNSEDAHGPLYPVGAVNSSRTGETGYIDSPTSLHMDSVEGQTTVRDSRSVQQADVTMATKEQTLPSTSGTTDSSSGSASSQPAFKGNPGRALKVSSSDALTVKATCNGDTVRFKFLPAMGWYHLLEEVAKRFKLATGAFQLKYKDDEDEWVILANDADLQECVDVLDSIGSRSVKLQVRDLPCLVSSSGSSSCCLQVEGSA

SEQ ID NO: 222807 - protein, 49 aa, Zea mays
  Clone ID: MRT4577_134791C.1.pep
CVSSYCIITYIDREGWIEETSPMSQISSRAGSERRGTSGWGRRCAVSVG

SEQ ID NO: 222808 - protein, 106 aa, Zea mays
  Clone ID: MRT4577_134792C.1.pep
LSKSSARAALRRKGTSPTAATVSYVSAAAARSLNVRNPIASAPSSELTASSSACALVARIIRATWKSPHSCGNRPNSVTYQYPSSKQPTYSSSARNQGILLTKSSS

SEQ ID NO: 222809 - protein, 179 aa, Zea mays
  Clone ID: MRT4577_134793C.1.pep
MAAGSGGGSRRARPNVLVTGTPGTGKTTTCSLLADAAGLRHVNIGDLVREKSLHDGWDADLECHVINEDLVCDELEDMMEEGGILVDYHGCDFFPERWFDLVVVLQTDNSILHDRLTGRGYMGSKLANNIECEIFQVLLEEARESYREDIVMPLRSDNVEDISKNVGALTDWVNNWRPS

SEQ ID NO: 222810 - protein, 76 aa, Zea mays
  unsure (1)..(76): unsure at all Xaa locations
  Clone ID: MRT4577_134794C.1.pep
KVFHPNINSSGSFCLGILKNQWSPALPISKVXLSICSLLLDQNPXYPLVPDIAHMFKPVRHKYEPPARAWPQRYAM

SEQ ID NO: 222811 - protein, 176 aa, Zea mays
  unsure (1)..(176): unsure at all Xaa locations
  Clone ID: MRT4577_134795C.1.pep
RPGRVHKDGEXTTFSLLADAAGLRHVNIGDLVRDKSLHDGWDADLECHVINEDXRTAGSGGGQNNNKVCDELEDMMEEGGILVDYHGCDFFPERWFDLVVVLQTDNSILHDRLTGRGYMGSKLANNIECEIFQVLLEEARESYREDIVMPLRSDNVEDISKNVGALTDWVNNWRPS

SEQ ID NO: 222812 - protein, 97 aa, Zea mays
  Clone ID: MRT4577_134796C.1.pep
ACGCSCSCRIRLSQRRINDRLAHPEITYIHTYIPACTHRKTQHYIELEKCVYVMLCTCCGLFPESMAALAIAACGSVDVDDAREPEGRCLGVPGDSV

SEQ ID NO: 222813 - protein, 110 aa, Zea mays
  Clone ID: MRT4577_134797C.1.pep
GIIEPLMNLLTAKDTKIILVILDAISNIFQAAEKLGETEKLSIMIEECGGLDKIEALQNHENESVYKASLSLIEKYFSVEEEEDQNVVPETTSEGYTFQVQDGAPGTFNS

SEQ ID NO: 222814 - protein, 70 aa, Zea mays
  Clone ID: MRT4577_134798C.1.pep
KGKQKKAIKLENPRRLPSHPKRAPPFFFIFFSFLINYNYFFFIYLFFIPFSLLFFFFFFFFFFFFFFFFF

SEQ ID NO: 222815 - protein, 51 aa, Zea mays
  unsure (1)..(51): unsure at all Xaa locations
  Clone ID: MRT4577_134799C.1.pep
HSEIRTREKQGPMEHGRRERRNSTGHPGKRPQEGXGKPPGASEKRKKATHP

SEQ ID NO: 222816 - protein, 403 aa, Zea mays
  Clone ID: MRT4577_13479C.1.pep
RHNKWRQSHGPSRRSSSPRSRRRPSSLPPSSRGSRPTNRGAGAAAMSAAAAAPAQAPRKWEGLVDEVLEREVLAACLDQAPERRRIREAFKDVQLSIDHCLFKGQYSGIRTKESCEHNSRGVEIFSKCWFPENRRMRAIVCLCHGYGDTCTFFLDGVARKIASAGYGVFALDYPGFGLSEGLHGYIPSFDTLVDDVAEHFSKVKGNPEYRGLPSFLFGQSMGGAVALKVHFKQPNEWNGAILVAPMCKIADDVVPPWPIQQVLIFMAKLLPKEKLVPQKDLAELAFKEKKKQEQCSFNVIAYKDKPRLRTALEMLRTTQEIERRLEEVSLPLIILHGEADMVTDPAVSKALYEKAKSQDKKLCLYKGAYHAILEGEPDQTIFQVLDDIISWLDQHSTKEGISL

SEQ ID NO: 222817 - protein, 75 aa, Zea mays
  Clone ID: MRT4577_1347C.1.pep
NRYLVAYSRVSSRSVTSTPKFLVSRIKTITMSLSSNLTPFTKKLNYYGSGIITYWFFVNKKLLRTTNPFSKEKKL

SEQ ID NO: 222818 - protein, 77 aa, Zea mays
  Clone ID: MRT4577_134800C.1.pep
LQACSIEGKKRQSYLFIITETDESTQAAASKIASIATTTACRQPATAVKVIKAGSPPTSRVLLSKASYLRRTPDGYL

SEQ ID NO: 222819 - protein, 82 aa, Zea mays
  Clone ID: MRT4577_134801C.1.pep
IAGGPPFIWWGFFFEGWLFLFLSFFFFFFFNAIQIFERSNNTIIKVAIDQKQKSNPKQALGRARPTAIKAHAAYGIFGVKRI

SEQ ID NO: 222820 - protein, 295 aa, Zea mays
  Clone ID: MRT4577_134802C.1.pep
MGRAPCCEKMGLKKGPWTPEEDKVLVAHIQSFGHSNWRALPKQAGLLRCGKSCRLRWINYLRPDIKRGNFSKEEEDAIISLHEQLGNRWSAIAARLPGRTDNEIKNVWHTHLKKRLDPTKQEQQQQHGTTPAAGAGKKHRPAAAAKRGGGGARKATANADAVVVPAPAPATAAPASPERSAASSSVTESSMTEQEQEHGNTGSSPAFPKEESLTTSSSDAEEFQFDDSFWSETLSMPLDSLDDVVPMEPSDDAFGDVDVDVAAASSSSVGADGDLDYWLRVFMESGDAHPELPQI

SEQ ID NO: 222821 - protein, 93 aa, Zea mays
  Clone ID: MRT4577_134803C.1.pep
SHIMQARINLSILCLPIYPSNNSDNLYLHLDFTRRNYFILTQTRQDQKIWLHNNTYWPIQISLAICLFQPTLHIYNNKITITTTTSIPSHHTT

SEQ ID NO: 222822 - protein, 81 aa, Zea mays
  Clone ID: MRT4577_134804C.1.pep
GSFASMLLSMLKVIKSVQFRWSTMIGSMKLLFILLSCLSLGRFELVVNLSPASDIWLSIEILHEGIDLVKSSLFETFIQEW

SEQ ID NO: 222823 - protein, 99 aa, Zea mays
  Clone ID: MRT4577_134805C.1.pep
EAYTEPELVLLEALLGIQGRGRAVAPRQLQEVESAVQALETQGGIPDPTSSSLIEGSWRLIFTTRPGTASPIQRTFVGVDSFRIFQEVYLRTDDPRVVN

SEQ ID NO: 222824 - protein, 286 aa, Zea mays
  Clone ID: MRT4577_134806C.1.pep
ISCITRRVILKKRKRTVRQETRKEPPKRPQLVEPPANAPSQTINQDSPEVFRCLSCFTFFIPTGCGFNIFRIFERRNVDQQVQPQHSSASVENCGSWLLSCFRTIDSPKPLNNADSLEEPLVSDSQRTDNITSVEENTPLHSDNTIGKAEQSNKPSPTGSQTTAATYEVKESFSQFHASSKVVTGSTQTEAGHVVTVQRNGARQEQIPLSRPAVDTKTDTSHLGHKEEFTQTEAGHVVTVQRNGARQEQIPLSQPSGDTANDSMHLGHKQDILEDIMAPSDNSTFF

SEQ ID NO: 222825 - protein, 54 aa, Zea mays
  Clone ID: MRT4577_134807C.1.pep
TLPTCFHHRLERRRLAQLQYGLHSVGHVTSPLRLGHQPEIVSPAIFVYAYNSVK

SEQ ID NO: 222826 - protein, 89 aa, Zea mays
  Clone ID: MRT4577_134808C.1.pep
PGRLGEPWAPFMFFALHARFTQHAGQLTGAERIVLHNSLAVCMETGTRPRHGALQAAGVEFTLTVTRPLDILLWRCRFGVLTYFFGFHG

SEQ ID NO: 222827 - protein, 141 aa, Zea mays
  unsure (1)..(141): unsure at all Xaa locations
  Clone ID: MRT4577_134809C.1.pep
APPPPPGGLPGTLNSDQGRGFALPLXKEGFYLQPLPPGKAVARVKMSAQDIITLKPFMDKKGWPYVQNALRLRASYLGXDLKTVLASKPKEEKQSLKELPGKFFSPIDVFAHAPKIKSPPGAEKYFPATKNALGEVPPKLA

SEQ ID NO: 222828 - protein, 100 aa, Zea mays
  Clone ID: MRT4577_13480C.1.pep
RVNTRVRILVHNFLLLALCAYLAVFGLLNMQNTIDEFSLSGDLSTLKVAAEDWSDTYIGDFTREGVKDSFRHLFLLHNSPGHDQFLTNDTSISGSSIEPH

SEQ ID NO: 222829 - protein, 57 aa, Zea mays
  Clone ID: MRT4577_134810C.1.pep
VDQRFFLLAFELLFDGVGTREITRPPKETPAPGAPYFITGLLRLENFFFGGFSAKIS

SEQ ID NO: 222830 - protein, 63 aa, Zea mays
  Clone ID: MRT4577_134811C.1.pep
GGELQLGEVGDQELPPVVDGFHVLLHCERDISPAVKHAEEGRGESEPALRLGGEGGFFSLAFW

SEQ ID NO: 222831 - protein, 91 aa, Zea mays
  Clone ID: MRT4577_134812C.1.pep
MTPGCPPRASRMRARRRSVRNQRIRSTRTSEAAAPARAATSEATTSSRAAIVATVTATTKGSNSSGGGDGKGNNSKGGSGGHNAGGKAPLA

SEQ ID NO: 222832 - protein, 103 aa, Zea mays
  unsure (1)..(103): unsure at all Xaa locations
  Clone ID: MRT4577_134813C.1.pep
ASLAQSFQGGTKLRCMCSTXYSSTQTHMRVCGLRARVQHFHTHEKKPVGVENQNPYSYPQVQTSHRKPALYRVFTRGHVGKMCPLPSLLPSITSTFQNIMEGC

SEQ ID NO: 222833 - protein, 127 aa, Zea mays
  Clone ID: MRT4577_134814C.1.pep
THEAVYLATAILMQMRRREDEKSTRSQKQAAGWGHPPPPLGPTGRKPPAKMSRRPRGAWVPGVHFRAISRPGRTGNRSPATSLLPQVRSPIVQCMHARASPQNAGSECLARTSAWPVSARTQQQQQQ

SEQ ID NO: 222834 - protein, 79 aa, Zea mays
  Clone ID: MRT4577_134815C.1.pep
RRTIHKTYCAKAQTINNLNAKEPDRPRVWTQNNRKDCQRRSNPQTNHQYRGPIEKPSIRLHCKIGKEKANKPSFVTSWP

SEQ ID NO: 222835 - protein, 69 aa, Zea mays
  Clone ID: MRT4577_134816C.1.pep
GEGQQEEKGPKKDQGPAAAAKPAKAGGGEEKKKKCSKGKLKEKANNAGVHDQATYDKRLSKGPKNKQIT

SEQ ID NO: 222836 - protein, 175 aa, Zea mays
  unsure (1)..(175): unsure at all Xaa locations
  Clone ID: MRT4577_134817C.1.pep
XHTIPHNIYFTXXLIXFNIXXXSTYLXXLPKSISQLHILHXLHITXNHIQLLPHSFPHLSXLHLFHTHQTPLXLPPKXLLXLHXHNLFXYINNILSPTXXIHNQTYNITFSTXLLSXFXSYKNNQQFPPPSYLNHIILIYFHLFIFPPSLNSSTKSFITTIIISTLIQFINILST

SEQ ID NO: 222837 - protein, 90 aa, Zea mays
  unsure (1)..(90): unsure at all Xaa locations
  Clone ID: MRT4577_134818C.1.pep
GXKRXXKGGKDQQKDPPTPCSAGPDGEDTYQRQATIMGPSDSPYAGGAFLVNIHCPPDDPGKPPKVTRRTKGSHPNNNSNGSICLDMTKE

SEQ ID NO: 222838 - protein, 35 aa, Zea mays
  Clone ID: MRT4577_134819C.1.pep
TLLGFTYPYRPLTVAFSASVRCTMVSVPEVVSQHN

SEQ ID NO: 222839 - protein, 167 aa, Zea mays
  unsure (1)..(167): unsure at all Xaa locations
  Clone ID: MRT4577_13481C.1.pep
KPPSFLFGQSMGGAVALKVHFKQPNEWNGAILVAPMCKXFCLCGLLYIQVNAFPLIHKLIPIDSRRCGSTLAHXQVLIFMAKLLPKEKLVPQKDLAELAFKEKKKQEQCSFNVIAYKDKPRLRTALEMLRTTQEIERRLEEVSLPLIILHGEADMVTDPAVSKALYE

SEQ ID NO: 222840 - protein, 65 aa, Zea mays
  unsure (1)..(65): unsure at all Xaa locations
  Clone ID: MRT4577_134820C.1.pep
LSLSLNVLIDVFYKQWMLYNLPSDNIPIPATMAIKTEDPXDPTPYNQENPSTQGDXWLDFSLENL

SEQ ID NO: 222841 - protein, 47 aa, Zea mays
  Clone ID: MRT4577_134821C.1.pep
QPKLHQTRIVIHGITTLQRPSEVLCIGWQNGTMLLKIYFTSRELTAL

SEQ ID NO: 222842 - protein, 144 aa, Zea mays
  Clone ID: MRT4577_134822C.1.pep
KVRGFPHKPFRGGGFPKNPQLNPGGTNTGRSCPQNGQDKLSQNTVGKVSNEFGALKKIVPGQKQKLGFKSKQGGVTLTILDKSLTTQFPSPPGKGGKITPLTPGVANPVPPKKKKGPGRVSSPLFNVCFFPTKNKKKIQKKERK

SEQ ID NO: 222843 - protein, 93 aa, Zea mays
  Clone ID: MRT4577_134823C.1.pep
IRSPPFFYLYPSRETPVAVSALGFFLADNDTMAPITQETVDGLKDIINKLESRVADLEGRLVHGSPASSSKSMAEQFRIVLMGPPGAGKGTQA

SEQ ID NO: 222844 - protein, 104 aa, Zea mays
  Clone ID: MRT4577_134824C.1.pep
SNDLDPAPEPRTVSLSPQLHQGRHRASAHYALKRMNAAIAGEGSWSAPVRLQPEADSAVRAQVGPRRVNVSRAPYLLSPLCSAPVCYCSWCSGSCFCSAPWIAA

SEQ ID NO: 222845 - protein, 86 aa, Zea mays
  Clone ID: MRT4577_134825C.1.pep
RPPPFLPCSFPSSAGCSSPSLRAPDPDPDPGACHGIQTYPQGIKGLAKGPSNIMQCRYELELPIDLRVMPHGLSLRIDAFCYTYEY

SEQ ID NO: 222846 - protein, 85 aa, Zea mays
  Clone ID: MRT4577_134826C.1.pep
PWPLENLITFLLPSTPLLEPMTFLPPTFITLHFCLLKMHLFSSHQTNNTIFLISFFFPRFFVCKDLLVKLCTSQLLWYTEKKKKG

SEQ ID NO: 222847 - protein, 104 aa, Zea mays
  Clone ID: MRT4577_134827C.1.pep
GLGSPLLRPGPFQLLLLPGPRGNECLVCCRPPGLRRVVAPGPSFFLVLWPPVRCLFLGGVVFVRVLFFLGFFLLRLLAAPPVPLVPFFFVAVFFGKHTDKKTIN

SEQ ID NO: 222848 - protein, 88 aa, Zea mays
  unsure (1)..(88): unsure at all Xaa locations
  Clone ID: MRT4577_134828C.1.pep
DDDQPVKRKLDPFERKPYPFPTCAYKIRKKWSKIEIETLLEGVGKYGIGNWKDIKLAYPGVFEERSTVDLKDKFRNLGKXATMNRLEA

SEQ ID NO: 222849 - protein, 105 aa, Zea mays
  Clone ID: MRT4577_134829C.1.pep
MEKRSSGSASLVLGLLLAASLSYQCHGARDVPAEKPLRPQNVFGFGGFYPGPTVNWVFPGPNGVTPQIGFGGMPGSSALPGGGGVVGIHGGAGAGAGAGAVAKKP

SEQ ID NO: 222850 - protein, 185 aa, Zea mays
  unsure (1)..(185): unsure at all Xaa locations
  Clone ID: MRT4577_13482C.1.pep
AFAKVFLPALPPPPLLTAPVFSRRPTNRGAGAAAMSAAAAAPAQAPRKWEGLVDEVLEREVLGACLDQAPERRRIREAFKDVQLSIDHCLFKGQYSGIRTKESCEHNSRGVEIFSKCWFPENRRMRAIVCLCHGYGDTCTFLLDXSFSSLMPLIXGVARKIASAGYGVFALDYPGFGLSKGLHGY

SEQ ID NO: 222851 - protein, 46 aa, Zea mays
  Clone ID: MRT4577_134830C.1.pep
NQLNIFFFLIDRKFSMDPFLSRTFAYFCLYLKAYYVPPRQYPLFPD

SEQ ID NO: 222852 - protein, 77 aa, Zea mays
  unsure (1)..(77): unsure at all Xaa locations
  Clone ID: MRT4577_134831C.1.pep
MGIPVVGGVAAAYSCSSSLAAPPRAAAAAARAPSRAHVAAAGMSSRASSFVGXSAXDLSAVAAIVACLSIKTGFHEI

SEQ ID NO: 222853 - protein, 124 aa, Zea mays
  unsure (1)..(124): unsure at all Xaa locations
  Clone ID: MRT4577_134832C.1.pep
MATSAELSTAANPTQLYGYRASLEKTQKEVVLRMPRECVQRSIAWQVANSITADRVPDMEKCKVMNLLLLEAISLPTVKVIVXPYGAFFVPDDSGNCGGVTYAKDILGNDIALEAWLNTHGPND

SEQ ID NO: 222854 - protein, 75 aa, Zea mays
  unsure (1)..(75): unsure at all Xaa locations
  Clone ID: MRT4577_134833C.1.pep
NDVGLDADHCRVLGNIEQQSPDIAQGVHGHLTICPGDIEAGDHGHXMFGYAXDQTPELMPLDHXLEKMLGARLTD

SEQ ID NO: 222855 - protein, 78 aa, Zea mays
  Clone ID: MRT4577_134834C.1.pep
LWLRGGHLISNQSNCVIRSLYLRIKRPSVLKDTHLFNFLPGLTCLRTSALTSVEMLSFCCQKISIFWALSYFTCYTFA

SEQ ID NO: 222856 - protein, 152 aa, Zea mays
  unsure (1)..(152): unsure at all Xaa locations
  Clone ID: MRT4577_134835C.1.pep
MAPKAYMKPAANKPXEEEPXRQTKRFNAPAGXQPMAEKCLPAGKSNEGVQGKTGKKQAKKSAETYKIYMFNVLKQVHPVIGISSKXMSIMNSFIYYIFEKLAAESAKLARYNKKPTITSHEIHTSVRLILPEELAMHARLRGTNAVTNFTSL

SEQ ID NO: 222857 - protein, 83 aa, Zea mays
  Clone ID: MRT4577_134836C.1.pep
ARLDTHTMEIDRQGSIKTTRLNTGKRRNPVLARRPIKSGAAGGDARHAQNQSLGKSQFLTTGNASLNKSPVDEGRPHAVDAGN

SEQ ID NO: 222858 - protein, 47 aa, Zea mays
  Clone ID: MRT4577_134837C.1.pep
IADAGRIFLMAVTMNSLCQNKHLTQLKYTVDLNMLTYWDADTEFIRV

SEQ ID NO: 222859 - protein, 334 aa, Zea mays
  Clone ID: MRT4577_134838C.1.pep
MEDAKMGNGATIRAVLAILQWWGFNVTVIIINKWIFQKLEFKFPLTVSCVHFICSSIGAYIAIKVLRTKPLIEVASEDRWRRIFPMSLVFCVNIVLGNVSLRYIPVSFMQTIKSFTPATTVVLQWLVWRKYFEWRIWASLVPIVGGILVTSVTELSFNTAGFCAALVGCLATSTKTILAESLLHGYKFDSINTVYYMAPLATLILSVPAVALEGGAVLGWLRTHESVGPALAVVVTSGVLAFCLNFSIFYVIHSTTAVTFNVAGNLKVAVAVLASWMVFRNPISAMNALGCGVTLVGCTFYGYVRHRLSQNQAPRARLEMQMLPLTVDKQGDKI

SEQ ID NO: 222860 - protein, 46 aa, Zea mays
  Clone ID: MRT4577_134839C.1.pep
NIETLEGLDYMITSFCARKIQSFITFQAIYESFTINFILTVITMAG

SEQ ID NO: 222861 - protein, 126 aa, Zea mays
  Clone ID: MRT4577_13483C.1.pep
MGNPEEWVEILKQCKYLPEQDLKELCEMVKELLLEESNVQPVAAPVTICGDIHGQFYDLLELFRIGGEIPLTNYIFMGDFVDRGYYSLETFTLLLALKARWPDKITLLRGNHESRQITQVYGFYDE

SEQ ID NO: 222862 - protein, 205 aa, Zea mays
  Clone ID: MRT4577_134840C.1.pep
LEAGRGRIWASLVPIVGGILVTSVTELSFNTAGFCAALVGCLATSTKTILAESLLHGYKFDSINTVYYMAPLATLILSVPAVALEGGAVLGWLRTHESVGPALAVVVTSGVLAFCLNFSIFYVIHSTTAVTFNVAGNLKVAVAVLASWMVFRNPISAMNALGCGVTLVGCTFYGYVRHRLSQNQAPRARLEMLPLTAVDKQGDKI

SEQ ID NO: 222863 - protein, 153 aa, Zea mays
  unsure (1)..(153): unsure at all Xaa locations
  Clone ID: MRT4577_134841C.1.pep
EHKGIILFFCPTEKKITYLNRWWFVDWISRFNCNHGKKSLFLSCDADSVWGCQKLEFKFPLTVSCVHFICSSIGAYIAIKVLRTKPLIEVASEDRWRRIFPMSLVFCVNIVLXNVSLRYIPVSFMQTIKSFTPATTVVLQWXLVWRXYFEWRI

SEQ ID NO: 222864 - protein, 63 aa, Zea mays
  Clone ID: MRT4577_134842C.1.pep
TVKPHHWGAVFLFKKHLVFSPFPNPKGYLPKMFDLWAKLKGFFLKGPGKIKPPVPFQKVFFFW

SEQ ID NO: 222865 - protein, 88 aa, Zea mays
  Clone ID: MRT4577_134843C.1.pep
LLPAPRQPGRRRHGRAGARRRLTAQTAGPERRRQKWNSTSTRTIEMRYTRRDQPTARVADWRELNAHKDVNLDDTKENLKGRETKHVA

SEQ ID NO: 222866 - protein, 34 aa, Zea mays
  Clone ID: MRT4577_134844C.1.pep
ANAYLSLELIGVTCTRREPEMVNAGNERKCIVKV

SEQ ID NO: 222867 - protein, 121 aa, Zea mays
  Clone ID: MRT4577_134845C.1.pep
GRVGGRVGGRVVKKKKKKKKKKKKKKKKKKKKKKKKKKKKKKKKKKKKKKKKKKKKKKKKRGGRFLGINFFCPFFGNFYFFFGAPKFNLLGRFFKTWDWEKPLFFPIFFFLKKFPFSHFGL

SEQ ID NO: 222868 - protein, 40 aa, Zea mays
  Clone ID: MRT4577_134846C.1.pep
PPPFFFFFTLTTIAVFIFFHAALILQHNKLPASSCHQVSV

SEQ ID NO: 222869 - protein, 117 aa, Zea mays
  Clone ID: MRT4577_134847C.1.pep
LICSRGQRNDRSGVAQLLKSASHGRSTDGHGRQLAARSTAGCIPHHDAQGEDAAPHPALHVADMQIHSPPSLLLAPAIIVIVYATSYLPLLLEAIPRSHHSYMHAPHYDDTASREVL

SEQ ID NO: 222870 - protein, 74 aa, Zea mays
  Clone ID: MRT4577_134848C.1.pep
PGVRPKALGLGDGFYIYFPERAHGGRDLFHANKIFPHHPLWPAIAVTGGALEEPVVVVVGIFQARFQNSSLPPF

SEQ ID NO: 222871 - protein, 101 aa, Zea mays
  unsure (1)..(101): unsure at all Xaa locations
  Clone ID: MRT4577_134849C.1.pep
ACPGGGFLPGGTLGLVGRLAGSTSWVPAYGGGDWSLRFRWSRPLGLGPGGFATLEWPVPGDAPSGVYRLRLFGASGPLVGSVGRFAGPSRAFAXCVRLLTV

SEQ ID NO: 222872 - protein, 48 aa, Zea mays
  unsure (1)..(48): unsure at all Xaa locations
  Clone ID: MRT4577_13484C.1.pep
KCTLAILFXWATTNLSETKKNVELVHYEAQKMTQLVIXIHVLLSKGVT

SEQ ID NO: 222873 - protein, 112 aa, Zea mays
  unsure (1)..(112): unsure at all Xaa locations
  Clone ID: MRT4577_134850C.1.pep
FCVFNFFFFFFLFFFFFFFFFFIKKKIYNKTIRKYPLIGXLXQTTSFFYRVMFRXXXHPKNKKKNQTNLYLYQNLIKIKXNIKLILIKLIKNXLSLKXPHITXTTKNKGQNL

SEQ ID NO: 222874 - protein, 96 aa, Zea mays
  unsure (1)..(96): unsure at all Xaa locations
  Clone ID: MRT4577_134851C.1.pep
CRLLSPRGPLWSVACSPCLFAPLWFLGWVFSSSRFFCCLVWGSFGSAFGCLFALWSFLSRLLLRVCAGALVGPSLGLLCCSXVAPGFLFSXLLVGL

SEQ ID NO: 222875 - protein, 179 aa, Zea mays
  Clone ID: MRT4577_134852C.1.pep
SRGNEAATKILARQLVRLRQQILNLQGTRAQIRGVATHTQAMYAGTSISAGMKGASKAMSAMNKQMEPAKQIKVMKEFQKQSTQLDMTLEMMSDAIDETLDKDEAEEETEELTNQVLDEIGVDVASQLSSAPKGRIGATNKKVDNGQARPARNVAAPALEPSSAEVEDLERRLASLRRI

SEQ ID NO: 222876 - protein, 229 aa, Zea mays
  Clone ID: MRT4577_134853C.1.pep
MNIFKKKVDPKEALRTSKREMAVATRGVEREIGSLQMEEKRLVAEIKKTAKTGNEAATKILARQLVRLRQQILNLQGTRAQIRGVATHTQAMYAGTSISAGMKGASKAMSAMNKQMEPAKQIKVMKEFQKQSTQLDMTLEMMSDAIDETLDKDEAEEETEELTNQVLDEIGVDVASQLSSAPKGRIGATNKKVDNGQARPARNVAAPALEPSSAEVEDLERRLASLRRI

SEQ ID NO: 222877 - protein, 178 aa, Zea mays
  unsure (1)..(178): unsure at all Xaa locations
  Clone ID: MRT4577_134854C.1.pep
IKXTAELAHAASFIEKLPDAYETMVGQHGSQLSGGQKQRIAIARAILKNPKILLLDEATGGLDVESERVFXEALNRIMVGRTTLIVAHRLSTIRSADCIAVVHQGKVVERGVHDKLIKDPDGAYSQLIRLQQAHATERHEVPDTDVSGSIFKRRXLPLEQXTGXDSSXNQRHHSXTKT

SEQ ID NO: 222878 - protein, 66 aa, Zea mays
  Clone ID: MRT4577_134855C.1.pep
HQKLKFLKKPGPKKKTPPWDQKKGSPDFFPPRGPYDPPGIFGPTPPLDISKNRSLLGGTPPFFPPF

SEQ ID NO: 222879 - protein, 650 aa, Zea mays
  unsure (1)..(650): unsure at all Xaa locations
  Clone ID: MRT4577_134856C.1.pep
GGGRRSGPATPLLKWDVGGRRGEGTKAAADEAGDAARARETKAREVSVRRLAAGVWRLRPPEAVAGAGAGGENRVRVGVEHIPRHLQVQLLKQNTSGHHQSLKNEVSSPISVLERKSGELHKVQLHATSAMLPVATMEKATKWEPGDIKGMESHDAYLIASQLNLLDEQQDTVYVAGLQMELQQARDRISELETERRSARKKLDHLFKKLAEEKAAWRNREHEKVRAILEDMKADLDHEKKNRRRLEMINLKLVNELKEAKMSAKQLLQDYETERKARELTEEVCNELAREVGEDKAEIEALKRDSLRLREELDEERKMLQRAEXWREERVQMKLVDAKLTLDAKXTQLSRLQQDVEAFIAACSTANGDITVVEEAENIIQAIKSVRAQGAEFRYEPPAASEDIFSIFEELRPSEEPVIKEIEPCYTNSSAKCESEIQQVSPMTDIFLETKAKVYSNKSPKDESDAEDGSSWETISHEDMRGSSGSPDGSEPSVSNKISISWNSRNGXSSTGRTRSWXDDLADAYLASMNQPKKKESAISKLWKSSRPKNSEVCKKDAVVETVNARPSNARHSVXGLIPLLKVASKXGLSPPSVEQWSSPDSMNIQFNRGFKGCIEYPRTSQKHSLKAKLMEARMESQKIQLRQVLKQKI

SEQ ID NO: 222880 - protein, 44 aa, Zea mays
  Clone ID: MRT4577_134857C.1.pep
YRLSRKMGFMLVTGKLQAKESYALTIRRSLVDCKSVERTGRQAA

SEQ ID NO: 222881 - protein, 102 aa, Zea mays
  unsure (1)..(102): unsure at all Xaa locations
  Clone ID: MRT4577_134858C.1.pep
LGLFVGRVCVLVDCGGGSTGAGSCAEVVCAAYLNTMCHDELRACGGGACLSACDAFXGPXYCCSGAFKYXSXCRSTAYWQVLKTASPNTYNYALYDSTFTFT

SEQ ID NO: 222882 - protein, 252 aa, Zea mays
  unsure (1)..(252): unsure at all Xaa locations
  Clone ID: MRT4577_134859C.1.pep
MYRRHFATMAESAAKRVKTSGNGPLIGTHSGHFHADEALAVHMLRRLPTYRDADLVRTRDPAVLATCHTVVDVGGEYDAEKRRFDHHQRGFNTTFPGRPTKLSSAGLVFLHFGRAIVAERLGLSEDSPDVDLIYKKLYENFVEALDAHDNGISVYDPAAXPLLALRSVSARVXRSRVPXVGRLNPKWNDPTPSDPAEAQAAEDXVQXPAAAFGQEFDRDLDNYXASWLPARTIVQEAFNKRKQYDEQGRILI

SEQ ID NO: 222883 - protein, 49 aa, Zea mays
  Clone ID: MRT4577_13485C.1.pep
MGYWWDRVVLPVRRAWLGVASRFGVRQTGLGKLRQEVSTCEYEDVHVMG

SEQ ID NO: 222884 - protein, 74 aa, Zea mays
  Clone ID: MRT4577_134860C.1.pep
FSIMLHVYPYLTMQQHPPLQCTLSLIMWHLNPSHITSSYLLTLPSLLSTIHNLIIISFTSLSFYCLLFQIYMLY

SEQ ID NO: 222885 - protein, 54 aa, Zea mays
  Clone ID: MRT4577_134861C.1.pep
TTLTFLFKTYPSKSYSSRSDRTFKPTSPSSPPPSPATICLINNIHYIFKSLRKS

SEQ ID NO: 222886 - protein, 135 aa, Zea mays
  Clone ID: MRT4577_134862C.1.pep
SMDIRTRQGLLNAMVGKVGKRMDNLLIPLELLCCISRTEFSDMKAYLRWQKRQLNMLEEGLINHPVVGFGELGRKVNEIRSLFRKIEESESLPPSAAEVQRTECLRSLREVATSLSERPARGDLTGEVCHWADGY

SEQ ID NO: 222887 - protein, 51 aa, Zea mays
  Clone ID: MRT4577_134863C.1.pep
HGVDRVVLRSVVDKAHGLMTQNGRVDRARYTGSRALRERASFPHSSRIRAR

SEQ ID NO: 222888 - protein, 191 aa, Zea mays
  Clone ID: MRT4577_134864C.1.pep
SKERKARYITELERKVQTLQTEATTLSAQLTLFQRDTTGLSAENAELKIRLQAMEQQAQLRDALNDALRQEVERLKIATGEMSKSNNEHFNMGMQHVSYSPSFFQLSEQHTMQQHGNIQLPHHFQQPPLTVPSHQMLSHPNSLSNMVQQDSLGRLQGLDIGKGSMAVKSEAEVVVKSEGSSISAGESNTTF

SEQ ID NO: 222889 - protein, 73 aa, Zea mays
  Clone ID: MRT4577_134865C.1.pep
KKSFGWVWPLKWGMRPFFGAKGEKLFFRLYGWGKKGGTGKYLSWGLGKGKPILDLNFKKQNGPGAQTCRRWFK

SEQ ID NO: 222890 - protein, 197 aa, Zea mays
  Clone ID: MRT4577_134866C.1.pep
PRVRDRAADCLFARSKERKSRYITELERKVQTLQTEATTLSAQLTLFQRDTTGLSAENAELKIRLQAMEQQAQLRDALNDALKQEVERLKIATGEMPKSNEQFNMGMQHVSYSGPSFFHLPEQHVDIQLPHHFQQPPRNVQMLSHPNSLSDMAQQDSLGRLRGLDIGKGSMAMKPEAEVVVKSEGSSVSAGESNTTF

SEQ ID NO: 222891 - protein, 208 aa, Zea mays
  unsure (1)..(208): unsure at all Xaa locations
  Clone ID: MRT4577_134867C.1.pep
RSSFLSPPLPSASPFPPLSLAGAVSPPPCEEDNSHIVYSRDCCILSPAQSTTTGHLIYQLGEIDKRVIXASERTLLNIDXRAFKSPWLVHQLKGERDRGITIDIATXNCETXRTYCCDSLDASCDDVHFIXNMISRTSHSDXAVLILTXLTAEFEGDISPDGHSPELALLRFTLGTEPMTLXCNKMDATAPLYSMDRYHEIVYQNAFY

SEQ ID NO: 222892 - protein, 74 aa, Zea mays
  Clone ID: MRT4577_134868C.1.pep
SPLAVPPQIHSLESSPSSWIDLLFLSLLNVVSSVFYIKICDELSLKFKLNAYFFVWLEFYYIETVNKWKIIYEF

SEQ ID NO: 222893 - protein, 32 aa, Zea mays
  Clone ID: MRT4577_134869C.1.pep
SYAGVVVLAEIEDLRVGMFDLEEKLSEVRREN

SEQ ID NO: 222894 - protein, 103 aa, Zea mays
  Clone ID: MRT4577_13486C.1.pep
SLIIALYLICCSGGFFNRMSRLSPNGAEGKGHQKQDPRRKKRPTELAQKTTPDRHKSHHKKGEKGPRALQNHKGTKREKQEKRETASSGGEQKRKTRENAGKG

SEQ ID NO: 222895 - protein, 110 aa, Zea mays
  Clone ID: MRT4577_134870C.1.pep
SPFFFFFFFFFFFFFFFWGPMIYFIPLSTGKGHPIKHTKQQQELAYWGGCLLVTRGTDRGTWKDPLAVPLWRAALGELDESLMDLATPIFGEEIAGPVLDGPLVRGHGDP

SEQ ID NO: 222896 - protein, 430 aa, Zea mays
  unsure (1)..(430): unsure at all Xaa locations
  Clone ID: MRT4577_134871C.1.pep
MAAPFFSTPFQPYVYQSQQGSVTAFQISGGDVQVLQVMLKSQEKLTAKPGAMCYMSGNMQMDNNYLPENDGGVWQWIFGKRVSSTIFFNSGSDDGYVGIAAPFPGRILPVSILLLFYVLIFLLASSFLVQCGINHCCRYSSYANGFXFGPGLAVYFWIALHLXIVICYMSGEGLLILLLNFNHPLEYIFFHXLDTNLTXCMIVYISLQCATSCQIYVKHACMXCGMCSVLEVLALQLCTDIVLELYLVLFXCLCLLQVDLTNFSGELLCQADAFLCSVNDVSVSSTVEPRPRNIEIGAEMILKQKLRGQGMAFLVGGGSVMQKILAPREVITVDAACIVAMSATINFQLKSPNQLRRAVFGGDNQLTASLTGPGVVFIQSLPFHRLSQRIASRSVAGPSLRDNPKFFIQIVMFFFLAYVMIVSSIILTDV

SEQ ID NO: 222897 - protein, 61 aa, Zea mays
  Clone ID: MRT4577_134872C.1.pep
RSRLLQLGGKRTSILQFVDVILHMHIMENESFHASCEGILRCRVSSNGIQGWCEWRTMTMC

SEQ ID NO: 222898 - protein, 104 aa, Zea mays
  unsure (1)..(104): unsure at all Xaa locations
  Clone ID: MRT4577_134873C.1.pep
DRHSEFLVRKKPCQRWISGSGLDSMLMLSARAACCELQSANHGYIAATDDLLCASPPPGIGSNRSPRLVQQNLKLPQNLPCSIACFHRTIENQSPPFTGIPQXX

SEQ ID NO: 222899 - protein, 190 aa, Zea mays
  Clone ID: MRT4577_134874C.1.pep
MDGPAFEAERSRVAQRPPNSSEGGIIEEFRDLNKLGQGFTLADPLEEIDIGDGKTLRPTFVNKTLKTDSRDEMIDVLKEYSDCFAWNYTEMPGLSREIVEHRLPIKSDFRPFKQKARTFHPDLLPRIKDEIHQLIEANFVRPCRYAEWVSNIVPVEKKESDIIRFSWSKKKRLKRPLYVQASLVYLNRLS

SEQ ID NO: 222900 - protein, 82 aa, Zea mays
  Clone ID: MRT4577_134875C.1.pep
RRENSVPYYSTHCVGCRRTYRRKLRRTVCGDRLVSSGPFTVVVPGTACSHNMRNTSSLLRSRVGLPHPGELMACACPALRAR

SEQ ID NO: 222901 - protein, 115 aa, Zea mays
  Clone ID: MRT4577_134876C.1.pep
FVSSFDQRHFAGMSLVSVLLVGLFLLSGYFWFVGSIPSIGCSCVSVALQVRAERGSVHGCTRARVAGASVWAPAESARKRGFTCWCCKDYVRERCGECRRRRLVSVLLSFIRVVC

SEQ ID NO: 222902 - protein, 74 aa, Zea mays
  Clone ID: MRT4577_134877C.1.pep
CVVPSSNETLVFVPGATSWIILSKGFTLIGRGWAGVNPCQNNPLQEKKQRKKFVSRCQNPRSVITIVQSNNEIR

SEQ ID NO: 222903 - protein, 102 aa, Zea mays
  unsure (1)..(102): unsure at all Xaa locations
  Clone ID: MRT4577_134878C.1.pep
GAKRAXXARCKTVXXLARNXXHEPAAXLNGAATGGASPIQTIXGCXXLVGKRADPVRAPFSLLXAQPARKGGFVLQEARGSWGNDTGFXPKSRRVCKTSGRE

SEQ ID NO: 222904 - protein, 74 aa, Zea mays
  Clone ID: MRT4577_134879C.1.pep
VGPGSPPFMQWEPPLFLGCLEGLPQIGGPFCLVASFKNPLRSFFFVAFWFKDDLPPPQFFKRGLVFFCPSGISC

SEQ ID NO: 222905 - protein, 115 aa, Zea mays
  Clone ID: MRT4577_134880C.1.pep
GSKDTLGYGVLHKKRKGGQRTNKPTPTLKGEKLFASFFQKKKNPEGLKKGSNGMGSKPWPSKKTGRTPTLFIYEIITPSHPMAPPTNKYIWMEKKMERPGAISRKHFEGNTSSKI

SEQ ID NO: 222906 - protein, 229 aa, Zea mays
  unsure (1)..(229): unsure at all Xaa locations
  Clone ID: MRT4577_134881C.1.pep
SIRLSEEVSDPELFFAWSVAPQPXAGRRRSNGQLPAKVCRTGGSAPTRILXRRRRRTLHHGSPELSSSPPPCTICRRLLRAPERDGIPRPAASRSQHQPPPPRRTHTSQRVESIKGTRSGRAQERPGGDQRSNAQEGRGRQGRGRRARRQERPGRKTEPERTGWGGNRERPGAHNRNATQRQEGEGEEEAEQAGDRDEAPLFLLSLSLSPARGGTPECPPGSVGQALRR

SEQ ID NO: 222907 - protein, 93 aa, Zea mays
  unsure (1)..(93): unsure at all Xaa locations
  Clone ID: MRT4577_134882C.1.pep
SVTNISXYTSLNPKYLHHVFPXLFLPLXIPCLTPLLVSNKNFHQFACNRHKYXXXTSLNPKYLXXFXXHLFQQVSXTLSXYVISXKXIXNISF

SEQ ID NO: 222908 - protein, 91 aa, Zea mays
  unsure (1)..(91): unsure at all Xaa locations
  Clone ID: MRT4577_134883C.1.pep
VKCAELVTKIDTRSAKQLQKEPKFVSIGHAGMXVKMVPSKPMVVXPFCQYPPSGRSTASHMRQAVAVAVSKRCXSKDPTVPKVAKTHAKNQ

SEQ ID NO: 222909 - protein, 96 aa, Zea mays
  unsure (1)..(96): unsure at all Xaa locations
  Clone ID: MRT4577_134884C.1.pep
QIFVKTLTFITITLEVXSSHTIHNVNGMIHNKESITPNQQLLIFIHNHLQDGNTLTNYNIHKESTXLHLLLLLRDMYHMFCEYILLQHHHHRCNII

SEQ ID NO: 222910 - protein, 98 aa, Zea mays
  unsure (1)..(98): unsure at all Xaa locations
  Clone ID: MRT4577_134885C.1.pep
MSDEKHHHFSSHHKTDEEQPAGEQGYSETEVATATGEGEHERYKKEDKAHKHKQHLGEGGAIDVGAFALYEKYFFSKDPEHPHRXRITEEVAAAAYAI

SEQ ID NO: 222911 - protein, 113 aa, Zea mays
  Clone ID: MRT4577_134886C.1.pep
KAPARGAGGGGEFFFLGAVPRGPRPGPKLGETRGKGVPGGKWLPPHISPQNTGRKQKGETRGGPRGGPTPINGGGPPARFPGGKPGGPVVLRNRPPPGEGGFAYGALFRFLVH

SEQ ID NO: 222912 - protein, 47 aa, Zea mays
  Clone ID: MRT4577_134887C.1.pep
RAAARAGKKKKKKKKKKKKKKKKKKKKKKKKKKKKKKKKKKKFKIKN

SEQ ID NO: 222913 - protein, 101 aa, Zea mays
  Clone ID: MRT4577_134888C.1.pep
HTHLGTPSSNQAITNQRHLFILLLNMSYVILGKRVLNEHLAVGTLAVFGTGVALAMRGGSKTDKSQIPAPAINSSSKDEEAFIREFVANMEREDAAASKKH

SEQ ID NO: 222914 - protein, 56 aa, Zea mays
  Clone ID: MRT4577_134889C.1.pep
NLLGENILETLLVKISITPCHVRINERRKTEVEIPCPWALLKFALNKQGSQQQPFT

SEQ ID NO: 222915 - protein, 187 aa, Zea mays
  Clone ID: MRT4577_13488C.1.pep
MSEVVAMAGQAYMKQLQAHPLRTKAITSGVLAGCSDAVAQKISGVSKLQLRRLLLIALYGFAYAGPFGHFLHKLMDRFFKGKKGKETTAKKVLVEQLTASPWNNMMFMMYFGLVVEGRPFGQVKNKVKKDYASVQLTAWRFWPIVSWINYEYMPLQLRVLFHSFVASCWAVFLNLKAARSIANTKKA

SEQ ID NO: 222916 - protein, 138 aa, Zea mays
  Clone ID: MRT4577_134890C.1.pep
EGPSAHAPVSSGSDRISGVLSTDASEPDHLSECIPSQDTSMISQLDSRKAHLSALQQERVEKVNQGPEDISANIGPVEKEHVHGDLTLQSASAVLSISCNGSNQGTKSETNLQPWTATDDRMAFGEQNAEKSHLELIG

SEQ ID NO: 222917 - protein, 110 aa, Zea mays
  Clone ID: MRT4577_134891C.1.pep
GSITRPLELKKKKKKEKRRKKKKKKKEGRKKKKKKKKKKKKKKKKKKKKENKKKKKRGGVLQRTHYPKQVRYQTKKPGKKSPKKKRAEQRKSPDRWKKPTVTQTKRLMGH

SEQ ID NO: 222918 - protein, 101 aa, Zea mays
  Clone ID: MRT4577_134892C.1.pep
TLHLSHSMILLTVVLISPCVSSTLYFGQMAPLIQYQVRVVTIDLFKLYSLPACQGPQEAVIVVGVSSCTHSTLTSARGSPTCTCPCIILLLFFVAFARECV

SEQ ID NO: 222919 - protein, 159 aa, Zea mays
  Clone ID: MRT4577_134893C.1.pep
PRVRGRVDKALCNILVQKCSRAGETSVLTCILQYMKEHFIVLRRPIFLEALQALKASGDSDELLREVNPHLSYEGIENDPILSDQGYLTDRSIILYLMSANKWSAIEQMVNQMAPKNVKMETHILSDVIEASCADRKPSCGLAVMRYGLGVGCELGRSA

SEQ ID NO: 222920 - protein, 993 aa, Zea mays
  unsure (1)..(993): unsure at all Xaa locations
  Clone ID: MRT4577_134894C.1.pep
MVARSDVGGGGSSNASGVVEIDEDLHSRQLAVYGRETMRQLFASNVLISGLNGLGAEIAKNLALAGVKSVTLHDTGNVEMWDLSGNFFLSEDDIGKNRAVACVAKLQELNNAVLIYTLTEELTTEHLPKFKVVVFTDISLDKAFEFDDYCRNQQPPISFIKTEVRGLFGSVFCDFGPEFSVLDVDGEDARTGIIASISITTDNRTMVSCVDDERLDFQDGDLVVFSEVQGMTELNDGKPRTVMCAGPFSFCIEDTSNFGTYTKGGIVTQVKERKILKFKSLRDSIREPGNFPLSDCSKFTRPPLLHFAFIALDKFRKEFGRFPGVACGLDAQRFVEFTASINEATIDYKIEDELDENLLRLFASGSKAVLNPMATMFGGIVGQEAVKACSGKFHPLYRFFYFDSSESLPTHQLDPKDLKPLNSRNDAQGGVFGSKLQKQLRDXDVVVACEVVLGKDVSYTSYLHLFPVGCAVEXKFNGKKGGPVKKXNLGRFISSVNNIXSCNIKSVAKCSQLELLVVGLRCGCEPVLGXCCCSPTIYRXNVMWIIFIIDTFDXDKDEDTNFHMDLXWACKHARKELQHSXVDKLKAKFIAGRIIPAIATSTAMATXSSVPGAVQGHCWGAPHGGLPQHIRQPSYTSAVYGGAGWGQADEASRYEVDRMGPVDYQGQXLTVAELLQWFSDKGLSAYSMSCXHLSAVQQHVREAQGEAAEEGXVDVAREVAKVEVPEYRRHIDVVVACEDDDGNDIDIPLVSXTSDSLPLSAHTKSSXMSSKRTHSVIWNDKQTMDCIQSXFPCQGLIWENXNKDKKAGLANMRARNYGIQEVDKLKAKIIAGRIIPAIATSTAMATGLVCLELYKVLARGHPIEDYRNTFANLALPMLTTSEPLPPTVIKHGDMTWTVWDRWSIEGDITVAELLKWLSDKGLSAYSVSCGTSLLYNIMFTRHKDRLSKKIRDVAKEVAKVDIPEYRKHLDVVVACEDDNGKDVDIPLISIYFR

SEQ ID NO: 222921 - protein, 72 aa, Zea mays
  unsure (1)..(72): unsure at all Xaa locations
  Clone ID: MRT4577_134895C.1.pep
APXXXTPTLELXXLIKISCYGGGPCDPDARHXLAGDAEETHRGGTCIQEAMPDHINATGGPXVNRPCMWNMT

SEQ ID NO: 222922 - protein, 80 aa, Zea mays
  Clone ID: MRT4577_134896C.1.pep
YMMGKVHARKLEKFTEDNMASLHIQAASDDEKPPYSVKTKKRLCTTTYHLVKFMTRRTKILLVLHTCHIQPGALILLAHQ

SEQ ID NO: 222923 - protein, 81 aa, Zea mays
  Clone ID: MRT4577_134897C.1.pep
FFFFFFFFFFFFFFFFFFFFFFFFFLKKGPGSFKIFPPKTSPQIFSQLKGGLPGGAPFKNQTTGKQNRENPPFKKPGKTNP

SEQ ID NO: 222924 - protein, 162 aa, Zea mays
  Clone ID: MRT4577_134898C.1.pep
MVLKTELCRFSGQKIYPGKGIRFIRSDSQVFLFANSKCKRYFHNRLKPAKLCWTAMYRKQHKKDIHAEAAKKRRRTTKKPYSRSIVGATLEVIQKKRAEKPEVRDAAREAALREIKERIKKTKDEKKAKKAEVTKSQKSQGGKGAVQKGSKGPKIGGGGGKR

SEQ ID NO: 222925 - protein, 98 aa, Zea mays
  Clone ID: MRT4577_134899C.1.pep
RPGTRFVVVVVYNPFKRPSAVRHRALAAAYPGSSGPAERKVPPERDVRQRRAASFIVTPHRDACMGDCRPGPANYWRIIGHTAPHLRAHNQSIKARRV

SEQ ID NO: 222926 - protein, 62 aa, Zea mays
  Clone ID: MRT4577_13489C.1.pep
GPSHRGKHKIHFFYPSSLIFKYILTAYVLKPDTYAFGLAHASPPNHTVSLSRHKLHDYSTVD

SEQ ID NO: 222927 - protein, 173 aa, Zea mays
  Clone ID: MRT4577_1348C.1.pep
PTRPAGVLSDAYETVEELRGIPTTLESWQPVYQRRKFELSYPKLPGHLKDCLRYFSMFPKGYEISAERLVWAWIAQGFVKETQGQNDLEKVGKKYLIDLISRKMIEAVEVHADGMALSCRAYDLLHGLIVSLSTEEKFVEILNDSQSHERASNPNTEVHRLSIQIQRNNMLHP

SEQ ID NO: 222928 - protein, 139 aa, Zea mays
  Clone ID: MRT4577_134900C.1.pep
MISAPLRLSAPRAAVGGSFLLGKSKSKPSRIRCAAGVGRGAAAATLYEILGLRAGATGREIKAAYRRLARERHPDVATAPGAAAEFVRLHDAYATLSDPDSRARYDRSAVAAVAVAQRPWRSGVGVYGRPLRTWETDQC

SEQ ID NO: 222929 - protein, 66 aa, Zea mays
  Clone ID: MRT4577_134901C.1.pep
PKRPSMSSSGVAALRLAPRFKDRLGSLAHGMSSTHQICTGIPVHPYYNMPKMLLGAHAHKKHLGIG

SEQ ID NO: 222930 - protein, 39 aa, Zea mays
  Clone ID: MRT4577_134902C.1.pep
PAQGEGVKLRLYLGAKGGGFFCPGFSQGKNFLNWGLRTF

SEQ ID NO: 222931 - protein, 206 aa, Zea mays
  Clone ID: MRT4577_134903C.1.pep
TRFPCLSLSVCRPATTDLLPPPSELHLGQQLLRPHASSRDLLPLPSMGAHPLPASSLLGSPAPMVSNAFLCPRRRAPLRPLRTPHGVELLRRAPVTCPARPHPSLCRRPFPPAGFLLFSPRRLVFSPPPPRQQEIDSMLAPSRTLLQKLPTTPSSANAASSRHPPPPWSGSHGDVAPFGVPAAVPNQSSVLPASTLHDAHSLALIL

SEQ ID NO: 222932 - protein, 95 aa, Zea mays
  Clone ID: MRT4577_134904C.1.pep
DAHSVMDDETLPFHKVGIGAGIIVTARFGSPERRRYLPAVALRIAYARVGGASSIPVAGPSLLARAAQNSSLRQQQRPRLVGTLALDMSPRSLSA

SEQ ID NO: 222933 - protein, 35 aa, Zea mays
  Clone ID: MRT4577_134905C.1.pep
LEYGSCCPSRLCKHDPVSEVICVVRGRQCVRGRVG

SEQ ID NO: 222934 - protein, 44 aa, Zea mays
  Clone ID: MRT4577_134906C.1.pep
NFCEEFIPICLSSEATRDTAATGSMRASSLCFWFVDRIYDSSSI

SEQ ID NO: 222935 - protein, 64 aa, Zea mays
  Clone ID: MRT4577_134907C.1.pep
KNAGSPPRVFCESKFAPESCEEGRIMKFNCIIWKVRSEIKKKKKKKKTKKKKKKKKSTLRCYHC

SEQ ID NO: 222936 - protein, 66 aa, Zea mays
  Clone ID: MRT4577_134908C.1.pep
KTRQTFQRMFLLPISIHKLNLSVPAPAPGSTSHVDLSFYAMFLTAFFSPSYDMRHIYKFKCVHRGT

SEQ ID NO: 222937 - protein, 75 aa, Zea mays
  Clone ID: MRT4577_134909C.1.pep
MSVATPADLPESAQRVAGLLADLGHDKPVLVLPQTGKTSAEAAAGLGCEVAQIAKSIIFRRAADDAPVLVIVSCS

SEQ ID NO: 222938 - protein, 111 aa, Zea mays
  Clone ID: MRT4577_13490C.1.pep
VVACSSARFLAPSIADALDADSIARTEKGVLHEDTKKVTKVVLEGLSKGTTGHAEEDSALIDPSGDSRLSTPDVKVGTVSNDYPTKSALRHDNERGHSNCAADSTCYTPKI

SEQ ID NO: 222939 - protein, 124 aa, Zea mays
  Clone ID: MRT4577_134910C.1.pep
YVSQEDVDMAIRVLLDSFISTQKFGVQKALQKNFRKYMTFKKDYNELLLLLLRTLVKDAVHFEEIMAGSASRLTHVEVKLEDLRNKAQEYEIYDLKPFFSSACFRDNGFVLDEGRGIIRHPLAE

SEQ ID NO: 222940 - protein, 100 aa, Zea mays
  Clone ID: MRT4577_134911C.1.pep
LDQCLYIFLPAWFSDLEHSNKERIQILPNRRDLKNDSAPGAKAQHASSLRSPIRNSPCCAISLNESIGKSLCQQFKTTSFNHVAGPSLYSHIYFLEPNDG

SEQ ID NO: 222941 - protein, 524 aa, Zea mays
  unsure (1)..(524): unsure at all Xaa locations
  Clone ID: MRT4577_134912C.1.pep
RHPRYNEVILRNDLIDXAHKGEEIEVTGIYTNNFDLSLNTKKGFPVFATVVESKXYMAKKQSSPARYTGTTASFWMMGVLSSXPLTEEQIIKSIAPSXIYGHDDIKTAIALAMFGGPEKNVKGKHRRWSDINVLLLGDPGTAKSQFLKYVEKTGHRAVYTTGKGASAVGLTAAVHKDPVTREWTLEGGALVLADRGICLIDEFDKMNDQDRVSIHEAMEQQSISISKAGIVTSLQARCSVIAAANPVGGRYDSSKTFTQNVELTDPIISRFDVLCVVKDVVDPFTDEMLARFVVDSHARSQPKGANLEDRVSTDVDDDPLAAARQADPDVLSQDMLKKYITYAKLNVFPKIHDADLDKISHVYAELRRESSHGQGVPIAVRHIESIIRMSEAHARMHLRSYVSQEDVDMAIRVLLDSFISTQKFGVQKALQKNFRKYMTFKKDYNELLLLLLRTLVKDAVHFEEIMAGSASRLTHVEVKLEDLRNKAQEYEIYDLKPFFSSACFRDNGFLLDEGRGIIRHPLAE

SEQ ID NO: 222942 - protein, 74 aa, Zea mays
  Clone ID: MRT4577_134913C.1.pep
FKKKKKKKKKKKKKKKKKKKKKKKKKKKKKKKKKKKKKPSRGGPEKGKFGKISKKLGAVGACLKRPKWPQLGVF

SEQ ID NO: 222943 - protein, 72 aa, Zea mays
  Clone ID: MRT4577_134914C.1.pep
TVKNRTCLKTTHVSRTNHIWMPFSLIRANDSSHGPRTQILTGQAYLHCTTERPLQLLYSVPSERKDDHNGVG

SEQ ID NO: 222944 - protein, 65 aa, Zea mays
  Clone ID: MRT4577_134915C.1.pep
IPLLNTRLEDSASHDAQSLEHHPLQNPVIEFNVILLLGIQTRLWHKLHIVQQLPRMICLWWAREA

SEQ ID NO: 222945 - protein, 39 aa, Zea mays
  Clone ID: MRT4577_134916C.1.pep
YNPNPVAEAFFPATVVPSCHHSDQLAQWTLTQRVLLFYP

SEQ ID NO: 222946 - protein, 54 aa, Zea mays
  Clone ID: MRT4577_134917C.1.pep
LPFKIITNLLNTTNNFSYITCIHTLHTLFTTPPSHNIFTPILPNILTTTLLYFY

SEQ ID NO: 222947 - protein, 96 aa, Zea mays
  Clone ID: MRT4577_134918C.1.pep
GKVARARMEAFRVMKTWSLWRTGGRSRIPWDWQVDQLVYIVSGEVKVIPPGVVPGEDYMHFVAGDLVRYPRWFEAALYFEGPYEEGSRFFASGAAT

SEQ ID NO: 222948 - protein, 140 aa, Zea mays
  Clone ID: MRT4577_134919C.1.pep
KNQALGVFWNPSYDQGGFLSFPTLPKKPGPPGYGLGENQANFPFWFFPGGQKMFQGPSIFPKNVGHQEFAPSGIPGPDGPRSMALKPFPPGYGPVGKNQGGGVSGGVLSPQAGFSKNVKFSPAPKKKVFHREFNRRQKFR

SEQ ID NO: 222949 - protein, 348 aa, Zea mays
  Clone ID: MRT4577_13491C.1.pep
MTMEGAVSDNTKGLALAVASSAFIGASFILKKIGLLRAAKCGDRAGGGGHTYLSEPLWWAGMTTMLLGEVANFIAYIFAPAVLVTPLGALSIIVSSVLAHFVLKERLEKLGVLGCVSCIVGSVVVVMHAPEEHMPNSVKEIWNLATQPGFLAYVVTALLLVGALVLFFEPRYGQTNILIYLGICSSMGSLTVVSIKAIGVAIKLTLDGVNQAAYPYTWLFLMVAIVCGVSQINYLNKALDTFNLAIVSPIYYVMFTTLTIVASGIMFKDWAGQSLSSIASESCGLITILSGTILLHTAEEGANNSAALLPWPLDKGSISWCINLSSDNLLKNVEEDYFTALQSSPAPV

SEQ ID NO: 222950 - protein, 46 aa, Zea mays
  Clone ID: MRT4577_134920C.1.pep
IISTGVVEVELGLLVVTVLVQPQRLLAYDSYQTSSPSAYTYCIVLF

SEQ ID NO: 222951 - protein, 71 aa, Zea mays
  Clone ID: MRT4577_134921C.1.pep
PHKYYGVGVSVLSSTLLLLLVLCCPPPPSRHVHEYGDMHELMPSVVRSSSSFSLQNQQQASSSLTRRFTGR

SEQ ID NO: 222952 - protein, 68 aa, Zea mays
  Clone ID: MRT4577_134922C.1.pep
PWKEGVKISILYICPKYNSVSNSEEPPMNQNLWQTKIKTFYKSSLILVRYAFIHSQADNYPAMCHHKI

SEQ ID NO: 222953 - protein, 62 aa, Zea mays
  Clone ID: MRT4577_134923C.1.pep
HMCSGTPIRRPSRQYSCETCPRYSDFAQIVCHDHVVVARRLRRRLPSYSTSSTRCVSVPSSA

SEQ ID NO: 222954 - protein, 198 aa, Zea mays
  unsure (1)..(198): unsure at all Xaa locations
  Clone ID: MRT4577_134924C.1.pep
MAATIQSVNARQIFDRRLYLTVQVIVFCSDGTFGWAAAPIGASIVVYQALEFRDGRSDYXGEGXVTQMRNNVNSVIGPTLIGKDPTVQTEIDNFMDQHHYGTKNEWGXSKLKLGANAILTESLXTCKAGPNIKXIPLYHIIANLPXNKQLEMPVPALNVINGGYHAGNKIAMXEFMILATGAAXIXEAMNIGVETYHH

SEQ ID NO: 222955 - protein, 139 aa, Zea mays
  unsure (1)..(139): unsure at all Xaa locations
  Clone ID: MRT4577_134925C.1.pep
SKFITPSPPVLDQPLTNYNXDAYRLQLKLFLYEVKQQQLLSGIRSYLKLYSTITISKLAQYMEVDEATLRSILMTYKHKMHAVDSDGKIVSSADFDFYIVEDVIHVVESKPTKRHGDYFLRQILKFEEMIGGLDKVQLD

SEQ ID NO: 222956 - protein, 35 aa, Zea mays
  Clone ID: MRT4577_134926C.1.pep
MDKGSVVATPAPVAADVNNDMSFEIPKRNADSLWN

SEQ ID NO: 222957 - protein, 48 aa, Zea mays
  Clone ID: MRT4577_134927C.1.pep
RPFFFFLKHLQIFTTICSHSITILCQIIHFLAQRISKSVTIDFNKRSF

SEQ ID NO: 222958 - protein, 73 aa, Zea mays
  Clone ID: MRT4577_134928C.1.pep
MIAGSPQQLTILYGGRVVVLLDACPPEKAAELIRLAAAAAQQGPQPPPEQALVDMPIARKASLRRFLAKRKDR

SEQ ID NO: 222959 - protein, 240 aa, Zea mays
  unsure (1)..(240): unsure at all Xaa locations
  Clone ID: MRT4577_134929C.1.pep
MPQSVLVERATSESLIGPDWSLNLEICDILNHDPSQAKDVVKTIKKRIAHKNSKVQLLALTLLETLIKNCGDFVHMQVAEKDMLHEMVKIVKKKPDYHVKEKILILIDTWQEAFGGARARYPQYYAAYQEMLRAGAVFPQRPESTVPIYTPPQTQPLRNYPPPALRNTDYRHDVPESSSAPEVPALSLTEIQNAXGVMDVXLSEMLNAIDPGNREGLRQEVIVDLVDQCRXYKQRVVQLV

SEQ ID NO: 222960 - protein, 103 aa, Zea mays
  Clone ID: MRT4577_13492C.1.pep
KKQNPKPTGKKTNFLFYNYPKIFLGLSTPKKAFPFFKKQNSFNFPPPGEQFLLKTINVLTPIFLGPHIHFFTQNKPSLPLGEGIPPSHWTDLAILSNSFIGSP

SEQ ID NO: 222961 - protein, 115 aa, Zea mays
  Clone ID: MRT4577_134930C.1.pep
PGVIAYGDFGFLFHARPTGKTILTAWVHQPERKTRGSERDRTSGPTRQSHRDDSHESGQWLAIGPHMSARKATSWATTGERLMGQKRISEPIKFSFSFLFFSFLFPFYFQILILF

SEQ ID NO: 222962 - protein, 279 aa, Zea mays
  unsure (1)..(279): unsure at all Xaa locations
  Clone ID: MRT4577_134931C.1.pep
MPQSVLVERATSESLIGPDWSLNLEICDILNHDPSQAKDVVKTIKKRIAHKNSKVQLLALTLLETLIKNCGDFVHMQVAEKDMLHEMVKIAKKKPDYHVKEKILILIDTWQEAFGGARARYPQYYAAYQEMLRAGAVFPQRPESTVPIYTPPQTQPLRNYPPPALRNTDYRHDVPESSSAPEVPALSLTEIQNARGVMDVLSEMLNAIDPGNREDXVDMFQIVQLDHTVPEVLVIPGFLNSTQHAXLRQEVIVDLVDQCRSYKQRVVQLVNSTSFRHVF

SEQ ID NO: 222963 - protein, 110 aa, Zea mays
  Clone ID: MRT4577_134932C.1.pep
ESQINTLKHYITSLAPTDTTSLHALFPLKKLKTKINGKEKGNTTSVITHKQPSAITLLASIIQTINQHTDMDTNPTHLNSLSVPPRLARWLMCVLSAGLYSELSTHVLHT

SEQ ID NO: 222964 - protein, 45 aa, Zea mays
  Clone ID: MRT4577_134933C.1.pep
RVAHNVGKNYCVVSLFHYYTTCFKVLMFCKAIYLGFSRVFPFPPL

SEQ ID NO: 222965 - protein, 77 aa, Zea mays
  Clone ID: MRT4577_134934C.1.pep
MFGNIGKIPIMGDLTGSNKNAHLKGNLVLMRKTVLGLDETSIDGCLMDGLRELLGRGDTCQHGSCTGLDPNGWNQFK

SEQ ID NO: 222966 - protein, 131 aa, Zea mays
  unsure (1)..(131): unsure at all Xaa locations
  Clone ID: MRT4577_134935C.1.pep
DRPDQLNLPSEHRHLFFWCLEHPKVGGGGLALPKREDWKTGGGTPPLXLTXRGNMGVEEILRVFNEAEWEPSLRWKAMPTGFAEDSPFRLGSSIGDAPVIPAVWAVPWEIQWELTDLGSRGLVLASLGWLG

SEQ ID NO: 222967 - protein, 82 aa, Zea mays
  Clone ID: MRT4577_134936C.1.pep
VIGLGGFMFLPSSAIKHFQNLGPPGPFQGQRGRRLFHNLKRNGFIFLTLKSAVPNLTMGTLFYQPKPITSYNVPVYVTLGKL

SEQ ID NO: 222968 - protein, 28 aa, Zea mays
  unsure (1)..(28): unsure at all Xaa locations
  Clone ID: MRT4577_134937C.1.pep
YFKLYSQTYGNMMLYRKTXXICNGPLVC

SEQ ID NO: 222969 - protein, 41 aa, Zea mays
  Clone ID: MRT4577_134938C.1.pep
PTKGVFFKKKKKKKKKKKKKKKKKKKKKKKKTKRKKKKKKR

SEQ ID NO: 222970 - protein, 111 aa, Zea mays
  unsure (1)..(111): unsure at all Xaa locations
  Clone ID: MRT4577_134939C.1.pep
LSSGNNAEYFFFFFFFFFLGDVSVQLRFVGMGVELAWCTIQESDCQMMYGISVDIEGKRSSLSPFLFDQNVVCVALVLCKMWGAELKVGQMPSIXDESLVPPSSGSTFSMP

SEQ ID NO: 222971 - protein, 147 aa, Zea mays
  unsure (1)..(147): unsure at all Xaa locations
  Clone ID: MRT4577_13493C.1.pep
IKLTLDGVNQAAYPYTWXXLMVAIVCGVSQINYLNKALDTFNLAIVSPIYYVMFTTLTIVASGIMFKDWAGQSLSSIASELCGLITILSGTILLHTAEEGANNSAALLPWPLDKGSISWCINLSSDNLLKNVEEDYFTALQSSPAPV

SEQ ID NO: 222972 - protein, 235 aa, Zea mays
  unsure (1)..(235): unsure at all Xaa locations
  Clone ID: MRT4577_134940C.1.pep
SPPSXPAPPLSSSXLPDPHRPTPXAKPPPSPRFPPSATPXRSPLSPNPSXPPTRALSWPPARGPCGLKPPVPXPSPXSRGSMQPRVPQLARPRSSLPRCSPSPSSPXPPTSTPPPRPDRAAPEALPSPRPHRPKPAXAPSHPLLPPXPPXVPRLSLVLYVPGSMPPRSPSAAASPPASCHRPDPQPSRRSSSRPAGLLRPLHRACPLPRTAASVFFRKREQRCIERLLDPSARPR

SEQ ID NO: 222973 - protein, 401 aa, Zea mays
  Clone ID: MRT4577_134941C.1.pep
MGALSRPEEVLALVKLRVAAGQIKRQIPPEEHWAFAYSMLQKVSRSFALVIQQLGPELRNAVCIFYLVLRALDTVEDDTSIPTEVKVPILQEFYRHVYNRDWHYSCGTNHYKVLMDKFHLVSTAFLELGQGYQKAIEEITRRMGAGMAKFICKEVETVDDYDEYCHYVAGLVGYGLSRLFYAAGTEDLALDSLSNSMGLFLQKTNIIRDYLEDINEIPKSRMFWPREIWSKYADKLEDFKYEENSKKAVQCLNNMVTDALIHAEECLQYMSALKDHAIFRFCAIPQIMAIGTCALCYNNVHVFRGVVKMRRGLTARIIDETNSMTDVYTAFYEFSSLIESKIDDSDPNAALTQRRVDSIKQTCKSSGLVNQRGYHLEKSPYRPMLIMIVLLLVAILFGVMF

SEQ ID NO: 222974 - protein, 81 aa, Zea mays
  Clone ID: MRT4577_134942C.1.pep
HRHILGTSYLTLRAELTTQSIPCTYKTYYKLQYTLTYFTITFSILMKQTNNKSHTMIYYHNNSNLLPHLHSFDHHFYTLLH

SEQ ID NO: 222975 - protein, 103 aa, Zea mays
  Clone ID: MRT4577_134943C.1.pep
AHPPKGVLAPSSCLTPVLVLPPSSAASSSASPSSCKHEESQTISSSKSLLAIFVLFFMHSVFRHKNSSPFRLFDTHLGAFRSLHDSLARLCPFIYCMGFMAYL

SEQ ID NO: 222976 - protein, 70 aa, Zea mays
  Clone ID: MRT4577_134944C.1.pep
MYIRIDYPRQKKKKKKKKKKKKKKKKKKKKKKKKKKKKKKKKKKKKKSLSLPGGPLKRGNFGKIHKTGGR

SEQ ID NO: 222977 - protein, 71 aa, Zea mays
  Clone ID: MRT4577_134945C.1.pep
SDQVALASGNKRNIEKVRNAQFSVNLPNVVTVDPMGMALNEDKLHLTTESQVKLGKMLAEAYILNFSTSTC

SEQ ID NO: 222978 - protein, 45 aa, Zea mays
  Clone ID: MRT4577_134946C.1.pep
VAFWLLVDCVQVLWYVVELSCVACGMERDGVCFPPMLHNKSPMLR

SEQ ID NO: 222979 - protein, 108 aa, Zea mays
  Clone ID: MRT4577_134947C.1.pep
TKPWITSTQGTRRQFKQGYCQVLDYYRAANGAVLLYICGESTCNGSGANYLAVVAKKFGAALVAPEHRYYGKSSAFNSPTTENVQFLASKHALFDLAAFRQYYQETFN

SEQ ID NO: 222980 - protein, 57 aa, Zea mays
  Clone ID: MRT4577_134948C.1.pep
SGRDLNPPGWSCWLQCMLLPVLVSTPRARELLNMTGHCADIRTDPISLSGNSKPALI

SEQ ID NO: 222981 - protein, 75 aa, Zea mays
  unsure (1)..(75): unsure at all Xaa locations
  Clone ID: MRT4577_134949C.1.pep
SLYGGXVCSWNVTRCATALEEAGFHYEIVPINFFTVDHKSPEHLVRNPFGQVPALHDGDLYLFESRAICXYAARK

SEQ ID NO: 222982 - protein, 111 aa, Zea mays
  unsure (1)..(111): unsure at all Xaa locations
  Clone ID: MRT4577_13494C.1.pep
ATIHDWVGVPSKHERVIFAGNXLEDGRTLADYNIQKESTLHLVLRLRGGMHIFVKTLTGKTITLEVESSDTIDNVKVKIHDKEGIPPDQQRLIFAGKQFEDGRTLADYDIH

SEQ ID NO: 222983 - protein, 97 aa, Zea mays
  Clone ID: MRT4577_134950C.1.pep
LQRRGFFALVNPAQVPVVFPPNFNPPPSVSGNLSAPNKKFPSCGPWALFFGGFVIRSKNIFFFPAAPVAPPVFGFLRKLKGAAPVSPISFYGFFLRN

SEQ ID NO: 222984 - protein, 66 aa, Zea mays
  Clone ID: MRT4577_134951C.1.pep
EKLNERIAKLASGVAVMDVGAQTESELTEKKLRVDDALNATNAAVDEGIVAGAGCTLRRLAPYEDP

SEQ ID NO: 222985 - protein, 98 aa, Zea mays
  Clone ID: MRT4577_134952C.1.pep
IGTSLYDEYGANIVKDLMAKAEKNGVKITLPVDFVTADKFDENAETGQATVASGIPAGWMGLDCGTESSKKYAEAVSRAKQIVWNGPVVVFEWEAFAR

SEQ ID NO: 222986 - protein, 512 aa, Zea mays
  unsure (1)..(512): unsure at all Xaa locations
  Clone ID: MRT4577_134953C.1.pep
RPAALQAVLRLPLPRPLHAADWREDREKAEVVQGTDDTGSHDRARGLSEDGITQGRCRVTDRLQCFAXGILTDKDITTRVIARELKMEETLVSKVMTRNPVFVLADTLAVEALQKMVQGKFRHLPVVENGEVIAILDIAKCLYDAIARMERAAEKGKAIAAAVEGVEKHWGTAVSGPNNFIETLRERMFRPSLSTIISENSKVVTVVPSDTVLTASKKMLELKMSSAVVAIESKPGGILTSRDILMRVIAQNLPPESTTVEKVMTQCPECASVDTPILDALHTMHDGKFLHLPVLDRDGNVVTVVDVLHITHAAIATVGNSGAAGSEATSAMMQRFWDSAMSIGPIDDDDDSRSEGSTRVVSEATDIGRSAFFPASGLSNTFGFKIQDKQGRMHRFNCETSGLAELITSILQRVGDDIDRKHLPQILYEDEDRDKVVLSSDSDLVAAVDHARQIGWKSLRLHLDYARRKRGDGSSDFEYAGKDAWASAYSAVAAGAALVAGLGVMAYLKRSG

SEQ ID NO: 222987 - protein, 515 aa, Zea mays
  unsure (1)..(515): unsure at all Xaa locations
  Clone ID: MRT4577_134954C.1.pep
RPAALQAVLRLPLPRPLHVTDRREDREKAEAVQGADDTGSHNRARGLSEDGVTQGXPCCXDSNALLCGILTDKDITTRVIARELKMEETPVSKVMTRNPVFVLADTLAVEALQKMVQGKFRHLPVVENGEVIAILDIAKCLYDAIARMERAAEKGKAIAAAVEGVEKHWGAAVPGPNNFIETLRERMFRPSLSTIISENPKVVTVAPSDMVLTASKKMLELKVSSAVVAIENKPGGILTSRDILMRVIAQNLPPESTTVEKVMTQSPECATVDTPILDALHTMHDGKFLHLPVLDRDGNVVTVVDVLHITHAAIATVGNSGAAGSEATSAMMQRFWDSAMSIGPIDDDDDSRSEGSTRVVSEATDIGRAAFFPASGLSNTFGFKIQDKQGRMHRFNCETSGLAELITSILQRVGDDIDRKHLPQILYEDEDRDKVVLSSDSDLIAAVDHARKIGWKSIRLHLDYAGVGRRKGGGGPSDLEYAGKDAAWASAYSAVAAGAALVAGLGVMAYLKRSG

SEQ ID NO: 222988 - protein, 211 aa, Zea mays
  Clone ID: MRT4577_134955C.1.pep
MDGGLDDEWEASFLDEVIRATDEAEAVVSRNPNPTPTPAPAPIPTYYPLAAAPVSYLPASSVSYIPAASHLRSAISFSPPRDLSQRPPLPPLPPPTAATSTRDALATGADVGRDFSPPPQLSQRPAADEGSLVAFAASSSASDRRFISTGCGEAGAKREAREIERLKRELDRVSKERNELVRTLCYHSWQYYVFLGILRTVHFYQSCLNLN

SEQ ID NO: 222989 - protein, 68 aa, Zea mays
  unsure (1)..(68): unsure at all Xaa locations
  Clone ID: MRT4577_134956C.1.pep
KPYRQXVXXXSFSXSLWRPXGRKRGDGRTPGGAHTRRTVRVEPRPAQAPHHLPPPPPRPLPGWRLLPR

SEQ ID NO: 222990 - protein, 45 aa, Zea mays
  Clone ID: MRT4577_134957C.1.pep
GLILQNGTACLHVSTPFQSIDIYSATDHSFRVVNVVFWIFYLIIC

SEQ ID NO: 222991 - protein, 52 aa, Zea mays
  Clone ID: MRT4577_134958C.1.pep
FPERTYISPCPRCWLVAPETLTSLRRPGMALFNKSQPYQSGETCAFFVLYMS

SEQ ID NO: 222992 - protein, 165 aa, Zea mays
  unsure (1)..(165): unsure at all Xaa locations
  Clone ID: MRT4577_134959C.1.pep
VHDGTDIVLLKWCKGDNQSWKILPWGXTTNTTXATPNVLTACCVLMHRSKEEDYRLMVRICTVYLGPTNTGNQCQDCVKDMRNMIALRNEEDYLNIRLCNXLLHXALNHYTLYVHSEKIMPYNPYYXSTSACFKPRAVTKKTKFRCLRIFNNIYLNFNTFHYNEA

SEQ ID NO: 222993 - protein, 62 aa, Zea mays
  Clone ID: MRT4577_13495C.1.pep
GSNNKSQLVRRKRRLGKSASLARHDAIMSCLLLPHAPESPPRRPIYAEGTQLFPPLSTSTLI

SEQ ID NO: 222994 - protein, 34 aa, Zea mays
  Clone ID: MRT4577_134960C.1.pep
SHNLNCKKSGSSPRTRCDSFNCIASSLVYLTNNR

SEQ ID NO: 222995 - protein, 100 aa, Zea mays
  Clone ID: MRT4577_134961C.1.pep
QKRGGGQVSKPRRQRWMSHTLQNTAQYGASDIILRGRPTIIGPKWNGTLSSHRTLFSSVTTQGHHLDCLTINRPNRTRHWSYGTVTVNVWAQSTTATPMW

SEQ ID NO: 222996 - protein, 191 aa, Zea mays
  Clone ID: MRT4577_134962C.1.pep
MPSPSSYHPHHRARLRSRAAPLLIVVVLAVVAVTELLRSRTGLPAPARRAGSATATASPSSLASTNQSVAQRKILLDPAFTPRLPRQSQLSLSLSARNALPPRNRDRFPTLPEGHLKVVLYVHNRPRYLRLVVDSLSRVEGIGEALLIVSHDGYFPEMDRIVQGIGFCQVKQVFAPYSPHLFPDAFPGASP

SEQ ID NO: 222997 - protein, 60 aa, Zea mays
  Clone ID: MRT4577_134963C.1.pep
GLRAADADKQCRQNTTLRIKKKLAKNMRQNRSITYCIRMLTVNTITNNAKRSDWRRTKLG

SEQ ID NO: 222998 - protein, 162 aa, Zea mays
  unsure (1)..(162): unsure at all Xaa locations
  Clone ID: MRT4577_134964C.1.pep
PVCRAYLPGSWARDFTNLGDWYTHLLRASPTDTIHVHVLGCTWTDNPANVPYMLRTNFNNFPQGEALLELLGDLLGGGIFNVDRHTWRHQRKXMASLKLGSVAVRLYPYGHRGAEVEYQLVPVLAADGDACSGADLHDVFRCFSFHTICXISLGLDLGCLYR

SEQ ID NO: 222999 - protein, 64 aa, Zea mays
  Clone ID: MRT4577_134965C.1.pep
YLCNYKEDTLKQYKLHLTKGAHKTNQTTGELNILISSLSSQATLGNSVSITNNSMLDLSKDLLF

SEQ ID NO: 223000 - protein, 679 aa, Zea mays
  Clone ID: MRT4577_134966C.1.pep
MSSSVPPPPPQQELESPSAGGDKVLAAAQHIVKSLATSKNAADDMIRILSGFDNRLSSITNDHLFPSPDLTAASASEISAAAASFDAADQLIQLWDATPDALVFEAPEDDIAQYLAAVDVAIDHLARGGPGGARAGVAVQLAMVRLEEELRHLMVRHAVPIDPTGLFFSLRRLSLESMDDLDACPDFDAATPHSLDATPAGPETARGASLGSNPFEDQVFDPVRPEAVEDLRAIAHRMARAGYARELADAYCGIRRDLLDEYLSVLGVERLSIDDVQRIEWKLLNDKMKKWVHGVKTVVRVLLAGERRLCDQVLDASDELMDACFLESTKGCIMQILSFGGAVAVCPRSPEKVPRILDMYEALAEVIPEMKDLCIGSSGDGVISDVQAILDRLGDAVRGNLFEFGKMLQQETSRRAMAAGEIHPMTRYVMNYLRLLVVYSETLDALLADDSSDHDTFRSSDDQDQEHLERMTPFGRRLLKLISYLEANLEEKSKLYDDAALECIFAMNNLLYIVQKVKDSELGKVLGDHWIKRRSGKIRQYSKSYLRVSWTKPLSYFKEDGHGSGSGSGSGSGSGSGHSSSRMSIKERFKNFNMAFEEIYRNQTLWKVPDPQLREELKISISENVIPAYRAFLGRYGNQVDGGRNPGKYIKYTPEDLESQLSDLFEGSPVSANHSRRRA

SEQ ID NO: 223001 - protein, 139 aa, Zea mays
  Clone ID: MRT4577_134967C.1.pep
DAGSMPIATVRRRREAMEDWRARSRGRDTQMQRIKRTAAPWCRIRINIGIKALPMDGSVARTPESGIGGQTRPREETSEDRRTSARMPVRRRSNGGEERGGGQCPSSSGTQWRPPRQRRRSCGLGKSGQGGCSGRPEGP

SEQ ID NO: 223002 - protein, 87 aa, Zea mays
  Clone ID: MRT4577_134968C.1.pep
RMTEGLHSQLQKEMQMLTQEFDGSTKKLSELEKNKLDLESILKELNNTILGLNSEKDATLLQQQQSLQKVSDLELELSKMQLEMEGP

SEQ ID NO: 223003 - protein, 190 aa, Zea mays
  Clone ID: MRT4577_134969C.1.pep
NQENIVFQITNKCETSKAAFEILCDGQSTKKEDGTKSELLPRASFGFPLWLEVQPAVGVIKPGETVEITLHHEDFYTQEEFVDGIPQNWWCEDTRDKEAVLRINITGNSSTKTKTHTINVQHRCPPPSAPPPAMNQQPVAAAPPSNVLASEGHSSKRSSKKSQSKHREQQQDYPQFGTSEVHDLCRMRCP

SEQ ID NO: 223004 - protein, 456 aa, Zea mays
  Clone ID: MRT4577_13496C.1.pep
MESHDLWAERESRLVGGYEIDGFGYDYGAGKWYSFRLERLIIDGKGPDFREGAEGVVWFKDRLCVPNIPSIRELILKEAHETAYSIHPGSEKMYQYLKKRFWWYGMKREIAEYVARCDSCQRIKAEHQRPAGLLQPLQIPQWKWDEIGMDFIGCLPRTRAGYDSICVVVDRLTNMAHFITVKTTYNSAVLAELYMSRIQLHEALGTHLKFSSAYHPQTDGQTERTNQILEDMSRACALQDKLGWDKRLPYAEFSYNNSYQASLKMSPFEALYGRNCRTPLHWDQPGERQVFGLEILLEDEENIRMVRENLKAAQSRQRSYADIRRRELSFEVGDYVYLKVSPIRGTTRFKRCGEVAYQLSLPENLSAVHDVFHVSQLKKCLRAPEEQLPMENLEVQEDLTYIEKPTQILETADRVTRRNTIRMCKVKWGHHSEEEATWEREDDLRAKYRELFASQP

SEQ ID NO: 223005 - protein, 253 aa, Zea mays
  unsure (1)..(253): unsure at all Xaa locations
  Clone ID: MRT4577_134970C.1.pep
PAEWGKNAMLRVNAWQGAPTGGNPVIESFLVDIYPLKIYLTEAMYRMMWGYFFPGDDQQPQKRQELFKVSTTAGPRRKKTTSVAETTSPNNQSSKETTFAQKPELRRTSSFDRTWEEPVAESVANELVSQMEGQTNTQYEPQDAAKDSKLLRPVRSTREDKKIVEPNELKQSRPQKMMDFRNIKISQVELQLTYEGLPFAVSDVRLLMDTFHREDFTGTWARLFSRVKKHIVWGXLKXSVTGMQGKKFKAKSS

SEQ ID NO: 223006 - protein, 61 aa, Zea mays
  Clone ID: MRT4577_134971C.1.pep
WLFRSSRLARRSPTGLSRDMLVSLSDWWLCMWHWMRPRVFHRALVVLVVPYECDGAGGVVF

SEQ ID NO: 223007 - protein, 63 aa, Zea mays
  Clone ID: MRT4577_134972C.1.pep
MGRRSTRCYRQIKNKPYLKSSYCRSGPDPKTRIYEADMNRMVRRRAELLSAACALGEGQASPG

SEQ ID NO: 223008 - protein, 116 aa, Zea mays
  unsure (1)..(116): unsure at all Xaa locations
  Clone ID: MRT4577_134973C.1.pep
LCRGSLRILIFGSHWGYWHECRECGRPYRGHGGGCDEHHGNGGGGHGHCRLLFVTHLLHRESWDHHFLHKDSWDHFFHRDGRDHLFIYRDFWDHHESRGGWGHLLXIHGGGRLRRD

SEQ ID NO: 223009 - protein, 55 aa, Zea mays
  Clone ID: MRT4577_134974C.1.pep
VIGFLMTCIIRQLYQDVSVICCRDVVDSAVCLEACVSSRCNISEQVLQHPNGVTA

SEQ ID NO: 223010 - protein, 135 aa, Zea mays
  Clone ID: MRT4577_134975C.1.pep
KNHVGPGLQVRKKSETYTSLQFIRPTHSKWYFLTRTCQRITCMNSYYMLSVGYVMNMNLFFWSAICFFRIKLKTHFPHISGLNNTINLCVCSCATTTGRQRFFHQFSCTLSCHHVHIICGKVRKELAVRGVDDRN

SEQ ID NO: 223011 - protein, 147 aa, Zea mays
  unsure (1)..(147): unsure at all Xaa locations
  Clone ID: MRT4577_134976C.1.pep
FIXMTGIKVAGKPLSVSSSAYSSLPTIIDSGTVITRLPTGVYSALSKAVAGAMKGTPRASAFSILDTCFQGQAARLRVPEVTMAFAGGAALKLAARNLLVDVDSATTCLAFAPARSAAIIGNTQQQTFSVVYDVKNSKIGFAAGGCS

SEQ ID NO: 223012 - protein, 110 aa, Zea mays
  Clone ID: MRT4577_134977C.1.pep
TLITNSRPAAPAHAYTLNQTSRQSQFTIRITDSHKLTNRITAHQHGRILITNSHKLTNRITAHQAPARQHQQTPASHCPAHCSKKGEEVDVLFILISSHCPAHCPAHCLS

SEQ ID NO: 223013 - protein, 110 aa, Zea mays
  unsure (1)..(110): unsure at all Xaa locations
  Clone ID: MRT4577_134978C.1.pep
VRQDELLDPRXGRAFCENEVYCMVHAXKXLCIRRDPHLRPRMSHVLRILEGGGGDMVVDSAGSRSWRMQQHQRWQEQSSPAAQRDSSQRGQETAGSPWSRERRQNLCHRY

SEQ ID NO: 223014 - protein, 91 aa, Zea mays
  Clone ID: MRT4577_134979C.1.pep
SRPAGTSSSLLDSTESLAGNEGESRQPTMRQSGTTTSETTTSWTRTLEVLVGSWRPPSRAPLIPSAVARRGRGTTLVFSFAGMTTTYLGDL

SEQ ID NO: 223015 - protein, 94 aa, Zea mays
  unsure (1)..(94): unsure at all Xaa locations
  Clone ID: MRT4577_13497C.1.pep
XXXKXXPAQAGASWGWVLVAMLATRRISIALFSCFSRLFESRSGGQAGVHSSLACGWFVCLWPLLCSASFVCFVSRRRSGRFWLMSVGLSVAFL

SEQ ID NO: 223016 - protein, 50 aa, Zea mays
  Clone ID: MRT4577_134980C.1.pep
LEHTLIHRKEHESKLGFKMSGYRYISTFLGPLCQYISTTSATVLPCNRPP

SEQ ID NO: 223017 - protein, 90 aa, Zea mays
  Clone ID: MRT4577_134981C.1.pep
CADLAAFGSRPDAATVAGGGERASTRRERWGFWLGFKLAGGSVSNPIPLYIAQRQWGRARRKGEASLGERKGARLEKEGAGTEDAAARWL

SEQ ID NO: 223018 - protein, 90 aa, Zea mays
  Clone ID: MRT4577_134982C.1.pep
NKANTKLPTPGNNLASMDINPSPTIFVEWKEAWKPPKKSPIWNQPKLNKWTQPKMVTHPQQQILDPFPAQTLLVAPNKSSFRLKSFTGLF

SEQ ID NO: 223019 - protein, 68 aa, Zea mays
  Clone ID: MRT4577_134983C.1.pep
SPGCMILFRCVPRDFRSRVWDMITGKDTHIHHVCKQRYPHSVAHHECAYNQTGCYHHPHEGGRRRPLP

SEQ ID NO: 223020 - protein, 96 aa, Zea mays
  Clone ID: MRT4577_134984C.1.pep
LLLLGITGTTFFVSMWIHNTACTVMMMPVATGILQRLTGGGAWAGTGAHDEVRRFSKAVVLGVVYASAIGGMATLVATGVNIIRVGMRSTYCSEEE

SEQ ID NO: 223021 - protein, 121 aa, Zea mays
  unsure (1)..(121): unsure at all Xaa locations
  Clone ID: MRT4577_134985C.1.pep
MARGQCAISGAVVAAVLLLATAATTSEADITCGQLSSAIAPCLSYAHGTRSGPSGSCCSDVTNLKSAASTADDRRASCNXLKNTARHVSSLNRHNAVSIPSKCSSSIPYTISTFTDCSKVN

SEQ ID NO: 223022 - protein, 264 aa, Zea mays
  Clone ID: MRT4577_134986C.1.pep
PCCPVLAAWLFAAHARTALSVPPAPPPSALAGDEGMGPDGGDDGPMVPYDNQRCVDALGAALERRGVGLPRPNATCDTVLCFCGIRLHQIGSLRCPAAFAVGAGAAARNATPTAAVKALEKSCRNASYAGCSRCVQSLQKLKGNVSREVSGAGGDRARRMLGRDCQLMGLTWLLAKNKTAYIPTVSAVLRAMLYTARPTESAGAAPRCSPDQENMPLAVDSLQFERTGSTTGSAAANATPRGAPAAALLGLALSLAVGWWDAFL

SEQ ID NO: 223023 - protein, 169 aa, Zea mays
  Clone ID: MRT4577_134987C.1.pep
KRSRTKSTATVMVGATYRSVHSHSVYCLSFHDPSSLPLSLPKCISVEATERKEKTTTSPTILLLGSQADVDVRGSPVHHLLRRACGPASHGEARRVQVHGAGVGLGRCGGGWRRIMEPVPRTCQRDRGGCGEHGWGRFRFWQCRNRGELLLRAHPPLVLLQAVGQEASH

SEQ ID NO: 223024 - protein, 564 aa, Zea mays
  Clone ID: MRT4577_134988C.1.pep
MLPVLEVLCCAAAGRGGRGLVQPVLRRTLQTNPRLEGALEMLLVLEVLCCAAAGRGGVDWYSLCCCGRFRRTPDWRAPWRCSWCSRSSGGCPGDAPGARGAGGIHMTAYFTAPWAGGATSTSRRALRHRLGRRAGKHPPASLRFPDPCLVQLIRIECRVSEYGWTTQKVFQFLNFLVNGVRSVVFVLRRNVQLVEPEDMPGLAFFTTYALLVLFWAKIYYQARAMSTDWLRPTFYWINGVVYAIQEFVAHTLNVNCAKFGRRASRILITGGEDLKVNLWAIGKPGFTSPVESVSFDSSEVTIGAGAASGTIKIWNIEEAKVVRTFTGHKSSCASLDFHRFGEFLATGSSDTNMKIWDTRQQRCIHTYKGHTQRINVLKFTPDGRWIVSGGADNSVMVWDLTAGKLMHDFCLHEGPVNCLVVHPYEFLLATGSVDKTVKFWDLETFELIGSAGHENNREYFELINQLLIVGKCPQLVVNDWFFRYYGEILWRGYIKMVYYQGQAKMVIQLIRSAPSEQNNSRALHCICIKEKDLRLLRSEEQGFSPDPQGRRSSQICVDAHPQRT

SEQ ID NO: 223025 - protein, 66 aa, Zea mays
  Clone ID: MRT4577_134989C.1.pep
SSGNNAEYFFFFFFFFFFTTLGTKNCSSFTLLLFRLYKAMHPNTTTTNDPHKNHYFQELMGSKHLR

SEQ ID NO: 223026 - protein, 252 aa, Zea mays
  Clone ID: MRT4577_13498C.1.pep
MGKYMRKCRGAAGAEVAAVEVTQVVGVRTRSRSAAATGGVAKVVAPRRKRAPAGEPAAAVGAGGDGGSCYIHLRSRMLFMAPPQPQPSVPTPAAEAADGAAGQQGAALAAGLSRCSSTASSVHVGGQRGSHTCRSDDAAEAGGDHVLVDVSASNSGSGPDRERRETTPSSRAHGELSDLESDLAGHKTGPSLPAATPAAELIVPPAHEIQEFFAAAEAAQAKRFASKYNFDFVRGVPLDAGGRFEWAPVVSI

SEQ ID NO: 223027 - protein, 90 aa, Zea mays
  unsure (1)..(90): unsure at all Xaa locations
  Clone ID: MRT4577_134990C.1.pep
LCQKGGAPRVSAGQLVALGLALLCAVAGPAAAQNCGCQPNVCCSKFCYCGTTEYXGDGCQSGPCRSXGGRRGSGGGGANVASAPPSSFFN

SEQ ID NO: 223028 - protein, 128 aa, Zea mays
  Clone ID: MRT4577_134991C.1.pep
PAGFQQTDTYYLISLNSRIYPEKPTRTKPTAEHPQDLDCPLPNLDSSFSLACIHGRLEKDRHCHSSPRCVLALLAPASAQHEAARGPFPAKSFAAACSPRCRYPAAWLASSRTSQGRHRSDLSHRLPP

SEQ ID NO: 223029 - protein, 63 aa, Zea mays
  Clone ID: MRT4577_134992C.1.pep
IPCPPRVLPLFHNQLQCFVIQTHSTIACGALSFANHRAYPCLLPYNDMCLTCCKHSYQPILGA

SEQ ID NO: 223030 - protein, 111 aa, Zea mays
  unsure (1)..(111): unsure at all Xaa locations
  Clone ID: MRT4577_134993C.1.pep
ACDNPSIQPYRLRQVIEAGILRLSPLLLELLWGLLQHIXLXHLLVQYIRGQYQQQRVLAEIADYFKHPRFITFNQLAAXNYDSYLXHHHLPYSQLYVGYIQRFITFRHMTD

SEQ ID NO: 223031 - protein, 186 aa, Zea mays
  Clone ID: MRT4577_134994C.1.pep
MAETIDLTGDGGVLKTVIRKAKDDAISPSDSLPLVDVHYEGTLAENGEVFDTTHEDNSIFSFEVGQGAVIKAWDIALRTMKVGEIAKITCRPEYAYGSPGSPPEIPANATLIFEVELVACKPRKGSSLGSVSDEKARLEELKKQRELAAATKEEEKKKREEAKAAAAARVQAKLDAKKGKGKGKGK

SEQ ID NO: 223032 - protein, 50 aa, Zea mays
  Clone ID: MRT4577_134995C.1.pep
LTILNSETSPPAIVLAPNSWKSHKPAALGALPAAELRAVADMATADSAHP

SEQ ID NO: 223033 - protein, 61 aa, Zea mays
  unsure (1)..(61): unsure at all Xaa locations
  Clone ID: MRT4577_134996C.1.pep
RRAVILTGCNAEYFVPEKNQGXAFGSGGRNKCVGLLATCASNRLTTKLRIXAKVSIAACGA

SEQ ID NO: 223034 - protein, 43 aa, Zea mays
  Clone ID: MRT4577_134997C.1.pep
IWYFLSTNYCKGLGNFPVLPNIQYTGLVLRFKKKKKKTPGRPL

SEQ ID NO: 223035 - protein, 75 aa, Zea mays
  Clone ID: MRT4577_134998C.1.pep
LGVLMVVVVIWVNLFCANIFSHHTSPQHKGQSLKGLRRGLPQINLVALTGGLLVGKLVVPDAFVTRPLLIGRPFA

SEQ ID NO: 223036 - protein, 227 aa, Zea mays
  unsure (1)..(227): unsure at all Xaa locations
  Clone ID: MRT4577_134999C.1.pep
QHLCDAHQEMXXSWAEAAQCAVAAAGVIMQALVGRNDAVWSKEHVTSLHKICPIVNTDELIIPVYKSRRAYGQLAKCHTSLTNIYESILEQEITAVDPVMEDEDLGSRRERIFSLSTGTVRARVFDRFLFDTPFTKNGKTQGGLEDQWKRRTVLQTEGSFPALVNRLPVTKSESLEFSPVENAIGMIETRTAALRNELEXPRSSEGDQLPRLQSLQRILQGSXWLCS

SEQ ID NO: 223037 - protein, 227 aa, Zea mays
  Clone ID: MRT4577_13499C.1.pep
MDIRLLVSADANLAAALSRSRSSKSAFQRQVVPGSRASSCRSVRARSAAAAAPAAGGISGHSNYTVGDFMTRRDNLHVVQPTTPVDQALELLVQHRISGFPVVDDDWNLVGVVSDYDLLALDSMSGNELADTSTNMFPDVDSTWKTFHELQRILSKTNGKVIGDVMTSSPLAVRINTNLDAATRLLLETKYRRLPVVDSMGKLVGMITRGNVVSAALKIKKKTEEGA

SEQ ID NO: 223038 - protein, 46 aa, Zea mays
  Clone ID: MRT4577_1349C.1.pep
IMWIQRSCQPRPLYLCIHGIHGSLLPTAKCFSIIMVILHLQKKIPE

SEQ ID NO: 223039 - protein, 90 aa, Zea mays
  unsure (1)..(90): unsure at all Xaa locations
  Clone ID: MRT4577_134C.1.pep
YYLHAALTEAVRLYTVCALXNKQCFGDDVLPDGSSVSKGDIVFYVPYAMGRMEYLWGKDAEVFRPERWLDQDGEFQQESPFKFXAFQVRR

SEQ ID NO: 223040 - protein, 764 aa, Zea mays
  unsure (1)..(764): unsure at all Xaa locations
  Clone ID: MRT4577_135000C.1.pep
ASASRHEIRPQGTPENGYMWXRVSPQLSSPNQPYSLREALAQAQSSRIGSTARALRESLHPVLRQKMELWEENLSTAVSLEVLGITEKFSVAAGARSITTDYAKLDCVTSILMGLLSRNQSLAFWKAFLPVVYNIFNVHGATLMARENDRFLKQIAFHLLRLAVFRNDSIRKRAVVGLQILVRNSFNYFKNTTRLRVMLTITLSELMSDVQVTQMKFDGSLEESGEARRLRKSLEEMADVRSKDLLKDCGLPVTALEAAPEGSSDNRWSWVEVKHLSKCLVQALDAGLEHALLGSVVTVDRYAAAEGFYKLAMAYAPVPDLHIMWLLHLCDAHQEMQSWAEAAQCAVAVAGVIMQALVGRNDAVWSKEHVASLRKICPIVNTDVSAEASAAEVEGYGASKLTVDSAVKYLQLANKLFTQAELYHFCASIQELIIPVYKSRRAYGQLAKCHTSLTNIYESILEQEASPIPFIDATYYRVGFYGERFGKLNKKEYVFREPRDVRLGDIMEKLSHIYEAKIDGSHTLHIIPDSRQVNADELQPGFCYLQITAVDPVMEDEDLGSRRERIFSLSTGTVRARVFDRFLFDTPFTKNGKTQGGLEDQWKRRTVLQTEGSFPALVNRLPVIKSESLEFSPVENAIGMIETRTAALRNELEEPRSSEGDQLPRLQSLQRILQGSVAVQVNSGVLSVCTAFLSGEPATRLRSQELQQLIAALLEFMAVCKRAIRVHFRLIGEEDQEFHTQLVNGFQSLTAELSHYIPAILSEL

SEQ ID NO: 223041 - protein, 641 aa, Zea mays
  Clone ID: MRT4577_135001C.1.pep
FWKAFLPVVYNIFNLHGATLMARENDRFLKQIAFHLLRLAVFRNDSIRKRAVVGLQILVRNAFNYFKNTTRLRVMLTITLSELLSDVQVTQMKSDGSLEESGEARRLRKSLEEMADVRSKDLLKDCGLPVTALEAAPDGSSDNRWSWAEVKHLSKCLVQALDAGLEHALLDSVVTVDRYAAAEGFYKLAMAYAPVPDLHIMWLQHLCDAHQEMQSWAEAAQCAVAAAGVIMQALVGRNDAVWSKEHVTSLHKICPIVNTDVSAEASAAEVEGYGASKLTVDSAVKYLQLANKLFTQAELYHFCASIQELIIPVYKSRRAYGQLAKCHTSLTNIYESILEQEASPIPFIDATYYRVGFYGERFGKLNKKEYVFREPRDVRLGDIMEKLSHIYEVKMDGSHTLHIIPDSRQVNADELQPGVCYLQITAVDPVMEDEDLGSRRERIFSLSTGTVRARVFDRFLFDTPFTKNGKTQGGLEDQWKRRTVLQTEGSFPALVNRLPVTKSESLEFSPVENAIGMIETRTAALRNELEEPRSSEGDQLPRLQSLQRILQGSVAVQVNSGVLSVCTAFLSGEPATRLRSQELQQLIAALLEFMAVCKRAIRVHFRLIGEEDQEFHTQLVNGFQSLTAELSHYIPAILSEL

SEQ ID NO: 223042 - protein, 57 aa, Zea mays
  Clone ID: MRT4577_135002C.1.pep
LLPWNHGAHPCPMQLLSTIDDLMAGLDEYHGFMAAQLCSLCSKLKDHMKMAIISEEI

SEQ ID NO: 223043 - protein, 78 aa, Zea mays
  Clone ID: MRT4577_135003C.1.pep
NFLIELPNVLFTGTKFHNDVRLYKPWTYLEFSSPCNPIPLFRQVSVIAEEACSRPPFPPFARPEWPMGRALPLCFTPV

SEQ ID NO: 223044 - protein, 54 aa, Zea mays
  Clone ID: MRT4577_135004C.1.pep
HFLFLLENNKIPHHPHETFLSPYIIHTLNFNSFTYRLVSQLIFHIINILTQIFT

SEQ ID NO: 223045 - protein, 621 aa, Zea mays
  unsure (1)..(621): unsure at all Xaa locations
  Clone ID: MRT4577_135005C.1.pep
DLEFGRAGKPLLPRNPTPAAAAPPPLASGSNPASPPQTMGFDVGVVPFNPDGWGPPDVPAIPQSLGGGASIPFAPFSRSDKLGRIADWTRNHAGPAAFAAASRDSVFDFTSADDSLVAGAEDSSFRLVDAKPQPRPQRFGPKWRFNQRQQLPQRQDEEVEARRRLAEKERARRDRHFQNNRSHHHPGFRGNQPSSSAKPSVDIQPDWTMREQIPFANFTKLSFSVSDQPEDLLLCGAVESYDRAYDRVNPKAARRLERFKSRNFFKVTTTDDPVIRRLAEEDKATVFATDAILAALMCTPRSILSWDIVVQRVGNKLFLDKRDGSQLDLLTVNETAQEQLPENKDDINSAHSLAVEATYINQNFSQQVLHRNGEKVNFDEPNPFASEGEEAASVGYRYRRWKLNDEISLVARCEVHAVSVDPSGTRQFITVNALNEFDSKITGVDWRQKLETQRXGAVLATELKNNANKLARWTAQALLAGADMMKLGYVSRVNPRDQYNHSVLTVMGYKPRDFAAQINLNTANMWGIVKSIVDICMKFEEGKYVFVKDPAKPQLRIYEVPSDAFENDYVEEPLPEEEQVRPLGEVDATAEEMDAVAEAEANNVSSANGGEGGKSAEATLA

SEQ ID NO: 223046 - protein, 99 aa, Zea mays
  Clone ID: MRT4577_135006C.1.pep
IDRSSGLSTCECAILEGEQHLDPAVVVVAYNHDDLLHLEGADGILDGGSYVRRAMQGANPEPSLVYSTTMGRSVDEPQKSDSLASGESCLQAEIEPSRP

SEQ ID NO: 223047 - protein, 138 aa, Zea mays
  Clone ID: MRT4577_135007C.1.pep
AQSFHQKAATGRSVYSQYPARNGFFTDHESFSRIPACFCLDSNLFSCIGSSLYQLTQGPGLGLFLSFMHSSAVPSSRLVHVMDVLDKGPVVHAIAPGPLMEVGVQPPCVAAIVQAEIDPQMVDPGPPEEVSGKEKENW

SEQ ID NO: 223048 - protein, 83 aa, Zea mays
  Clone ID: MRT4577_135008C.1.pep
TAACLLAINLGLTLHHATLLIVRHCIRACDLLLLSLMHDAEKEEEEEEDEEKQENQGSRDVTDDKGSADASILHMNINAACQA

SEQ ID NO: 223049 - protein, 45 aa, Zea mays
  unsure (1)..(45): unsure at all Xaa locations
  Clone ID: MRT4577_135009C.1.pep
XXAXXLLDPCAXLXGSGKWXGAXAIXXXXERGEQAPXDEXFWLLR

SEQ ID NO: 223050 - protein, 64 aa, Zea mays
  Clone ID: MRT4577_13500C.1.pep
YSSPIDTRVFYMDRGTHNKLNNFYAHHYLKTYVSIYSITNNNYYFFTLIIKYFIFFYYLFLYTH

SEQ ID NO: 223051 - protein, 53 aa, Zea mays
  Clone ID: MRT4577_135010C.1.pep
IHAYCIHSCTRIHALLSITAAELHYLPWWVSVYNAFTTYVAAGDGLMQIKCSS

SEQ ID NO: 223052 - protein, 337 aa, Zea mays
  unsure (1)..(337): unsure at all Xaa locations
  Clone ID: MRT4577_135011C.1.pep
MEVLIGLHLLHLRAAVTLSSARHTQLMGTQQRRDLQANIPALRKLDTMLLRVRTSQERANEKWWIPIVNVPPGGLSPTSRAWLLHQKELVNQVLKAAMAINANCLNMENGRASLGDALYRVITDVEFDPNDFLSTMDLTSEHKILDLKDRIEASVIIWNRKVHNKDSKSSWGSAVSQEKREQFEERAQTLLLILKHRHRFPGIPLSALDIAKIQENRDVGFALLESYSRVLESLAFNVMSRIEDVVQTDNLARDIAKKNAPPAADPAARRRTTLLDFMGWNRDAXDGTGTPRAXDDVSPQSHRLMKLPNIMTNLKKTYMDKLDFFLTTSFFCDFQFT

SEQ ID NO: 223053 - protein, 523 aa, Zea mays
  Clone ID: MRT4577_135012C.1.pep
MNAGAQLERRSSVRRSQSMVQEEDRGQPPDEELMSRSQGSSTEPSGGALRTGGAVPDKDSATPKPRLAEQSAGPSEMDLMKEKFAKLLLGEDMSGSGKGVPSALALSNAVTNLAASVFGEQRKLEPMAPDRKGRWKREVGWLLSVADHIVEFVAKKQVLDNGTEMEVMGTQQRRDLQANIPALRKLDTMLLDYLDNFKERNEFWYVKRDSCSESENEERSDEKWWIPIVKVPPGGLSKTSRGWLLHQKELVNQVLKAAMAINANCLMEMSIPDTYIDTLPKNGRASLGDALYRIITDVEFDPDDFLSTVDLTSEHKILDLKDRIEASVIIWNRKVHNKDGKSSWGSAVSQEKREQFEERAQTLLLIIKHRFPGIPQSTLDIAKIQENRDVGFALLESYSRVLESLAFNVMSRIEDVIQADNLAREKAKKNAPPAADPAAGRRGPQEAGGDDDDQSKTTLLDFMGWTGDSEGKNDDASPPPPPELPAQDDGRLMKLPNIMTNLKQTYMDKLDFLSGNRSPSGRH

SEQ ID NO: 223054 - protein, 100 aa, Zea mays
  Clone ID: MRT4577_135013C.1.pep
FFFFCFFFLGFFYNIWGATKDRNPKVGGNGPTGGEHDNTPYMKRRRGKGARERVGPNNRTIRKERKAPGGDENHTLTERAARPSQPLITPKKGAHGAGGA

SEQ ID NO: 223055 - protein, 280 aa, Zea mays
  Clone ID: MRT4577_135014C.1.pep
MAPPDSISTCSSLPLAAAPMSEPTPFPFAASPLPNPLVATASFLQHHLSRLASHLNVPRPALAAAAARTPGPQGASLSLSLAPDEVARALTGTPVFTVCNSSNEFVLVSDPATGLRSLGLLCFRSEDADALLSHVRTRQPVLGKGAKVVPITLDQVYMLKAEGIAFRFLPDPLQIKNALEMKSGLTAFDGVPVFQSDLLVVKKQKKRYCPVYFQKEDIERELTRASKGSRGSALSKKIMVGSLEDVLKKMEINERDSGWDDLIFIPPGKSLNQHINEVSA

SEQ ID NO: 223056 - protein, 56 aa, Zea mays
  Clone ID: MRT4577_135015C.1.pep
IHQQPSRDDIDQTEYGLLSMDLGDKPPQLEETTGPHVADYKQKRAADTDKVPVEKK

SEQ ID NO: 223057 - protein, 136 aa, Zea mays
  unsure (1)..(136): unsure at all Xaa locations
  Clone ID: MRT4577_135016C.1.pep
MGASMIFKSAMAVAPNGLDVPRSVTPSYKIVSMHKKKIKTDKSYGIGGGLTADRHTNGRNGKGKGVYQYFYKNRSNVXDSYPFYNVDDWLPTXGDFFGGGTTGILIWAVTLAGNLRGGALLFLNNQAXKRLRISKC

SEQ ID NO: 223058 - protein, 28 aa, Zea mays
  Clone ID: MRT4577_135017C.1.pep
MRIVKCYFCSGPIYPGHGMMFVRNDCKV

SEQ ID NO: 223059 - protein, 52 aa, Zea mays
  Clone ID: MRT4577_135018C.1.pep
NKLREAVLDCFNTILYVFLNSLSFYIVTTIQILDYHYITSLLQNPLPHTILS

SEQ ID NO: 223060 - protein, 95 aa, Zea mays
  Clone ID: MRT4577_135019C.1.pep
SYDMSQAIRCRSFFQCNLCAGMAPLLQYAMYVTVLLEQSRASVAVLAGLRGVGMTSRTYVKIAAVICVGLHGCLHVQLGGPLVGRINSPVGDDRS

SEQ ID NO: 223061 - protein, 190 aa, Zea mays
  Clone ID: MRT4577_13501C.1.pep
GPAAEILMGIASSIESIILSLLFCRSGLSFLLSQPEATELILLSLQDAEKMNKSECITLRQAFVLLSKGFFCRPKEVGLITELHLKVGSAATRILSVPPNSDELLWVLWELCAISRSDSGRQALLALGYFPEAISVLLRSLSSYKDLDSVMAENGGSPLGLAIFHSAAEILEALAADSTASSLESWIGFA

SEQ ID NO: 223062 - protein, 42 aa, Zea mays
  Clone ID: MRT4577_135020C.1.pep
TGVYSSFNCVYTEIRLVEASRLLRLGYFSYMLTTCRSKRMLL

SEQ ID NO: 223063 - protein, 61 aa, Zea mays
  Clone ID: MRT4577_135021C.1.pep
GPKRTRVFICIKPFATFTHVCAFPLCRQDQQNKFFHYPELTSKPENRWDALESHRGNSDTN

SEQ ID NO: 223064 - protein, 43 aa, Zea mays
  Clone ID: MRT4577_135022C.1.pep
VLLVHASHHQYTEYEGVITRPRTPGSRRLYRTGALQSARSFTL

SEQ ID NO: 223065 - protein, 85 aa, Zea mays
  Clone ID: MRT4577_135023C.1.pep
SIENPFPVIQTYINPLNVIEIYSFPSMSSNLNFNPLNVITVILKQIFPMLSKSIPIKLVRYIWIFFKNSIMKKYGIEGFPSFSFR

SEQ ID NO: 223066 - protein, 222 aa, Zea mays
  unsure (1)..(222): unsure at all Xaa locations
  Clone ID: MRT4577_135024C.1.pep
FPDNSIDPQSSPVTLPRASPSPPPQQNPIHLKSIRPLARAPERAGWELWDSLLNWLRSLFFGEQLEVALAGXQNAGNTSLDNAAATGXGYREXMMPTGGFNMRXAAYGRAAIKLCHLGGHRTFHTMRQRYCRGXSAILYRWXPAERDSVPIATSDLHDLMTIQTLAESPLRVLDNNIDEPETLSKQDSADQLVLQLNEDLEGRRYMISSTDSADTDVLIDWL

SEQ ID NO: 223067 - protein, 106 aa, Zea mays
  Clone ID: MRT4577_135025C.1.pep
NGVFDATSDFWCCCLARSSGGCRALVTTAREEYQSRKQRQGVRSRSGAEPVLSMPGLVLGLWWASTSARGGRAAGHTRDSEEHAKPRIAPLPLLCHWCFTLCIEEG

SEQ ID NO: 223068 - protein, 34 aa, Zea mays
  Clone ID: MRT4577_135026C.1.pep
TTHTPSVSYEDLLVERPDQPHGQRPRRRASISFV

SEQ ID NO: 223069 - protein, 91 aa, Zea mays
  Clone ID: MRT4577_135027C.1.pep
EIWHRPRLIRYVHNKVCSHSTPPRHRLTQGHHATIYSTSPLFCELRHERVIRTSNFSSCRLPVRFTNSVSYGTLRALSVALDELRRSVIDR

SEQ ID NO: 223070 - protein, 105 aa, Zea mays
  Clone ID: MRT4577_135028C.1.pep
QLPKREGRASPTSWATAPVVQTGTCKKAAKLGKARLSPRQNGAQRRPVKRHPRAKEGGRGPPKAGPGRTPRVMDICIYSPFSVVSALFSIFFFFFFFFFFVQAFF

SEQ ID NO: 223071 - protein, 89 aa, Zea mays
  Clone ID: MRT4577_135029C.1.pep
PPAPFPSQAAIFMPDQWPPPENCCKMYEPPGRTGAQCKGCWRSRMRYRLKAENSLSNCLMPQNRPKQSCSLVTKCFYACLLRRRLHFFK

SEQ ID NO: 223072 - protein, 128 aa, Zea mays
  unsure (1)..(128): unsure at all Xaa locations
  Clone ID: MRT4577_13502C.1.pep
MHALRKLAINFEGAQLQTESSAPKKRKSGFTSAESKPTEATVGRYATAESPYTTKGRSASKLAASTPRRSVLXSTPPNINIWIDIXNACPALSVPAMHGEVSAWLPLARRDRVTHTDEREMNTERRKQ

SEQ ID NO: 223073 - protein, 95 aa, Zea mays
  Clone ID: MRT4577_135030C.1.pep
LIGLPLLIDNYVPPLEGLPIFILRLATEVNWDEEKECFESLSKECAMFYSIRKQYISEESTLSGQQSEVPGSIPNSWKWTVEHIVYKALRSHICL

SEQ ID NO: 223074 - protein, 51 aa, Zea mays
  Clone ID: MRT4577_135031C.1.pep
KRSRSGTDGYGGAIPNLGSDMVGNIGWTLSRAYEPSACRRAAARHSAWSCG

SEQ ID NO: 223075 - protein, 40 aa, Zea mays
  Clone ID: MRT4577_135033C.1.pep
LQHKKKKKKKKKKKKKKKKKKKKKKKKKKKKKKKKKKKKN

SEQ ID NO: 223076 - protein, 97 aa, Zea mays
  unsure (1)..(97): unsure at all Xaa locations
  Clone ID: MRT4577_135034C.1.pep
MQCSRALPLQGKESLIPARRGKAGYGMERIRINXCGVRRSTALKRMCCSARGAVSRTQRVLTSHAMPDTIVVXEHTFRGIXAEPNQTNAVTLFGGTA

SEQ ID NO: 223077 - protein, 117 aa, Zea mays
  Clone ID: MRT4577_135035C.1.pep
PAGPGKHNPYLVITQTRYSKQTRIEFLPLLNRPNDHNGCSRGCKNATNLLYHGTDRAKRGKPINTKRNQRHPNRKDRGGKGSRETLRISDLKRSTQSVKEEVNYTLQPIYKISLASK

SEQ ID NO: 223078 - protein, 152 aa, Zea mays
  Clone ID: MRT4577_135036C.1.pep
PAGPGRSSTPASRSPPHRFSGTPSPLLLHEWIEHGGREHRGFLASSLPTAKTLPHQLLLTTRRGPLDHRSSSTPILSEPTSHDSNTLSNKDDMQLDILGMNLQDLNIRSMTTIHFHHHGERIGEIVGDDAKKTGCTMLKASSKQAGITASGP

SEQ ID NO: 223079 - protein, 253 aa, Zea mays
  Clone ID: MRT4577_135037C.1.pep
MHACMPASLLCFGLVLLDRHCNPSSEREREIERERELVCMGCVSSKESRRRPPGYEDPNTLARETTFSVNEVEALYELYKRISYSITKDGLIHKEEFQLALFRNSNKRNLFADRIFDLFDLKRNGVIEFGEFVRSLDVFHPATPVEEKIAFAFRLYDLRGTGFIGREELKETRLAILNESELLLSDDAVEEIVDQTFRQADMNGDGKIDPDEWKVFASKNPALLKNMTLPYLKDITMAFPSFVLNSGASDDEL

SEQ ID NO: 223080 - protein, 101 aa, Zea mays
  Clone ID: MRT4577_135038C.1.pep
VVVFSLGVFFFFFFFKKTRIHPRPILQGFFPTRGAYTRLFLGRNPPKKKPGSPMKHPVVPHPWVTQRVWWKTPFETGDPYPRNQPKLGFLGNPAPFFSGKP

SEQ ID NO: 223081 - protein, 209 aa, Zea mays
  unsure (1)..(209): unsure at all Xaa locations
  Clone ID: MRT4577_135039C.1.pep
MHACMPASLLCFGLVLLDRHCNPSSEREREIERERELVCMGCVSSKESRRRPPGYEDPNTLARETTFSVNEVEALYELYKRISYSITKDGLIHKEEFQLALFRNSNKRNLFADRIFDLFDLKRNGVIEFGEFVRSLDVFHPATPVEEKIXVIYIRSFLLCRLPGLLIKEYNFFLISVAFRLYDLRSTGFIGREELKEMVLXILNESELL

SEQ ID NO: 223082 - protein, 246 aa, Zea mays
  Clone ID: MRT4577_13503C.1.pep
MSHLGTINDSGTLHSLFSKCMRECESEAELDETWAMMHHEYNMQEHPWLTDLYQQRHKWCSALHKDAFDGGIESMDRNESLNNVLSNIDDESASLSTFVLELDKLAGSWRKTESLEDIQCNQAAPECTVKHNRILQHAAEVYTHKVYKSIETDFLDGCSATSYQAAQCNETLHKFEFLLENSPNVSVVFLNTSTMELSCTCKKFETMRILCSHALNALVLKNVDRIPERYILNRWTKYARKGTYPF

SEQ ID NO: 223083 - protein, 61 aa, Zea mays
  unsure (1)..(61): unsure at all Xaa locations
  Clone ID: MRT4577_135040C.1.pep
MTKRTKKAGIVGLYGTRYGAXLAXRIKKMDVSQHSKYFCEFCXGKFAVKXRKAVXIWGCKD

SEQ ID NO: 223084 - protein, 98 aa, Zea mays
  Clone ID: MRT4577_135041C.1.pep
LLVEQDVILINSQVPELHSHDDTKDNIMVNGLRQPCEPVLPLSGKEFMKKMMSWYDEEDTIYWPMLPFASFTYQPASEATKPQLLLLRFPYVSQDSVP

SEQ ID NO: 223085 - protein, 94 aa, Zea mays
  Clone ID: MRT4577_135042C.1.pep
THASQFNRTTAPAPAQAPVHRIPYQPASFSLENRHWDWGLIPSLEPSTLLSRSMSFCWAEPLVARSQWRSPTRPTLSKPTLIRNPADLALPQRH

SEQ ID NO: 223086 - protein, 83 aa, Zea mays
  Clone ID: MRT4577_135043C.1.pep
DLTTHIASLTRYIDCDCTLLQSKTQINHILLFSQIPPIMDTTKFWRCNNCYAENAFNTGKVCQNFPCTSYYDPSCLTYAVSVK

SEQ ID NO: 223087 - protein, 56 aa, Zea mays
  Clone ID: MRT4577_135044C.1.pep
WGCASPLRPCCSLRSSARGRSFPWCGCLLAPRSCLPLAAALGVSLFVPLLVPFVLP

SEQ ID NO: 223088 - protein, 110 aa, Zea mays
  Clone ID: MRT4577_135045C.1.pep
VNKKKKKKKKKKKKKKKKKKKKKKKKKKKKKKKKQKKKKKGGRPPPLFVPLRGGDWRPGGNQAETCSRGEGVPPPQPPPHKSRGVKGENWGGPTGGGTPLNWVGAPAPFS

SEQ ID NO: 223089 - protein, 476 aa, Zea mays
  Clone ID: MRT4577_135046C.1.pep
MARNEPLDFENEDDPLLPAPRPAKRSKVIGMDDLLLDYFQSGKKDKLKVKAAKSKHGPKGGYDSGEEDDRATQQEITVCKIFEEVQQKGKVMDARDDVPPWGQQFFRCQNPPSNLSNGGVENCHLLQSFSAIEDIGFDLEMHQGEGFLEGMLLDGWLLNLVRICGFVEDSVASWTLTNLLHSPNEKLQVSAADFWDGILSLDEAGEPLVNLGYFPSYSVLKRAMLSYGYLFDTSGTKASISGSTAAGGPDDSLPHNIIAWLRVVSACCKIRKVHSIFSPSEAEELLAIAISLFLDRRLEGLLLVLGDCLNSLILYFNTSEWETSCVMVAESIAQRVTLDLNCLRVVDCITGTNKRSKILRSQVALQLLKISFGLKVANVEKILKLVTSINVKEKECDFFRLYVYLVLMDNLLFSSDAFRDKTGMVDAWRNYLRNCSTQIGCTDWRFYAPKARNKASYLLQGSILKKSSGDGKSCVR

SEQ ID NO: 223090 - protein, 141 aa, Zea mays
  Clone ID: MRT4577_135047C.1.pep
YSARGFLEGGGVDGWLLNLGRIWGFVEDSVASWTLTNLLRSPNEKLQVSAADFWDGILCGGEAGEPLGNLGYFPRYSVLKRAMLSYGYLFDTSGAKASIPGSTAAGGPDDRLPHNIIALVRGVSACCKIRYKIFNTLDIFA

SEQ ID NO: 223091 - protein, 124 aa, Zea mays
  Clone ID: MRT4577_135048C.1.pep
MARNEPLDFENEDDPLLPAPRPAKRSKVIGMDDLLLDYFQSGKKDKLKVKAAKSKHGPKGGYDSGEEDDRATQQEITVCKIFEEVQQKGKVMDARDDVPPWGQQFFRCQVDSNFIFCLPFSVDQ

SEQ ID NO: 223092 - protein, 70 aa, Zea mays
  Clone ID: MRT4577_135049C.1.pep
VDSRAEQIFPCFSIPVRRGGVQVKGREGPPPPRSATPPPSATRTPTPAPSCSRPTHTPTDRPTCFLAISY

SEQ ID NO: 223093 - protein, 349 aa, Zea mays
  unsure (1)..(349): unsure at all Xaa locations
  Clone ID: MRT4577_13504C.1.pep
MEDLASSRGGGGCGGLDAQIEQLMECRPLPETEVKTLCEKAKEILMEESNVQPVKSPVTICGDIHGQFHDLLELFRIGGKVLSALHNLCALYLFALLMLFISFSKSXDHSLLFXCPDTNYLFMGDYVDRGYYSVETVTLLVALKVRYPQRITILRGNHESRQITQVYGFYDECLRKYGSANVWKIFTDLFDYFPLTALVESEIFCLHGGLSPSIENLDNVRSLDRVQEVPHEGPMCDLLWSDPDDRCGWGISPRGAGYTFGQDISEQFNHTNNLKLVARAHQLVMEGYNWAHEQKVVTIFSAPNYCYRCGNMASILEVDDCRNHTFIQFEPAPRRGEPDVTRRTPDYFL

SEQ ID NO: 223094 - protein, 155 aa, Zea mays
  Clone ID: MRT4577_135050C.1.pep
MGIVDVVSEFCSLPRTRRHLKKRKQFQTVEMKVRIDCEGCERKVKKAVEGMKGVSSVEVAAKQNKVTVTGYVDAAKVMRRVAYKTGKRVEPWPYVPYEMVQHPYAPGAYDKKAPAGYVRNVVADPTAAPLARASSTEVRYTAAFSDENPNACSVM

SEQ ID NO: 223095 - protein, 77 aa, Zea mays
  Clone ID: MRT4577_135051C.1.pep
QVSPQGLLVLQRGLASETACGVDKGRKISICLDQFLTSEKGKKLGEDGGGGTIKASCGSSMRGDYDGDLRGPSSSSN

SEQ ID NO: 223096 - protein, 94 aa, Zea mays
  unsure (1)..(94): unsure at all Xaa locations
  Clone ID: MRT4577_135052C.1.pep
MSSAPSVDETAPFFGLLGASAVLVFPCMQAPHCTAKSAVGVAPTGVMRPELAMKSTEPVLMTGAPSXYGLIIAVIISAEIHPQANPYYLFDVYA

SEQ ID NO: 223097 - protein, 268 aa, Zea mays
  Clone ID: MRT4577_135053C.1.pep
MSSSSSMLRLPPCRPAVHPVCRGAGSSGGSTHPLRSSSRSRPSSLTAACALKTPSNGGSRGKVNPRDLFTFSHKFSTDIPMSETQGASIDEYLRNSPRIVGAVFPDQRKRRKINDEEWSVQLLPIRFLFLSASPVIVMRFVSKSGGKEYPPNVPVHATSLLLMEVTDYKLNGLDSNAMPSHLALTVRGLMYPQRQREGRKSLKGHVEMTVGFDLPPVLALVPASIIRGVGETVLRQMAEQMKQDMDTGLAADFNKYRREKLTERRSSP

SEQ ID NO: 223098 - protein, 124 aa, Zea mays
  Clone ID: MRT4577_135054C.1.pep
LVCFFFFLFCFFSFFFFFFFFVFFWGQNGPGLLTKFLTGWGHLNYIPNPPLGGGARGRGETFGAWGPWGKRGPLPPLGEGPRGLWGEIFSGANSGVSSPGLGGNSFFFGGPKLNSRGGVSHVGA

SEQ ID NO: 223099 - protein, 108 aa, Zea mays
  Clone ID: MRT4577_135055C.1.pep
LEAGRDTLNPLSTSTSYGVLRTDTPSVGSMAYYQEVDYCSEEVRSVAPAGFRRHGGGVQQHVDKEKFEEVDTVSRAGANHHHHHGHHGDHGFEERETSVEEDVNTCTG

SEQ ID NO: 223100 - protein, 62 aa, Zea mays
  Clone ID: MRT4577_135056C.1.pep
RICPHKRETGSPRCSILPIPLVSRETVICTALRHAYCRMRCLWTSCCYRGLIDEPSVVHTST

SEQ ID NO: 223101 - protein, 60 aa, Zea mays
  Clone ID: MRT4577_135058C.1.pep
MNFKKKKKKKKKKKKKKKKKKKKKKKKKKKKKKKKKGGPLFKETKFTSPGLQSKNFFFGA

SEQ ID NO: 223102 - protein, 215 aa, Zea mays
  unsure (1)..(215): unsure at all Xaa locations
  Clone ID: MRT4577_135059C.1.pep
VVAFLSIPRSPSCCPPAVPPPPXPSVGSAPPPPAPGTQWSAGCFIPASLPAHPPPLPPLMLVATTTIPPSPXARPGHGPAPPXPLPERGRGSAPXPPRPRPGAPPSPPRRPRAGRRPRAGCRCARTVLAPGLPLLMPAHMTVSTSSTGTSLAGVHDKEATENDAWLRHVAATLLGSRSEIRRPFLEALSTCLGSPDAGLVGACLTMAWWRLSVRK

SEQ ID NO: 223103 - protein, 185 aa, Zea mays
  unsure (1)..(185): unsure at all Xaa locations
  Clone ID: MRT4577_13505C.1.pep
LCCIVFDSCXNRYGSANVWKIFTDLFDYFPLTALVESEIFCLHGGLSPSIENLDNVRSLDRVQEVPHEGPMCDLLWSDPDDRCGWGISPRGAGYTFGQDISEQFNHTNNLKLVARAHQLVMEGYNWAHEQKVVTIFSAPNYCYRCGNMASILEVDDCRNHTFIQFEPAPRRGEPDVTRRTPDYFL

SEQ ID NO: 223104 - protein, 271 aa, Zea mays
  unsure (1)..(271): unsure at all Xaa locations
  Clone ID: MRT4577_135060C.1.pep
INRVPAKIRRRRSVQAALTANGWVHDISGSLTTQVLFEFLLVWDLLQEVQLYPNVEDQHRWLPSSSGLYSASSAYLRFHXGATTFEPAKRIWKTXGPPCCEYFIWLASLNRCWTADRLARHGMDHQDSCPLCDQQDETVHHMLVACVFTREVWFRXLSRLGLQHLAPTSDAXVPGWWSEAERNVSNLKKKGFNSIVILVAWQIWKHRNVCVFDNASPNIHAILLTSHDEALLWGLLLLGRFGCSLSFPFFFFPFFLGAFLAPCTGSFSRYF

SEQ ID NO: 223105 - protein, 82 aa, Zea mays
  Clone ID: MRT4577_135061C.1.pep
TNSFFALNCAGAFMTFYGFGQQLLPFFLRGCISSEHKKHSGSNKTVKAHCTFLLGILLCARCQQSQYNQLQPEKWEIGETTE

SEQ ID NO: 223106 - protein, 87 aa, Zea mays
  Clone ID: MRT4577_135062C.1.pep
SVATNAKQSKCTETTNVEPPKELERAKATGKNAQMWPHMPHALTTNPYNSGAHHKKAPAKYARSAPQATADPSPPNLKYKNMFNDNN

SEQ ID NO: 223107 - protein, 92 aa, Zea mays
  unsure (1)..(92): unsure at all Xaa locations
  Clone ID: MRT4577_135063C.1.pep
NSLHCFLQHLTSAINYHYLHTSFCTYGGVLDSKIILNQQTHRSLGFSLFTFSTVDSIRHTIQNLNXTNLNTHNITLHHAQSSSCRPGLVNPF

SEQ ID NO: 223108 - protein, 38 aa, Zea mays
  Clone ID: MRT4577_135064C.1.pep
IRVQDLVRIIAPQVVIKKPLDVGNGGAKKNENDLANEF

SEQ ID NO: 223109 - protein, 70 aa, Zea mays
  Clone ID: MRT4577_135065C.1.pep
VTGAAGFVGTHCSLALRARGDGVLRLDKFNSYYDPSLKRRRQALLASRGVLVLDADINDAPLLEMLVDVA

SEQ ID NO: 223110 - protein, 329 aa, Zea mays
  Clone ID: MRT4577_135066C.1.pep
MDAEAAAAEGQVRHWTADVNGISLHVAERGAADAPAVLLIHGFPELWLSWRHQMAALAARGFRALAPDLRGYGDSSVPTDPAAYSILHLVGDLVALLDHLQLTKVFVVGHDWGAMVAWHLCLFRPDRVRAAVVLGIPYFPRGPRPMTDSFAKLGDGFYINQFQEPGRAERAFARYDVATVLKKFYALKIAEMIAPPGVEIIDFLQAPSSPIPWMTDEELGQYAEKFEKTGFTGPLNYYRMLETNWRLTAPWSGSKITVPAKFILSKNDVGLQSFGTEKYVKSGALKENVPDLEISIIEGHHFVQQEEAGTVNSEILSFLDKFPSEGGSA

SEQ ID NO: 223111 - protein, 69 aa, Zea mays
  Clone ID: MRT4577_135067C.1.pep
MDPFYSVVAPPPGFPKGSIPLFKGFPKPAPKGFPKVPARPAIGFFVLGFVGFFFRVFFFPLPNIFVGSG

SEQ ID NO: 223112 - protein, 142 aa, Zea mays
  Clone ID: MRT4577_135068C.1.pep
KKKKKKKKKKKKKKKKKKKKKKKKKKKKKKGGGGGLLSPLSAYLWEISHNSCPPGGGVSFLRFPGAPFCAFVCAISWLPVSQFSSLEKPLNPPRLYPPFEGLSPFSPFFHIWQKGQEAFPLSSLFKNFEWRLGAPCPLSLSP

SEQ ID NO: 223113 - protein, 140 aa, Zea mays
  Clone ID: MRT4577_135069C.1.pep
LHRAIGILEAGKKKITKKKKKKKKKKKKKKKKVFVVGHDWGAMVAWHLCLFRPDRVRAAVVLGIPYFPRGPRPMTDSFAKLGDGFYINQFQKLETDCTLEWIENHSACEIHTQQERRRPAVLRNREVRQEWRSEGERSRP

SEQ ID NO: 223114 - protein, 115 aa, Zea mays
  Clone ID: MRT4577_13506C.1.pep
LEAGRVSVIIDWVVNHCHKGSVTYTVDSRLQCSYNADEVRLALNLGLMCAHPICNARPSMRQVVQYLNGEMPLPEMMPTDLSYSVLAFMQNEGFDQYTSTVGSSGITASSLSSGR

SEQ ID NO: 223115 - protein, 166 aa, Zea mays
  unsure (1)..(166): unsure at all Xaa locations
  Clone ID: MRT4577_135070C.1.pep
IAPPGVEIIDFLQAPSSPIPWMTDEELGQYAEKFEKTGFTGPLNYYRMLEXNFHTACPPLALMXLLDSHNLILIPLCYLXNWRLTAPWSGSKITVPAKFILSKNDVGLQSFGTEKYVKSGALKENVPDLEISIIEGHHFVQQEEAGTVNSEILSFLDKFPSEGGSA

SEQ ID NO: 223116 - protein, 98 aa, Zea mays
  Clone ID: MRT4577_135071C.1.pep
CLSSLASRLSDRRKPMQMRFLSTMTAISLMLLLRAALETMCNLAIRNCRASTHTISFSFSGAIVVAALDLVSITSCQLSSSGTQCVVVWYVTPVFQAS

SEQ ID NO: 223117 - protein, 150 aa, Zea mays
  unsure (1)..(150): unsure at all Xaa locations
  Clone ID: MRT4577_135072C.1.pep
VQQLGRLSLLLLVLSHRIRQAWISCRKRTTAQTMAXDKMRIKVKYNPPESSLSKLRIRQRPKWGSKKSKVPCTYSAEXTCYLLHGQXKVYPQRHGEELAEIGAGDLGVFPKDMSCTCHVVEADDKHYNFEDSATPSMPALVDVYLLCSCI

SEQ ID NO: 223118 - protein, 67 aa, Zea mays
  Clone ID: MRT4577_135073C.1.pep
DHACPGCTCERAPSARHHSFPAKPKHEAISILPSNMIVFMGSNLEHSVTDRYHDPWVPADFVPHDCM

SEQ ID NO: 223119 - protein, 70 aa, Zea mays
  Clone ID: MRT4577_135074C.1.pep
GRWAGRVGWEERSKNGVVKDQPSDAAVSSNATPSQSSSINDISSMSTEQTLASDTDSSLDASTGPLEGCR

SEQ ID NO: 223120 - protein, 43 aa, Zea mays
  Clone ID: MRT4577_135075C.1.pep
KKKKKKKKKKKKKKKKKKKKKKKKKPKKKKKKKKKVFLGPEPP

SEQ ID NO: 223121 - protein, 76 aa, Zea mays
  Clone ID: MRT4577_135076C.1.pep
SVSESYVRVAAPSSKDPVVTLSELSRDVVHAFDHVDAECFGEAAGASSAAKDTTAEAMPTRTTLRVRARAMFARWI

SEQ ID NO: 223122 - protein, 91 aa, Zea mays
  unsure (1)..(91): unsure at all Xaa locations
  Clone ID: MRT4577_135077C.1.pep
GRPARRGAQEKDRHTNXTSAPKKTRHEKEDEGAPTTGTRESPHHKETQHRNNARPQDAAHNDKRTNRARKHPHPDRQKPTAAPPDPKNHRP

SEQ ID NO: 223123 - protein, 50 aa, Zea mays
  Clone ID: MRT4577_135078C.1.pep
IPDLNDPNNPIILYISLLYLVINSPDLTSLPRGDNPLNLLHNLSTHLTNH

SEQ ID NO: 223124 - protein, 1024 aa, Zea mays
  Clone ID: MRT4577_13507C.1.pep
MGKGKRGHGSPRHAGNKRKRDPSPPSEDFGDSKYSEEEVSSEFEGSLALASPPASSDDSDNSQGIATEERSDDDSDDEGDIDDGGREGGDDDGGRGGEGDVGGKGGSGSGGDVFRSNRRAMSDVASVLEIAMAPKRKKKSSIAAVIPPIDPNSQLPFAGNHVTVISESDLLHIVDIGVLLPKELCSWRICRGITVPTEDNHESIVYVPFLIRGFALPVSPFFHGLLDFYELNLTHLNPNSILQVSIFVHLCEAFVGILPHSGLWKYLYHCRPGMAGGQHQLVGGASLELRRGRKAEYLDIPLKDSIKWWRLEWSGRQLDVRTPSWIESPTPSEITEAKVLLAENRQPLKDRAYPAYLYNGVNDSTRVTNRRIPIEDLMSRLDIILRGRVSNAGAPVAYYAWNMPPIRPFSEFVSNPLGSDGSLGLRVRPSPEDIEALIAPLWSLSEDERQTHFEMPASTDDAEIDAVLSLLAGESSDSTHAEPMTITTGAGSSAPVHDEVPAEALPEVDAKGCDRAQAAVCIFDEDEEEEEEVPLIRKNNRHYRGSEGGLPISDFDQVLEEVVPEDMLSEPTADDIPAVCSEVPDRGNPSGVLCIVDFGGQSSMPRRWSESPTPMEVTEEPSALEVATAEDPAPEGGAGSYQAPEGVAGSDPALVGSASYDPALEGVQVGSLSHASMDVHVGSSPPRSDGATAVHASTVLSGQVALEVGELDARSLLPAGGAEITPNNVLQIVPADLPSSSHDMAPPALGLPLFLSNLQLRSCGATVPKQALSLMQWNPLLLQKQIDDLKASNAAVLSDMPRRCSDLEEKYSRSQADLTQRCSDLQEKYSQSQLDLAQTSTSLDGARSLHSSLSAQLDSERMSHEEEKPALATSRDNLDRLYRDASNSLTILERSNRFTMSDLDHHRHELQVSQDEVLRLGQLLSTKDSAIRDLRASKKLVAQELEAARLAVKASEDNCAILKAQRDKAMDKAIRAGWILMRRPGVVVPDDIVADVKAAPDASSRPSSSIAPAKDIAGKDILMQ

SEQ ID NO: 223125 - protein, 101 aa, Zea mays
  unsure (1)..(101): unsure at all Xaa locations
  Clone ID: MRT4577_135080C.1.pep
TTESYLSSFSTSIQRAAYRTASDSLXERLLFMHVQXRGSSRSLTDEQISQLLFHASVDEHWLDCLLTPFGESIGSYRLLDQATYIYNHYCQIYEAYARSYH

SEQ ID NO: 223126 - protein, 86 aa, Zea mays
  unsure (1)..(86): unsure at all Xaa locations
  Clone ID: MRT4577_135082C.1.pep
MNMFYPIVIQCTQHAYDICTVDQGSLLKQLANKSISGGVAVVLAETNKXEMEMDIAKLEVGFMGTSVICRSDAPLILADLRKPRQT

SEQ ID NO: 223127 - protein, 111 aa, Zea mays
  unsure (1)..(111): unsure at all Xaa locations
  Clone ID: MRT4577_135083C.1.pep
MREATMFFCGDPSTPQWVDQHHHHMEIHRVANGSTLLKRFRKPSPNNNLLEGSLLKQLANKSISGGVAVVLAETNQXEEEMDIAKLEGGFMGTSVICRSDAPLILADLRKV

SEQ ID NO: 223128 - protein, 78 aa, Zea mays
  unsure (1)..(78): unsure at all Xaa locations
  Clone ID: MRT4577_135084C.1.pep
PIDAAVGRPTPSPHGDSQGSLLKQLANKSISGGVAVVLAETNKXEMEMDIAKLEVGFMGTSVICRSDAPLILADLRKV

SEQ ID NO: 223129 - protein, 144 aa, Zea mays
  Clone ID: MRT4577_135085C.1.pep
LETGNSSLEGKRVPIDEDGWAPSCPGHSILLLSYSYLFPMLATSRRCPHCRRGGRLCPLRRAPGRIDASVPRLASTAANNMRRQRAMGESLEWGDLARRDYHLTASMVLNTMRWSASMGQSMCVVAWCVVERGRGRERGRADVM

SEQ ID NO: 223130 - protein, 37 aa, Zea mays
  unsure (1)..(37): unsure at all Xaa locations
  Clone ID: MRT4577_135086C.1.pep
MAPSRNGMILKRHFHQDWQQXVDTWFNQSARRIRRRK

SEQ ID NO: 223131 - protein, 117 aa, Zea mays
  Clone ID: MRT4577_135087C.1.pep
MSTLLNKPYDAFADEGAADEEDVQVEVKKAKTSNVIHIRIQQRNGRKTITTLQGVPSEYDPKKLLKAFKKEFACNGSIVDDEDMGKVIQLQGDQRQKILEILIEEGIQKETIKMHGF

SEQ ID NO: 223132 - protein, 37 aa, Zea mays
  Clone ID: MRT4577_135088C.1.pep
EMEMDIAKLEVGFMGTSVICRSDAPLILADLRKPRQT

SEQ ID NO: 223133 - protein, 37 aa, Zea mays
  Clone ID: MRT4577_135089C.1.pep
CLVTDGISSDSITAGHELANFQRVYIPCNAGMRLSPH

SEQ ID NO: 223134 - protein, 70 aa, Zea mays
  Clone ID: MRT4577_13508C.1.pep
SWGWCACTCSPPGTPCMAVASGAILSPRRTGTPPGACGPAGASGPGPGSHRAPAPRPCTGPRRQAASPRW

SEQ ID NO: 223135 - protein, 191 aa, Zea mays
  Clone ID: MRT4577_135090C.1.pep
VRPFGFCGVRSKKFDGVLGPGAFGPKAMKVQGGGRWFIFSIYPENWGDSPGHQKNNSWQGFGGIPPPNKWGVLKIPLGRFFPPWRGNVVPAKLGINPARVVGMFFSVNPKGGVSGAQTGAGDFRVDVAWVKTFKAFLTPPVIVFFSLGPFLFFPPAPGGPLNFSPGPHPRGNPSPDCPPPFALKKGFCFAF

SEQ ID NO: 223136 - protein, 323 aa, Zea mays
  Clone ID: MRT4577_135091C.1.pep
MTWCNSFNDVRAVENNLATAAAVAAAAAKKQQQQQASSHVNLIRTCPSCGHRAQYEQVQAAATIQDLPGLPAGVKFDPTDQELLEHLEGKARPDARKLHHPLIDEFIPTIEGENGICYTHPERLPGVGKDGLIRHFFHRPSKAYTTGTRKRRKVHTDEQGGETRWHKTGKTRPVFTGGKLKGYKKILVLYTNYGKQRKPEKTNWVMHQYHLGSDEEEKDGELVVSKVFYQTQPRQCGSGSATAKDAIPLAANAATDHHHHHHHDGGNGGGNNMLKEAGIVDFYSPAALISYNQAASNSRVAASAHLVPNFEVHTTSGAAGFGP

SEQ ID NO: 223137 - protein, 144 aa, Zea mays
  Clone ID: MRT4577_135092C.1.pep
NNNNKNAVHILLEGENGGRPSYTLPAATLSAVQFQHTSPSRFSLAHGPSTSDVVLFYGREATRYLAGNVGLHCGRCVAHVSSVIWSLDPQAQPLRWEWIHRAGLRRAQPSLQRTRLSRLLSAFLAPRPGSSIGDEKSTLFLFSR

SEQ ID NO: 223138 - protein, 43 aa, Zea mays
  Clone ID: MRT4577_135093C.1.pep
PVIPLAAKLNAYAAELCPPKAQKKISSKIDEIAKKGWPILHDI

SEQ ID NO: 223139 - protein, 39 aa, Zea mays
  Clone ID: MRT4577_135094C.1.pep
CRSVITELPTPPSRLGDADQSGVCSRWLSLALMRNKRGL

SEQ ID NO: 223140 - protein, 73 aa, Zea mays
  unsure (1)..(73): unsure at all Xaa locations
  Clone ID: MRT4577_135095C.1.pep
YPTGSTNQGRTCNTDQSLVLRGAXXHLDPIPAPLPEPNXEPKPEPQPAPQPGPCPDPAPVPHAEPKPALRPGP

SEQ ID NO: 223141 - protein, 105 aa, Zea mays
  unsure (1)..(105): unsure at all Xaa locations
  Clone ID: MRT4577_135096C.1.pep
KAXGDXGKERKHXGGETGXXXXDKXTGGXAKGGEPXXEATRKEPDXEKRHPSXGEEEDXTXGGTXXPAXGSXEKTRPQEGGNTGNEGPEKGAPESQTXARERKQP

SEQ ID NO: 223142 - protein, 43 aa, Zea mays
  Clone ID: MRT4577_135097C.1.pep
STSVTNYKQYNLPKEYLHVLIPPINKETFKSNYTSTTQQHANL

SEQ ID NO: 223143 - protein, 77 aa, Zea mays
  Clone ID: MRT4577_135098C.1.pep
SDPLVMCFIHKNEQVPPSMVFHMGDFNSEYMCLLMKKIYLLGLTDSMIQTYFIVLATLFPFYNATLKTVTDTCVTNS

SEQ ID NO: 223144 - protein, 41 aa, Zea mays
  Clone ID: MRT4577_135099C.1.pep
LIAHQSKECDCTPQSHSLALLNTPALSLYMTYAILREQSQG

SEQ ID NO: 223145 - protein, 71 aa, Zea mays
  Clone ID: MRT4577_13509C.1.pep
QCNFVAYVFLTKLQTQHFQHALMTAVSTSGLLHPFRGARAVTPRGIHGTTEQAHFPTNGRAGTHDSRSCGF

SEQ ID NO: 223146 - protein, 134 aa, Zea mays
  unsure (1)..(134): unsure at all Xaa locations
  Clone ID: MRT4577_1350C.1.pep
PAGGQVLLXEERAVSPLPLGHVGSPFCPPRVFSLGSRPFSFLALGPGAVATREPFMPFHIPNFCSSPFPPLWFPPRSRSGIPWGARASFPFVRWFFAPFVFGFLPFCLVPPLLFFLFFFSPPPPFLLKTFLLFD

SEQ ID NO: 223147 - protein, 150 aa, Zea mays
  Clone ID: MRT4577_135100C.1.pep
WGRGWAEEDEIQELKARWHALEADRESMRHAIMAMGDEKAQVVLLREIAQQLCRDAAPFPAVPLKVQPRPQPFVMAQRKVVKRHSSFAKIFIVTVIKWVMSIFCWRRKSDRVRYPIGMCGSNPGRPLVLDRFPKQRQKKIPKRKLSASIL

SEQ ID NO: 223148 - protein, 262 aa, Zea mays
  Clone ID: MRT4577_135101C.1.pep
MHAPPSFSHLSLLSSARTLFGEGPTALVVTMERTPSWCILLCLAAASAVVAAAAPLPQYYNAIFSFGDSFSDTGNFVIINSGKLPNMPKFPPPYARCSNGRLVIDFLAEALGVPLLPPSANKGTNFSQGANFAVMGATALELKYFRDNNVWSIPPFNTSMNCQLEWFQEVKETVCSSPQECNEFFGKALFVFGEFGGNDYSFAWKAEWSLDKVKTEMVPKVVESMIDGVEALLDEGARHVVLPGNLPAGCIPITLTMYASED

SEQ ID NO: 223149 - protein, 103 aa, Zea mays
  unsure (1)..(103): unsure at all Xaa locations
  Clone ID: MRT4577_135102C.1.pep
LQAHHSNLVVYTCIVAWNDLVGHDQNGVRRFLVGSGRLSGAVDGEGAGMGRWRANDSRVEEKLATTASLEVAARAMGWRGPVSRWEPHXAQVAGANIRKSGGV

SEQ ID NO: 223150 - protein, 105 aa, Zea mays
  Clone ID: MRT4577_135103C.1.pep
LCRLFCGFFSAGPSGGVSCRGFLLLFVCWQLLSRVSAAFCGCARPVLLPAPVVRFSLPAPRVVRARVVLRAPPARAPRLAPACPGRPWEPRACRRRSPCLLRPSP

SEQ ID NO: 223151 - protein, 70 aa, Zea mays
  unsure (1)..(70): unsure at all Xaa locations
  Clone ID: MRT4577_135104C.1.pep
ISLEKXRYINGLQHNPTHNTVKFIFNLLLQHYLINLNIHLSLKTSRLKTSFSSSFISTPTKAISSTLRLV

SEQ ID NO: 223152 - protein, 63 aa, Zea mays
  Clone ID: MRT4577_135105C.1.pep
LILFPGAMKPRSGPPHTPSFRFIPILPRILDASATASGPILIRWIHQHRDVRIRRRMAVTRCG

SEQ ID NO: 223153 - protein, 104 aa, Zea mays
  Clone ID: MRT4577_135106C.1.pep
ILLVTDYVLRTWGDNYLHHMVPQPLLGMQPIAIDLHHSTTTILILHRHFSSSTNLTAERPAVLCQPPLLHHLPVVDNHSTIQCWLKHTHLFLLQIIQQVRRHII

SEQ ID NO: 223154 - protein, 138 aa, Zea mays
  unsure (1)..(138): unsure at all Xaa locations
  Clone ID: MRT4577_135107C.1.pep
XHXDDXVKTKHPRHPQQRAGASTVLVRGLDAVRRRLRREEGQPRRHRRRDVAHSTLPPAAPAAWASSYDGGAGLAGCCCNCNCLFRALVVWAGGRRPEVELAGRDVRTVVGCCSRGAAGLRPCFSLRXYEEQRKPXPA

SEQ ID NO: 223155 - protein, 101 aa, Zea mays
  Clone ID: MRT4577_135108C.1.pep
LCPPPFFFPTGRGPWGGLGVSWGVKKLFFSLYGGLYLGRVFLLCSPVCFFSGAWGLHIFFFFLRRVVFFLPRQLKCFNMPISCFFFFSSFFAGPCKFFCRV

SEQ ID NO: 223156 - protein, 47 aa, Zea mays
  Clone ID: MRT4577_135109C.1.pep
ERKKKKNEKRDLIKKLRAGPSNESNLTSQCLRRQSSSRAHLNSLPYP

SEQ ID NO: 223157 - protein, 149 aa, Zea mays
  unsure (1)..(149): unsure at all Xaa locations
  Clone ID: MRT4577_13510C.1.pep
MEAYAAMASPPTKAMAMGVDKLSYEIFSLLESEFLFGAGSGCLSPGPCTPARALLGGGRVRVLAIDGCGADAEDALLAAAALARLEAGLRDHAGDPDARVADFFDLAAGAGAGGVLAAMLCLRGADGRPAYTXDEVLAFVAGSVXGKHG

SEQ ID NO: 223158 - protein, 129 aa, Zea mays
  unsure (1)..(129): unsure at all Xaa locations
  Clone ID: MRT4577_135110C.1.pep
PSRAHPYDNGQXSVCHTIFVWSKTPXXLQLDLSFILTTANMADNHDPFKKLDPTSLIQNKFTPLRKVKHTPHPNYAYYNNLHATLKNHNLHPITHIQDVTHFKTNDHIIHLTTPKLHTSYPSNTNPIYY

SEQ ID NO: 223159 - protein, 75 aa, Zea mays
  Clone ID: MRT4577_135111C.1.pep
DPLADPLADPLVPHPLGAGGRSLPSPPPRAYRSRRSCRIHMPEEEEENAQVKKTSLFIAVPSQLHITVFVWNLKF

SEQ ID NO: 223160 - protein, 86 aa, Zea mays
  Clone ID: MRT4577_135112C.1.pep
MVLVIERTAQEGQEPEDSGPAAEVWTVQRPVYYVSEVLHEAKTRKLRHYFQTHRVVVFTSFPLRAILHNSNATGNIAKWATELAEF

SEQ ID NO: 223161 - protein, 70 aa, Zea mays
  Clone ID: MRT4577_135113C.1.pep
MGGFVMTHMTSAYFKRILVIFKRMRAVKTDYRARIRLINQDKNKYNILIYRFVVRFTNKDITARIISGSI

SEQ ID NO: 223162 - protein, 208 aa, Zea mays
  Clone ID: MRT4577_135114C.1.pep
GIQHTILLFSLTRETQLYQLPNNHQANCIKKMPSNSLNYPLLAIPAYYVFSLIPHGYAGSLLSSNGYKVNNANPKASLSPDAVKGKVPDAIFQKYQRAENAQSNNMEQLPLFATAVLASIVAERTTAVGLGREVVSGDATGLTTFVAAWFAVRTAYVVSYVQIADHATSFVRSSFWAVGSGLAVYQIYKAAALLGKGGFAWIRVRIMV

SEQ ID NO: 223163 - protein, 267 aa, Zea mays
  unsure (1)..(267): unsure at all Xaa locations
  Clone ID: MRT4577_135115C.1.pep
DADGHGAHGGHLLRLFEVVLIGSIDLAPCLADHGEAIKEDTGHDPSDDGAHEPFSRKLLEDKPRITEEMVRGYMSNTELETAVHAFGSRCSNISRVYSIKXTLANTSGYSXWVIEISDKPKQRESEPAFKFIGNVHGDEPVAREVLMHLANWLCDNYLKDSLATLIVENMHLHILPTMNPDGFALRWHGNANNIDLNRDFPDQXQPETRAIMNWVKQEHFTTSASLHGGALVANYPWDGTRDTRSVGIYHFANLHQQQNMYMAKTNH

SEQ ID NO: 223164 - protein, 130 aa, Zea mays
  Clone ID: MRT4577_135116C.1.pep
LGTSRPAGTHLPTNTMLRRLVDANVAVHSPLPPPICRLLHYCTSRGDCTSSDAETVTIPHRSIAAEPLYQIERTGSPDILVQSHLPPRRYGYCDLHYFSSKLYCEHLILRHPLRRHAHYELVHHNCDICS

SEQ ID NO: 223165 - protein, 136 aa, Zea mays
  Clone ID: MRT4577_135117C.1.pep
LSPLVFRAQYDFVSHCNILNNDFTSYNKHYYGCPDDKTFQHMASVYSRSHYNMSLSKEFEGGITNGAFWYPIYGGMQDWNYIHGGCFELTLEISDTKWPKADELPIIWEHSRMSMLNLLASLIKAIERRGTPCHLQ

SEQ ID NO: 223166 - protein, 106 aa, Zea mays
  Clone ID: MRT4577_135118C.1.pep
RKKRMPSQREQYESTVHLFIGAGHNPYKIIFMPFTVDNNSIVICRGLNSLFIFKSVSLSAVTPKLSYSHLRRCTNLRIILVYCDADLSPKIPVHILYSRNTVKSCF

SEQ ID NO: 223167 - protein, 76 aa, Zea mays
  Clone ID: MRT4577_135119C.1.pep
DVNHAVLAVGYGVEDGVPYWLIKNSWGADWGDDGYFKMEMGKNMCGEYSIHFLATIKNEKRSCVFRYGALALVTRY

SEQ ID NO: 223168 - protein, 88 aa, Zea mays
  unsure (1)..(88): unsure at all Xaa locations
  Clone ID: MRT4577_13511C.1.pep
RLYLGLLETQKKLCMGGTTXPLTRLINIFKGRHRLHNKGTKLKYQHWRREQPYNTLTLRCRGAPTYLYKGLRRTGPFCGQPVAPQNIN

SEQ ID NO: 223169 - protein, 106 aa, Zea mays
  Clone ID: MRT4577_135120C.1.pep
MASYRPYAPPPPQGGYPPQMNPYTPPPPQAPYNRMPAPPYHAGPPPPPPPGPPPPHQPQFNFGPGPPQQHPPPPMYYQPPPPPYGGNSNPPPPPPSAPPPAPCPPP

SEQ ID NO: 223170 - protein, 78 aa, Zea mays
  unsure (1)..(78): unsure at all Xaa locations
  Clone ID: MRT4577_135121C.1.pep
GLWTEHALCAYWLAEDRDHHVLQIRRASYHNVIRVSGVGKLLVISQARSCVINXARXVLVNGRAQARSRKGVTNTCQI

SEQ ID NO: 223171 - protein, 221 aa, Zea mays
  unsure (1)..(221): unsure at all Xaa locations
  Clone ID: MRT4577_135122C.1.pep
QRYKRALSREEVEVHDVGKEMELDLIKQYSQVERIFADRVSKADGDDLVPEYLVKWQGLPYAESTXKXETDIDFAQDAIDEYKAREAASDILGKTVDFQRKKSKASLRRLDGQPEWLKAGKLRDYQLEGLNFLVNGWRNDTNVILADEMGLGKTIQSVSMLGFLHNAQEINGPFLVVVPLSTLSNWAKEFRKWLPNMNVVVYVGNRASRKMCQQHEFFSDK

SEQ ID NO: 223172 - protein, 88 aa, Zea mays
  Clone ID: MRT4577_135123C.1.pep
GRVSVAFEVITGFRLYKSGVYTSDHCGTTPMDVNHAVLAVGYGVEDGVPYWLIKNSWGADWGDEGCFKMEMGKNMCGVATCASYPIVA

SEQ ID NO: 223173 - protein, 411 aa, Zea mays
  Clone ID: MRT4577_135124C.1.pep
HKPAISIGKSVNHFPLWVIEISDKPRQRESEPAFKFIGNVHGDEPVGREVLMHLANWLCDNYLKDSLATLIVENMHLHILPTMNPDGFALRWRGNANNIDLNRDFPDQFFPVNNDIDYRQPETRAIMNWVKQEHFTASASLHGGALVANYPWDGTRDTSKHYYGCPDDKTFQHMASVYSRSHYNMSLSKEFEGVITNGAFWYPIYGGMQDWNYIHGGCFELTLEISDTKWPKADELPIIWEHNRMSMLNLLASLIKSGVHGRIFAADTGRPVPGSVMIKGIDSKVSASSTFGDYHRIVAPGETYEVVASMRGFRQKSTRIRLEQEAVSLDFILDPDGADGQTKLLPRSNDRGCRCDNDNAAKPFHVHEAHLWLYLLIVSVLLALYVVFKRKTVPRLLAYRHSSSLRRPVAV

SEQ ID NO: 223174 - protein, 53 aa, Zea mays
  unsure (1)..(53): unsure at all Xaa locations
  Clone ID: MRT4577_135125C.1.pep
LQGCCGGLHFSDVVTLDVETMAWSALATTGQRPXTRDSHGAALVGHXRMLVVG

SEQ ID NO: 223175 - protein, 73 aa, Zea mays
  Clone ID: MRT4577_135126C.1.pep
FYPIFNQSRLRSFFRFDQLAGLSKVTNTHVSRALNFGVLGYIVRSLDPSSLAGLDPRPKAWLKTERDRRIDEY

SEQ ID NO: 223176 - protein, 78 aa, Zea mays
  Clone ID: MRT4577_135127C.1.pep
EGRNPDADREWLGTKEKQPFRTAPLTALMMRDKNKPMILIDTAQQQEASPGVTALLDRYQEHGRSENGAGDVVDTSPR

SEQ ID NO: 223177 - protein, 147 aa, Zea mays
  Clone ID: MRT4577_135128C.1.pep
MVRVRAVTVFSCLLAPAVRTRPELSVSSLRDAVILTAHRGVRVGGGSACLPQGARGRGRQCLRRRLTGGGLPDMINASSPRGCGTIDFRDFLNLMARKMKDTDSEEELKEAFRVFDKDQNGFILAAELRHVMTNLGEKLTDEDGDEM

SEQ ID NO: 223178 - protein, 72 aa, Zea mays
  Clone ID: MRT4577_135129C.1.pep
EADALTLKLNEAIPEEFKSLIEVLNRNEDYGRVLVAKRDIQPGEVVLIEKPLLHITTDLEQPNLVPVVIAFQ

SEQ ID NO: 223179 - protein, 74 aa, Zea mays
  unsure (1)..(74): unsure at all Xaa locations
  Clone ID: MRT4577_13512C.1.pep
LKKPTNPGRGREELRGXPPREKKPSSSQPFKTLGRGQRFSPPNSKXGHLEMRDSRVXSXLXXXTPXPPPPNCCI

SEQ ID NO: 223180 - protein, 30 aa, Zea mays
  Clone ID: MRT4577_135130C.1.pep
HFLVMVYAHSILALASMTGPKLVCEKHSRL

SEQ ID NO: 223181 - protein, 195 aa, Zea mays
  unsure (1)..(195): unsure at all Xaa locations
  Clone ID: MRT4577_135131C.1.pep
PILSGSYNPGAGTATKRSGHSLGDADLKGKNVFALRRPLRLLVDXDHKITDDTAIHAFDRTIKGLLENASKGILASHLRRAQGITPYYRLNPVVSRLTELLAAEVAIANDRIAEEVEKLAAVFSEGGVLLLDNGRFYKEEEKNEPECAKKLPSVDDLYVNDAFXGTLHRVHASTVXVTKRLKPAVDDSLMHQELD

SEQ ID NO: 223182 - protein, 351 aa, Zea mays
  Clone ID: MRT4577_135132C.1.pep
MDDITTTATGPIAPAAVSSELAHGGAPWSHAVAPSALPTTDSPLVDTLATIQAAVTASRERERAASLALERERVLGAALTTQMATTQRLLGRLPAALVEPPEDPLASDLDADLIAALHAQAAGLHNIRALVSVVLDPASSHYPRWRGQVLLTLRRFVLDDHVLVDHDAPTPRSWCLMDSVVLSWLHDTITVELQDIIRDQADTARQAWLALEDQFLGNRDARALHLDAQFHLFSQGDLTVGEYCRQMKGLTDSLRDLGEPVTDRTLVLNLLNDVLVAPHITHNLLSVRRFTTDNSCSIEFDPSGFSVKDLATRTLLARCDSSGPLYTLQPSTAGVSPPPVLVSTTSSTTWH

SEQ ID NO: 223183 - protein, 108 aa, Zea mays
  Clone ID: MRT4577_135133C.1.pep
LACWGFILFGVLFLFFFFFFSWPKNWDGIKIKFFFVHFRLKNHSRTPQEGGKGQPVLTGRSRVQPQPFEYFAVKVWALKIPFPKPGKGGEAFRFGPPFIRQKTYRTCP

SEQ ID NO: 223184 - protein, 442 aa, Zea mays
  Clone ID: MRT4577_135134C.1.pep
MADLPPDAHTAGLAHPASLATGIASLGLHAAGQTHPMSPGRSVADAEAPYIVVLRPLRDVSSPAHRRGSPPGFPALAAPPGTDSTLGDTLASIQAAVMASRERERAASLALERERALGAALTTQMATTQRLLAARRSPLDADLIAALHAQAAGLHNIRALVSVVLDPASPHYPRWRGQVLLTLRRFVLDDHVLINHDAPPPRSWCLMDNVVLSWLHDTITVELQDIIRDQADTARQAWLALEDQFLGNRDARALHLDAQFHLFSQGDLSVGEYCRQMKGLADSLCDLGEPVADRTLVLNLPRGLSPRYGHLKALIKRSVPFPTFHAVQNELLLEELTMANEAPTPASALYSTPTSGLNDVLVAPHITHNLLSVRRFTTDNSCSIEFDPSIFSMKDLATRTLLARCDSSGPLYTLQPSTAGVSPPPVLVSTTSSTTWHRRLGH

SEQ ID NO: 223185 - protein, 57 aa, Zea mays
  Clone ID: MRT4577_135135C.1.pep
TCHGIGEGVRCSSRNKRTLHSMSSFCQKVKQVNVYDFGHSGRKLQLANNGTMIRSLV

SEQ ID NO: 223186 - protein, 107 aa, Zea mays
  unsure (1)..(107): unsure at all Xaa locations
  Clone ID: MRT4577_135136C.1.pep
MLPCFLENRDPRVISVGHDRGWTTQQLPPAAPSPPLRSAASPPMEGPPTSPALXPLPAVSPLXPCAADLRRAFPPSLHPPGATPSRPQRSPTPPPRSSTPSLRSRPL

SEQ ID NO: 223187 - protein, 257 aa, Zea mays
  unsure (1)..(257): unsure at all Xaa locations
  Clone ID: MRT4577_135137C.1.pep
MDRLPFIFLPCKMRLLLGLLLLPLTSPEIGDEDSDIYYQDGSYXPRPYXDHTSAGCCKPXTTGDSPARDFYITGFPVLSATTDPAXTGCNEQEPYDPNLITGIQRLNQQWSNIRRPNNHGXADWKNLXKNDGDCSDLIEIDYFETALSFRRTIXPLVLLQAKGIEPDFILYSLYGIPXAFKRGINAXTRFIQRSTGYPFDKHMLLQLDICAAXISTIINCPATQXDTCSXVILFHPXQKWMLKQQLXQDDXPFQLPG

SEQ ID NO: 223188 - protein, 93 aa, Zea mays
  unsure (1)..(93): unsure at all Xaa locations
  Clone ID: MRT4577_135138C.1.pep
PTARVAWGFAVRDTXPLNDPLPVDXEMXALVARRGLTGRQSKMPRAWSSSLDAGGXXLXXTPXPVSXXWGDDGXEGAXXRRRAPGCQXTAGXS

SEQ ID NO: 223189 - protein, 109 aa, Zea mays
  Clone ID: MRT4577_135139C.1.pep
TRHDLVVGVLPPEHWGRDADPGPTCGFTTASSSIAPLPLDIPCGTRPRGTACTTTSRRPTSETSPIITILPWGAYFLHCVPWQGVKSQRRQSRDRRIPAPASREPIPYR

SEQ ID NO: 223190 - protein, 38 aa, Zea mays
  Clone ID: MRT4577_13513C.1.pep
KQLLNTQHFYDTYISYLIEKTSRIYSPKTPLFFTTPLW

SEQ ID NO: 223191 - protein, 73 aa, Zea mays
  Clone ID: MRT4577_135140C.1.pep
VPEIAQSHIDVALPFRSNPMLFLVIDSIGLLKRSEEISNAATNLHGQDKNNSYKLDRIHGRTDVKSSGGTQFC

SEQ ID NO: 223192 - protein, 52 aa, Zea mays
  Clone ID: MRT4577_135141C.1.pep
DGTRRRRCIQSRSGIVRFPRFVQQNAAALLYLTETHLHCQTKSGMVALALDL

SEQ ID NO: 223193 - protein, 142 aa, Zea mays
  unsure (1)..(142): unsure at all Xaa locations
  Clone ID: MRT4577_135142C.1.pep
PDLGVNWSKTTSIYPCGAGVKKQSCFLKXXXXXXXXXXXXGIXXXKKKKKKKEGRPFWGFPGFPPRACHVLIFFFGPPNFISLAGVFHLRAGETPGVPHFFSLWGPFPFFPRLGFFPERAPPRSALSHLLAPPFLALWDPPP

SEQ ID NO: 223194 - protein, 79 aa, Zea mays
  Clone ID: MRT4577_135143C.1.pep
LTKTGLHLLCRPKFFCFSKSSHSNLQVFLSEKHLCPIKYGVEHGVFFPHPFRNQIFSSKSRLFVRPNDILVFWKFFSPF

SEQ ID NO: 223195 - protein, 105 aa, Zea mays
  Clone ID: MRT4577_135144C.1.pep
ICAVEKEKEMAHGKPMRWSLGKNPAGSVCARPTATKTVVTRVSSPDSPCEQIFQYLTRCRVYGVCDVVSHSQKLAVTSSIPKNLEDAYRDRINVCAFLKMSICTL

SEQ ID NO: 223196 - protein, 69 aa, Zea mays
  Clone ID: MRT4577_135145C.1.pep
LPMLSRALVKNMEQPKKPPAGIIYQKKYKQLNFVKVVPVGHGERSKPDNLIPVDIKEGDIVLCLKNDGS

SEQ ID NO: 223197 - protein, 177 aa, Zea mays
  Clone ID: MRT4577_135146C.1.pep
RGTPAHAESPCAFDTAGEAICWEIVYCVKGGPEKDLNAILSLEKRECVCAHKISFVFYKKGDPLYPSVTGVLVFVSSPDPIGDKCYFGRAPLQYMSRQFYTANGPGGYNRDSVFSMERALARFTLEYVLLIELPSEVRRVLHRTKEPKISGANVPMISRAPFVPLCAFPKGPVVVSR

SEQ ID NO: 223198 - protein, 224 aa, Zea mays
  unsure (1)..(224): unsure at all Xaa locations
  Clone ID: MRT4577_135147C.1.pep
MPQEASKVSDPDADTKVAAEAVAESSKQAEAESANESGDEETGTAEGAEGAAGKKKKSKKNKIKDALSGKGKAGEVTDLNAPAGGILPKEAMNMLLANNPALANELQGKANNKDDLQKLLQALNLNEMLTGLAPQGSQKDMASHAFWKTQPVPSFDEMANKDNIKDGPIKEIDIEKVDKNPSPMYPGFEWVTMDLXTEKQLEEVYELLTNHYXEDKDATFRFNT

SEQ ID NO: 223199 - protein, 79 aa, Zea mays
  Clone ID: MRT4577_135148C.1.pep
SSLCLNMMTTLTAMYMGMSLHHPHMVNNIPTDGGQFIACCSSSSKHSLNLFCSNEFVMSQAYLPPIALHKCIWNRMKYS

SEQ ID NO: 223200 - protein, 84 aa, Zea mays
  Clone ID: MRT4577_135149C.1.pep
SLNPYALFPTTLEPYPLVPYCADTLSFPFFTYQSCAEPHSLSAFSLLLNVGQLFGALLPTAHRPGSATPSVRAPQHDRYVPTKA

SEQ ID NO: 223201 - protein, 63 aa, Zea mays
  Clone ID: MRT4577_13514C.1.pep
MGGGRFQHATLKGPSVVKEILIELTLVLIVEGLWKIHHWTRQRKTRSFYNMLDRGQISVFVKE

SEQ ID NO: 223202 - protein, 60 aa, Zea mays
  Clone ID: MRT4577_135150C.1.pep
DDIFAQNPRELYHLQNPKFFNFGSSLARSLGHRNHHWRCSAGRRHYYIRGRYQVTGYASR

SEQ ID NO: 223203 - protein, 55 aa, Zea mays
  unsure (1)..(55): unsure at all Xaa locations
  Clone ID: MRT4577_135151C.1.pep
MFGFGHHGHHGQNPPAHGGVHQPTFKIFCKADEGYXLTVRDENVVLAPGNTCDEH

SEQ ID NO: 223204 - protein, 128 aa, Zea mays
  Clone ID: MRT4577_135152C.1.pep
PISLNQHMGFCSLMLFTSPRGIAIELVMEPASCLRVLDLNKTAVDAIPKFIGNLAHLTYLNLDGAHVTYIPSFIGFVINSQTLSLHGFQNLQRLSMSIMALIELRCLCVYRTYLSHAPKGDVLSTHPN

SEQ ID NO: 223205 - protein, 125 aa, Zea mays
  Clone ID: MRT4577_135153C.1.pep
GARFRGKVILRTLSPMSHFEGGAFDAGGDCPRTRPFRADETAPMGGLELEFYTSQLEEFREAKGLDVVLMDPPAAMLMRPDGPPSRYGHWPDEKRTLYNDCIPWCLPGPIDAWNDMLLHMLSHSS

SEQ ID NO: 223206 - protein, 68 aa, Zea mays
  Clone ID: MRT4577_135154C.1.pep
VVTRSEFYYHYSRKLQATFVAEGSLVLTHLTLFCLVRLHMVELKSSSAQTDLHAVVDLDEFVHVISFN

SEQ ID NO: 223207 - protein, 234 aa, Zea mays
  Clone ID: MRT4577_135155C.1.pep
MEKQEVQLTEDSLRRMLVAFCEQTEGQKLLEDLPVQAMLETLTKRYEKELIHPIQNLFSGELARAMLIQIQKLKLDLESGLLEMDQILRANAINFAVLAALPAFGLSLLLLVLLRAWVQRDHGAEGRGNIARCQRRLLLVDVERRLMEFQHYRDNGMEEEARCKFGLVLYTLDRLCKAVESHAKETGEWLSLRQDIFDLSKLDMGMPDKMIVVSRLKWMYNCLLPFSSSRLPRL

SEQ ID NO: 223208 - protein, 74 aa, Zea mays
  unsure (1)..(74): unsure at all Xaa locations
  Clone ID: MRT4577_135156C.1.pep
MDCGPPDQLPPSSAPACFLNLNWDQSMAAATAGDHLDLVSSPASNSTFXDGLALHGISPHPQYGGTPLSSPRKL

SEQ ID NO: 223209 - protein, 71 aa, Zea mays
  Clone ID: MRT4577_135157C.1.pep
SPPRSFLAPCGAGAALGLSLSVLSAPLCVLPPRLRSRLGLARVGLLFYIGRPGRRVVRLAVAAPAGLVCWA

SEQ ID NO: 223210 - protein, 147 aa, Zea mays
  Clone ID: MRT4577_135158C.1.pep
MDCGPPDQLPPSSAPACFLNLNWDQSMAAATAGDHLDLVSSPASNSTAADGLALHGISPQPQYGGTPLSSPRKLNLSMMGQFHHYPPMGHLDQFLADPGFAARAARLSGFDGRPGGSGYGGAVPGQFGLPDAGPIGGALRELELGNG

SEQ ID NO: 223211 - protein, 113 aa, Zea mays
  Clone ID: MRT4577_135159C.1.pep
FSGGTGPPPRWVGSEIYPLRLGAQALPPGFALTRMARGPVAIFFLSISRPVTVGGAFPAFPPVSALWVGFVPLWGPETSGKTLEEINSLFGGAGFSVPPGGPAKVEFGPPERF

SEQ ID NO: 223212 - protein, 497 aa, Zea mays
  Clone ID: MRT4577_13515C.1.pep
MWKQFIGKLSWKSMKSSSGSGGSPPAPLSSPRENGASPRENGATGKPNVSPRSPAAGAGAGAEVRSREDAFVQKVNICCAVYDFSDRGKDSPEKERKRQMLMSLVDCIGAAEEPLTETMIAACVRMFAANLFRVFPPKVRSGTSASETEEDEPFFDPSWYHLQVVYEFLLRFVTSPLVDAKVARKYVDSPFVSKLLDLFDSDDPRERDCLKTILHRIYGKFMGNRPFIRKAVSNIFYRFVFETDHHNGIAELLEVFGSVISGFAKPLKEEHKLFLWKALIPLHKPKSMGVYLPQLTYCITQFIDKEPKLAGTVIRGLLKYWPVTNSQKEMMFLGELEEVLELTDMAEFQKCMVPLFRKIASCLNSSHFQVAERALFLWNNEHLFDMISQNRQVILPIIYPALERNTRWHWNQSVLNVTMNVRKMFRDMDERLLQACHDNFQEEEEKRAVTEERRRLMWEQLERSAARGYHQPPAIAADASSFPAPSSSARLVSLTVT

SEQ ID NO: 223213 - protein, 210 aa, Zea mays
  Clone ID: MRT4577_135160C.1.pep
NSARGDEVALGGEHVRYGYRDVHQDVDSFETELVESLATFIKLDALFRCSDAAGDQQRDSSYYERENALTVIGSNPLRRHLALGYDDSHSHDDGASSAGSDRVDGIELAAAAPAPAVVKKQVRFAVAPPRSPGVDETVLEELHELCEAREAGTAFILGHSHVKTKPGSSILKRLAVGVGYNFLRRNCRGPDVVLRVPPASLLEVGMVYVL

SEQ ID NO: 223214 - protein, 95 aa, Zea mays
  Clone ID: MRT4577_135161C.1.pep
TARGGRFAIDLTTAGSPGRGNGELNRHALWPPGGFVMSAAVQGEGRRGRPSVEIGVAHVGCAEDAAAFVALAAAVDLSMDACRLFSCKLRRELSA

SEQ ID NO: 223215 - protein, 91 aa, Zea mays
  Clone ID: MRT4577_135162C.1.pep
PSSIRHWTLHMILTAELQVMTILRFTAWSWPGAVGVCITSMWSMPILSSYCLLHSATLLPPCSTSRPITTASSSPCICLCFVLGMSPTPLQ

SEQ ID NO: 223216 - protein, 77 aa, Zea mays
  Clone ID: MRT4577_135163C.1.pep
MICRESLFLWLDLFSPLSLFGLGVNPFRTMRSYYGVCWSCAYSRAVIQARSFCLPRAPGLAFCHKAIITPNMTIKNN

SEQ ID NO: 223217 - protein, 213 aa, Zea mays
  Clone ID: MRT4577_135164C.1.pep
SIDKLLVIAYLYKNIFLICGCQVGLAPQTFVCCICNCSLSKEGAISAVRLFSCGHATHLQCESEQTRSSNQESKEGCPVCLSMSDTQARSKSPMFENGLMKYSGAEHEVSHGMYQIHEVDHAERSRGLQQMSRYEILNNLQKAQKSFHIETVPPLKLAPPAIYHEKIQKRTTSVGETSKHSVRSQKPQKIWQMKEKKSKEAGSHHPQKSSFLR

SEQ ID NO: 223218 - protein, 73 aa, Zea mays
  Clone ID: MRT4577_135165C.1.pep
ILCALYPESPLVTTLIYSPGRRVLRTSKRPEPVNLVHCPSCDPHEPFCYSRRHRPTPKNTLRGNPGCAVGPKT

SEQ ID NO: 223219 - protein, 78 aa, Zea mays
  Clone ID: MRT4577_135166C.1.pep
IGTSSRPATGQARGERSRAPRLLVAAEGIISTIRAGPASAGAAVDDGLCARAMVAAARVVSGVKAEGLLRGACAALAA

SEQ ID NO: 223220 - protein, 119 aa, Zea mays
  Clone ID: MRT4577_135167C.1.pep
RETKATRLGSSTRASERAAHLSGKRRRGLDRSRRRTPPWRRLAAAQEGRFSVPEAAPFTAVLKYAAEEFKVPPQTSAIITNDGIGINPQQSAGNVFLKHGSELRLIPRDRVGAVVMSSG

SEQ ID NO: 223221 - protein, 98 aa, Zea mays
  Clone ID: MRT4577_135168C.1.pep
MAAAGGGAGGKVSFKIILTSDPKLPFKVFSVPEAAPFTAVLKYAAEEFKVPPQTSAIITNDGIGINPQQSAGNVFLKHGSELRLIPRDRVGAVVMSSG

SEQ ID NO: 223222 - protein, 67 aa, Zea mays
  unsure (1)..(67): unsure at all Xaa locations
  Clone ID: MRT4577_135169C.1.pep
VVLDSTTHYSESYDASSFATAFFSLSYLFTXFFTPRPGIHGWWIRYYWVCPLAWTMSGLIVTQFGHL

SEQ ID NO: 223223 - protein, 131 aa, Zea mays
  Clone ID: MRT4577_13516C.1.pep
LSLALVQVLPVPVHLNGGVRATTVGSQVSSGVGSAIRRLLVLVCAVLQCMTGGYDAIAMLLHGGTTKVVSSAIPSRVSSSVSLLVVVSVLLFANDRESAEPGPVSIFMVVSVVLPEVGPTQGVVSTVTRTC

SEQ ID NO: 223224 - protein, 116 aa, Zea mays
  unsure (1)..(116): unsure at all Xaa locations
  Clone ID: MRT4577_135171C.1.pep
EGGTCCPGDLGVERSRVRPINDRYQXRRIDRCVTYINMVCETLRNTIXKAVVHCQVKEAKRNLLNRFYAHVGSKEKKQLSAMLDEDPALMEKRDALVKRLELYKSARNEIDSVAWK

SEQ ID NO: 223225 - protein, 396 aa, Zea mays
  unsure (1)..(396): unsure at all Xaa locations
  Clone ID: MRT4577_135172C.1.pep
EKRFAAVESELNSSIGFDQRSARASHPAPPRPLATAMASPYSLSWADAPPYHYHGRPQPAPDSPASSDGAGPRSLWIGGLLPWMDEDYLYGCFTTSRELLSLVIKRNKQTGQSEGFGFLKFSDHTAAAHILKSYNGQKMPNAVQDFKLNWATQQPAPKKLPDPDFKLDLATQQERHAAVDSSSDHSIFVGDLAYNVTGYMLHHVFKARYPSVKSAKIIFDKFTGLSKCYGFVQFGDVDEQIQALTEMNGAYCSTRPMRIGPVPKKKSIXFRSKQWTESYHDANNSRLFVGQLDQSVTSEDLMQAFSPYGELVDVKALPGKGCGFVTYSNRASAEEAIRMLNGSQLGGKAIKLSWGYPSADKQAQRNSGGGFGRDCFVWSPQYPYAYAQTCQPGYGY

SEQ ID NO: 223226 - protein, 49 aa, Zea mays
  Clone ID: MRT4577_135173C.1.pep
LRRAQSSSDTPYLHSNAFTNNLDHTNLLINGFSTTLYNHYCESTITIVL

SEQ ID NO: 223227 - protein, 137 aa, Zea mays
  Clone ID: MRT4577_135174C.1.pep
TPGKYAYNEQTRQTITESGPDGAVVLGTPVAPPVNGDMYTDISPENAVLQGQRRLSKGVDYLVEASAAEAEAISATLAAVKATQVNGEMEQLPDKEQSPDSTSTSKHSSLIKLDTALSNNLAAPPGVRLHHRAVVVA

SEQ ID NO: 223228 - protein, 103 aa, Zea mays
  Clone ID: MRT4577_135175C.1.pep
TDHVTYEASEGLRYVARSRNGNFQLCGNGALQEHHHFLLMKARCHESGVQGRPPPKTVRRRDCDHRARWTVGGSSVSLAASESPPTGRYLSGCRRRWLRLYPS

SEQ ID NO: 223229 - protein, 77 aa, Zea mays
  Clone ID: MRT4577_135176C.1.pep
IVERSRSSGAVLEDVESHLIRAGAMNLSLNTAQLCLARDLGAGGYHHAPVVCRIKKSGQQACPVYVTVPDERLDQVV

SEQ ID NO: 223230 - protein, 64 aa, Zea mays
  Clone ID: MRT4577_135177C.1.pep
GQLVRLHWPRRRGQPRRAGRSVVDGVSTTGASSVATTVRVWTSAVAMGTDEKVDDYATEWLATS

SEQ ID NO: 223231 - protein, 96 aa, Zea mays
  Clone ID: MRT4577_135178C.1.pep
VHLLVSRQPPPVGMHEENDQDLAWLLMLVILVLDRQHINKRHDGQLMEIVHQSERVGHSTYDALFYAVPKYKQMTRLIFSKWLTINSSFASRAITD

SEQ ID NO: 223232 - protein, 221 aa, Zea mays
  Clone ID: MRT4577_135179C.1.pep
AAGTSDLPFAFPKYTFPSALALHRRPSSAEQENRAVSPRCFRSMEFARRGRGDEDIDDMHRFIDLPPPHVDPLLVIREALLSQLQKDRLRQEIIQVELAKIERAMVLCKCNSSHHGIAADDVEWTRPAPFTFREQSMRPWRWSVSQECYVDVDEVHDRKQKEGRHRSVVLKSEKPAMEDGECLRPCCNGKASQANSKVEDQKSQESSEVGALSFLFFTLAR

SEQ ID NO: 223233 - protein, 62 aa, Zea mays
  Clone ID: MRT4577_13517C.1.pep
FPFKKGGTNRKLINISFLHHLAPQFFPLILPVGIFFEVVNAYRFHPESIYHHDFLDFLYHSL

SEQ ID NO: 223234 - protein, 97 aa, Zea mays
  Clone ID: MRT4577_135180C.1.pep
ETIVGPTVIGSHHRSTNAVRTSFGPRTHEELDGKKLDIIALQTDSYEKKNVKSQRNLGPTRPNGDLSVRDTYYPKKTLTGNNVNPQGALNPRALVSS

SEQ ID NO: 223235 - protein, 87 aa, Zea mays
  Clone ID: MRT4577_135181C.1.pep
SFLFKQGSLKRVGLAKKNTPPKKQNRCCQGLTVRLSGENSRGLKLWRRKHQGGQKIGGGFLLSTPPVLKFEHPQTPQGGGARSKKPF

SEQ ID NO: 223236 - protein, 86 aa, Zea mays
  Clone ID: MRT4577_135182C.1.pep
LSDRSHSLKILNTGGATDKQLKVRGRHKGAIRSGAGQLLVRTHVKVQLAGMNARHWGAPALPTNFDDNVWSYDVCRLMLKLHTLLG

SEQ ID NO: 223237 - protein, 164 aa, Zea mays
  Clone ID: MRT4577_135183C.1.pep
TYFFYNIYTFLIVEPAEGPGKARPGHGGTHTLPEREATERKGKTRAKEETTKKWGRPTIPPKKTPRNKKGKRGGPKGGGKKKKKPWGKRAGKKREKTTGQTHKKNGQKTGKGGTGKRPQGESPLNNLNCKHRRDLNQTPRKKVNEKGHTGWPHKGKTQMDEGKR

SEQ ID NO: 223238 - protein, 82 aa, Zea mays
  unsure (1)..(82): unsure at all Xaa locations
  Clone ID: MRT4577_135184C.1.pep
NWNLTHEISALSAVRSRNGMYPGIELHILAGDGDLDIANIDDKVIVNIGSRYDVGNXITSDFDAVAHGNNYCVWETHGRTVR

SEQ ID NO: 223239 - protein, 57 aa, Zea mays
  Clone ID: MRT4577_135185C.1.pep
HGTSISLVDHRAAQNVHSLAKADSLFYASVIEKEERNTCQLDSRHSLSAPSRSARVV

SEQ ID NO: 223240 - protein, 119 aa, Zea mays
  Clone ID: MRT4577_135186C.1.pep
MTARYNGPNHTWASELDEAAWWDDDVAGLRLVPVKAKGVPARFVSVGPATAAKASSEGWRLCLRPNSIDRKDETCKAPKKEKQSMVNWVRHYPQTRIEKGLKGYVRSKHEGKGIDVARV

SEQ ID NO: 223241 - protein, 488 aa, Zea mays
  unsure (1)..(488): unsure at all Xaa locations
  Clone ID: MRT4577_135187C.1.pep
MVQLPGSKKRHAEMATAATVKAEVEGLGCGDGSPHKHVKPMPQPPPQPPPPEDLPFDVLDGPSPLGLRLRKSRSLVDLIQCKLFQDKSAHEQFDGHNNISDTPMKKEVRSGAPTAGERMKASNFPANVLRIGSWEYISHYEGDLVAKCYFAKHKLVWEVLHNGLKSKIEIQWSDIIALKATCPENEQEGVLDLVLARPPLFFKETDPQPRKHTLWQAASDFTDGQASSKRRHILRCPSSLLSRNFEKLIQCDQRLRELSQQPAAILQNPGFEPKRSIFQNPNESKDCLDIGGLKFEHNKATXPSSLLPSQHVSFHHCPIMXRPINIGFGAGHFGGNVPEESKNCNQWNQLIVPGLEALQGDERSAGGPPLTTNDAISKKAWEDLVQHLFSDTPSLPALDDNNLTSRVDSLYSLLEXKTQLHPPCATLNAVVMVGTSAQSXDSDGFKGRLDPSPPGISRNDSLDELLLNLPKIASIPQFLFNRTEDSDE

SEQ ID NO: 223242 - protein, 123 aa, Zea mays
  unsure (1)..(123): unsure at all Xaa locations
  Clone ID: MRT4577_135188C.1.pep
MKRNPRVTSSRRKCRKAHFTAPSSVRRVLMSATLSTEFRHKYNARSIPMRKDNEVQVARXTYKGREVHVQQVYRRHWVXIHDDRITXENVNVSTVNVFIHPSKVMVTNLTLDKDRKDAPRPKG

SEQ ID NO: 223243 - protein, 71 aa, Zea mays
  Clone ID: MRT4577_135189C.1.pep
LYMFSCRQHLLVVSLVDQLRVVRLVGQLSGRRTSCLRLATCGLLALRLLGRGLIVPLDSFRTGRPRALAQG

SEQ ID NO: 223244 - protein, 143 aa, Zea mays
  unsure (1)..(143): unsure at all Xaa locations
  Clone ID: MRT4577_13518C.1.pep
MXREAAXTKPPKLRRXLXSPEEDEKLXNXIIRYGXGCWSSXPKLAXXGGWXKSFFLRWINXLRPDXKRGSXXQPQQDPIXSXHKILGXRXXQIYPEPPLRTDNEIKNSWNSMIKKKLRQQGIXDLATHKPLNDDNVAAAAAAD

SEQ ID NO: 223245 - protein, 371 aa, Zea mays
  Clone ID: MRT4577_135190C.1.pep
MASSSVAADMELDRPNLEDYLPPDSLPQEAPRNLHLRDLLDISPVLTEAAGAIVDDSFTRCFKSNSPEPWNWNIYLFPLWCFGVVIRYGLLFPLRSLTLAIGWLAFFAAFFPVHFLLKGQDKLRSKIERKLVEMMCSVFVASWTGVIKYHGPRPSTRPHQVFVANHTSMIDFIILEQMTAFAVIMQKHPGWVGFIQKTILESVGCIWFNRNDLRDREVTARKLRDHVQQPDNNPLLIFPEGTCVNNQYTVMFKKGAFELGCAVCPIAIKYNKIFVDAFWNSKKQSFTMHLVRLMTSWAVVCDVWYLPPQYLREGETAIAFAERVRDMIAARAGLKKVPWDGYLKHNRPSPKHTEEKQRIFAESVLMRLEEK

SEQ ID NO: 223246 - protein, 339 aa, Zea mays
  unsure (1)..(339): unsure at all Xaa locations
  Clone ID: MRT4577_135191C.1.pep
GNGCFDETEIGCAFHRHVSYVITNEEVKMLMKKNYKFKWEMPAVGIPRSKWVGTGEKVQEACDDHLHDVKGKLRDHWQHTLSDHLNSRMNFYSLCNSYRDIMHCNKKPFYLKSNGPDSSTMDAYLMHALNHVHRTRDVVIRNDAKLRNDTERDITDDKTYLDQGFTRPKVLFLLPLKSFARRIVKRLIQLSPLPQKDSAMGQFKKEFGESDDEGIPEHSTKPADFDLLFAGDIDDHFVFGVKLTKKSIKLYSNFYSSDIIVASPLALKRKIDGGGHDKKDFDFLSSIEIVVVDHADVMSMQNWDHLEAVFEQLNQLPXKRHGTNVMRIKPWYLDQHAQY

SEQ ID NO: 223247 - protein, 49 aa, Zea mays
  Clone ID: MRT4577_135192C.1.pep
KLLVEFHITKTKWITRIKARRRLLLCLTEHNNDEIPPAVYYSGSDIYNI

SEQ ID NO: 223248 - protein, 508 aa, Zea mays
  unsure (1)..(508): unsure at all Xaa locations
  Clone ID: MRT4577_135193C.1.pep
MASSSVAPDMELDRPNLEDYLPPDSLPQEAPRNLHLRDLLDISPVLTEAAGAIVDDSFTRCFKSNSPEPWNWNIYLFPLWCFGVVIRYGILFPLRSLTLAIGWLAFFAXFFPVHFLLKGQDKLRSKIERKLVEMMCSVFVASWTGVIKYHGPRPSTRPHQVFVANHTSMIDFIILEQMTAFAVIMQKHPGSTHAXMKTILESVGCIWFNRNDLRDREVTARKXLSLNDKPIYYVVHFVQRITLXLRDHVQQPDKNPLLIFPEGTCVNNQYTVMFKKVNPTSIYSVICVCVGGYSYICFSTSVFLVAKQXLMPETRSXHSMAFNCIVADLLLFTMTMFFFIWCXXGAFELGCAVCPIAIKYNKIFVDAFWNSKKXNTNDETNLCHPHFSLVNMITSHEMFXQSFTMHLVRLMTSWAVVCDVWYLEPQYLREGETAIAFAEXTYIFNSFYFPRKADGTMSLWRDHNILFLVXNCFXRVRDMIAARAGLKKVPWDGYLKHNRPSPKHTEEK

SEQ ID NO: 223249 - protein, 65 aa, Zea mays
  Clone ID: MRT4577_135194C.1.pep
QSLQGQVIRSAPALTKLNASPILACTFVSFSSQGSNNDTTPHLQNITFSATTKRVRRQPTYMRNQ

SEQ ID NO: 223250 - protein, 87 aa, Zea mays
  unsure (1)..(87): unsure at all Xaa locations
  Clone ID: MRT4577_135195C.1.pep
MSCSCGSSCCCGSSCKRGKKYPDLEETSTAAQSTVILRVIXEKNASPDLVNASAETXEASHCCSCGRGCQCXDPCNMLITSIDDHVI

SEQ ID NO: 223251 - protein, 67 aa, Zea mays
  unsure (1)..(67): unsure at all Xaa locations
  Clone ID: MRT4577_135196C.1.pep
KQXXXAGKXRRTTGTQHRXEQRTERQKREQEGGEAXKXXRRRREEGGGXXXXXAXEQQGERQPEGQP

SEQ ID NO: 223252 - protein, 68 aa, Zea mays
  Clone ID: MRT4577_135197C.1.pep
MLAVFSGQVVEVPAELVAAGSRTPSPKTKASQLVGRFLAAFEPVVFVQLGDHGHLGYFHTNQALLSPK

SEQ ID NO: 223253 - protein, 46 aa, Zea mays
  Clone ID: MRT4577_135198C.1.pep
GPTIKGVQGFFFEPCIKNLGEKAPEVNFGYNTLKKLQRLFFCRLGN

SEQ ID NO: 223254 - protein, 90 aa, Zea mays
  Clone ID: MRT4577_135199C.1.pep
LIRVFPVLALLVKKRGCFTKILPGILPKFYRFKFPLPFRPPHLLERPFGGALFFIFPIGKRGISAKALKLGTPGVFPSLSFLKTRPGTPR

SEQ ID NO: 223255 - protein, 39 aa, Zea mays
  Clone ID: MRT4577_13519C.1.pep
LIIFIPTAFRQYEERKTLTVHVFIFAQHMLRGSWAYDVG

SEQ ID NO: 223256 - protein, 50 aa, Zea mays
  Clone ID: MRT4577_1351C.1.pep
TSFSTQHGIVIAIVVSNIIHSDPAISSTLAPASLWSYSVQDHQFNTTVSL

SEQ ID NO: 223257 - protein, 256 aa, Zea mays
  unsure (1)..(256): unsure at all Xaa locations
  Clone ID: MRT4577_135200C.1.pep
MSSTEMQMRFCRGSGETVDSFHASRYPSPSTEDPACLLPRRAPTPSYASTEDLGDLHDSLEEVDVVELDPHDQPARMVADPGQIAWHALDLKFPREESESDWSDWSEGDGRLIDGEEKDCPGNEVVDSDDDDDDDDDDNCNVQVVYEDKSPNTKIICPGKLYPESEAEEIELEWIESYCKQMGEYSELFDDILAREDHDDFTTLPPFPMKLLPPTTSLCFMDGGYCYHSLYKTHDTSTTASTLGYRTPQQMLQXFS

SEQ ID NO: 223258 - protein, 97 aa, Zea mays
  Clone ID: MRT4577_135201C.1.pep
INKLNRYKRMANVANTSDILYVMKMEEGATTELLNEAKRKKKRRKKQRASLGSSHESMSSWPSERTAGQGAASTTKKRSEQLAYRRGSGKGLVINKM

SEQ ID NO: 223259 - protein, 53 aa, Zea mays
  Clone ID: MRT4577_135202C.1.pep
EHRAARSWNESLQQVTRDCGHRPARSMNESQHSECRDLSLALSFCLLFPSRRR

SEQ ID NO: 223260 - protein, 85 aa, Zea mays
  Clone ID: MRT4577_135203C.1.pep
EGHASFLANQSCSHPRSAPSARLDEVTPADRRVVADVMKVHTGAGVCRPVASHLLDLSNHALTGRVTSDRGESTVSAIRRSRLTT

SEQ ID NO: 223261 - protein, 71 aa, Zea mays
  Clone ID: MRT4577_135204C.1.pep
GNPPPVRLSSPGQWFLRSGARCAGSQHLVGEGLGVYAIQQGSVAEVLSLGEEMESFDSICAGGPVYPGLSI

SEQ ID NO: 223262 - protein, 95 aa, Zea mays
  Clone ID: MRT4577_135205C.1.pep
LRPKSGLRTGLIVSMVVGSVALAAVIVILALLWRSRTWRGVFTCSRREFEAGGSLAFYSYAQMKKATRNFSDKLGEGGFGSVFRGTMAGPTAVAV

SEQ ID NO: 223263 - protein, 210 aa, Zea mays
  unsure (1)..(210): unsure at all Xaa locations
  Clone ID: MRT4577_135206C.1.pep
MACAGLLTVCLLGPPAPQQPRHSAPAAGHALFQDVFRRADKNDDGKLSFEEFQNYFADGVLSSAELRELFSGIDDHXTDNLETEKLCDYFSTHLGVYRPVLAALESLNRAVLTAMDTTKLEYEQASKVDQFVTRFLLRETVNQLQALQTSLEGASXTLEAQAHGQRLDEKTIKAQSRPCGXRRAGRRALRSISWSPSWSAGSSDTGVLAD

SEQ ID NO: 223264 - protein, 401 aa, Zea mays
  Clone ID: MRT4577_135207C.1.pep
REGDWVCPDASCGNVNFARRTECNKCGAPCPSGGGGSGGGGYNRSGGGGGGYNRGSGDYGSGGGGGFDRDGGDYNSGGRGGGGGGRGGYNQSGGSDRGFDDHRGGRGGSYGGRDQENQKGSEGGYNAGGYGQTPPQGPPSYGGPAGDYAAPTSSYGGNNAYGSESAVPPPNSYSGGPGSYPPSYGAPPPHQYGGAPGGQGGLPPTYAGGYGGQSMPGGGGSGGAPPPYRGGASGYTGSAGPEPAGKVKQCDENCDETCDNARIYISNLPPDVTVEELQELFGGIGQVGRIKQKRGYKDQWPWNIKIYTDDSGKAKGDACLAYEDPSAAHSAGGFYNNYDMRGYKISVAMAEKSAPRAAPSYGHGGGRGGGYGGGGRRDNYRDGGGHGPNRNQGGGSRSRPY

SEQ ID NO: 223265 - protein, 164 aa, Zea mays
  unsure (1)..(164): unsure at all Xaa locations
  Clone ID: MRT4577_135208C.1.pep
MACEVVRPSDAELLKAQADIWRLSLSYLTPLSLRCAVELGISTAMXAPSXVXLAXEXDTAXXRXGTKXPARRRXXRHXAAXGXGTXDKQSTEEEXDRXSPGXDRRXDGXPHEDHXNHTAXXHTGTATRDSEAEKGPAEGXKRDXGTTPXEEXHGAXRXHESXGS

SEQ ID NO: 223266 - protein, 106 aa, Zea mays
  Clone ID: MRT4577_135209C.1.pep
QKKLFGSIQLVGGAAYTAGLAQVLEQRVRTKISANQFIEKVQVLQSRTYPLFVPWKGGVILGVLDIGKDAWIHREDWIKNGVHIGSGRKYKDSYFLQAQVMCYYNV

SEQ ID NO: 223267 - protein, 203 aa, Zea mays
  Clone ID: MRT4577_13520C.1.pep
YCRGVPDPKIRIYDVGMKKKGVDEFPFCVHLVSWEKENVSSEALEAARIACNKYMTKSAGKDAFHLRVRVHPFHVLRINKMLSCAGADRLQTGMRGAFGKPQGTCARVDIGQVLLSVRCKESNANHAEEALRRAKFKFPGRQKIIRSRKWGFTKFTRAEYLKYKSEGRIAPDGVNAKLLGVHGPLSKRAPGKAFLAENIQASA

SEQ ID NO: 223268 - protein, 590 aa, Zea mays
  Clone ID: MRT4577_135210C.1.pep
MDYLRTVVPSQLLAERGSNLVVINPGSGNVRMGFASQDVPFNIPHCIARHINPQEGEEPRFSVRDQMLNCHATSSQNAERESAYDIIAALMKIPFLDDEEMPSPNQPLPPKMGRVDGFSSQQNRDDNKFTWTDVSERIIKPSTPFDRSVYKDAEEDTLPSTSDDDNGQDFKENKYKEMIFGEDALKIPPSESYCLSRPIRRGHFNVSHNYSVHQVLEDLRTIWNWILTEKLHINPRDRGLYSAILVLGETFDNREIKEMLSIVLHDLGFSTAVVRQEALSAAFGNGLSTTCVVNIGAQVTQVVCVEDGVALPHTALALPYGGDDISRCLLWVQRRHGTWPNFQTDPMSNPIDMLMLNKIKESYSQIKTGSIDAAVLVHSYDNERSGGHQKTRLSAINVPPMGLLYPRVLVPEEYPPPPRSWFQDYDDMLEDTWQTSDGLYPSGNGGFGMWDSYPMFPTRLKKFDNIGLVEAIISSVLSTGRVDLQKKLFGSIQLVGGAASTAGLAQVLEQRVRTKISANQSIEKVEVLQSRTYPLFVPWKGGVILGVLDIGKDAWIHREDWIKNGVHIGSGRKYKDSYFLQAQVMCYYNV

SEQ ID NO: 223269 - protein, 80 aa, Zea mays
  Clone ID: MRT4577_135211C.1.pep
HQVVTVCDIIFVKITHGSDGKMGPVHLSEGMVGLLSMSVQVSVIPVSVRSTAAREMWSAFVTMRRCSQLSVYVLRSLDLL

SEQ ID NO: 223270 - protein, 573 aa, Zea mays
  Clone ID: MRT4577_135212C.1.pep
MDYLRTVVPSQLLAERGSNLVVINPGSGNVRMGFASQDVPFNIPHCIARHINPQEGEEPRFSVRDQMLNCHATSSQNAERESAYDIIAALMKIPFLDDEEMPSPNQPLPPKMGRVDGFSSQQNRDDNKFTWTDVSERIIKPSTPFDRSVYKDAEEDTLPSTSDDDNGQDFKENKYKEMIFGEDALKIPPSESYCLSRPIRRGHFNVSHNYSVHQVLEDLRTIWNWILTEKLHINPRDRGLYSAILVLGETFDNREIKEMLSIVLHDLGFSTAVVHQEALSAAFGNGLSTTCVVNIGAQVTQVVCVEDISRCLLWVQRRHGTWPNFQTDPMSNPIDMLMLNKIKESYSQIKTGSIDAAVLVHSYDNERSGGHQKTRLSAINVPPMGLLYPRVLVPEEYPPPPRSWFQDYDDMLEDTWQTSDGLYPSGNGGFGMWDSYPMFPTRLKKFDNIGLVEAIISSVLSTGRVDLQKKLFGSIQLVGGAASTAGLAQVLEQRVRTKISANQSIEKVEVLQSRTYPLFVPWKGGVILGVLDIGKDAWIHREDWIKNGVHIGSGRKYKDSYFLQAQVMCYYNV

SEQ ID NO: 223271 - protein, 110 aa, Zea mays
  Clone ID: MRT4577_135213C.1.pep
MAPVEPLPEAPNDGRPIVCPMSDFCPLTIDGVLKELFLETLRKKRRSSGLRAKELGRKAMYLGVPFVCEWVRNKSHSWKSQITTLKAVDAFQDHTKAIKLLHLESCHLFL

SEQ ID NO: 223272 - protein, 62 aa, Zea mays
  unsure (1)..(62): unsure at all Xaa locations
  Clone ID: MRT4577_135214C.1.pep
RFQLFRNITGNPEGKVNKSXRAAGVLENHEEGRRYAMHGLKSFVHDKTPEIMPAVNKFFTDP

SEQ ID NO: 223273 - protein, 87 aa, Zea mays
  unsure (1)..(87): unsure at all Xaa locations
  Clone ID: MRT4577_135215C.1.pep
VVAAKDPNNAFFKRCDGFQPCEVNEPKAGTHYFAIYAEXLRSVEAXKQSALSKFESEYQEVLAKFTEMTTRYTQEMQTVCAYVGDRR

SEQ ID NO: 223274 - protein, 65 aa, Zea mays
  Clone ID: MRT4577_135216C.1.pep
RKLFMLTRASFHISTIQLSSLLTPTFEQTIGYDRLPVLVLSVNCPRHHLTWEGWRSTCHGCRTVI

SEQ ID NO: 223275 - protein, 58 aa, Zea mays
  Clone ID: MRT4577_135217C.1.pep
ILTEQYGPKVTLWNKAGKKRLGNRLGGGTKQQFANISSNCHLPRQKPKMGRHKAAGTY

SEQ ID NO: 223276 - protein, 102 aa, Zea mays
  Clone ID: MRT4577_135218C.1.pep
ILSHSCSFMHLMVTDKLQLAHKLRHGVEGWVLRYVSITLDTEMLNRVTRPRQAHPYVPAEVGATLLRIERPPRRAFVGPPDRDPFMDHSHGIARRFNPKTHH

SEQ ID NO: 223277 - protein, 123 aa, Zea mays
  unsure (1)..(123): unsure at all Xaa locations
  Clone ID: MRT4577_135219C.1.pep
MSLPHQGTVDYPSFKLVIFGDGGTGKTTYAKRHLTGELARKSEPPIGAVVHALDFTTHXGKIRFYWCYTLTQENCGGTRNGYYIXHGQGAIIMRDVTSWLTYMQVPTWYKDLCRHRENITIAS

SEQ ID NO: 223278 - protein, 113 aa, Zea mays
  Clone ID: MRT4577_13521C.1.pep
RLAGACRAREENKLCALPCYRAALPTPHPRLSPRNRTKHLHTSPSTRTRVPRRRSTEQARQRPFEHGRRPRPTVHLRLRRTGPWARTVWVKVSSQVDSIDKDSFSSDSRPRSG

SEQ ID NO: 223279 - protein, 188 aa, Zea mays
  Clone ID: MRT4577_135220C.1.pep
MGSSAAGSTPTARQQRGAGAGAGASAAPSSSSPVFLNVYDVTPANGYARWLGLGVYHSGVQVHGVEYAYGAHDGASSGIFEVVPRRCPGYAFRESVAVGATELSRGEVRALMAELAAEFPGDAYNLVSRNCNHFCDAACRRLVARARIPRWVNRLAKIGVAFTCVIPGNGRAARPPSAASRSRSRSAP

SEQ ID NO: 223280 - protein, 64 aa, Zea mays
  Clone ID: MRT4577_135221C.1.pep
FLKATPSGERYLQSCFFTNNCNTIGLISPAAHPQQRLRKALVLRALDAALYTVGASCSSSHLLH

SEQ ID NO: 223281 - protein, 111 aa, Zea mays
  unsure (1)..(111): unsure at all Xaa locations
  Clone ID: MRT4577_135222C.1.pep
APSSXXXVXFXWXXXXLXXXLXLPLPXXLAFFXVXRXXXPAXXXPARGAAAPGRXXWXXCFLAXCPXXAXGGGAXXXASLXAPSSSLPSFSSSSXSXVGPCASXVRCXWAG

SEQ ID NO: 223282 - protein, 273 aa, Zea mays
  Clone ID: MRT4577_135223C.1.pep
MMSGSSPPPPSLPAGSGGFFRGYTKLCKGLAVILLIVHLVVQLFPSAVTYLALIPGRTIPFAWNLITAGYVEQTIPGMVVSIIGLLLFGKLLEPLWGSKELSKFIFIVNLSTSACVFMTAIVLYYITQQEIYLYTPFSGFYGVLSGLLVGIKQLLPDQELNLFVLKIKAKWIPSLVALISILGSIFIYDFMSYLPVLLFGMYMSWIYLRYFQKRLETSLKGDPSEEFSFSSFFPEFVRPFLDPIASVFHRLLCGRSDARGETLDTSPLPGSDV

SEQ ID NO: 223283 - protein, 151 aa, Zea mays
  Clone ID: MRT4577_135224C.1.pep
SARGGNGADTLAHWPTSAEIMTGEDAFLQVLQYLDKIWGTISSSEKKELEKLAFIPVANGTRLVPVKSLFARLTINMSPFAFELPSRYLPFVSLLREIGMQESLTNSYARELLLDIQKACGYQRLNPNELRAVMEILEFMCNGINQSITDG

SEQ ID NO: 223284 - protein, 65 aa, Zea mays
  Clone ID: MRT4577_135225C.1.pep
TRPKNHYFYLKQYSHNFAYTHMLLQLLFINTQTLTAEKPYIKTHPFQGLFGYSQNTWIGWDWKKL

SEQ ID NO: 223285 - protein, 53 aa, Zea mays
  Clone ID: MRT4577_135226C.1.pep
ARNSARGRIKTPVIMRHQEKHLNGGDLPRMPPETKNKGKVIKKKNRVVVYFKT

SEQ ID NO: 223286 - protein, 536 aa, Zea mays
  Clone ID: MRT4577_135227C.1.pep
MCRRTSKGPLPRAVQCQQAMVDTVAGATDYRGQPASRAATGGWKPSVFVMAMEIAERFAYKGVAANLITYLTGPLGQPMARAAASIDAWKGVSQMLPLPLACVADAWLGRYRAIVLASLIFAVSMGALSLSSALPALRGGHVAIFYVALYLVALGEGAHKPCAQAFAADQFDEKDPRESVARSSFFNWWYFGMCAGTAVTTMVSSYVQDNVGWGLGFGIPCIVIVASLVLFLLGTRSYRFYTTAAASPFSRVGKALLALVQSWAPKHRTRKLGDSDGDAVAVEEVKSVLRLLPIWASCIIYAIIFSQTSTFFTKQAATLDRRIGARFKVPAAALQTFISVSIVVFIPVYDRLFVPLARRYTGRPTGITMLQRVGAGLALALVAVALSALVEMKRLRVAAEAGLVNTPKAQLPMALWWMVPQYVLIGVADVFAMIGLQEFFYDQVPNAVRSLGLALFLSIFGIGHLLSSFLISVIDKTTAKSGTSWFSNNLNRAHLDYFYWLLTGLCAVELVAFVIFSRVYVYKRKVGNDGGNGDFV

SEQ ID NO: 223287 - protein, 60 aa, Zea mays
  Clone ID: MRT4577_135228C.1.pep
GKRKSFIRGSFLGMTGAVTNMYNGPHGQRAYMIDGLWPRMVTLKEVSPSCLRRDIGRIRD

SEQ ID NO: 223288 - protein, 79 aa, Zea mays
  Clone ID: MRT4577_135229C.1.pep
DSYINPFNRGSNSSRKTTSSLFLGRVHHLVGNVAPPVFYVVRRIGEKPPFGLLASISRSNFFLFLRIFTDKPAEEFLFG

SEQ ID NO: 223289 - protein, 247 aa, Zea mays
  Clone ID: MRT4577_13522C.1.pep
MPCSRTYIGGAHLDTLTGQLAQRRDIVEMSDSGELCKGLADDVEVPMLSKLRRQLVGKGSHRRLVYSVDFGAHEGAMVNFLDHYDAHLVIFEKLPDGVFADPFELQHFVERKVFVDVAVFGDANLELPTALSNGSSVEIHFDLRRIISNNCNLVIEMPLHARYPPLDASGYATVEFGSPDLFLRYRKKDIHSGSCLWVINNLKAAPLEKAAWRIPCGDEAHIGFVSSITFLSALVCSMSIVLASLIF

SEQ ID NO: 223290 - protein, 339 aa, Zea mays
  Clone ID: MRT4577_135230C.1.pep
MFTECLRKYEEDKGREKELKLEQELAWKPRAVAASGNIEGSFTVRLLDLFDSEDARERDRLKMVLHRIYGKFMVYRPFIRKAINNIFYQFIYETEKHNGIAELLEIFGSIINGFALPLKEEHKLFLVRTLIPLHKPRCTTMYHQQLSYCITQFVEKDCKLADSVIRGLIKYWPITNSTKEVLFLGELEEVLDATQPGEFQKCMVPLSHQIARCSNSPHFQVAERVLFFWNNTHFENLVKQNSKVILPIVFPALEKNINGHWNQVVRSLSLNVRKLFSDRDPQMFNECLRGYEEDKDREKEFRLKQELAWKRLDEIASAKVTSGEAVLVSPTLHRQPSVL

SEQ ID NO: 223291 - protein, 430 aa, Zea mays
  unsure (1)..(430): unsure at all Xaa locations
  Clone ID: MRT4577_135231C.1.pep
WTRWKRGKRGSANQGVRGTEEENPRPRATALASRVSPVIFLPIHLKLLLKTTVAAVRGSVRERDVPLSAPAKLSVSHAEDIEISLCDGNSEDERRRRKIGSLRRKAIHALKKRGRRRVDFRFPPXAISIEDVREAEEERAVASFRDRLAAHGLLPDKHDDYHMMLRFLKARKFEADKAMQMWSEMLKWRKEFGTDTILEDFDFAELDDVLRYYPQGYHGVDREGRPVYIERLGKVDPNKLMQITSVDRYIKYHVQEFERAFRERFPACTLAAKRHIDSTTTILDVQGVGFKNFSRTARELVHRMQKIDSDYYPETLHQMFVVNAGSGFKWIWNSVKGFLDPKTSSKIHVLGSNYQSRLLEVMDSSELPEFLGGSCTCSDKGGCLGSNKGPWNDPYILKLIHNLEAGCMREITNLFLRGKKEAAHPFGWNR

SEQ ID NO: 223292 - protein, 55 aa, Zea mays
  Clone ID: MRT4577_135232C.1.pep
DRLHRIRTLLLLIQPSPTANDGGHPDHLTAETDPRLTPTSAPTESTHELTAVETN

SEQ ID NO: 223293 - protein, 43 aa, Zea mays
  Clone ID: MRT4577_135233C.1.pep
RSSSIVAPSSSRRNHHRRLTAQAALLPIIGYWHYAPLCSRSSH

SEQ ID NO: 223294 - protein, 136 aa, Zea mays
  Clone ID: MRT4577_135234C.1.pep
GLCRVSAYMGIYKVNTSQPIAPLFDEPITITSAFESRKAYSTSAVASNPIIVIFNSSIQFFFNPIKGFIRVSHAKHEPYIRVECTMHHAPSNYYKDGNVYVSLGGRCVVRTVVHCPLGTYCEEAGRRDFADRLVCR

SEQ ID NO: 223295 - protein, 382 aa, Zea mays
  Clone ID: MRT4577_135235C.1.pep
MRKFGLICGPFDATMEDKTSFDECSHGNAEVLQIITDLQKRTEALEKKLIGSDKEILSLREIFKDSGRKVQQLEYIVDELQFKLDSSLAHLGNMCNTLATPSIFLIGGYNGVTWLSSLDSFSPEKDAVLGLTPMSSPRSYASAAVLDGHIFAFGGGDGMSWYNTVECYSSRNNEWTECPSMNQKKGSLAGICLNEKIYAIGGGDGNEFYSEVEIFDPYLGKWICSPSMLTSRFALAASGLNGVIYTSGGYDGNMYLKSAERYDPREGFWVRLPSMSTRRGSHTLTVLGDTLYAMGGYDGDKMVSSVEIYDPSLNAWRIGDPMNTPRGYAAAVYLDDSLFLIGGMQSSVQMLDTVEVYNASSGWSVLGSSSIGMRSFASAVVL

SEQ ID NO: 223296 - protein, 62 aa, Zea mays
  Clone ID: MRT4577_135236C.1.pep
SCSVRQISSCWSAGMTSLWCDMDALVVDGVSRLHVDGDSLFSQDLDSHLNASLERMRHPSRE

SEQ ID NO: 223297 - protein, 151 aa, Zea mays
  Clone ID: MRT4577_135237C.1.pep
RTRGFIRTIRMPLLFSEETSTAADMTGILDVNFDEALAAAMTSHYTEDLEPHLAQRSFLPHSPNIPRNSRSSISSPSSSNSSFSARNDSPAYSNGSPSSTGSSLSNGFSRYANPVDRRTILNTRQQFEDQRRAKLDSLEEALSRLDLSNAR

SEQ ID NO: 223298 - protein, 94 aa, Zea mays
  Clone ID: MRT4577_135238C.1.pep
MASGAAAPVKMSTAVTACILLAVLLPMAPKLVLGNVCSDRCGALCDTFADGFCTEDPELCPPALAGPCKPTVVTGCITECNTLCITGGFVPCAA

SEQ ID NO: 223299 - protein, 344 aa, Zea mays
  unsure (1)..(344): unsure at all Xaa locations
  Clone ID: MRT4577_13523C.1.pep
MAAGGGRCLLALALAAAWISGAVVAASSSGEQEGGSRTPVKCMPCSRTYIGGAHLDTLTGQLAQRRDIVEMSDSGELCKGLADDVEVPMLSKLRRQLVGKGSHRRLVYSVDFGAHEGAMVNFLDHYDAHLVIFEKLPDGVFADPFELQHFVERKVFVDVAVFGDANLELPQLXSNGSSVEIHFDLRRIIXNNCNLVIEMPLHARYPPLDASGYATVEFGSPDLFLRYXXXDIHSGSCLWVINNLKAAPLEKAAWRIPCGDEAHIGFVSSITFLSALVCSMSIVLASLRLRVLSEVRDRRILFMHPHILANDNPVAINFASFSGVFASFIETELPTSNHIQTRTR

SEQ ID NO: 223300 - protein, 70 aa, Zea mays
  Clone ID: MRT4577_135240C.1.pep
LSPSQRVSPVSPAGGSPYLLSGPNNSGEFVEHLGFGRHSRNKPCVESKVRKLQRARVRTRSRCFKVSLNA

SEQ ID NO: 223301 - protein, 101 aa, Zea mays
  Clone ID: MRT4577_135241C.1.pep
FCISSPPQTGGGGRLKNITSASVDVLAVVAGPIIGVDHHAVALPIPVVAPCEDGHVLLPSPRTDSHDQRAPRCAVSRSPAAQFRPLRCHGTLPSRSKHAPE

SEQ ID NO: 223302 - protein, 92 aa, Zea mays
  Clone ID: MRT4577_135242C.1.pep
RCGATVAIIGVVTMCIGSRMRTAPVYELCLSRREESPIPRGCHRMVLGARELPCYCSFKLESLIVPRIRHCLLLALDDELCLIRPRDDSFVM

SEQ ID NO: 223303 - protein, 94 aa, Zea mays
  Clone ID: MRT4577_135243C.1.pep
PLPRQVGGFRGIPPKNFPRLHQVRLIFGPQVFYPPKGPGGFGSRPLPDFLTPGKNKINLFVFPGPASGFVFYIYGPGGLFYIGLWGPQWEFFCS

SEQ ID NO: 223304 - protein, 240 aa, Zea mays
  unsure (1)..(240): unsure at all Xaa locations
  Clone ID: MRT4577_135244C.1.pep
MSCCMQGGGPAYKLPLGRRDGLAPASNAAVLAALPPPTSKVPTLLSFLAKINLDVTDLVALSGGHTVGIAHCGSFDNRLFPTQDPTLNKFFAGQLYXDLLNREGLFTSDQDLLTNATTRPIVTRFAVDQDAFFDQFVYSYVKMGQVNVLTGSQGQVRANCSARNGAAAGDSDLPWSSVVIETVADAAGSLVLETTTTSMAMAACSAGRALARAPVDDPCPRGPGLSRPIDVNRGSSSIAK

SEQ ID NO: 223305 - protein, 372 aa, Zea mays
  unsure (1)..(372): unsure at all Xaa locations
  Clone ID: MRT4577_135245C.1.pep
MAAATSSRRPAAALLVLALALAAAVVALAAEGARYPPLAPGLSFDFYKKSCPKAESIVREFLASAVRQNVGLAAALIRLHFHDCFVQGCDASILLDATPTQPSEQQSPPNLTLRPAAFKAVNDIRARLDQACGAASSCADIVALAXDIVALAARESVALGGGPAYKLPLGRRDGLAPASNAAVLAALPPPTSKVPTLLSFLAKINLDVTDLVALSGGHTVGIAHCGSFDNRLFPTQDPTLNKFFAGQLYRTCPTNATVNTTANDVRTPNAFDNKYYVDLLNREGLFTSDQDLLTNATTRPIVTRFAVDQDAFFHQFVYSYVKMGQVNVLTGSQGQVRANCSARNGAAAGDSDLPWSSVVIETVADAAGSLVL

SEQ ID NO: 223306 - protein, 66 aa, Zea mays
  Clone ID: MRT4577_135246C.1.pep
RDEHWCHFLGLQDRGNKTTKDWYSDMYIYAALFRYNVGSGFPLEADILSLGFRIGLMIGRIILVGT

SEQ ID NO: 223307 - protein, 187 aa, Zea mays
  unsure (1)..(187): unsure at all Xaa locations
  Clone ID: MRT4577_135247C.1.pep
LDLLXAPDPSTLXEFLGTIPMVFNVVILSPHGYFAQANVLGYPDTGGQVVYILDQXGTEHCHMRAMENEMLLRIKQCGLDITPKILIVTRLLPDATGTTCGQRLEKXILRVPFRTENGIVRKWISRFEVWPYLETYTDDVAHEIAGELQANPDLIIGNYSDGNLVACLLAHKMGVTHCTIAHALEKT

SEQ ID NO: 223308 - protein, 67 aa, Zea mays
  unsure (1)..(67): unsure at all Xaa locations
  Clone ID: MRT4577_135248C.1.pep
CFFFLLESTIMEHDAFKNIPIIMMSSHDSVSIDFKCMLKGAAYFLVXPIRKIELRNLWHLDWRKTTC

SEQ ID NO: 223309 - protein, 187 aa, Zea mays
  Clone ID: MRT4577_135249C.1.pep
KTLDLLEAPDPSTLEKFLGTIPMVFNVVILSPHGYFAQANVLGYPDTGGQVVYILDQVRAMENEMLLRIKQCGLDITPKILIVTRLLPDATGTTCGQRLEKVLGTEHCHILRVPFRTENGIVRKWISRFEVWPYLETYTDDVAHEIAGELQANPDLIIGNYSDGNLVACLLAHKMGVTYCTIDHALE

SEQ ID NO: 223310 - protein, 59 aa, Zea mays
  Clone ID: MRT4577_13524C.1.pep
LGVGFFLRFSLPLFGLPCGDLMPRSTGHQTNIQIKSMYIAIPDETMPPTNHTGDESKLS

SEQ ID NO: 223311 - protein, 45 aa, Zea mays
  Clone ID: MRT4577_135250C.1.pep
IPVQVPKLYLSSTTADKSIAYAVETLRYLQKVDACRSISQHLSDA

SEQ ID NO: 223312 - protein, 44 aa, Zea mays
  Clone ID: MRT4577_135251C.1.pep
KKTPGSRPRHGGRGVTSYAVHSSHFITILTQLIRGTLGLVDQRS

SEQ ID NO: 223313 - protein, 93 aa, Zea mays
  Clone ID: MRT4577_135252C.1.pep
SIYQARPFQTGAGCLVGAAAPYPVPPHYLPFYLHPQQHPAQLVRLPSLQPPPLRPRQHRGHPLLKWISRLPQLLFPVLCLLSPSYSASSSIWP

SEQ ID NO: 223314 - protein, 81 aa, Zea mays
  unsure (1)..(81): unsure at all Xaa locations
  Clone ID: MRT4577_135253C.1.pep
IKETLSFKLFEGTERLSCAHSFCICVTYLLTCLPVLSAHLQXPQLYQEGVQNILFSWCRILGWMLNGVMNAALIFFFCITT

SEQ ID NO: 223315 - protein, 114 aa, Zea mays
  Clone ID: MRT4577_135254C.1.pep
SKFRYCALVKRDRVLVNVSLWFMIFLSICIHMHNAFHSDTLINGVMRKTSQVDPKRGLLRMVVLEDEPARSSASTRMIIKWTSPNNTNLVLPRQALVHFPPPCVLKSLSPYLMH

SEQ ID NO: 223316 - protein, 45 aa, Zea mays
  Clone ID: MRT4577_135255C.1.pep
TARAGPAEPREARRPPTSTPSCSGSTRADDPSTITCESAAALCGV

SEQ ID NO: 223317 - protein, 38 aa, Zea mays
  Clone ID: MRT4577_135256C.1.pep
STELKRHSGPVRHWTCLQPRRFHAGIYQPHFWNVSHSK

SEQ ID NO: 223318 - protein, 64 aa, Zea mays
  unsure (1)..(64): unsure at all Xaa locations
  Clone ID: MRT4577_135257C.1.pep
GLARLVPPSVPDNVLQXRMTVTIGTFCKIYPEYHGSSSLGVESIIDTLRVLLLQVVTTPPFLGI

SEQ ID NO: 223319 - protein, 97 aa, Zea mays
  Clone ID: MRT4577_135258C.1.pep
VLTGICVVTLPRLKKINFTPMETDDACSPLLFLEREKKQETNKIYGRRVGGGWMMDHANAPARGSSGTGTTLTPSPVTSHCRSLLALTTPALFGMSY

SEQ ID NO: 223320 - protein, 104 aa, Zea mays
  Clone ID: MRT4577_135259C.1.pep
RGRCIKCWQVICVVTLPRLKKIIFTPMETDDACSPLLFLEREKKQDTIKIYGRRVGGGWMMDHANAPARGSSGTGTTSTPSPETSHCRSLLALTNACICFGMSS

SEQ ID NO: 223321 - protein, 64 aa, Zea mays
  unsure (1)..(64): unsure at all Xaa locations
  Clone ID: MRT4577_13525C.1.pep
TXKNFKLNFGPLARHHSLWRRANIAQRHSLWRRAMTWQQRLVASRADLALTWWRRGLVARRHRS

SEQ ID NO: 223322 - protein, 71 aa, Zea mays
  Clone ID: MRT4577_135260C.1.pep
GERVFERGKKRSFLGGGVFYLTRGDFLYLPGGPFKGGNSRKWGGVFGGSGLGTKLGEIRGIVVSWGKLFLG

SEQ ID NO: 223323 - protein, 63 aa, Zea mays
  Clone ID: MRT4577_135261C.1.pep
PLYCNPSQTTGLGQTSMIKQLTKAWPWSNKNKKRAIKACSVITKRTFDEVLKSGSESTLSITR

SEQ ID NO: 223324 - protein, 125 aa, Zea mays
  Clone ID: MRT4577_135262C.1.pep
AGEEGEEGQLLGAAAAAALPRWLAQERRRVLGGRRETERRGRGRRSVMLDQGATERPWRWTSASRCSVLCCSRVYAVSINLSVPWNGWPGIGETKGDLTARSFCKQTSNEACTCKKKKKKKKTRD

SEQ ID NO: 223325 - protein, 52 aa, Zea mays
  Clone ID: MRT4577_135263C.1.pep
PGGYVTLIQLKKGPKGFKGVRFNKKRFSEQQAQEWWRENQEKVFRKKNPPGK

SEQ ID NO: 223326 - protein, 47 aa, Zea mays
  Clone ID: MRT4577_135264C.1.pep
ITAASLQQSEQLAYSRTSSVRASLIIEPIIGSNFLPCHIEPAINTLM

SEQ ID NO: 223327 - protein, 48 aa, Zea mays
  Clone ID: MRT4577_135265C.1.pep
HHNAWVTRSPCVLRSTCLTQTPSMAAEYRSSAHSYSTGPGSGFGNNLL

SEQ ID NO: 223328 - protein, 40 aa, Zea mays
  Clone ID: MRT4577_135266C.1.pep
PRYMQPGTTKATTRRLLVTILIIKLPPLFSRAHAMNFTSP

SEQ ID NO: 223329 - protein, 53 aa, Zea mays
  Clone ID: MRT4577_135267C.1.pep
KHRRTMQQKQSTCTWDGIPEVQRLKSSQIPHIQIVYQKAQGLSRATITRNLFP

SEQ ID NO: 223330 - protein, 76 aa, Zea mays
  unsure (1)..(76): unsure at all Xaa locations
  Clone ID: MRT4577_135268C.1.pep
QQPNNNSLHPPIQAPXNTTKQTHFQTYFLIXIXIPHRGGGGGFNXXLTFIPWGGKGGWFIPFNYRPGKLPFCLALA

SEQ ID NO: 223331 - protein, 63 aa, Zea mays
  Clone ID: MRT4577_135269C.1.pep
ITLGQGPEKSEDEGARVGGGRRRAAVRRAIESAAAAVLDDGGGCGACVVVDAVASASDLAGVV

SEQ ID NO: 223332 - protein, 65 aa, Zea mays
  Clone ID: MRT4577_13526C.1.pep
AVLFLQSPLGVASGAIAGHLIATAFAILGGAFLANYLSEKLVRQKKVLWSWMIFCVTVCNLSTFM

SEQ ID NO: 223333 - protein, 64 aa, Zea mays
  Clone ID: MRT4577_135270C.1.pep
ITLGQGPEKSEDEGARVGGGRRRAAVRRAIESTAAVLADGSGCGACVVVDAVVGGDDVAGVVAV

SEQ ID NO: 223334 - protein, 67 aa, Zea mays
  Clone ID: MRT4577_135271C.1.pep
KREPPPKKSASKSGQQFTRPPSPPRITRSPREWASSFTKIEPPPLSPPGKVGLNFKVMGAIPFRVIF

SEQ ID NO: 223335 - protein, 63 aa, Zea mays
  Clone ID: MRT4577_135273C.1.pep
LPIASRDSSAPVVQTVVLNVVIHCHGFNKNVLKVLKGIQCFHDVTVDSSQHNVTVTVTVDSYT

SEQ ID NO: 223336 - protein, 48 aa, Zea mays
  Clone ID: MRT4577_135274C.1.pep
IQAVYCMWARQEAKGPSCVCPVLFYRRMVTQPIISYITVGGLSATNII

SEQ ID NO: 223337 - protein, 193 aa, Zea mays
  unsure (1)..(193): unsure at all Xaa locations
  Clone ID: MRT4577_135275C.1.pep
QAFFFFFFFFFFFYFFFSFPPLEGVHPSTGGGGFRGPGRPPPRGPPRGGGGPRKRGGSDHNPXQDPDPKAKREKPGAPREGTNGKEARDTPGPLXGEKPGGPREKKNPPTPGXGGERLGPKNPPHPTXTQRNRPPGGGGGGQFTEGRQSGSPQRGGKAGEKNRGGKGPQKARNKGRAPEGGVYQRPPPRAHNK

SEQ ID NO: 223338 - protein, 55 aa, Zea mays
  Clone ID: MRT4577_135276C.1.pep
LLNSLLFLYMTPGLGSCFKGMMFCLCIISNINFFFIFSDFSLYAMCCSIINTFLF

SEQ ID NO: 223339 - protein, 81 aa, Zea mays
  unsure (1)..(81): unsure at all Xaa locations
  Clone ID: MRT4577_135277C.1.pep
SGTRARNTKVHKCIFQLLTLGLLCSQEAPTDGPSIRNVSAKMVQVKEHFGSCSLXKTCQILGSLWKSKGLGLAMNSXXHMN

SEQ ID NO: 223340 - protein, 99 aa, Zea mays
  unsure (1)..(99): unsure at all Xaa locations
  Clone ID: MRT4577_135278C.1.pep
NPGRATRPLLLDDMQKSVYPSRRLIILGSITGNTNTLAGNIPPKAGLGDLRGLAAGLRGQNGSAMIDGSQSFDSAXKAYQGQAESCNMGSLMLGALHRR

SEQ ID NO: 223341 - protein, 74 aa, Zea mays
  Clone ID: MRT4577_135279C.1.pep
PRWVVALFTTWLEDGEMQMKEGLWMRLEVVTTGQHRCEPSCGIASISVDSQTQIRSSTESRALHTLWRCPCWCW

SEQ ID NO: 223342 - protein, 112 aa, Zea mays
  Clone ID: MRT4577_13527C.1.pep
RNPDVWDDPLRFDPERHIPLSPEMEVSLVERDLRFISFSTGRRGCIAAALGTDMTIMLFARLLQGFSWSKMTGVAAIDLSESRHNTFMARPLVLQAKPRLPAHLYPGILLCK

SEQ ID NO: 223343 - protein, 94 aa, Zea mays
  unsure (1)..(94): unsure at all Xaa locations
  Clone ID: MRT4577_135280C.1.pep
MKMVIGLGECLALSAAIFYVMLMPCPCAVMHGLDGSVTGLTTIMGAGGLNPYTENLMETXSNPMEEETYYAGCGRTSSMYEPLQXLCCHQQIRM

SEQ ID NO: 223344 - protein, 130 aa, Zea mays
  Clone ID: MRT4577_135281C.1.pep
MALLAVQGMAMSTAAAALPSHNHGAVSSYVSTSSYALAASAAFPRARAAFAVGAVLSATVTPVLDVYCGRGDKKTKRGKRFNHSYGNARPRNKKKGTGPARLFAPPAPPRKDQFDDGEIISIEIDEDILE

SEQ ID NO: 223345 - protein, 57 aa, Zea mays
  Clone ID: MRT4577_135282C.1.pep
LCFYLQLNRLQLVTEIPKLSPFSSAHCFVNFFSTDPLKNCAQCSQLAREKKEKYYFL

SEQ ID NO: 223346 - protein, 130 aa, Zea mays; identical to SEQ ID NO: 223344
  Clone ID: MRT4577_135283C.1.pep

SEQ ID NO: 223347 - protein, 130 aa, Zea mays
  Clone ID: MRT4577_135284C.1.pep
MALLAVQGMAMSTAAAALPSHNHGAVSSYVSTSSYALAASAAFPRARAAFAVGTVLSATVTPVLDVYCGRGDKKTKRGKRFNHSYGNARPRNKKKGTGPARLFAPPAPPRKDQFDDGEIISIEIDEDILE

SEQ ID NO: 223348 - protein, 47 aa, Zea mays
  Clone ID: MRT4577_135285C.1.pep
TTSMSTFRFRLDLDTTRFCQKSLICYRFNVGRGPQPEKRPFSQNLPL

SEQ ID NO: 223349 - protein, 563 aa, Zea mays
  unsure (1)..(563): unsure at all Xaa locations
  Clone ID: MRT4577_135286C.1.pep
CLHLLSISREKITTAIFNSSGSWLVFGCAKLGQLLVWEWRSESYILKQQGHYFDVNCIAYSPDSQILATGADDNKVKIWTVSSGFCFITFSEHTNAVTAVHFMANNHSLLSASLDGTIRAWDLFRYRNFRTFTTPSPRQFVSLTADQSGEVICAGTLDSFEIFVWSMKTGRLLDVLSGHEGPVHGLMFSPINAILASSSWDKTVRLWDVFESKGAVETFQHSHDVLTLAYRPDGRQIACSTLDGLIHFWDPSDGLLMYTIEGRRDIAGGRLMTDRRSAANTSIGKYFTTLCYSADGSSILAGGNTKYICMYDVGEQVLLRRFQITRNLSLDGVLDFLNSKKMTDGGALDLIDDEDSDVEEGIDRHTRGNLGLGLPGSMANRGRPMARTKCVKFAPTGRSFAAATTDGVLLYSVDESFIFDPTDLDIDVTPEKVEEALAENQQQRALILSLRLNEDLLIKKCIFAVDPADVRAICSAIPYKYLQRLIDTFASLLESCPHLEFILXWXQELCKVHGHYIQQNSRTLLPSLKSLQKSITRLHQDLADTCSSNEYLLKYLCTAGTKN

SEQ ID NO: 223350 - protein, 112 aa, Zea mays
  Clone ID: MRT4577_135287C.1.pep
TEIIPGTTPFWNSLRQRSSCHFVHQVLYRRQHPQVAEPVQPQMQPPPLLLSPRSPMSELRRLHMPSSPRKVASSSSSSSSSSAVSSPRHVGEDQKQRPAAPENQSTIADSIV

SEQ ID NO: 223351 - protein, 107 aa, Zea mays
  Clone ID: MRT4577_135288C.1.pep
SRFRILPWALDFSVGPLRLCSSLRLSSCASTPYRAAPSPGLRGRRRDRRRHQFLAASLTPPLIRSPLADSPSDATIGARGHASSEKQVGDTGFSSARRRAGGRRGAA

SEQ ID NO: 223352 - protein, 191 aa, Zea mays
  Clone ID: MRT4577_135289C.1.pep
MPPPTVPFFLTSTTLATTAKKPQPQSPLCDAQAQAAAASLASAASASYAARMRLNPHLALRLFDHLLRSGADPDPAAYELAFASCARARDRATAAQLHAHAAKRGLVASHRRVRCRLVHAYAVCGMLPHARRVFDGGTDNDMVAWNCLLRGYAQEGGDEDLLRDFFAQMPSRDSVSWNTVLSWCVVNGEYD

SEQ ID NO: 223353 - protein, 61 aa, Zea mays
  Clone ID: MRT4577_13528C.1.pep
LFVVQLINIWHSRDNVCVVKVLVNVCLSVHPHVGGEAEERESSSMEHALLDTLVQAVGVVV

SEQ ID NO: 223354 - protein, 51 aa, Zea mays
  Clone ID: MRT4577_135290C.1.pep
VKCRASVIEFWMSLYNIYYVGCSSRSDLSFYYRTSFVILFYIYFLLFFFFF

SEQ ID NO: 223355 - protein, 104 aa, Zea mays
  Clone ID: MRT4577_135291C.1.pep
RPRIEDRFVVGKCWNRSCSCREAAEGVRALCRTPGKRTFDASSETLLTRRKSASNVAKSFSTRIGPSDTILLAPQKVEERRSEIGAGKTEGRRELDGVSVNWYL

SEQ ID NO: 223356 - protein, 60 aa, Zea mays
  Clone ID: MRT4577_135292C.1.pep
TNYIFLTGTGSLNHLSIFKSNAFLKPPLPGGPHFLNQTLTWVLPPFPIYSSYLGPKPNPQ

SEQ ID NO: 223357 - protein, 50 aa, Zea mays
  Clone ID: MRT4577_135293C.1.pep
INPTQINLVKSPLKPPKVLTLMFRVVFFFEILTEKNFPQEKTISLISPNF

SEQ ID NO: 223358 - protein, 82 aa, Zea mays
  Clone ID: MRT4577_135294C.1.pep
LEPAGPGYSTYPASASHLPVALTLFVSDDCTLPLQLHSCATDTHGLPSHRSSRSLGRTCLTKASEIKFSTASALEKKGKRVR

SEQ ID NO: 223359 - protein, 200 aa, Zea mays
  unsure (1)..(200): unsure at all Xaa locations
  Clone ID: MRT4577_135295C.1.pep
MRFSALLLIVALLCLGGGGGGRVTASTEFNFPAVFNFGDSNSDTGGRVAAGFESIFPPYGSSFFGGPAGRFCDGRLVIDFLRFEHATQACCGYGGPPLNYDGNVPCGHTVSLDGKMVTAKGCSDTTEFVNWXDGIHYTEAANFHIASQILTGKYSDPSFXDXMPFVIKPRFLMAYFPSLLTTLQHRLQIRCILITWPYIA

SEQ ID NO: 223360 - protein, 207 aa, Zea mays
  unsure (1)..(207): unsure at all Xaa locations
  Clone ID: MRT4577_135296C.1.pep
MRFSALLLIVALLCLGGGGGGRVTASTEFNFPAVFNFGDSNSDTGGRVAAGFESIFPPYGSSFFGGPAGRFCDGRLVIDFLMEAMDMPLLNAYLDSLGTPSFRTGVNFAQAGCSITPAKPTSVSPFSFGLQIKQFFAFKNKVTKLLSEGDMHSRYIPQQEYFSEGLYTFDIXQNDLAXKLYDQXXGKXWIHNXGPLGCLPXNIALFG

SEQ ID NO: 223361 - protein, 74 aa, Zea mays
  unsure (1)..(74): unsure at all Xaa locations
  Clone ID: MRT4577_135297C.1.pep
MSSNLSMLATKIMMGVTMETRMRDSGLEEKKAHLMEIQVNGGSVADKVDFAEVHFEKTFDVSXIFEHNENIDVI

SEQ ID NO: 223362 - protein, 383 aa, Zea mays
  Clone ID: MRT4577_135298C.1.pep
MRFSALLLIVALLCLGGGGGGRVTASTEFNFPAVFNFGDSNSDTGGRVAAGFESIFPPYGSSFFGGPAGRFCDGRLVIDFLMEAMDMPLLNAYLDSLGTPSFRTGVNFAQAGCSITPAKPTSVSPFSFGLQIKQFFAFKNKVTKLLSEGDMHSRYIPQQDYFSEGLYTFDIGQNDLAGEFYSRTEDQVIASIPTILLEFENGLKKLYDQGARKFWIHNTGPLGCLPQNIALFGKDPSQLDELHCVAKHNRAAKPFNLQLHALCTKLRAEFDGASITYVDIHTIKYSLIANYSRYGFEHATQACCGYGGPPLNYDGNVPCGHTVSLDGKMVTAKGCSDTTEFVNWDGIHYTEAANFHIASQILTGKYSDPPFVDKMPFVIKPRF

SEQ ID NO: 223363 - protein, 355 aa, Zea mays
  Clone ID: MRT4577_135299C.1.pep
MRFSALLLIVALLCLGGGRVAAGFESIFPPYGSSFFGGPAGRFCDGRLVIDFLMEAMDMPLLNAYLDSLGTPSFRTGVNFAQAGCSITPAKPTSVSPFSFGLQIKQFFAFKNKVTKLLSEGDMHSRYIPQQDYFSEGLYTFDIGQNDLAGEFYSRTEDQVIASIPTILLEFENGLKKLYDQGARKFWIHNTGPLGCLPQNIALFGKDPSQLDELHCVAKHNRAAKLFNLQLHALCTKLRAEFDGASITYVDIHTIKYSLIANYSRYGFEHATQACCGYGGPPLNYDGNVPCGHTVSLDGKMVTAKGCSDTTEFVNWDGIHYTEAANFHIASQILTGKYSDPPFVDKMPFVIKPRF

SEQ ID NO: 223364 - protein, 52 aa, Zea mays
  Clone ID: MRT4577_13529C.1.pep
LAPPLGPFFFPFKVNQLKKKKIKTKKKKKKKKKKKKKKKKKKKKKKKKKKKK

SEQ ID NO: 223365 - protein, 92 aa, Zea mays
  unsure (1)..(92): unsure at all Xaa locations
  Clone ID: MRT4577_1352C.1.pep
KCETHHAALIVFVKKRGFVNCLKGPKKFAYTIYFGWKPPSQTNSYXIKRPWKKKKAAPSQKKVKFWGSGQGGTCMTSPPGSNPRLKKKFFFF

SEQ ID NO: 223366 - protein, 30 aa, Zea mays
  Clone ID: MRT4577_135300C.1.pep
LLIIMDLKANDLLYQLAGTSQQRIRELKDR

SEQ ID NO: 223367 - protein, 88 aa, Zea mays
  Clone ID: MRT4577_135301C.1.pep
DSDLSDSMDNKYLPVCQATVHESNNISVCINELGHLGAARLVGRGTEEDCSLNTARVELVASRQIAYLSYKSQRYRYSRIPDVTLSAT

SEQ ID NO: 223368 - protein, 146 aa, Zea mays
  unsure (1)..(146): unsure at all Xaa locations
  Clone ID: MRT4577_135302C.1.pep
PPPLAPRVLPFLFWGCVLCGLFPAGHFFPGDCSDLGSALVGPGLGPPCVGLPCFGIPPWGGAARVGGGIMAGGIAAGVLAGWVFCRRWLGITVAGIAMGGSVRVGHFLFEQLSFVPKSIVPKKXKKKXKXKKKKXXXKXKKKGVVT

SEQ ID NO: 223369 - protein, 83 aa, Zea mays
  unsure (1)..(83): unsure at all Xaa locations
  Clone ID: MRT4577_135303C.1.pep
MMRVLAVVAMLATAFFAVPARAEQCGSQAGGALCPNCLCCSQFGRCSXTSYYCPSHSHKSCHQARPRVVEPANPRVHTPPRET

SEQ ID NO: 223370 - protein, 84 aa, Zea mays
  Clone ID: MRT4577_135304C.1.pep
PEWVQFFTGGQPSNWPGHTIGYTSDKKWGVWIHLFFSLGGWEPHKRVLVACFKKKKNFLLKKWTGPYQKGGFLNTPKNSEVYEI

SEQ ID NO: 223371 - protein, 171 aa, Zea mays
  Clone ID: MRT4577_135305C.1.pep
PGYPYTKDPHSDIQQHRAAEHGLIDTVSACVTATMRAHPPRSPEALVYGSPAFTTRSETMSSTYTKDARNATPANTTGASTTMTHGHPRGDRFMVRHTGAQEKSTARPGTALSLGVPSSPLLLTSRGLGIHLVRDCLYASCMYENEQAHRTLASRRTCTDSDPVRITTISS

SEQ ID NO: 223372 - protein, 47 aa, Zea mays
  unsure (1)..(47): unsure at all Xaa locations
  Clone ID: MRT4577_135306C.1.pep
LALDRERPVLKIQSYVTRACRRSXTLLIAVTRKLHIARAPSASTNGR

SEQ ID NO: 223373 - protein, 279 aa, Zea mays
  unsure (1)..(279): unsure at all Xaa locations
  Clone ID: MRT4577_135307C.1.pep
KKKKKKKKKXKKNKKKIEKXKNKKIKIKKNKKKKKKKKKKKKKXKKKKKKKKKKKKKKKKKKKKKKKKKKKKKKKKIKKKKKKKKXKKSKKXKKQKKKKKNKKKKKNKKNKKKKKKKKSKKNKKKEKKKKKIMKNKKKKKKKKNTKKEKRKKKKKNKKKKKEKXIIKKKKKXKNKKKKKNIKXKYNKKKKKKIKKKLTNKKKKKKKXKQKLLRKKKKRLKIKKKKKKKXKKKKKKKYKKKKKKTKIVEKKCTKIKTYIVVINKTELRNSIIKNCNCLSN

SEQ ID NO: 223374 - protein, 154 aa, Zea mays
  unsure (1)..(154): unsure at all Xaa locations
  Clone ID: MRT4577_135308C.1.pep
MAGRDERCGARGGPGDTHASTSRAPAGTAGESEGASPDSLRNTPSNIARLEDAIGHCAARRKYLANTKSPSDGKDVRWYFCNLPLADKVLSSSVPRTEIVGKGDYFRFSERDSLXLEASFLEREGXLLAYWWREYAECSAGPRGSLESDDSAYL

SEQ ID NO: 223375 - protein, 83 aa, Zea mays
  unsure (1)..(83): unsure at all Xaa locations
  Clone ID: MRT4577_135309C.1.pep
MRPSCGVLAPWESIISSVXRVVNNPEXSSMKPMYTCMVKFKIVSLKVIRPVEYVPELTDEQKDQVSVEQISQVVFSDADRPSP

SEQ ID NO: 223376 - protein, 145 aa, Zea mays
  Clone ID: MRT4577_13530C.1.pep
MESKVEAEAVQLAGKKKKSTFPSWAADDGGVEAASMGIMASSPSAASPAAIVSAFLAPPLSLLRHVASLCAGYLGLDGGLKPPASSSSSVATAAAAAAASQRGEVVEAAASVVSSHASSTRIDAYACRVIQIINELLLPLQQCLK

SEQ ID NO: 223377 - protein, 43 aa, Zea mays
  Clone ID: MRT4577_135310C.1.pep
PPEPLALRGKRPPGQSGRPSPPRDASGLKGGFEPLQSADRIGP

SEQ ID NO: 223378 - protein, 87 aa, Zea mays
  Clone ID: MRT4577_135311C.1.pep
RRTGKGPRPNKTRRRHLPRRIESRRRKRIKVPVPPRLQRRRYNKLLGSNGSLRTQEASASTTSRSPRAIQESISYRRPLLYLIQFTR

SEQ ID NO: 223379 - protein, 59 aa, Zea mays
  unsure (1)..(59): unsure at all Xaa locations
  Clone ID: MRT4577_135312C.1.pep
NSKNCPFPLNVSRKNGLKFLIPRKMSLNKNHFFQIKKKLNPPXLKNPPNLQKKTNGKNK

SEQ ID NO: 223380 - protein, 84 aa, Zea mays
  unsure (1)..(84): unsure at all Xaa locations
  Clone ID: MRT4577_135313C.1.pep
GVDAQHPQVRRFHRRQPARQGSSAPLQHNIFNRATXGXNVADVSVKDVRRGDAAGDSDNNPALEAAGVTCQVIILNHPGHISAG

SEQ ID NO: 223381 - protein, 54 aa, Zea mays
  Clone ID: MRT4577_135314C.1.pep
GVGVGKDKRVLKFAKRKLGTHKRAKKKREEMMGVLRKMRWVGTHIEKKNLSFLS

SEQ ID NO: 223382 - protein, 106 aa, Zea mays
  Clone ID: MRT4577_135315C.1.pep
MALYNTNTNVGKAKIHCYTFAIGYVRTGLSRTKIQVQYMLKEVDKQMINNELKLDGNLSMNLFKYASTLVELKGDKVIQISININYGDMDENKVYSDVHNRRVHMI

SEQ ID NO: 223383 - protein, 82 aa, Zea mays
  Clone ID: MRT4577_135316C.1.pep
LFFSKLSKLPPNRVYRRCTRWAPRVLVHLKRFEPSMCPSMRSQQRFLFFQQGLVQKGPPTPSQNKAFFVSKNQVLRKKKDKP

SEQ ID NO: 223384 - protein, 99 aa, Zea mays
  Clone ID: MRT4577_135317C.1.pep
IILLECAIDVLFSVERGGGKPPGENRGGETTGKKKKKPGQAEGRQSPPWSSTPEKIIHFDHPGGRGGSSHPGGTRGAQALYHGSYYERQFYTGITNIAP

SEQ ID NO: 223385 - protein, 185 aa, Zea mays
  unsure (1)..(185): unsure at all Xaa locations
  Clone ID: MRT4577_135318C.1.pep
CCGACRCCGGVRGSGSPSGXCFPWVLPSSCGRCSGSALPSPLWGSPXPPRWVRLXLRAAXRXLFASXLGXLLXPCCCXLXPAPCRRRCRXXCCRLWCLSAWPXXXXXXXPPPPXXXVLGRRAAXXAXVXXXVVGSLGGLXPXLLVLLGFLASPPPALFVVPAPAFPLGGVAVWARAAXPRRPRRP

SEQ ID NO: 223386 - protein, 90 aa, Zea mays
  Clone ID: MRT4577_135319C.1.pep
HGRTSGSFSQSPLPCPALTPRLASHFPLLLLLLIWSSEERGAVSSALLRWIRRRCITAARITALVASFRRPAAARPSAANTATTTPRTSL

SEQ ID NO: 223387 - protein, 204 aa, Zea mays
  unsure (1)..(204): unsure at all Xaa locations
  Clone ID: MRT4577_13531C.1.pep
MYSGSALRVVESCLVTPSDETPREGLWLSALDLVLANRGHTPLVHVYSASDDAAADGFFNVAKLKKSMAKALVPFYPLAGRLGADRDGRIQIDCNGEGALFVVARSDRTVEDFSGPTPSSELTKLFCPRVQPSSIMLAAQVTFLKCGGVVLGTAVHHAAVDGSSAFHFIGTWARYCRDGQXAVIELPCHDRALLRARSPPAIHP

SEQ ID NO: 223388 - protein, 70 aa, Zea mays
  Clone ID: MRT4577_135320C.1.pep
SVPRMLQTRYVSDPEFVIGYLLHFNDRLWCTKRIGAIILIFHVTRKKCSNYKSNCCIFVIRRRYIYLRNL

SEQ ID NO: 223389 - protein, 56 aa, Zea mays
  Clone ID: MRT4577_135321C.1.pep
ASLRRLNSAIPFLNLLTKMHHACMYYITSGRTYIYLASFAAAANTDLFSGQQQNQG

SEQ ID NO: 223390 - protein, 39 aa, Zea mays
  Clone ID: MRT4577_135322C.1.pep
DGFRFGAFSLGRELKSVIRKANFKKTPLPGKQLNFLQIP

SEQ ID NO: 223391 - protein, 53 aa, Zea mays
  Clone ID: MRT4577_135323C.1.pep
SRYAFINGHLHHISLRSFRLSSGQMLRIQSMPCYSLTMHTLSHANVYCLSECN

SEQ ID NO: 223392 - protein, 86 aa, Zea mays
  Clone ID: MRT4577_135324C.1.pep
GKRPHTANRSSPAVGHFFYAGGTEVFSFGGGGGGLPHFLLGGRSFIHPGFWLFFFPFFFLGSLRRAIFFFLFPLLALVALTLGPTW

SEQ ID NO: 223393 - protein, 115 aa, Zea mays
  Clone ID: MRT4577_135325C.1.pep
GFDRTKYLGLLSPLPVPPHAWHSISMDFIEGLPKSRAVDCILVVVDRFSKYSHFLALAHPFTAAKVAQIFLDNVYKLHGMPDNIVSDRDRIFTSNFWQQLFQLTGTHLCMSSAYH

SEQ ID NO: 223394 - protein, 47 aa, Zea mays
  Clone ID: MRT4577_135326C.1.pep
WPWCCWYSSSSSSGCCSPIGFSFWAVLGFLPIQFGGVSPLGVLHAPF

SEQ ID NO: 223395 - protein, 257 aa, Zea mays
  unsure (1)..(257): unsure at all Xaa locations
  Clone ID: MRT4577_135327C.1.pep
MTDVVADLKKQTGALQSSINSVAKTAGSTPAAKKTVSTPAKATQSAASKTTTVPPVKKTTSTATPATKTRTPIGTQKKLPVRTAIGETKPAAATTTPAKSTATPLKKTAASAASTGKPAVSNASKPATTTGTAATKKVTPGTATTPVKKAPRKLNAGGATPSAVTQGSKPSTVPAGTGPTPAKTTVNTPKTATNSAXPIPSKGCTSEEECRWPSCPRAQEEHCVPRRWRCLEQRQLDRRRHHGIVNTVADSATSGVT

SEQ ID NO: 223396 - protein, 86 aa, Zea mays
  Clone ID: MRT4577_135328C.1.pep
GSHQFSLVRASALCAIPLPNDVLSELHVNSHFCSTHAIVTILHHFLHANWHFHPPCAYVQPSVQDLWCIRSVACLIYAMFLPPRFL

SEQ ID NO: 223397 - protein, 191 aa, Zea mays
  Clone ID: MRT4577_135329C.1.pep
MAAKREISSTLRNLKFMQRGAAAQKAEEKAEVEVQEEAVVMAPSGGFASSAQVVRKCIVIMEGNPHPGAIKGRMSFQNFNPSIDKLNEEARGDQQTESASPSNCDQDNANSSRGNEVPASRCRDFGIPSSESISLNELKRKEPDLDMETPASYKEPKTNVGGRSSSQSNGRGSHKSNKREKLDFNHLRPKK

SEQ ID NO: 223398 - protein, 103 aa, Zea mays
  unsure (1)..(103): unsure at all Xaa locations
  Clone ID: MRT4577_13532C.1.pep
DLCAKIDIXDEMRKKICAGCEFSRIQSPPLIMGAHLDQLLKCAIYVRQEVTKGDESFQNIMRSYRAQPQARSQVYKSVSIXGKKLKQNSGRLEGGTGTQYALS

SEQ ID NO: 223399 - protein, 60 aa, Zea mays
  Clone ID: MRT4577_135330C.1.pep
GTPDILLSYYCERRPRAMRLGARREECLFLETGYYLIRSTFANGVFGGHGADTQAVRILL

SEQ ID NO: 223400 - protein, 465 aa, Zea mays
  unsure (1)..(465): unsure at all Xaa locations
  Clone ID: MRT4577_135331C.1.pep
MDDGAATTIVQGGDAHVLLLPFPGMQGHANPMLQLGRRLAFHGLRPTLVVSRHVLSTTXPPPGXPIPVAAISDGFDDGGISSCPDTAEYVRRMEAAGSETLAGLLDAEARAGRPVRVLVYDSHLPWARRVARAAGVAAAAFMTQMCAVGLVYGEAWAGRVALPLADGAALRGRLAVELGPDDVPPFVAAPEWYPAFTESALSQFDGLEHADDVLVNSFRDLEPMEADYLESTWRAKTVGPTLPSFYLDDGRLPCDKTYGVDLFSSTDSEAAPCMTWLDKQEPCSVVLASYGTVANLNKEQLDELGNGLCDSGKPFVWVLRSNEAEKLSRQLGGRCKERGLIVPFCPQLEVLAHKATGCFLTHCGWNSTIESIASGVPMVAMPQWADQPTTAKYVESAWGIGVRMRKGSLVRKEVERCIREVMGGERKHVYGRNAARWMHKAKEAMQEGGSSDKNIAEFAAKYLPK

SEQ ID NO: 223401 - protein, 73 aa, Zea mays
  Clone ID: MRT4577_135332C.1.pep
ASPLHLPLYIALQASPRKFALLYPLYVIILPLVLSYIAQFNLLLVLSTCPHMLLMLGCIFQHYRHHVYSLPPH

SEQ ID NO: 223402 - protein, 290 aa, Zea mays
  unsure (1)..(290): unsure at all Xaa locations
  Clone ID: MRT4577_135333C.1.pep
ALSSHVAISIASCNATNTEPWTTAPQPQSSKAATRTSCSCRSLPLADGAALRGRLAVELGPDDVPPFVAAPEWYPAFTESALSQFDGLEHADDVLVNSFRDLEPMVSTERTXAGETEGIQIWVPLIEQEADYLESTWRAKTVGPTLPSFYLDDGRLPCDKTYGVDLFSSTDSEAAPCMTWLDKQEPCSVVLASYGTVANLNKEQLDELGNGLCDSGKPFVWVLRSNEAEKLSRQLGGRCKERGLIVPFCPQLEVLAHKATGTHEMYSTTMRNLFLEEKSFNFETYRVLSL

SEQ ID NO: 223403 - protein, 81 aa, Zea mays
  Clone ID: MRT4577_135334C.1.pep
VLILIIHNVYCTYFYARLGHTGEHGYIEQRALLLVITRGDTRRLIRSPLLFAYTQITDYASHRSCAVSKQLLTMDTVRPPA

SEQ ID NO: 223404 - protein, 100 aa, Zea mays
  unsure (1)..(100): unsure at all Xaa locations
  Clone ID: MRT4577_135335C.1.pep
MGSIESIASGVAMVAMPQWADQPTTAKYVESAWGXGVRMRKGSLVRKEVERCIREVMGGERKHVYGRNAARWMHKAKEAMQEGGSSDKNIAEFAAKYLPK

SEQ ID NO: 223405 - protein, 43 aa, Zea mays
  Clone ID: MRT4577_135336C.1.pep
HSDRLSWNAIWCRPIKFREREGFPQAGRPAWPVSQLISGVTIQ

SEQ ID NO: 223406 - protein, 54 aa, Zea mays
  Clone ID: MRT4577_135337C.1.pep
ANSILKRTASAQMTYLQPVLTRSGDTPRYQAILFSRVQYRLHQITRLPSSRPFS

SEQ ID NO: 223407 - protein, 133 aa, Zea mays
  Clone ID: MRT4577_135338C.1.pep
SAHVKGGYQTNVSYDCLAYECCSCFITPEGQAHNHPLLMAHTGNLSQRDHTIDIPMSDGMTASTSHQDDHSGSDELHRSRGPSNEVSPSPDTSSGTNDVSNSHNASSARIDRGHRQQNPLNSGFWISIELIVN

SEQ ID NO: 223408 - protein, 105 aa, Zea mays
  Clone ID: MRT4577_135339C.1.pep
HLLDLLGVLGAAPLVTADGVGDGGQDVLVVVLRREDLADGPVGVLHLDHHRRAPVGVSAGHAAPEAATGSHQWQVQGAAASSGIGPTPLVLSPTEIATRSATRKT

SEQ ID NO: 223409 - protein, 37 aa, Zea mays
  unsure (1)..(37): unsure at all Xaa locations
  Clone ID: MRT4577_13533C.1.pep
HALINLMGPYRXPLFCLPYTLHTNELWCSLADCSTWF

SEQ ID NO: 223410 - protein, 193 aa, Zea mays
  unsure (1)..(193): unsure at all Xaa locations
  Clone ID: MRT4577_135340C.1.pep
MPRAPRRQSDEARRGAYKPRVDFSRSRRRREDGLLALRRLNRDTGLFKRRRDEPAPAVPASDLTPTRAEAAPFAGITRPAFTPSSPPDVAAPRDAAEXELEGLSELVDKLCSDDTTSQLEATIQFRKLLSDEKNSTVIKIIRADVLPRFAEFLSRHGLPQLQMEXAAWVLTNIAASDYTLLVAECGAVPRLVE

SEQ ID NO: 223411 - protein, 78 aa, Zea mays
  unsure (1)..(78): unsure at all Xaa locations
  Clone ID: MRT4577_135341C.1.pep
INTGPRTPMRLFAPQFFRAFNSARPCSDWSPSNLIAFQKGPNNPHPKDCYWGAGGGCPCAGGGCXCCCPWXDWCSKFP

SEQ ID NO: 223412 - protein, 101 aa, Zea mays
  Clone ID: MRT4577_135342C.1.pep
SKRPCFTTVPSCQRQRPECQPPPIASQPSQPSPTEQPLSVSPDPQRCPQAAPKSGERSGCSAAPPCRTCPSCWPRPVRSAAPPSPARRSSSGRVAVSVSIR

SEQ ID NO: 223413 - protein, 97 aa, Zea mays
  unsure (1)..(97): unsure at all Xaa locations
  Clone ID: MRT4577_135343C.1.pep
VYGRFACRDVVSEVVRGVALLLLLLVVVVLVLPLAXSGGGAGGRLVELVVLVFSLRFLAAGLASDLEYNVVVPQHRLVGLVDPRAGGCVGSHASPYA

SEQ ID NO: 223414 - protein, 70 aa, Zea mays
  Clone ID: MRT4577_135344C.1.pep
IASCRSRSRSSVPDQRSDQTKTTTHGFMLFLLLNNGRIHAYDACTTTCLRRRRGDASGEKTQRRLGFRRR

SEQ ID NO: 223415 - protein, 102 aa, Zea mays
  Clone ID: MRT4577_135345C.1.pep
LHALRPNAGGAAVFYSPNPIASLLNPVALQELEEVVAVRALHCVYAEAEAMTDDNHVVAGALHKLYWFRYTKATCVQRLHFAYYCCMHALTCSLPKMRDENN

SEQ ID NO: 223416 - protein, 59 aa, Zea mays
  Clone ID: MRT4577_135346C.1.pep
TQPITLYTNLSDPRAEPYPTQGRSSSSSAPPLPVGCWAVRTARTTSLLGSDLTRIFSAG

SEQ ID NO: 223417 - protein, 99 aa, Zea mays
  Clone ID: MRT4577_135347C.1.pep
MAQQKVVLRISTMTDDRTKQKAMEAVADIYGIDSIAADVKENKMTVIGDMDTVAVAKKLKKLGKVDIVSVGPAKEEKKPDKKPEEKKPEAAAGKKDDKK

SEQ ID NO: 223418 - protein, 39 aa, Zea mays
  Clone ID: MRT4577_135348C.1.pep
IYHTNSKIKSYLLVLNVNNCYKERIQFLLMHDFSNHFIF

SEQ ID NO: 223419 - protein, 105 aa, Zea mays
  unsure (1)..(105): unsure at all Xaa locations
  Clone ID: MRT4577_135349C.1.pep
LLLSAVCALACVQPKPPREQNGQVCQICGDDVGLAPGGDPFVACNECAFLVCRDCYEYQRREGTQNCPQCKTXYMRLKVCQRVTXPMDDDRVHYLDXSSNWSGHV

SEQ ID NO: 223420 - protein, 149 aa, Zea mays
  unsure (1)..(149): unsure at all Xaa locations
  Clone ID: MRT4577_13534C.1.pep
MQYNHRSRLPPPPLPFGRGGHPRGPKQPCYAPLPPPPFPPAPPPPPPSLERKYEVLMEAGRLATEYLVAQGVLPPAALQRGAGISGAWPDHPLPPPPQLQQQEPXXXVMGPEARTKMNTTIILGEPMTLVVAPVAEMIAAVAAAMEEGR

SEQ ID NO: 223421 - protein, 134 aa, Zea mays
  Clone ID: MRT4577_135350C.1.pep
RMTATLPHMVVCSDDAAPLVHVCEALPSHQQRVRGYAGWNLKAVAGKLLVDDCGHRAPALHHIRSTRPPPSFVLLRVDEPVTEDPGVQQVDNSEQELVEASSAVTRIRRITLVIGISSARYHRMRRMVDVALCS

SEQ ID NO: 223422 - protein, 75 aa, Zea mays
  Clone ID: MRT4577_135351C.1.pep
RDILPYYPSPLIQLFLSKKETNPPFYLLEFSVPPIFNKSSERVGVFPCNPPRNNLCFEPLAKPKAVNQLNTSKTK

SEQ ID NO: 223423 - protein, 195 aa, Zea mays
  unsure (1)..(195): unsure at all Xaa locations
  Clone ID: MRT4577_135352C.1.pep
MVFIISASAGAAGASCPSLPPSDSTSTDTVAFISVSAAAGGVAVIFTATASSGISSXSRPNRRSQTPEAXSGASSPSNSLLTTSTFWSFTPNSSSKLFCVAVSSVSGTAAACSASSGPFASSSLDMAGSKSTSHSSMGSKPLPGSGSESEGGHGGGDGDAGGLGCRPIGDGGEAGVLAMEREVVRRLRHGFRALD

SEQ ID NO: 223424 - protein, 53 aa, Zea mays
  Clone ID: MRT4577_135353C.1.pep
LLLHFLDIYIRLSILHNRFTRMRYSSTCVFIQRQSQDCTLALRSILWIPVSPA

SEQ ID NO: 223425 - protein, 84 aa, Zea mays
  unsure (1)..(84): unsure at all Xaa locations
  Clone ID: MRT4577_135354C.1.pep
PFVPKNPVMASCRKKKTNDAPLPEDLKAPMGGFLPPPLDGPKSCFKKTIQKMFGISKAVXKKSPAEANKTEVERGLPLQTRVFP

SEQ ID NO: 223426 - protein, 46 aa, Zea mays
  Clone ID: MRT4577_135355C.1.pep
NTPLKPDFYLWPGHFKKKNQAKEVPGSCKMGQHWFQISRDSNRYLN

SEQ ID NO: 223427 - protein, 134 aa, Zea mays
  Clone ID: MRT4577_135356C.1.pep
SWSCRPSPGSWADCLPAQLNIRMTTIRNRRRHGACRRQSPHIQNFTSLRLHLWRSWKTHRLFRTLVLLPLRKRALFSPAYEWNARAPVPRADEDFVEPSTAYYRPTEGVTHTHSVSTPPLMAIETRAGPSKLVT

SEQ ID NO: 223428 - protein, 100 aa, Zea mays
  Clone ID: MRT4577_135357C.1.pep
PPPPVPGNFFPFVKKTPRFEKGPSPIPVYFSPSFRVKKGAPFFFGQGRPPSKTVGFKVAKVLPPGFPPPRKKPFPPPWVLAFVPRGVLKGMSFFVKKTPF

SEQ ID NO: 223429 - protein, 104 aa, Zea mays
  unsure (1)..(104): unsure at all Xaa locations
  Clone ID: MRT4577_135358C.1.pep
KPGKKPRPPGLKAHWGEKKEGGNKFKPPPPPNKKKKKGGPGNPLQKKPGPIFVSTGXALKKGGPKKRPPPKXNGPEPPPPLGGFLPQKTPSPGXGQGPKGASGP

SEQ ID NO: 223430 - protein, 87 aa, Zea mays
  Clone ID: MRT4577_135359C.1.pep
PPLFFFFFGIKNLHKLLKKEHVLGLTDVCFEKYRPCAACQARKQMGTTHLSKNMMTTSKPLELLHMGTTHPTLKGSIEDGARSAPRV

SEQ ID NO: 223431 - protein, 108 aa, Zea mays
  unsure (1)..(108): unsure at all Xaa locations
  Clone ID: MRT4577_13535C.1.pep
MAEKEGAKVGAEEMEEREQEGEAEEVEVKFRLFDGSDIGPVRCNAAATTVAALKDRVVADWPKXAPFGDLPSSAITMHVVVQPSSAKSKPDKKANKLPKTTRCSCTIL

SEQ ID NO: 223432 - protein, 161 aa, Zea mays
  Clone ID: MRT4577_135360C.1.pep
MVSLCLQAKRPRVGAAPRVVANQMGAFEVLPQELILSVLTALSSAADKPADLFNVMLVCQEFCRLVTNPQVIRAASAACVSVLPRRWCAAADRFLRFCGDNGNADANFFLGMIQFYCLGLQTHGWSRMLMAVRSGHAHAAFAAAVVYYNGSCIDHNQRQPL

SEQ ID NO: 223433 - protein, 62 aa, Zea mays
  unsure (1)..(62): unsure at all Xaa locations
  Clone ID: MRT4577_135361C.1.pep
MGKVHGSLARAGKVRGQTPXVAKQDKKKKXRARAHKRMQYNRRFVTAVVRFRKKGGPNSSEK

SEQ ID NO: 223434 - protein, 47 aa, Zea mays
  Clone ID: MRT4577_135362C.1.pep
LLSANGPQSPSRRLFDAGINFCRIIINQSDYFSTLLRAHKIVKELEN

SEQ ID NO: 223435 - protein, 73 aa, Zea mays
  Clone ID: MRT4577_135363C.1.pep
GLFDGADPMELHVYDFKGPGVTLSMYNSDEFIRPFAKSSMDMALSKKSSLHLSTKNTIIKKYDDRHGSSMFLQ

SEQ ID NO: 223436 - protein, 62 aa, Zea mays
  Clone ID: MRT4577_135364C.1.pep
LLLLPQSRISSAITTTANHLTDCGTSTISDKRWPRRVMSWQSASISRRPTLASVCGRTTVSR

SEQ ID NO: 223437 - protein, 105 aa, Zea mays
  unsure (1)..(105): unsure at all Xaa locations
  Clone ID: MRT4577_135365C.1.pep
MVCAKCEKKLGKVIVPDKWKEGASNTNESGGRKINENKLLSKKNRWTPYGNTKCIICKQQVHQDAKYCHTCAYSKXRNTLQREHGVCAMCGKQVLDTKLYKQSNV

SEQ ID NO: 223438 - protein, 161 aa, Zea mays
  unsure (1)..(161): unsure at all Xaa locations
  Clone ID: MRT4577_135366C.1.pep
FGSRSFEGLALSICSFTGPIRAHLDRLCPLDRLFLGLNHLTGEMPTELGTLTRLXGLXLSINDLAGEIPASXPAVTNLRLINLLRNHLRCEIPALLGEWPMVEALQVRDNNLKSPLPPALSRNGRLKTLDVTSYQLTGSIPTDSAREGTLSXLVLMDNGXF

SEQ ID NO: 223439 - protein, 88 aa, Zea mays
  Clone ID: MRT4577_135367C.1.pep
RGRGFFFLRFWLVFSPVLFSGLGFSKKKTSPPVFLGGFWFFTGDRGLRLKKKKKKKKKKKKKKKKKKKKKRKKKKKKKKKKVSVLFHC

SEQ ID NO: 223440 - protein, 110 aa, Zea mays
  Clone ID: MRT4577_135368C.1.pep
LAPLGALVDVVLGLALRVLRFRIVRVASWDPPLGQVLVGPSPRGGVSRGQLAKFPLCLAWDYHARRFVCLYFPRFLLGFREPKSFSGFFVLALGNFFMCCPLWFAPSGAL

SEQ ID NO: 223441 - protein, 124 aa, Zea mays
  Clone ID: MRT4577_135369C.1.pep
PGVRPKPTLAYSTLGRPNGRGLQSTPLKRSKNQLEYHGVLLCLSISRLRGISTTWSLSPLHLKFTKKYGVREGMSNPHKTSKDQSNPHTSSNKSSQHNSKSSQLHKSSICYHNEMNARDRCLGA

SEQ ID NO: 223442 - protein, 138 aa, Zea mays
  Clone ID: MRT4577_13536C.1.pep
MAEKEGAKVGAEEMEEREQEGEAEEVEVKFRLFDGSDIGPVRCNAAATTVAALKDRVVADWPKDKSIIPKTASDVKLISGGKILENDKNVAQCRAPFGDLPSSAITMHVVVQPSSAKSKPDKKANKLPKTTRCSCTIL

SEQ ID NO: 223443 - protein, 64 aa, Zea mays
  Clone ID: MRT4577_135370C.1.pep
KVESPLVQYKSFGRGNLLEINLYVPDPIIREPILFLIKKYYFIFLVQKKKKKKKKKIPKKKKKK

SEQ ID NO: 223444 - protein, 97 aa, Zea mays
  Clone ID: MRT4577_135371C.1.pep
IDLNNTASMIVKEERKLITVVFPDGRDGRTFTLKAETTEDLNEWRSALENALAQAPSVVNTAGQLPVVSTDITEPVEAAVEQLHSSRDAIFSNSGTM

SEQ ID NO: 223445 - protein, 29 aa, Zea mays
  Clone ID: MRT4577_135372C.1.pep
EGRALVLKFWIRATGSYRVGVLFFRRKEI

SEQ ID NO: 223446 - protein, 85 aa, Zea mays
  Clone ID: MRT4577_135373C.1.pep
HFQVEELFQSLIRAFKLGESSILFTAISASPSVKAREHAPGLASWRYQPQTTVVSNDRQPVSLEVQYHILDEVRCPGLIQSVDCV

SEQ ID NO: 223447 - protein, 50 aa, Zea mays
  Clone ID: MRT4577_135374C.1.pep
GDQGRTRFLHVLGYQPPRLLSLLLGNIDSRKFIFLQPILKGSPGVRPRVR

SEQ ID NO: 223448 - protein, 109 aa, Zea mays
  Clone ID: MRT4577_135375C.1.pep
GRCSTEQRRPKSLRCRARELFYYLKGKQVDYGEEHSKACGHNRFGRIYHTGHYPVCYEHNPVHFVGHSAGAQVVRVLHQMLADKRDGSCELEYRIRAPKLGISHAYHPA

SEQ ID NO: 223449 - protein, 70 aa, Zea mays
  unsure (1)..(70): unsure at all Xaa locations
  Clone ID: MRT4577_135376C.1.pep
RGRTXARRRXXKPPXXRRPKXGACXRRPWRRXRVXFWXXRXDRRXGXXXVVLXXXRGNFRRLGTFDFPAG

SEQ ID NO: 223450 - protein, 77 aa, Zea mays
  Clone ID: MRT4577_135377C.1.pep
PTRPANHGVHDRPVAGRASPRPDRQARQQVHREGVVCGGGGRRPPRGPWSHGQRSLEHHVRSGGARPYRCGHEGWTT

SEQ ID NO: 223451 - protein, 123 aa, Zea mays
  Clone ID: MRT4577_135378C.1.pep
PGEKRDFPPPPKKGGGGFPKKSRPGLGPEHLMGLGEKNFEPGPLFQGGPMGGFNLGGGFFIGPLKLPNLFWKKPLLGPQGELGVFRFAEPWGFFFFFHQGRGEPFFFKGHLFFWGPGWGAQLF

SEQ ID NO: 223452 - protein, 176 aa, Zea mays
  unsure (1)..(176): unsure at all Xaa locations
  Clone ID: MRT4577_135379C.1.pep
MRATGKDDSYAAHITKAYKWEFAEREGLQLVVLNPGTTLGPFFMSSVNTSLNNLLQLLXRSRGLKIXDQQLELDPINTGWVDVRNMAQSXIMTYENPSTQGXCLASMECLFDFTDRIADMYHDFPVHRIXIKEDKHXWLMRAKEPSKKLIDLGVCFLPFDVTIRETVDCFRSKGLI

SEQ ID NO: 223453 - protein, 134 aa, Zea mays
  unsure (1)..(134): unsure at all Xaa locations
  Clone ID: MRT4577_13537C.1.pep
QRHYCWGRTCANARLVDCRIRRRGYWSHPSSWRAAVQVVLIXRXLXXHGTQRMRRRLRRPRKSTEVHLGLQAHGVERLTMTAAQIGVAQSSTSPAISAAAGRCSSVAACSLQRVIVVLGLEASRADPFLVSPHA

SEQ ID NO: 223454 - protein, 130 aa, Zea mays
  Clone ID: MRT4577_135380C.1.pep
KKKKKKKKKKKKKKKKKKKKFNLEPKPHLRVICTSFPYPCRGDFPCIFLALVALLACLFRLHCPFFCPFLPGHCPGFTHFNRVKTLSLSTFWGFNKMPLSDLPSIAKGPLIGDCPPPVPFFKQWGGLFAH

SEQ ID NO: 223455 - protein, 81 aa, Zea mays
  unsure (1)..(81): unsure at all Xaa locations
  Clone ID: MRT4577_135381C.1.pep
VKRTDYPTADGTCIRDXYVDVTDLVDAHVKALNEADTRKVSIYNVGTGRGLVTRELFIYLYNYYLFMWIVVPCTGFNQYFT

SEQ ID NO: 223456 - protein, 52 aa, Zea mays
  Clone ID: MRT4577_135382C.1.pep
GWVSRRFTRLTPFKGGWAKNTTSITNGGNRTSMNVVKPKRRRFSRAELFCCR

SEQ ID NO: 223457 - protein, 81 aa, Zea mays
  unsure (1)..(81): unsure at all Xaa locations
  Clone ID: MRT4577_135383C.1.pep
VKRTDYPTADGTCIRDXYVDVTDLVDAHVKALNKADTRKVSIYNVGTGRGLVTRELFIYLYNYYLFMWIVVPCTGFNQYFT

SEQ ID NO: 223458 - protein, 93 aa, Zea mays
  Clone ID: MRT4577_135384C.1.pep
MSVKSLATGCFTYRTNRLAWMPSNATAKQVDPARSNGKASHEVRLEPLGLTGLRRVWFVARIGNPGRVCGGGPFRLSHTSRSRGAEPNSELRG

SEQ ID NO: 223459 - protein, 82 aa, Zea mays
  Clone ID: MRT4577_135385C.1.pep
NIFTKSYVPTIMFEKAIDLVPYLVTQGCRPNEKTFNSILQGYSRHGRMVEAKSFLSNLPKIYPGISKQEKQRLSELLAKHPS

SEQ ID NO: 223460 - protein, 298 aa, Zea mays
  unsure (1)..(298): unsure at all Xaa locations
  Clone ID: MRT4577_135386C.1.pep
LGTSRPAGLSRHPQLSQSCYAVSSCTPQWLTDIVDSYSQDVAAADMISKLAVDAAAIPHFTWKDGLLRYKNHIWVGQSHSLQTRLISAFHSSVIGGHSGVPVTYARLKQLFAWRGMKHSVQQFVSHCLVCQXAKADRSRLPGLLQPLLVPESLWQIISMDFIEALPRSQSYTCILVVVDLFTKYANFLPLRHPFTTLTVAKLFHDQVYKHHGLPQSIVSDRDRVFLRTGGREVGSVLGDVQLRMSSAYHPQTDGQTERINQCLETFLRCFVDACPXQWSLWLSVAQFWYNSSPHSAIG

SEQ ID NO: 223461 - protein, 93 aa, Zea mays
  Clone ID: MRT4577_135387C.1.pep
PIFVECRILAYSSQLAYHCSELGIATAHHKPLRSLSKACKCSLPANNLQLNLTTTASFVRGPSSKSEFVYIIKSATAHTSICLPFRLSTHLDA

SEQ ID NO: 223462 - protein, 68 aa, Zea mays
  Clone ID: MRT4577_135388C.1.pep
LLRNERRAQHMWGHLISKKIVLGIRKMSTRQRLSSSGQSFGQLVSSDQELHPLYPRSIVLFVRCGGGS

SEQ ID NO: 223463 - protein, 67 aa, Zea mays
  Clone ID: MRT4577_135389C.1.pep
YSTLYKNVTLVVWHPKVHAFILPSMFFEFLVVFLVAAFWILNLLHTQVWRHGVEIFSGLLKVCCCSL

SEQ ID NO: 223464 - protein, 57 aa, Zea mays
  Clone ID: MRT4577_13538C.1.pep
TSLCFLKQTKLQAIPHWFVNFFWGFPYINLSKKRKRGDVSAKPCWPFPRKDWQNPSH

SEQ ID NO: 223465 - protein, 50 aa, Zea mays
  Clone ID: MRT4577_135390C.1.pep
SGECSASTVTVEQSLPLSSCTRLALCITPSPGIISLDPCNQSSPHSINAF

SEQ ID NO: 223466 - protein, 76 aa, Zea mays
  Clone ID: MRT4577_135391C.1.pep
KKGKQYNEHTHSITKKGRSRLWLPFLKTPVFQPYNLLKRFPYIHVSARFKTPLFPDNPLSNPLLTPWPTLPFSPSV

SEQ ID NO: 223467 - protein, 53 aa, Zea mays
  Clone ID: MRT4577_135392C.1.pep
YHMMSTGLVLAIHIILKAPTINFSRCTRSCCSVRQQVPSHPFASSIRTANHVV

SEQ ID NO: 223468 - protein, 141 aa, Zea mays
  Clone ID: MRT4577_135393C.1.pep
GAPLLGGGFAGGGGGFGGGGGFGGGGGGFGGGNRGGGFGNSPGKLRNLPVGPPRPNFPFCPRDVFPSPKGFFSFVPFGGAPLCFFFQGPPLSVFKGVVLSGGMGVPPSTTMVCGDHGSCFPLWVMFWVFPKEKKGFLCLAN

SEQ ID NO: 223469 - protein, 92 aa, Zea mays
  Clone ID: MRT4577_135394C.1.pep
PPMRRTNSRKGRAPLVVIRMASPFLSTKTALAPTSNDLRIYPPLTKSTGHSTPFCFPHHRLQNLLPDSRPLVLWPLAQKINSNRSWKHSALA

SEQ ID NO: 223470 - protein, 82 aa, Zea mays
  Clone ID: MRT4577_135395C.1.pep
WRGRPQGGSSYTSRAGLSRGLNPIAPLSKHQVRPTRPRRNSGRWCLVVRTPREADGCNKSNARTTWLAPKKNGDSRNGMFNA

SEQ ID NO: 223471 - protein, 222 aa, Zea mays
  Clone ID: MRT4577_135396C.1.pep
MPHENNEPDDTIHILHLSYDNEDRSALTILANDVRFQIIADPKSLQKSSDKTLYYEYLDKVYGLRDAEQREYEASQQKPKDERRKKSEDRDSAVDVTADEDGDEEDEDQDSLSAAVDLKKWLLAGMTDVIAEYAPPDRTPEPSSLYDWYHGPTYFYDLAIRGGKLVPELLEENDEMLARIEKLSPRLKMPQYIQKIDVPWIDANDLTVESEVDFPEPAHWSH

SEQ ID NO: 223472 - protein, 89 aa, Zea mays
  Clone ID: MRT4577_135397C.1.pep
SRITRAERARAPYVDFLKPIIADGDTGFGGTTATVKLCKLFVERGGAGVHLEDESSVSRNCGHMSVNVRVAVSKHVNRLVAARLQFDVM

SEQ ID NO: 223473 - protein, 156 aa, Zea mays
  Clone ID: MRT4577_135398C.1.pep
MAGGSLEPGQTGAAPNQRKRKAPAPTADAEDEAEAEAEAEAEELQSVEELEREVADLDRRVLEHVRGTATLLSDAIVSRLDALRPPARPEAAVISETSVTEDDQELEKKVKILKSKIEANIADLPKVLEKINETVARCENFTNLNVNVDPVFRRKL

SEQ ID NO: 223474 - protein, 72 aa, Zea mays
  Clone ID: MRT4577_135399C.1.pep
QRDYIFYWTESRQAVDNNTSRLNVQTGRLPTPCVDRGAKATRRYDQPYRHAGQAGAFARITNAGSGQFGEHT

SEQ ID NO: 223475 - protein, 337 aa, Zea mays
  unsure (1)..(337): unsure at all Xaa locations
  Clone ID: MRT4577_13539C.1.pep
LYGDLPPPSSAGDEDKASTASVWSSATKMAPPTLRKPSTTFAPPPSILRNQXPARPNDYEDYRKDKLRRAKEAELNKELERRRREEQDREREREQREREAREREEKDYQSRASSLNISGEEAWKRRAAMSGSGSAARTPSSPPHGDGFAIGSSSSAGLGVGAGGQMTAAQRMMAKMGWKEGQGLGKQEQGITAPLVAKKTDRRGGVIVDESSSRPPEKKPRSVNFDGQPTRVLLLRNMVGPGEVDDELEDEVASECAKYGTVSRVLIFEITQADFPADEAVRIFIQFERAEEATKAMIDLQGRFFGGRVVQATFFDEERFGRNELAPMPGEVPGFFD

SEQ ID NO: 223476 - protein, 124 aa, Zea mays
  Clone ID: MRT4577_1353C.1.pep
MRPQLILVGTLAVLAILAALGEGSSSWPCCNNCGACNKKQPPECQCNDVSVNGCHPECMNCVKVGAGIRPGMGHRPRRHLPLCDDVLTNFCQSSLPGGAGAHRGLLLTYGMGRPSRVCFSPVSS

SEQ ID NO: 223477 - protein, 108 aa, Zea mays
  unsure (1)..(108): unsure at all Xaa locations
  Clone ID: MRT4577_135400C.1.pep
VTVLVEEHTCTSSARRKTTSPTSSWVASKAGFFSAQVEDXTNTHNRHVVKSYLHECTCXEWQDTGKPCPHALALIITQESVDVELEDVVHEYYXVQRLKNAYXRIIEP

SEQ ID NO: 223478 - protein, 59 aa, Zea mays
  Clone ID: MRT4577_135401C.1.pep
AVRGLLNFRFLIGADQNGFFIPPANIGSSPTGVWGFPLFRKVHARGGFFLKMATCGVVV

SEQ ID NO: 223479 - protein, 145 aa, Zea mays
  unsure (1)..(145): unsure at all Xaa locations
  Clone ID: MRT4577_135402C.1.pep
FPGELVPKGKGFLVPPNGRFPLFRGPRAPKANAPASRQKRXGLKKKXGRLRRVFFLDGCVFSFFQKFLFSGGKKNPVTPTFFFDYSGFPHISIAPFLPLPLGSPPPFFAPPFCFWVPNCLPPFSLFPPVFGGPCKLDSLFFVSAF

SEQ ID NO: 223480 - protein, 75 aa, Zea mays
  unsure (1)..(75): unsure at all Xaa locations
  Clone ID: MRT4577_135403C.1.pep
VCVLSXGICTGLGASINVAKPTKGSTVAVFGLGAAGLADAEGARIAGARRIIGGHLNPSRFVEARTFGCTVLVNP

SEQ ID NO: 223481 - protein, 73 aa, Zea mays
  unsure (1)..(73): unsure at all Xaa locations
  Clone ID: MRT4577_135404C.1.pep
MAAKIFCLLRHLGLSATAATATIFPQCSQTPISSRHLPYLIPAVSPVSDNSTLHTYTIENAIXSGNLYLTPLI

SEQ ID NO: 223482 - protein, 106 aa, Zea mays
  Clone ID: MRT4577_135405C.1.pep
AANVIYLVCSKSLCVGNWTISEYLLFQRHDLALIKINDTFPPCRLSPTSNRLPQHCSANEMTARGTRGGCACEGGGGARRWRCRCRGARHRRRGGWRRHSPRWSRR

SEQ ID NO: 223483 - protein, 24 aa, Zea mays
  Clone ID: MRT4577_135406C.1.pep
KLMTEVSPTKETIYCSKTAGKLAS

SEQ ID NO: 223484 - protein, 145 aa, Zea mays
  unsure (1)..(145): unsure at all Xaa locations
  Clone ID: MRT4577_135407C.1.pep
WGKRTRPQARILYSGRDLCVRSRDHLSSFSTESSKRGCNLIFTTLSVXIGSHNGVQMFSPLDIPHRDCLPADFTFGARAXTYPKRTSXHENGTGESNWNHFCLIHSERILDVSKSNIEAKCYPLYNTDIRLLMELGMDTYRYSIS

SEQ ID NO: 223485 - protein, 129 aa, Zea mays
  Clone ID: MRT4577_135408C.1.pep
MAAEADQKVVVHVRSTGDAPILKQSKFKISGRDKFLKVIEFLRRQLHQDTLFVYINSAFSPNPDELVIDLYNNFGIDGKLVVNYALSAAWGLSLSCSKWKSTTIPHDDCKSHLVLVLNQTLAISYRAYA

SEQ ID NO: 223486 - protein, 100 aa, Zea mays
  Clone ID: MRT4577_135409C.1.pep
EIRPEVEKQIATEVVENDASAQVEPGNGGGSAARALNQTLSSEEMQDQLEQFTYVMQQKFLSGEDTEHMDYSRIDNDEMLDDHWSREANYDAEEKYFEED

SEQ ID NO: 223487 - protein, 384 aa, Zea mays
  Clone ID: MRT4577_13540C.1.pep
MLGGLYGDLPPPSSAGDEDKASTASVWSSATKMAPPTLRKPSTTFAPPPSILRNQHLRPPKAAPTSVPAPSAVAAEPAAATSFQPAFVAVQPTVLEEYDPARPNDYEDYRKDKLRRANEAKLNKELERRRREDQEREREREQREREAREREEKDYQSRASSLNISGEEAWKRRAAMSGGGAAARTPSSPPHGDGFAIGSSSSAGLGVGAGGQMTAAQRMMAKMGWKEGQGLGKQEQGITAPLVAKKTDRRGGVIVDESSSRPPEKKPRSVNFDGQPTRVLLLRNMVGPGEVDDELEDEVASECAKYGTVSRVLIFEITQADFPADEAVRIFIQFERAEEATKAMIDLQGRFFGGRVVQATFFDEERFGRNELAPMPGEVPGFFD

SEQ ID NO: 223488 - protein, 66 aa, Zea mays
  Clone ID: MRT4577_135410C.1.pep
EGFRRWGAQSVMTDQDRELHKLSQETSFQLAPPSTTRKKGGRCGVHTRMHACMHWVFVSRVHLVNW

SEQ ID NO: 223489 - protein, 118 aa, Zea mays
  unsure (1)..(118): unsure at all Xaa locations
  Clone ID: MRT4577_135411C.1.pep
MAAEADQKVVVHVRSTGDAPILKQSKFKISGRDKFLKVIEFLRRQLHQDTLXQHNCWFYENLICDIGILLSCCLCCQQFVYINSAFSPNPDELVIDLYNNFGIDGKLVVNYALSAAWG

SEQ ID NO: 223490 - protein, 65 aa, Zea mays
  Clone ID: MRT4577_135412C.1.pep
YPLNPIRACLKRIQPLPTSEDRPSYKWRSHSLLCFTSTTISALSQTRSNPIWNEHHPLARPTPYS

SEQ ID NO: 223491 - protein, 93 aa, Zea mays
  unsure (1)..(93): unsure at all Xaa locations
  Clone ID: MRT4577_135413C.1.pep
HSQDPDATSRLKTSGKVPDAPTAALTISIIHRGNRWQVLARPANAPVSSDSFQGFSPTTHTYSAPYKTDPGSNFIPFSASSAVXPHSLKALQP

SEQ ID NO: 223492 - protein, 86 aa, Zea mays
  unsure (1)..(86): unsure at all Xaa locations
  Clone ID: MRT4577_135414C.1.pep
RPXSNKTHRHEPIFPPHVSSPPSPFPEDPCTRRHSTNRPSTPAPRAAAHPYAEITTGGCIVGSLVSSYVSAYPSNTLYLGQKCLPR

SEQ ID NO: 223493 - protein, 76 aa, Zea mays
  Clone ID: MRT4577_135415C.1.pep
FFFCPMYKAPSLVRAQITDPSLGKSLFNPMGQFSLLNFPKPGEFLGPNFFLAPYKPVKFFGGIPPKIENSDLARPF

SEQ ID NO: 223494 - protein, 34 aa, Zea mays
  Clone ID: MRT4577_135416C.1.pep
CRWCDGQVLYRHCRRHPPGAVVVPQLQCAVEAGP

SEQ ID NO: 223495 - protein, 60 aa, Zea mays
  unsure (1)..(60): unsure at all Xaa locations
  Clone ID: MRT4577_135417C.1.pep
PTSITATYCIIXNPQHVIVAVDGTPIRDFKNHEARGVAFPKSQPMRVYASFFFADGWGXH

SEQ ID NO: 223496 - protein, 76 aa, Zea mays
  Clone ID: MRT4577_135418C.1.pep
SVSIKSVGWKIVDMPMGLALMWHVTLYVANCTPDVDHFGIRVKPLVWSASTVSDGQGRKVSADKSQRLITVLLVFE

SEQ ID NO: 223497 - protein, 123 aa, Zea mays
  unsure (1)..(123): unsure at all Xaa locations
  Clone ID: MRT4577_135419C.1.pep
GXGTXKXDRXRFXSDSVXLIHRXXAXSCXQNVXXSFDTKYPGXKSKXSRSLNPPGRXDKENLTLASKDNLXXXKXYVFKLEAXLHQPXRRQXNXXKEXENALGEXSEKELXNXKXXIXXLFGG

SEQ ID NO: 223498 - protein, 100 aa, Zea mays
  Clone ID: MRT4577_13541C.1.pep
RTGVSLRPSRSGSQSFVIAVVVIVAATFSTGIDSKCLQFKQAEGESEEDDIPYGLGFLHLVFVMGAMYFAMIFVGWNASHTMERHASSIQKKKGMTWWPE

SEQ ID NO: 223499 - protein, 97 aa, Zea mays
  unsure (1)..(97): unsure at all Xaa locations
  Clone ID: MRT4577_135420C.1.pep
SPAMRHMNRKELPARNIPVTQAQSCGAPPGAAAGGXGAGRAAARYGARPRAGGYGGGGXYAGPPEGGAAGYEGGGGYAGRREGGGGGYGGGGGXWRA

SEQ ID NO: 223500 - protein, 151 aa, Zea mays
  Clone ID: MRT4577_135421C.1.pep
LAPSSPDGRTRRRFLRKVVVANHLAEILSPTGCINQTAAASSAVNSIPLRSLMVHHLGVCKMSLPPKVSPHRPFAIINGAQDQLFGPVLRSGYSEDGVEISISNAGLANLLPADADSDSTGLGMGDGMSASISRLCSSMYDCQNTWPLLFA

SEQ ID NO: 223501 - protein, 98 aa, Zea mays
  unsure (1)..(98): unsure at all Xaa locations
  Clone ID: MRT4577_135422C.1.pep
EFPRVVTRCLWGSPDLGRLVSTTVYGVVNGAPLLVVRVGYETRFLGLAGLCGPLGVVGIWRFRGSPAISXGCRRXGVVSXSGVGVXAALASGXVWAAP

SEQ ID NO: 223502 - protein, 42 aa, Zea mays
  Clone ID: MRT4577_135423C.1.pep
LRNNVLSFPMVGECHFIHNQACSLLLTTKKKKKKKKKRVPVG

SEQ ID NO: 223503 - protein, 181 aa, Zea mays
  unsure (1)..(181): unsure at all Xaa locations
  Clone ID: MRT4577_135424C.1.pep
KRMVVSFSSIPXDLIKTFXQHDHNGNSMHQLHQILSESAALIVVATSKLHPLVDIVRDAHTRMFFLIMSGVGMXPHAIVXDYITIXNVSEMXVLDRPXADYAEVNVQVQDGXSPSYYVXLDVDIEAFTAYFPHAYMYKCIGKVVQFLNXILXSKRFQDKXELVPLXLNFLEDHNDKASRMM

SEQ ID NO: 223504 - protein, 61 aa, Zea mays
  unsure (1)..(61): unsure at all Xaa locations
  Clone ID: MRT4577_135425C.1.pep
MYKTTVVMKPMAEMRLPSSKSSGKEGGEKKGKKKAKKSVXTYKMXIFKVLKQVYPRQSAYI

SEQ ID NO: 223505 - protein, 70 aa, Zea mays
  unsure (1)..(70): unsure at all Xaa locations
  Clone ID: MRT4577_135426C.1.pep
IPNHHXSSSRPFQTGGVANNKLFIKIKIFQPFYPYHNSTHISPNIIFYPIIPQTIKSPYIISIHYFSQFP

SEQ ID NO: 223506 - protein, 37 aa, Zea mays
  Clone ID: MRT4577_135427C.1.pep
SSGPKGSTPRSSSPPTRAIHCTSAGRLRQKSINLVRL

SEQ ID NO: 223507 - protein, 39 aa, Zea mays
  Clone ID: MRT4577_135428C.1.pep
FYKHMIPMVMMSYCHMLYNSYNTPYEENTILSYLIIRYA

SEQ ID NO: 223508 - protein, 26 aa, Zea mays
  Clone ID: MRT4577_135429C.1.pep
RSDNNVLRFDLGCLQPVMVGHPLLAS

SEQ ID NO: 223509 - protein, 46 aa, Zea mays
  Clone ID: MRT4577_13542C.1.pep
TVSDDIHYLLLICVHSPCRDIDNIIYNHLFCHHAHWTLVSRLHISL

SEQ ID NO: 223510 - protein, 66 aa, Zea mays
  Clone ID: MRT4577_135430C.1.pep
YLPARGQHELIEGGSQRHPICGMIRTIQSPWRKGQPEDILPVALFDQVLSPPLFLIRKGLELACLH

SEQ ID NO: 223511 - protein, 768 aa, Zea mays
  Clone ID: MRT4577_135431C.1.pep
MATAGGAAPAAMDEKARRTRDLLASFYNTDPSAAAGGAAAPAFLARPSPTAAPASPLDSINSTSFDPDIYMNVLVQQSNLEGLLQRHVKMATEIKNLDTDLQMLVYENYNKFISATDTIKRMKTNIVGMEANMEQLLTKITSVQSRSDTVNTSLFDKRENIEKLHRTRNLLRKVQFIYDLPTRLNKCIKTEAYADAVRFFTGAKPIFEAYGDTSFRDCKKASEEAMDVVIQHLQTKLYSDSEPIEARAEAVVLLKQLKFPVDNLKSNLLEKLEECLLNFQNETTHASIGDISKTFRAYLIIFPDSERRLIELAQALFLNRYETVRENLKKRIPSTDLLAMLRSLWEDATIIDEVISEAALPAFSLETTRDIVKQHIATAFLHLQSEISEALVRTHSTSNEKLEESQLQTAMETSKIKVSQGCIDLLQEFHHLVDGNIELLVKLRDLIIDWVQEGFQEFFQKLDGHFHVLSGRSKTNLQEPTMDSMQTDKTPTVLVLMLAQLCVYIEQTTVPKVTEELASFFGGGAHSYEYGPPFVPGEICRLYRSSGEKFLHHYINMKTQKISKLLNKRFTTPVWIKHKEPREVNMFVDLLLLEINGLVSEVKQILPGMVRRHRHSDSTGSTTSSRSNPMREDMLNRSNTHRARSQFLENHLAKLFEQKMEIFTKVEYTQESVISTVLKLCLKSLQEFVRLQTFNRSGFQQIQLDMEFLKTSLKEFVDDEAAISFLLKEVNNAAHERCLDPIPLEPPILDKLINAKLAKIKERNPNMR

SEQ ID NO: 223512 - protein, 154 aa, Zea mays
  unsure (1)..(154): unsure at all Xaa locations
  Clone ID: MRT4577_135432C.1.pep
PGHRPPRSQSPTPRPNSEPQNRAKPPRPPCPQPSPMARTKQTARKSTGGKAPRKQLATKAARKSAXLREIRKYQKSTELLIRKLPFQRLVREIAQDFKTDLRFQSSAVAALQEAAEAYLVGLFEDTNLCAIHAKRVTIMPKDIQLARRIRGERA

SEQ ID NO: 223513 - protein, 1110 aa, Zea mays
  unsure (1)..(1110): unsure at all Xaa locations
  Clone ID: MRT4577_135433C.1.pep
MTAPRGGGDEPPPSSAAAGHAAGNEPVTPTSALVSGLNRRGSRGAGMATFSMEVFDNEVVPSTLNSIAPILRVAAEIEHERPRVAYLCRFYAFEKAHRLDQNSIGRGVRQFKTALLQRLEKDNSPSLAKRVKKSDAREIESFYQQYYENYVRALDKGEQADRAQLGKAYQTAGVLFEVLCAVNKNEKVEELNPEIIRLHKDVQEKKDIYTPFNILPLDAASASQSIMQLEEIKAAVAALRNIRGLNWPSTFEPQRQKGGDLDLLDWLRAMFGFQRDSVRNQREHLILLLANVHIRLEPKPDPLSKLDDRAVDVVMTKLFSNYRKWCKFLSRKHSLRFPQGAQPQEIQQRKILYLGLYLLIWGEAANIRFMPECLCYIFHNMAYELHGLLAGNVSIVTGENIRPSYGGDEEAFLKKVVTPFYRVIRKEAGKSQHGKTPHSAWSNYDDLNEYFWTSDCFSLGWPMRDDGDFFKSVHDSRPVTTAGSSPQKDSTKSTGKTNFVETRTFWHIFRSFDRMWTFYILALQAMLIFAWNDYSVTEILRKDLLYYLSSVFVTAAFLQFLQSILDFILNFPGSHRCKFVDVMRNVLKMIVSAMWAVVLPFFYISTASKVNLLPFKDLEKWLRYVNGVPPLYILAVAVYLIPNILSAALFLFPMFRRWIENSDWHIVRLLLWWSQKRIYVGRGMHESQVSLFKYTFFWILLLCSKFSFSYFVQIQPLIKPTKDVMGVHNIHYEWHEFFPNASYNIGAIMSLWAPVLLVYLMDTQIWYAIFSTIFGGMTGALGRLGEIRTLGMLRSRFHSLPGAFNTYLVPSDKSKNRRFSLSKRFAEVSPNKRTEAAKFAQLWNEVICSFREEDLISDGEMDLLVVPYSSDPSLKLMQWPLFLLASKIPIALDMAAQFRPRDSDLWKRICADEYMKCAVLECYESFKLVLNLLVVGENEKRIIGIIIKEIEGNIGKNTFLANFRMSALPVLCKKFVELVSTLKERDASKFDNVVLLLQDMLEVITRDMMVNEIRELAEFGHGNKDSVPRRQLFAGSGTKPAIVFPPPVSAQWEEQXYKQIVDCLYYQACVLEYIVLYNSVHKLQCLQIKRLYLLLTVKESAMDVPTNLEA

SEQ ID NO: 223514 - protein, 109 aa, Zea mays
  Clone ID: MRT4577_135434C.1.pep
MARTKQTARKSTGGKAPRKQLATKAARKSAPATGGVKKPHRFRPGTVALREIRKYQKSTELLIRKLPFQRLVREIAQDFKTNLCAIHAKRVTIMPKDIQLARRIRGERA

SEQ ID NO: 223515 - protein, 93 aa, Zea mays
  unsure (1)..(93): unsure at all Xaa locations
  Clone ID: MRT4577_135435C.1.pep
SVSITYKNRKGTTDCGLSSCVVTATVQGVXQGFDDTFNFYPIAANILATSGISSFTVTVNNADGTKDVYDNNGQEYPIQDAIVFQAPQSCVLG

SEQ ID NO: 223516 - protein, 136 aa, Zea mays
  Clone ID: MRT4577_135436C.1.pep
MARTKQTARKSTGGKAPRKQLATKAARKSAPATGGVKKPHRFRPGTVALREIRKYQKSTELLIRKLPFQRLVREIAQDFKTDLRFQSSAVSALQEAAEAYLVGMFEDTNLCAIHAKRVTIMPKDIQLARRIRRERA

SEQ ID NO: 223517 - protein, 136 aa, Zea mays
  Clone ID: MRT4577_135437C.1.pep
MARTKQTARKSTGGKAPRKQLATEAARKSAPATGGVKKPHRFRPGTVALREIRKYQKSTELLIRKLPFQRLVREIAQDFKTDLRFQSSAVSALQEAAEAYLVGLFEDTNLCAIHAKRVTIMPKDIQLARRIRGERA

SEQ ID NO: 223518 - protein, 82 aa, Zea mays
  Clone ID: MRT4577_135438C.1.pep
MVLAVDLLNPSPAAEARKHKLKTLVPTPRSFFMDVKCPGCFTITTVFSHANTVVVCQGCSQVLCQPTGGKARLTEGCSFRRK

SEQ ID NO: 223519 - protein, 136 aa, Zea mays
  Clone ID: MRT4577_135439C.1.pep
MARTKQTARKSTGGKAPRKQLATKAARKSAPATGGVKKPHRFRPGTVALREIRKYQKSTELLIRKLPFQRLVREIAQDFKTDLRFQSSVVSALQEAAESYLVGLFEDTNLCAIHAKRVTIMPKDIQLARRIRGERA

SEQ ID NO: 223520 - protein, 58 aa, Zea mays
  Clone ID: MRT4577_13543C.1.pep
FWGVPPGKDSKKIKEALSKMGVMIPPFAKKGLKGYFCISGGKPGPPYALMKGPNALRL

SEQ ID NO: 223521 - protein, 136 aa, Zea mays
  Clone ID: MRT4577_135440C.1.pep
MARTKQTARKSTGGKAPRKQLATKAARKSAPATGGVKKPHRFRPGTVALREIRKYQKSTELLIRKLPFQRLVREIAQDFKTDLRFQSSAVAALQEAAEAYLVGLFEDTNLCAIHAKRVTIMPKDIQLARRIRGERA

SEQ ID NO: 223522 - protein, 29 aa, Zea mays
  Clone ID: MRT4577_135441C.1.pep
QFLQSFKHFYYISMDVPETARQLRINESE

SEQ ID NO: 223523 - protein, 72 aa, Zea mays
  Clone ID: MRT4577_135442C.1.pep
MARTKQTARKSTGGVKKPHRFRPGTVAALQEAAEAYLVGLFEDTNLCAIHAKRVTIMPKDIQLARRIRGERA

SEQ ID NO: 223524 - protein, 593 aa, Zea mays
  unsure (1)..(593): unsure at all Xaa locations
  Clone ID: MRT4577_135443C.1.pep
MEEEVTGSGGGIGRKMAAGEVDLKEKSGTAWSHSYLNQKPWHPLSYPNQRRKWIAEQVHANHARRQEEVQREFAQEQEFFRQTALFSKKDKEKMEVMKAVSFMYVRPPGYNAESAKAAEIEDEKKRSDPGDMGTASASTSSIPDKGPEKAKSGADKKNRPKDVFGRPLATEQEFEVLKNAPRLDTGAPARVKPFGVEVRNVRCLRCGNYGHQSGDRECPLKDAIMPNEESLLKRDDPLTTIMAQTDXSEPLKWELKQKPCMSPPRGGFDPDDPNQQIVAEDIFDDYGGFLGNCAIPALISNFSATKSKKRSKKKSKHKQAKSAIHEDSGRHESSYHLSSDFDNEKRNITSRSKRKKANCSDSSYSDSEIDARKGKSKSKHKHTKKYQLESSDSEFDVREDTRRRLKRDHMKEKRDESPLPFSKDQGDTEGKRHSRCSREKHNYSYSSSSSERGRRRSREKRHYSYSPSSSERGRHSLRHKEKQYYSDSSSDRSHRHSRRSREKRHDRDSSSPDAIRRSSRSTEKQRRPDTSPRHANGHSKKSSGKQDYTERSRYETSRHSRRSQEKRHYPDSSVSDYSDSDQHKKHRHHHRRK

SEQ ID NO: 223525 - protein, 136 aa, Zea mays
  Clone ID: MRT4577_135444C.1.pep
MARTKQTARKSTGGKAPRKQLATKAARKSAPATGGVKKPHRFRPGTVALREIRKYQKSTELLIRKFPFQRLVREIAQDFKTDLRFQSSAVAALQEAAEAYLVGLFEDTNLCAIHAKRVTIMPKDIQLARRIRGERA

SEQ ID NO: 223526 - protein, 136 aa, Zea mays
  Clone ID: MRT4577_135445C.1.pep
MARTKQTARKSTGGKAPRKQLATKAARKSAPATGGVKKPHRFRPGTVALREIRKYQKSTELLIRKLPFQRLVREIAQDFKTDLRFQSSAVSALQEAAEAYLVGLFEDTNLCAIHAKRVTIMPKDIQLARRIRGERA

SEQ ID NO: 223527 - protein, 185 aa, Zea mays
  Clone ID: MRT4577_135446C.1.pep
MWALRRAGNPLRFHAQKVVSPRGCASLEVLLTADAKNVEEHHEADCQKVCYCHKPKPPSFLLSFSSGPFAWSRGFSSQPGANSSDKDDELEDVFSDLNVPPEAGKKDAGLTSEDTSDEDATDEIGLPSMDADAKPETEHIKRTFGSTLLKTVLEAPRHQVTSALEKWAKDGNALDRGELYYVLLN

SEQ ID NO: 223528 - protein, 59 aa, Zea mays
  Clone ID: MRT4577_135447C.1.pep
LPNRGYVPETLTSITSNNSPPTLLSMNATTTGFSISHLPQPYIALPALTVRLLHKLRAT

SEQ ID NO: 223529 - protein, 94 aa, Zea mays
  unsure (1)..(94): unsure at all Xaa locations
  Clone ID: MRT4577_135448C.1.pep
ARAGRSGXYAAVLCADYAAQSLMTLHTEPQRHQPKLYVGGPRPRRSCTLTPHACNTLGGLLKSHCCRYDTGEQGHRDVNQQHGVLSLGPQALDH

SEQ ID NO: 223530 - protein, 49 aa, Zea mays
  Clone ID: MRT4577_135449C.1.pep
PTEPIKSQTLTKSKTHKWECHITVLEHLQKLRWLIYILTVVVTKKILKN

SEQ ID NO: 223531 - protein, 137 aa, Zea mays
  unsure (1)..(137): unsure at all Xaa locations
  Clone ID: MRT4577_13544C.1.pep
APALTKVSADDAARKPLPPCCLKXAKARVPANRANCHDTGDAGWFXEPKSRSGIXTSKVHDFNNPMRPGEAHSXLKWDKSCFKGNSXYQEILGFESSTYGNVLVLDGIFQLTXKDDCAYLELGTHLPLCSIPAPNML

SEQ ID NO: 223532 - protein, 83 aa, Zea mays
  Clone ID: MRT4577_135450C.1.pep
RTQASSTAAVRAIPCPRYATLPRRRFLLLLLDPRPPPYRRKSSPEMANARSGVAVHAECMLTSGELQSTDDAPLHNWQDGRHS

SEQ ID NO: 223533 - protein, 48 aa, Zea mays
  Clone ID: MRT4577_135451C.1.pep
FALLGCLVHNNSLTMCWTLNHQNIIEMVQGHIFLSLHRTNTHGSSNFM

SEQ ID NO: 223534 - protein, 79 aa, Zea mays
  Clone ID: MRT4577_135452C.1.pep
WMHFLKTYSSLLTLYSSTISYYITFLFYLPSYYSTNLHYNYLTPTPTSYCRSKSTISKYHFPRHSHALNFTLNLLNHLH

SEQ ID NO: 223535 - protein, 49 aa, Zea mays
  Clone ID: MRT4577_135453C.1.pep
RTPSLIGPHLFFFVTATRMGPNFPRHLVPPPLELGPVCFVCFEELKINP

SEQ ID NO: 223536 - protein, 264 aa, Zea mays
  unsure (1)..(264): unsure at all Xaa locations
  Clone ID: MRT4577_135454C.1.pep
IVGTFSAIPTWLSXIQDSYKEDPKAQELLVQLASNPAAVPEYTLQHGILRHKGKILVGSHLPTQQSIIGAFHTSAVGGHSGIPVTTRRIKQLFCWRGLNKSVTDFVSSCSICLQAKPDRARYPGLLQPLAVPTAAWQTISMDFISGLPKSGNADGILVIVDKFTKYNHFLPIHHPYTATSIAQLFIDHVYKLHGLPQAIVSDRDPVFTSKLWQELFTRAGVSLHMSSAYHPQSDGQTERVNQCLETYLRCFRHTCPSKWINGYP

SEQ ID NO: 223537 - protein, 61 aa, Zea mays
  Clone ID: MRT4577_135455C.1.pep
SVLVSQVLENIAKVSLVLHVVDPLSIDPHPFDARRHSTRNVSVRSALDGLLCKVTMLNAAQ

SEQ ID NO: 223538 - protein, 67 aa, Zea mays
  unsure (1)..(67): unsure at all Xaa locations
  Clone ID: MRT4577_135456C.1.pep
MKRREAVCAHRHFLGTGKPPXHPLGRSIPVEPCPGLPAFAEVDLLSLLVPIKISSTPPSGSRLDPQI

SEQ ID NO: 223539 - protein, 46 aa, Zea mays
  Clone ID: MRT4577_135457C.1.pep
GAVSIKIKVYLFGVTNLCIPLRHFGFDSPVKLERLVITCNERRSRL

SEQ ID NO: 223540 - protein, 37 aa, Zea mays
  Clone ID: MRT4577_135458C.1.pep
YIFTYINTFLYTNQNIHSSTYIQIPPYSPTISNHILT

SEQ ID NO: 223541 - protein, 54 aa, Zea mays
  Clone ID: MRT4577_135459C.1.pep
MQVTLRWKKKKKKKKRKKKKKKKKKNKKKIKKKKKNETRTKKPKPDLAQTESHH

SEQ ID NO: 223542 - protein, 70 aa, Zea mays
  Clone ID: MRT4577_13545C.1.pep
LLPFSQLAGVSPATFLIQPQLLPFYQHVVASIMQRFFPPQCLRPPAPGSICIASHVDRGRQWWCPLLDFL

SEQ ID NO: 223543 - protein, 249 aa, Zea mays
  unsure (1)..(249): unsure at all Xaa locations
  Clone ID: MRT4577_135460C.1.pep
GYLEAGRQGYIASNYQFQFDSPLQAGARESTGFSVCGNSSLALSAPGRSSPAIWYQCLSGTFYNLYSQSTGAQCIPIYITAVQQGGGASQIPDGQPQVTQPPRVSQISDGQPQATTPRPVISQISDGQPQVGTPRPVVSQISDGQPQVGTPRPTTRPVVSQISDGQPQVGTPRPVVSQXSPTANPRSAPPGXVVSQISDGQPQAPVQTGNATRPNATRPAPSQFTGAATSGMAPAGALVAGLFGLFGML

SEQ ID NO: 223544 - protein, 143 aa, Zea mays
  unsure (1)..(143): unsure at all Xaa locations
  Clone ID: MRT4577_135461C.1.pep
AGCPTRKAYHPWHGSLGSLSRKRSSRHGGKGKPLPRADPXAWPTHCTYLVATYGMTDIVREADKRATXLHKTETREDLTIIETPPLATXGLGAYMKXPMGLXTLNCARLQHVIEELTRWTYMIWRKSTKXALTKNALKYENDA

SEQ ID NO: 223545 - protein, 40 aa, Zea mays
  Clone ID: MRT4577_135462C.1.pep
FFFFFFFFFFFFFFFFFFFFFFFFFWGEKKKMFFILENYI

SEQ ID NO: 223546 - protein, 57 aa, Zea mays
  Clone ID: MRT4577_135463C.1.pep
YAAKYRHYRYIIIPQRMILRKIHPNSDISTRCKLFWGNRTIGFIPLSSFEHIAMYLL

SEQ ID NO: 223547 - protein, 108 aa, Zea mays
  unsure (1)..(108): unsure at all Xaa locations
  Clone ID: MRT4577_135464C.1.pep
AKAHRRAQERRVQRHVETLDAIRAKNKAAAPSSNRTRRPAHLPPRPQNQQRXVPAAGAHHGDGAGXQTQTAASWDSFDLLSSVPPSTSAAAPVTSTTTPSPRLEWELF

SEQ ID NO: 223548 - protein, 44 aa, Zea mays
  Clone ID: MRT4577_135465C.1.pep
YMDFIFWCSRQCNAKLTNGNSQSFFRYSLILNIKSKQIYKKYSN

SEQ ID NO: 223549 - protein, 107 aa, Zea mays
  Clone ID: MRT4577_135466C.1.pep
YLGVWVPAPPPRDIKPWFFLNLPRLGGFFLGGGRPKLFCCFPGVNFTLFFCRGGKMAPRSGKIFSLSHPNYVGGWSPPLLPKNKQKKKKKETKQIKKKKKKNKKKQK

SEQ ID NO: 223550 - protein, 64 aa, Zea mays
  unsure (1)..(64): unsure at all Xaa locations
  Clone ID: MRT4577_135467C.1.pep
LVTTNMDVKSRPTFHLQXLVCLGAFXRPQFDIXLLDVSGVRQFIAFVSITNCDYXPSXXLTIII

SEQ ID NO: 223551 - protein, 202 aa, Zea mays
  unsure (1)..(202): unsure at all Xaa locations
  Clone ID: MRT4577_135468C.1.pep
TVKFGHVTFXWNGNRSGYXDATKEEYVEVPSDSGITFNVAPNMKXALEIAEKARDALLSGKFDQVRVNLPNGDMVGHTGDIEATVVACKAADEAVKIILDAVEQVGGIYLVTADHGNAEDMVKRNKSGKPLLDKNDRIQILTSHTLQPVPVAIGGPGLHPGVKFRNDIQTPGLANVAATVMNLHGFEAPADYEQTLIEVADN

SEQ ID NO: 223552 - protein, 63 aa, Zea mays
  Clone ID: MRT4577_135469C.1.pep
ACMRPCPCKPGPCLCIWSHTSSGGRARSSLGQAGALDAPPLIIRRRTVRSFGCGFRHLLVLVC

SEQ ID NO: 223553 - protein, 201 aa, Zea mays
  Clone ID: MRT4577_13546C.1.pep
PRGRPGRPPVCLATLASAPTASTSISAPRSMLDAPVVTSPRQQPDPTMPRKACLCTRRCILRFCSALHDPVVIHPASTPAIVSSASTLRSMPPSSSIHAQTLSAPPAAINNNLPRAPSSPRICLIHVKSTFAAVSRPSSTDGSVHVRGGEDAGPRDVAPNTAKHFECKLEERGLHRFERHLANAPHGVGIDAPPPKSGCGG

SEQ ID NO: 223554 - protein, 60 aa, Zea mays
  Clone ID: MRT4577_135470C.1.pep
TPSLPSLPRISEMRSRSTLSLPRSAGDTAQRGSALSLILALRLCETACASTACRCAASTG

SEQ ID NO: 223555 - protein, 116 aa, Zea mays
  Clone ID: MRT4577_135471C.1.pep
TRIPPLHASSSSRAPWMLITAITPPIPSSTTSPAKDSMKKRIIVITTETLEYRDHTHCIGEICIEKGLNRLILTNYTTVQVCVPVSQADEVYPLSSCSSCKIYSWEYMIKTIHQHE

SEQ ID NO: 223556 - protein, 62 aa, Zea mays
  unsure (1)..(62): unsure at all Xaa locations
  Clone ID: MRT4577_135472C.1.pep
LLVPQDKCVARCTAGRMSSAKERGWEFFFFFVFFFFFFIFFFLFLLMNSPPPTPLYILPXTR

SEQ ID NO: 223557 - protein, 89 aa, Zea mays
  Clone ID: MRT4577_135473C.1.pep
LPRRAVDYSLCVPTVYVESSISLTSCHVVMQRLCVHRFPCHRRIALRQPPHMLLSLTHEARRSNPFFLDSYRFYTHAYVQIQWRLHRAA

SEQ ID NO: 223558 - protein, 80 aa, Zea mays
  Clone ID: MRT4577_135474C.1.pep
PNVVVVWIWKNFLRSKSGEFSISIRGVARFPHHNHVVGSHSKFLIFQCGWCYCWGQNSVIHFILVLNPSSCDLFSISNRG

SEQ ID NO: 223559 - protein, 389 aa, Zea mays
  Clone ID: MRT4577_135475C.1.pep
MGYIGHHGVATLRRYKYSGVDHSLVAKYILQPFWSRFVNIFPLWFPPNMITLTGFMFLLTSAFLGFLYSPHLDTAPPRWVHLAHGLLLFLYQTFDAVDGKQARRTNSSSPLGELFDHGCDALACAFESLAFGSTAMCGKATFWFWFISAVPFYFATWEHFFTNTLILPIVNGPTEGLMLIYLCHFFTFFTGAEWWAQDFQKSMPLLGWVPLISEIRVYDIVLCLMIAFAVIPTIGSNIHNVYKVVEARKGSMLLALAMLFPFGLLLAGVLVWSYLSPSDIMRTQPHLLIIGTGFAFGFLVGRMILAHLCDEPKGLKTGMCMSLAYFPFAIANALTARLDDGNPLVDEQLVLLMYCLFTVALYMHFATSVIHEITNALGIHCFRITRKKA

SEQ ID NO: 223560 - protein, 95 aa, Zea mays
  unsure (1)..(95): unsure at all Xaa locations
  Clone ID: MRT4577_135476C.1.pep
GSAARPLYVSASLTMPAPWRRRGAQDPDEDEDAAASAMPATSSDCGSTHASHRIPRTRDAISETLGTGALASGLNSRRRAGEASDYASPXXSSAA

SEQ ID NO: 223561 - protein, 86 aa, Zea mays
  Clone ID: MRT4577_135477C.1.pep
GGGLTVEQIAEVQDYAEDLKYPSTSLVYGGNDEDDYLYCLLDNRELEVCRKMMDKMGYPKLECELSAMPKDQLAYCLAYNTLKVGI

SEQ ID NO: 223562 - protein, 234 aa, Zea mays
  unsure (1)..(234): unsure at all Xaa locations
  Clone ID: MRT4577_135478C.1.pep
MQSDQPVISLRPGGGGGPRAGRLFSPAFATSVSGDFLRLHVGGASGISKIGDSHFEPRERVRYTRDQLLELRELVDVSEDILRLKQEIDIELHGEDQTWIHNDSAVQGQVQGQTQAQNRYAETDNRDWRARSAQPPSANEEKSWDNIREAKEAYTSSGRQQEQANRQDQLSSQFASKAQFGSTPALIKAEVPWSARRXNLSEKERVXETVKXILNKLXPREIDLLRVTKEAGIL

SEQ ID NO: 223563 - protein, 147 aa, Zea mays
  unsure (1)..(147): unsure at all Xaa locations
  Clone ID: MRT4577_135479C.1.pep
WIKELPSVDWSLRTTPSRATGFSPFFLVYGAEAILTTDLEHGSPRTKAYDDQNNQTSREDSLDQLEEARDVALLHSARYQQFLXHYHAXKDSARSFQVGDLVLRLRQDARGRHKLTPPWEGPFIIAKILKPRTYKLANDQGKVYSNA

SEQ ID NO: 223564 - protein, 49 aa, Zea mays
  Clone ID: MRT4577_13547C.1.pep
LQDNTFTQYLKVIKHWHDNFPNRNGCLMFEIFIVCEWMSILNKTICVLV

SEQ ID NO: 223565 - protein, 265 aa, Zea mays
  unsure (1)..(265): unsure at all Xaa locations
  Clone ID: MRT4577_135480C.1.pep
MASAPRLSSAFRAATPLRTTAFNGLRFYSSKTTSLKETFANKLPGEIEKIKKLRKEHGNKVIGEVTLDQVYGGARGIKSLVWEGSVLDSEEGIRFRGKTIPECQELLPKAPGGQEPLPEGLFWLLLTGEVPSEQQVRDLSAEWAARSDVPKFVEELIDRCPSDLHPMAQFSLAVTALEHESNFAKAYAKGMHKSQYWEHTFEDSMDLIAKLPTIAAKIYRNIYKDGKVAPIQKDKDYSFNLAXQLGFSENRXFVELMRLYLTXHT

SEQ ID NO: 223566 - protein, 444 aa, Zea mays
  Clone ID: MRT4577_135481C.1.pep
MASCFCFRRRRRPIIASSVPLFLLLVSFLASASASSATTTKLLGSGNNATRRVAFSSEELRGLRSITARLARLRDASVKTIQSPDGDVIDCVPAHLQPAFEHPKLRSQKPEEEPEERPRSSAGRFSDAGQDEDDDPLPQVWRRSGEPCPEGTVPVRRTTEDDVLRATASSATRFGMKARGAGLGFARRDSTGGGHEHAVGYVTGGQFYGAKASLNVWPAQVASPAEFSLSQIWVISGAFGNDLNTIEAGWQVSPQLYGDNSPRFFTYWTDDAYQETGCYNLHCSGFVQTSSRVAIGAAISPVSSYAGRQFDVTLLIWKDPRRGHWWLQLGSGALVGYWPSALFTHLGSRADMVQFGGEVVNARPAGAPHTPTQMGSGRFPAEGYARAAYFRNVQLVDWDNNLVPAAGLRLLADRPGCYDIAGGSGGAWGTYFYYGGPGRNARCP

SEQ ID NO: 223567 - protein, 48 aa, Zea mays
  unsure (1)..(48): unsure at all Xaa locations
  Clone ID: MRT4577_135482C.1.pep
RPHIFVIVKSGSYCLILFTFYYTRAXSSGPLPYYXYYFDPPPPPPVTK

SEQ ID NO: 223568 - protein, 275 aa, Zea mays
  unsure (1)..(275): unsure at all Xaa locations
  Clone ID: MRT4577_135483C.1.pep
QHAVGYVTGGQFYGAKASLNVWPAQVASPAEFSLSQIWVISGAFGNDLNTIEAGWQVSPQLYGDNSPRFFTYWTXEQLPRSSLVTIFSGHQSSKKMETXQDDAYQETGCYNLHCSGFVQTSSRVAIGAAISPVSSYAGRQFDVTLLIWKDPRRGHWWLQLGSGALVGYWPSALFTHLGSRADMVQFGGEVVNARPAGAPHTPTQMGSGRFPAEGYARAAYFRNVQLVDWDNNLVPAAGLRLLADRPGCYDIAGGSGGAWGTYFYYGGPGRNARCP

SEQ ID NO: 223569 - protein, 51 aa, Zea mays
  Clone ID: MRT4577_135484C.1.pep
CQSSMECHERTMVVQNWAAMAMAAYRVGVRVSTAAKLHVEASSRRTRPRVR

SEQ ID NO: 223570 - protein, 91 aa, Zea mays
  Clone ID: MRT4577_135485C.1.pep
RACCTTESMQPVSMRTATWQVHPGFGCCYNGTTMDAAAVPVRLARSPEPPFMVLSPSMRLGRSTIQTMNKYLFTKHCIIDISMPTELRCCC

SEQ ID NO: 223571 - protein, 160 aa, Zea mays
  unsure (1)..(160): unsure at all Xaa locations
  Clone ID: MRT4577_135486C.1.pep
FADAAAVYDVGFFDQIRQIEAFGAWPVATVSAGEKKVTVEGPLCSASEVVGWFSRDLDDDGTTRSVAYDRREADLDPAAAGTRARTTTTIGVSGFAFNSSILWDPERWGXASSSLPDTSQDSIKFVEEVVLEDRAKLRGIPSGCSQVMVWQYSDMPSSQQ

SEQ ID NO: 223572 - protein, 153 aa, Zea mays
  Clone ID: MRT4577_135487C.1.pep
GRDLRRGGFCLTFQRRRAFGAWPVATVSAGEKKVTVEGPLCSASEVVGWFSRDLDDDGTTRSVAYDRREAGLDPAAAGTRARTTTIGVSGFAFNSSILWDPERWGRPASLPDTSQDSIKFVQEVVLEDRAKLRGIPSGCSQVMVWQYSDMPSS

SEQ ID NO: 223573 - protein, 525 aa, Zea mays
  Clone ID: MRT4577_135488C.1.pep
MDGHGAVSPWSVLGGAAAVLFLWLASQVLEWAWWAPRRVNRALRAQGLRGTRYRLLCGDLIEEQRLRAAALARPVPVDRPHDFLPRVAPFLHRVLQEHGKLSFTWFGPTPRVLITDPELAREVLSNKCGDFVKSLLSPLSTLLVAGLVVLDGEKWVKHRRILNPAFHAEKLKGMLPAFLACCNELVDRWEKQISASAEPTELDVWPEFQNLSGDVISRAAFGVSYEEGRRIFLLQAEQAERLVQSFKTNYIPGFSLLPTENNRRMNEIDREVKTILRGIIEKRQKAAKNGEATKDDDLLGLLLESNMNYSDSDGKSSKGITVEEVIGECKVFYFAGMETTAVLLTWTVAVLSMHPEWQDRAREEVLQVFGENKPDFNGVARLKVVTMVLYEVLRLYPPVAAINRRTRQPTKLGGVTYPAGVMLTTPVMFIHRDPALWGSDADEFNPGRFADGVSKACRDPGAFAPFSWGPRVCIGQNFALLEAKLAVSMILQRFAFEVSPAYVHAPYTVLTLHPQHGAPVRLRRL

SEQ ID NO: 223574 - protein, 74 aa, Zea mays
  Clone ID: MRT4577_135489C.1.pep
LGGGAFRGPPPRFGNASKGKDLLVQSPICKLKPGKGVSHRNFCHIRSLQPKPLGCSGSSCPWFKSETIGGCYPQ

SEQ ID NO: 223575 - protein, 168 aa, Zea mays
  Clone ID: MRT4577_13548C.1.pep
RCCRVKNPSSNGVLTAAAAFSDSKAMRESGKAAAARPYKGVRMRSWGSWVSEIRAPNQKRRIWLGSYATPEAAARAYDAALLCLKGSDAVLNFPSSSASSTHRRADDSSGGRPDDDDPGASGGMSPRSIQRAAAAAAAAFGDAAGIGASATTTPTPASLSTQGSTDHA

SEQ ID NO: 223576 - protein, 81 aa, Zea mays
  Clone ID: MRT4577_135490C.1.pep
WTNLSAATGEGPRASKRAVTSWLRLLGCGRDGVPILCLGELGGGHLYSGCLGVRLGGVGLHRGGPPRAWGVVCGAGTGVWA

SEQ ID NO: 223577 - protein, 39 aa, Zea mays
  Clone ID: MRT4577_135491C.1.pep
FALTRGPTNLSYIVPTHDVQGGVRAKCAPARNQSRYRGI

SEQ ID NO: 223578 - protein, 79 aa, Zea mays
  Clone ID: MRT4577_135492C.1.pep
SKKPGRGNRESKNPSAPLCGGKVYDQGGTCSALCLFRCFAAWGYSFLGGGWNPFPQNPLRGINKMVCIRGLPGTRKGFS

SEQ ID NO: 223579 - protein, 67 aa, Zea mays
  Clone ID: MRT4577_135493C.1.pep
KNLYRYNYKYRHVDWFLIPPYSCNDIEGSGTSPRVYTFMYNISFPSTICMDLILKLRVTSRTLVLIA

SEQ ID NO: 223580 - protein, 60 aa, Zea mays
  Clone ID: MRT4577_135494C.1.pep
DGQITIAQQVCVATTAAMGGEDLSVPVKGLKPGVGGKGGLPSRSTSGRSSSSRAPRCIFR

SEQ ID NO: 223581 - protein, 54 aa, Zea mays
  Clone ID: MRT4577_135495C.1.pep
AATLQLQITLTSTQTNQCKPRYDHGHHNHRSKKKPKKQSYQHQTPQPKKQAQPT

SEQ ID NO: 223582 - protein, 102 aa, Zea mays
  Clone ID: MRT4577_135496C.1.pep
TGSSLARIFLSGVAALTVPAAFSYAGATVRYVIWSPEDVALDRDHVYVQLLLQHGGHGVGPLLCRSAGPHAVESLLRSGVDRGVVLIHGCPLSRQCPRSGLR

SEQ ID NO: 223583 - protein, 83 aa, Zea mays
  Clone ID: MRT4577_135497C.1.pep
SEGSRSHTLAQTVGRIVRQLQPFPSRESGGASPQILVHPQQLSQLIIGCHLHQALVNNAYALYCHVESHPLVKKKKKKKKRRP

SEQ ID NO: 223584 - protein, 68 aa, Zea mays
  Clone ID: MRT4577_135498C.1.pep
ATRRPRDIALQPREARQRGMLQLHTRHVMMCSPLHPNYPVVQKSARNPRQKYSMQHPRVRPRVLGCVG

SEQ ID NO: 223585 - protein, 141 aa, Zea mays
  unsure (1)..(141): unsure at all Xaa locations
  Clone ID: MRT4577_135499C.1.pep
DLSSCEPSEYYSVYESTTSGGPGPPSCSEEKHHYSLNYHETDQXSIDGDYCYSDTEVDAAIGEDKYERYKTDEKENEHDEHLPEDANIAAGAFXLYVKDYAKKVPENTHXRNKIADEVADVLAVGADGYVFHEQLHMKNDA

SEQ ID NO: 223586 - protein, 86 aa, Zea mays
  Clone ID: MRT4577_13549C.1.pep
PAFFWPPRFGSPPMASFRWESFFLKSGWPIKPFFLRGKVFPAFFFGVRFHFSSLWPIKCPFKGARLVFPLVLKGLPPPFFFPIPVV

SEQ ID NO: 223587 - protein, 99 aa, Zea mays
  Clone ID: MRT4577_1354C.1.pep
MRPQVILVGTLAVIAILAALGEGSSWPCCDNCGACNRKQPPECQCNDVSVNGCHPECKNCVKVGAGIRPGMGPGPVVTYRCDDVLTNFCQTSCPEAPAP

SEQ ID NO: 223588 - protein, 60 aa, Zea mays
  Clone ID: MRT4577_135500C.1.pep
LGSKLKDWDKMKDSSASVRKKRFLQSTLLIRNRNIVSNLGPVWFVAKCATLCLRLVVRIE

SEQ ID NO: 223589 - protein, 67 aa, Zea mays
  unsure (1)..(67): unsure at all Xaa locations
  Clone ID: MRT4577_135501C.1.pep
SFASRLXHTLGSPGVILSPSKAIEREGGLVEQYNVTSRHSNPACSIFLADSQVTVNNYNTHLKARWT

SEQ ID NO: 223590 - protein, 61 aa, Zea mays
  Clone ID: MRT4577_135502C.1.pep
ATWQRHLGTEKGVVCSRIGEGSYPNNNIILYLTLFPQIIPIIPVYRSTPLSIFLIGQREDA

SEQ ID NO: 223591 - protein, 251 aa, Zea mays
  Clone ID: MRT4577_135503C.1.pep
MARCGIAVAEQLRREIAASQRAQIEGHHVTFIVPTVPSDGAHCRHPKCLVHPSNSTQEQRYSKQSSKKSQREVPYRQWRGAEHYRRKDEPTAVPGTPTNNPPLHMRPMIRTRTIPNHWRAPATLPRAPTSEAKAGSIRIIASAEGEAEADYSVEKDAIEGIRLQVVENINKYQAETIKWRDRKVRLKNIEPGHLVLRRVVNPETVGKLQLKWEGPFLVVSSSRPGSYRLKDMDDNDIPRSWNADELWRYYV

SEQ ID NO: 223592 - protein, 647 aa, Zea mays
  Clone ID: MRT4577_135504C.1.pep
MEQSSDGLPISQRRANSSTKHSSKSDEVAEDMLQSNIPHETVRLCQGVESEEIEGPPHKKIVQNFTESSSSKNKKHRWSSEEDEALKQMVKKYGTKNWRTIACAIPGRNANSCLSRWKYLLDPAINKEPWSQQEELRLIRAQQVYGNKWCKMVKHFPGRTNDALKEHWRSPMKRKLDSYLASGLLEHVPDLQDDVSFPQTQNNQSDIPKDCKAASDRNRFSSRLSTDPKLKQELTELDENGNTSARKSSDLFYAKAPDTHSAKISEMRMAKSQQCAGTRKKLAFLSTPVELKSVVPHETTKHCQDMEPEKTEGPLCKRNSHCIKDGSSLKIPESTKGKWLAEEDEILIKMVTKHGKNWQTVAFAIPGREAKQCQIRWTRSLDPAIKKQDWSEQEDLKLIRAHQIYGSQWLKMVKHFPGRTNHALKEHWRNRIKGKLNFYLASGLLEQVPDLEEGGISVPESSQSEIPKDSQGSADRSGPPPVLRAQPKSKPELPENAGTSGEGTSDSIRLKGPNAHPTEVSEKVLAKSKQRARARRRLDFLSTPVELKLCTAAASCQRPPQKMDQPGPVAENISPSDACQDISQNVPPERADAITPLAASNHHSPATPVDPFSLEMHEANASDLLDMSYCDGLIIDSPRDPHDGSLM

SEQ ID NO: 223593 - protein, 61 aa, Zea mays
  unsure (1)..(61): unsure at all Xaa locations
  Clone ID: MRT4577_135505C.1.pep
YAXYVKICTDASSIKEMIPWGALVMLTPSLMXNLFGIETLSGVFAGALVFGVQDNARSILR

SEQ ID NO: 223594 - protein, 133 aa, Zea mays
  Clone ID: MRT4577_135506C.1.pep
FPGRTNDALKEHWRSPMKRKLDSYLASGLLEHVPDLQDDVSFPQTQNNQSDIPKDCKAASDRNRFSSRLSTDPKLKQELTELDENEMRMAKSQQCAGTRKKLAFLSTPVELKSVVPHETTKHCQDMEPEKTAI

SEQ ID NO: 223595 - protein, 276 aa, Zea mays
  Clone ID: MRT4577_135507C.1.pep
MPFLHFVLMGLPYRWTRSLDPAIKKQDWSEQEDLKLIRAHQIYGSQWLKMVKHFPGRTNHALKEHWRNRIKGKLNLCLASGLLEQVPDLEGQSEIPKDSQGSADRSGPPPVLRAQPKSKPELPENAGTSGEGTSDSIRPKGPNAHPTEVSEKVLAKSKQRARARRRLDFLSTPVELKLCTAAASCQRPPQKMDQPGPVAENISPSDACQDISQNVPPERADAITPLASSNHHSPTTPDDPFSLEMHEANASDLLDMSYCDGLIIDSRRDPRDGSLM

SEQ ID NO: 223596 - protein, 51 aa, Zea mays
  Clone ID: MRT4577_135508C.1.pep
FFLFFFFYFFFFCSLYIIRHFFQPRGKHTCLRFEGQTGKSAKYYFMTSHPY

SEQ ID NO: 223597 - protein, 76 aa, Zea mays
  Clone ID: MRT4577_135509C.1.pep
TGVVRIFRLVLHPFFVPSSGLYLVICHLTGTSYIGTPTDVIRLLKFREGHHHQTCLPRSHEATIPHTRRACAKRKF

SEQ ID NO: 223598 - protein, 142 aa, Zea mays
  Clone ID: MRT4577_13550C.1.pep
MTPILFQVAYSPEAPSLDSMQRRKVKERLRAICSEIPIYVFVVKKSNIFGQSQDMVFSRKYPDVCLPFKSGALILQCHGKSWEVILEVRKDQGESKRLRIGWAKFARDNNLQLGDICLFEPLKTMKYPMNVPIVRRRVRFGK

SEQ ID NO: 223599 - protein, 318 aa, Zea mays
  unsure (1)..(318): unsure at all Xaa locations
  Clone ID: MRT4577_135510C.1.pep
MGSADLVLKMACEGCGNTSDLYGTGCKHTTLCSDCGKSMARSRARCLVCSAPITRLIREYNVRANSVMDKTYSIGRFVTGLPPFSKKKNAENKWSLHKEGLQGRQIAENMREKYNKKPWILEDETGQYQYQGQMEGSQSATATYYLLMRHGKEFNAYPAGSWFNFSKIAQYKQLTLEEAEEKMNKRKTSATGYERWMMKAAANGPAAFGSDMKKLEATNGGEKESARPKKGKKNEQGNNSDKGEEADEEEATRKNRLGLTQKGMDDDEECGKHXHFDSDDEXLTKCDDWEPEETFTDDDEAADIVPRERAHLAXPEIP

SEQ ID NO: 223600 - protein, 119 aa, Zea mays
  unsure (1)..(119): unsure at all Xaa locations
  Clone ID: MRT4577_135511C.1.pep
KTYSIGRFVTGWPPFXKRGXENKWSLHKEGLQGRQIAENMRVIGVGVLGFGLKDPGSRRSRDDGEEKYNKKPWILEDETGQYQYQGQMEGSQSATATYYLLMXDGKEFNAYPAGSWFNF

SEQ ID NO: 223601 - protein, 44 aa, Zea mays
  Clone ID: MRT4577_135512C.1.pep
VATRLVRLEKKMLHACLQATNEFINDLPDHTVSPCPAPYAPELK

SEQ ID NO: 223602 - protein, 168 aa, Zea mays
  unsure (1)..(168): unsure at all Xaa locations
  Clone ID: MRT4577_135513C.1.pep
MAITSSYPTGRSCTLLIALMTPLSLPASXHKYTRLEQVAETLSGHTINLCPNXAPQAITXTHSPYXEIYFLNPTCRCSHTGSINNFLNTMHVLPMLPPYYYTSVDSTKSNSMTIISATAMXPPCLRSLELSVXILNXGSCILLIQXLQTISSXSVLGSSCKSYLTILA

SEQ ID NO: 223603 - protein, 156 aa, Zea mays
  Clone ID: MRT4577_135514C.1.pep
QKFLFFFKEGVPFKPLLGGVLVLVSPPDPIGHRVFFGPAPLGDRAGQIFPPKGPPGYKRGSLFSRGGALAGFTPENFLFIGLANGVGGGVPRTKGPKILGAKVSLKSQAPFGARAGFPKGPVVGLKKGDPWGWAPPPGFFSRFWRFGALMVCFSLF

SEQ ID NO: 223604 - protein, 135 aa, Zea mays
  Clone ID: MRT4577_135515C.1.pep
YASLNQVYVGKEKQTVAEMLPYLRLGYISDPDEMQSILSSEGDTCPVSPCTERAVLDQLGGYLESRLAGYPTTLNEDEAMLADGSLEPKQEVATRLVRLEKKMLHACLQATNEFINDLPDHTVSPCPAPYAPELK

SEQ ID NO: 223605 - protein, 41 aa, Zea mays
  unsure (1)..(41): unsure at all Xaa locations
  Clone ID: MRT4577_135516C.1.pep
RXPXHHEPRHARRRRLCSSAHGLWLCVESEEGVPGNVGGGP

SEQ ID NO: 223606 - protein, 382 aa, Zea mays
  unsure (1)..(382): unsure at all Xaa locations
  Clone ID: MRT4577_135517C.1.pep
LVVTLERVLGDESMAELLTNNKLSEVACLAFNLIQEXKKQGKDSFWYTYIKELDRHRGRGQLAVESPLLWTESELDYLSGSPLKDEVVARDEAIRREYNELDTLWFMAGSLFQQYPFDIPTEAFPFEIFKQAFVAVQSCVVHLQKVSLARRFALVPLGPPLLTYKSNCKAMLTADGDSVRLVVDRPYKAGEPIIIWCGPQTNSRLVLNYGFVDEDNPFDRVAIEASLNTEDPQYQEKRMVAQRNGKLAIQNFNVYVGKEKQTVAEMLPYLRLGYISNPDEMQSILSSEGDTCPVSPCTERAVLDQLVGYLESRLAGYPTTLDEDEAMLADGNLEPKKEVATRLVRLEKKMLHACLQATNEFINDLPDHTVSPCPAPYAPELK

SEQ ID NO: 223607 - protein, 113 aa, Zea mays
  Clone ID: MRT4577_135518C.1.pep
LRLGYISDQTKMQSILSSEGDTCPVSPCTERAVLDQLGGYLESRLAGYPTTLNEDEAMLADGSLEPKQEVATRLVRLEKKMLHACLQATNEFITDLPDHTVSPCPAQYAPEMK

SEQ ID NO: 223608 - protein, 168 aa, Zea mays
  unsure (1)..(168): unsure at all Xaa locations
  Clone ID: MRT4577_135519C.1.pep
NKTGGKQTHPWGKTKRGRGHPPTAEPKTQKGFFPPPNTKKRRAKHPPQQGPTKKPRGGLEKXPPGQLTLNKNPPGGGRPRNXPPXGPHPGAAGGGGPTGAPQTPSGGGAGATPQSXPQRREGQQRGAXXPAPHSPPRGAPPGAGVCAPGPKGGAPGPFFPRVGRGRRG

SEQ ID NO: 223609 - protein, 113 aa, Zea mays
  unsure (1)..(113): unsure at all Xaa locations
  Clone ID: MRT4577_13551C.1.pep
PPPFGPLPKGPRPGLFPQIPKXEGEPPFIFFPXVSAPGQKNPRPQETPGNAPGPWHGRSPGGKAPGLXPGSPPRAAPSMGVPPVPGXVPPPSQGLGCGPPLPPRCFAPFLTLF

SEQ ID NO: 223610 - protein, 75 aa, Zea mays
  unsure (1)..(75): unsure at all Xaa locations
  Clone ID: MRT4577_135520C.1.pep
RDLGTSRSRAVALSTQDFSSRACQWVPPINAGAALYFHLFFYKGYALNTVAGEWCCGHNTSCXIQCIHIRVLSVT

SEQ ID NO: 223611 - protein, 121 aa, Zea mays
  Clone ID: MRT4577_135521C.1.pep
LPSLFSLPSRVLILRRVQQPPHSPYPAVQVQRPAPAAGHSRYILTSFSLSSGARGPGVRVPRGHTHDSSTRRRSAAVPVILLPSSLHRADIMRTELINGKNYSAHGNGVNYDTKVGPARRL

SEQ ID NO: 223612 - protein, 69 aa, Zea mays
  Clone ID: MRT4577_135522C.1.pep
KKPNEDFSSNKRGAAKQNLGANHGAGLHKQKSMGGWDKRGKKNPQLNNGDPGAPIRRKRQKKGPKQMGG

SEQ ID NO: 223613 - protein, 196 aa, Zea mays
  unsure (1)..(196): unsure at all Xaa locations
  Clone ID: MRT4577_135523C.1.pep
MSRPPNRSDAHLSAEDEAALEAEVREYYDDAAPKRHTKPSRSEHSXPCTSTRSSRTSXNSHPELDKFQELEAHTERLVYEGANVGDEFVETEYYKDLGGVGEQHHATGTGFIKMDKAKGAPFKLSEDPNAEERHASCRGNPATNEWIPSADTVKTGGAQSSLSYAGVPGVRQAKQKRQLRDCISPAMRIQTSAFHH

SEQ ID NO: 223614 - protein, 91 aa, Zea mays
  Clone ID: MRT4577_135524C.1.pep
RIPGGPLGGVVYPLYPGGSFDPLGLPGAPGAFSGLKVKGFKNAPPPRFSRLGFFVQAIVPGKGPLKNPPGPIAGPVNNKGWGYPPKFVPAK

SEQ ID NO: 223615 - protein, 121 aa, Zea mays
  Clone ID: MRT4577_135525C.1.pep
MARARGAVPVREPRVVRRPGSAPPVSGAVALVAGAAPERSRRVLACLGRRGGGRGLLDARGSRTRAHAGHPVLRLRLEVRGRRVAVCAPGRGGPRGGSLWLSGWPPGPLANLGAPSERGSP

SEQ ID NO: 223616 - protein, 203 aa, Zea mays
  unsure (1)..(203): unsure at all Xaa locations
  Clone ID: MRT4577_135526C.1.pep
MSRPPNRSDAHLSAEDEAALEAEVREYYDDAAPKRHTKPSRSEHSXPCTSTRSSRTSXNSHPELDKFQELEAHTERLVYEGANVGDEFVETEYYKDLGGVGEQHHTTGTGFIKMDKAKGAPFKLSEDPNAEERHASCRGNPATNEWIPSADTVKTGGAQSSLSYAGAGSAPIGVSTDERIVKQVAVASFQVYPASDKPSRSDS

SEQ ID NO: 223617 - protein, 165 aa, Zea mays
  unsure (1)..(165): unsure at all Xaa locations
  Clone ID: MRT4577_135527C.1.pep
MSRPPNRSDAHLSAEDEAALEAEVREYYDDAAPKRHTKPSRSEHSXPCTSTRSSRTSXNSHPELDKFQELEAHTERLVYEGANVGNEFVETEYYKDLGGVGEQHHTTGTGFIKMDKAKGAPFKLSEDPNAEERHASCRGNPATNEWIPSADTVYPASDKPSRSDS

SEQ ID NO: 223618 - protein, 75 aa, Zea mays
  Clone ID: MRT4577_135528C.1.pep
FEAPCSYDMWKCHRGTMALPGELGSSLRQAVIRLAIGTAGLPAGPGPVLSGIPTRLNFLKKLVRFMCRRGDIEFF

SEQ ID NO: 223619 - protein, 153 aa, Zea mays
  unsure (1)..(153): unsure at all Xaa locations
  Clone ID: MRT4577_135529C.1.pep
MPKKVAMRRGKPAPDQGKRRRHGPRLSKVMLRELDAMGPGPARGSDGEEDGSDAVAEDVYEYEEGVPEEEAGKNGRYDTVAKYEYNFDSDASDADXDVPSEEGEDMDEDDNDDGDDEEKQIRILQETTGMPREAFDGKKRKQPSELHLQHGDG

SEQ ID NO: 223620 - protein, 135 aa, Zea mays
  unsure (1)..(135): unsure at all Xaa locations
  Clone ID: MRT4577_13552C.1.pep
KQKKKAGGGKGKTERAREKKPGPPKKRKEKKGQGEKKKKRGRLFSKKEKTLGWKKKGGPKGPRAGVKRGRNKGQKRGGPGFVHPQTGGGGHRPVQPGPDFGKGTGHGGQKPLKTGGGPXVEGGQPREPPPEKMGG

SEQ ID NO: 223621 - protein, 52 aa, Zea mays
  Clone ID: MRT4577_135530C.1.pep
SFFFFCPGSSTKYWPKWGETPMKLTLMIHHRLSENFRLTHPSGILEPRPHNS

SEQ ID NO: 223622 - protein, 46 aa, Zea mays
  Clone ID: MRT4577_135531C.1.pep
LPVCLMGTKNALSNKSAGHERAIWVCYELCLAKELLGGMFNCRLDG

SEQ ID NO: 223623 - protein, 124 aa, Zea mays
  unsure (1)..(124): unsure at all Xaa locations
  Clone ID: MRT4577_135532C.1.pep
KADRPGGDKHGNGKDDCHRCCHKQSKLPEDAVVIAIPVRAVEHRKDAAAHEKAEGNAAXXCCXXXXXXXXXCAEAHGGEDEVCIVISARSPCCSTARSRSASPKDAMCCGSGGKDGGAISALVC

SEQ ID NO: 223624 - protein, 64 aa, Zea mays
  Clone ID: MRT4577_135533C.1.pep
IPGSTHASEKKKKKKKKLKIKKKKKKKKKKKNNNLWKTKINNHSYFHLINSFLLPLNFNLLPFF

SEQ ID NO: 223625 - protein, 355 aa, Zea mays
  unsure (1)..(355): unsure at all Xaa locations
  Clone ID: MRT4577_135534C.1.pep
MGRTRGNRGVGGAKSFPSPASSSASSSEFEFTVTLSPASKQRSAEQLCPADELFYKGQLLPLQLSPRISMVRTLLLSSASTSSASASDSTNSSSRDSNGSTSSSFSADCGALLGPDSAASSSRPSSATEDDRHLHPPXRRGAAATRQAHRXSSTSRPSPRASPRSSTAAXAGAPAAKKQPSKSLAKEVIKKYAKKVKPLYERLXPRSPTRTRTTSSTATANRSRGSRXFTFSIRKKKGDAVAAVVEAAAEVGGNKYAHSSSFSGNLWFPRQKRATASCPSSMQSSPSHSGLLTXRGWRRGLPRRAGRCQRHWRRSGXLSTASSMEELQSAIEGAIAHCKNTMGGTVSVKAAAWPE

SEQ ID NO: 223626 - protein, 70 aa, Zea mays
  Clone ID: MRT4577_135535C.1.pep
TFAFLQFNLFAPHPFFFRSLTIAHSQIVPPLKRFLTLIVYWHYPRRDSLTSALFMVHSIVSFTFVFSHTP

SEQ ID NO: 223627 - protein, 305 aa, Zea mays
  Clone ID: MRT4577_135536C.1.pep
MQDVARRALSHYFSVLSGVVDGLDLRYYPAVHLAAQEMSDNRHRGGRHAQQEQQAPQDEAPQQQLPPPPPMTIEQMFLMQTQCISSSPPPQPQIPQMPIDKCAEFMRGHPPVFVHSADPMDAEDWLCIMERELHTAQCDDREKVLYGPRLLRGAAQSWWESYLATHANPDTITWEEFRDNFHQYHVPVGLMTVKKEEFLALKQGPMSVNVNTNAKRQYRFLRGLVDIQHYQLMNHIFPTFQHLINRAIMTVKKRKEREDRKRKIGGPQPGSNNHPHFSGNPPQQFKQNQRPPQQQYRQNSQTGGS

SEQ ID NO: 223628 - protein, 86 aa, Zea mays
  Clone ID: MRT4577_135537C.1.pep
FPIQVFVWQSKIWWGSHYDWLVVAEEHIPWLEMAIMFCLARIKLPFISVVGYVFENISYRSLYRLSAYYGCCIAAPHRLYIEIRLH

SEQ ID NO: 223629 - protein, 68 aa, Zea mays
  Clone ID: MRT4577_135538C.1.pep
QSRTLDQRMCTRCGLNHELRHDCNYNHLKKLHQGWLRADIAIPSEYMAHVIFSVFKQPLLKKGSTQFT

SEQ ID NO: 223630 - protein, 69 aa, Zea mays
  unsure (1)..(69): unsure at all Xaa locations
  Clone ID: MRT4577_135539C.1.pep
TGFIPNSVFFLESNYVFTIQQTKVLMVVGAGRGPLVXASLQAAEETGRKLKVYDVEKNPNAVITLHVSY

SEQ ID NO: 223631 - protein, 94 aa, Zea mays
  unsure (1)..(94): unsure at all Xaa locations
  Clone ID: MRT4577_13553C.1.pep
MQSFRLVWXTRRIMNKKGVRLLRTKVSNHDVVLLVQVSKAHRRMQITVFXAQTDIVKFRXAFLPXTVMMLNLIPXAAWKPMLKLVYSYISKCRS

SEQ ID NO: 223632 - protein, 132 aa, Zea mays
  Clone ID: MRT4577_135540C.1.pep
LFACKMLEIKCSELELAWPQARVQGQTQVQQFLVGARRRRSPEDRHLGTCVGRRRSAVVATRDRETGARENHERERERVCKRGCDGPLLGLPVPAHFHPLQLQSSHLLRLPRSLPHLARSGTVSQQLPRPGR

SEQ ID NO: 223633 - protein, 75 aa, Zea mays
  Clone ID: MRT4577_135541C.1.pep
FDTKRGQQPPCVVFFYYHIPNYYFNTTTTHHQLINLLLPLFIPSKKLFQIGSFSNFYNSPTQNNPCYLPQLSPTV

SEQ ID NO: 223634 - protein, 44 aa, Zea mays
  Clone ID: MRT4577_135542C.1.pep
HTSPHVLEQNPLSSGTNHSRPIATHLSERLLYLTWEVATVYFRV

SEQ ID NO: 223635 - protein, 702 aa, Zea mays
  Clone ID: MRT4577_135543C.1.pep
MERYKKYKEQVVKCSEECEPRYNGLKKKYTDECAERRRLYNELIEIRGNIRVFCRCRPLSSDELARGCSSVVEIDSSQETELQFVPNEKERKPFKFDHVFGPEDDQEAVFSETVPVVGSVMDGFNVCIFAYGQTGTGKTFTMEGVPENRGVNYRALEELFRISEKRSASVAYTFSVSILEVYNEKIRDLLDESNDQSKRLDIKQNADGTQEVHGLVEAPIYNIDGVWEKLKFGAQNRSVGSTNANELSSRSHSLVRVTVRSEHLVTYQRSRSHMWLVDLAGSERIAKTGVEGDRLKESQFINKSLSALGDVISALASKNSHIPYRNSKLTHLLQSSLGGDCKTLMFVQISPSSMDSGETLSSLNFASRVRAVEHGPAARKQADPAGSLKLKQMTEKLQHEEKENAQLNQSLQLMQLKYASRENVFRTLNEKVKDAEQACRNYQQRIRELENELGNEKRASRDSARSSRPPLVPTRQRQPQGRTNSFAPPSGPSRWRLKAPAKHNKENIPVAMNKPNAGDDPNKPVGRARRVSLAPVIRQIPIQPKRRSSMAVLPSVREHLSVLNDKKAGSRLSQANMARGSLGAFGLNLVPGTPLAGHGGPVDATPDGAKFRRFDFGSSSKFTSPAPNVGMWNKMVTPQQKLGMAPAGAKLCFSIQKRVTPPHVRAKPGLGIFDPALRENMVVGRAGNALRVLNPKRRQSVI

SEQ ID NO: 223636 - protein, 63 aa, Zea mays
  unsure (1)..(63): unsure at all Xaa locations
  Clone ID: MRT4577_135544C.1.pep
QRNDXSGGASAVCYHTVFHXREEERTTRRRTLIMVPFMCAHSPLYRLLIGSNILNLFRPLEDY

SEQ ID NO: 223637 - protein, 19 aa, Zea mays
  Clone ID: MRT4577_135545C.1.pep
QMLKLTQQKPQLARDTYNN

SEQ ID NO: 223638 - protein, 63 aa, Zea mays
  Clone ID: MRT4577_135546C.1.pep
TIQILHTYVPCPFHRAKEHLHKSILLCLLCLRKFCHLHTAKDLNQYWTLICKVLDHYTITLRG

SEQ ID NO: 223639 - protein, 100 aa, Zea mays
  Clone ID: MRT4577_135547C.1.pep
TRWAVTSVSPNAFRCTPPSVPGCWPALRLPSRSRLCDSSTIDCTQALRKSVRAQACWLLLIGGKRVCARILASYYGLICTQVKCTTHICSFYFGWVIPLY

SEQ ID NO: 223640 - protein, 158 aa, Zea mays
  Clone ID: MRT4577_135548C.1.pep
MANSNLPRRIIKETQRLLSEPAPGISASPSEENMRYFNVMILGPAQSPYEGGVFKLELFLPEEYPMAAPKVRFLTKIYHPNIDKLGRICLDILKDKWSPALQIRTVLLSIQALLSAPNPDDPLSDNIAKHWKSNEAEAVETAFGLAAKEWTRLYTSGA

SEQ ID NO: 223641 - protein, 65 aa, Zea mays
  Clone ID: MRT4577_135549C.1.pep
SRVRTHAYRSPPKFPGDSSTPRLLRHPLRESSREGIAKEGPTHTELRKAMETQGRLECQAPRRGP

SEQ ID NO: 223642 - protein, 105 aa, Zea mays
  Clone ID: MRT4577_13554C.1.pep
PQKCLVHFQTFKLGPWVLDKTKTGTGPCVAGFDKIKKQKGFGYKKLARGLGINGHVYPLPFYMLTLFESHVMLHKSPNYIHPPGDSCIYTCFPITGIKKKVFVNK

SEQ ID NO: 223643 - protein, 191 aa, Zea mays
  Clone ID: MRT4577_135550C.1.pep
TNRCQENKTCCDSCSPPQRSWLLCGGGGLQREQGRRERTLCEEGIDWVGSRAEGINSERMGRMWHADGPCVAHRCGGLCGRGKRRRVRARRRGEGMAVVYTIILIVSREVEIFCQVAHFHNPKRAKGRNNRVTKPLDKHVTIPIISLVRVPSRAIARRLRLVHTTQPLSPLRSLTVKPTPQTPSLQDLVPN

SEQ ID NO: 223644 - protein, 64 aa, Zea mays
  Clone ID: MRT4577_135551C.1.pep
RPGRGKQTVFYLKDTLTVVKGDKIEGSISVRPNAKNHRDLDIDISYNLEGQQQTTSDSLSFKMA

SEQ ID NO: 223645 - protein, 89 aa, Zea mays
  Clone ID: MRT4577_135552C.1.pep
WLEDSLTRGRYNGVCALGTSWIPPSASFPPSDCWAAYRSWVDTWDSRTSSHVSAKLVGQAGAHLSPGPLGCQKHAPAVLVILTGLTMMH

SEQ ID NO: 223646 - protein, 55 aa, Zea mays
  Clone ID: MRT4577_135553C.1.pep
FGSSSNQRLSHSPSTPPSRGMEELLLGTRLPRYMIEPILILAPQPMPINEGIKLH

SEQ ID NO: 223647 - protein, 51 aa, Zea mays
  Clone ID: MRT4577_135554C.1.pep
PLFFFFFCLSFRKHSLFAIKKNKRNIIYRHSIRLGTTTFVSPDRFAAKSEA

SEQ ID NO: 223648 - protein, 184 aa, Zea mays
  Clone ID: MRT4577_135555C.1.pep
EIHVKDLWRRMKPKNLRRGHWTQDEYQNLFDLVNLDLRMKAHQYFDPGHRQIRDNISWEAISDKLTTRNNHECCQKWYLQLASPLVKEGIWADKDDYLLVEALQNVDAVCVEEVDWENLVEHRSGELCRQRWNQMVRLLGGHRDKPFIEQVEVLARRYCPEMLPYRESKAGDLSAGELAGGSDL

SEQ ID NO: 223649 - protein, 286 aa, Zea mays
  unsure (1)..(286): unsure at all Xaa locations
  Clone ID: MRT4577_135556C.1.pep
MGPARHLRGLTALLISAALLLSAAIPAARGQEETEDEEEFNYIPGDANGPENWGSIKPEWANCSAGRMQSPIDLARERVSLVPALGFLNHSYRPAQASIVNRGHDIMVRFNGDAGRLVINGTAYDLRQMHWHSPSEHTVDGRRYAMELHMVHESAAGKAAVIGIXLYEIGLVPDPFLLRLEPFIRRIADRKDRXSPSGVVDPRXARGTASAYYRYMGSLTTPPCSEGXVVWTIIKKVRSVSKRQLELLREAVHDGNENNARPLQDLNDRDISLFRPKLHKHELFSF

SEQ ID NO: 223650 - protein, 110 aa, Zea mays
  Clone ID: MRT4577_135557C.1.pep
MTSNTGTSVQQSNIDSIEEKAGQIDAVSDPHAHIIQDMGMDTNNGPPVAESGSPVAEEKPPEQSSSIGDVCVTANAGIPTDQTQHPNGSTENVVRKSPNRELYEEKSGRL

SEQ ID NO: 223651 - protein, 270 aa, Zea mays
  Clone ID: MRT4577_135558C.1.pep
MVRWLPPPPPADGEIPFGHDAVALSFFVACVAATVALASSMCSACGRKPKAATRADPAASDQSTGTGSGSVSGGGGSQEASAAEAGGGSGETVTGAGDARRHRPGDAAVVDVEAAPVHQREQEAEHEHPGQAAAEPAGAQGPPPTRWSRRTRCGRRASSSGRSAGSRARGRRRPASPSTPPTRSPPAASAGPATPGPCRGRARSPCTTTSSTSTGPTPQPPCPDRTLITAPRPVIIFEREIGASVGAEGNRHTTSAAGCNVHSNSDVIAL

SEQ ID NO: 223652 - protein, 115 aa, Zea mays
  unsure (1)..(115): unsure at all Xaa locations
  Clone ID: MRT4577_135559C.1.pep
MVVVLVLPPAQPQLVRDIQAQLLAHADGQPPPRXTTAAPPARWRRASPAPATASPPPPLPLPPPRQPPGXLPPXWRRPSQPGPRWWPPLACGRTPSTWTTRARRWRPRTPPRRKT

SEQ ID NO: 223653 - protein, 78 aa, Zea mays
  Clone ID: MRT4577_13555C.1.pep
IHNRIEATTRRERALAYAFSQQILSCGGGTSKKRTSAHAEGQGEFNVGWSWLERWMATPQAKPTNDCSSRSTNTGSST

SEQ ID NO: 223654 - protein, 62 aa, Zea mays
  Clone ID: MRT4577_135560C.1.pep
WYRVAQDPGGPCSTCWARKGAPGTAADVIRCAPDKPFVDPYIEGLLLILPLHISVSLLHPPP

SEQ ID NO: 223655 - protein, 94 aa, Zea mays
  Clone ID: MRT4577_135561C.1.pep
RRGGGGGSGETVTGAGDARRHRPGDAVVVDIEAAPVHQREQEAEHEHPGQAAAEPAGAQGPPPTAAAVARRPGQEGHHPRGEVQDPGGAGGGVR

SEQ ID NO: 223656 - protein, 117 aa, Zea mays
  unsure (1)..(117): unsure at all Xaa locations
  Clone ID: MRT4577_135562C.1.pep
MTPQALLLLLLAAAVAVAAASAAPANGAANDLLPKYGLPKGLIPDSVSSYTFDEATGDFEIHLAGTCYVRFGDHLXYYEKTLRGCLSKGRITGLAGIQAKKXFLWXSXSGIVAHPAE

SEQ ID NO: 223657 - protein, 60 aa, Zea mays
  Clone ID: MRT4577_135563C.1.pep
WVEGVLDTNWVKREVPGFFFRCNFYKGGLQQGWKLGSGGWHWRWQLRGPLLILEIGLRIT

SEQ ID NO: 223658 - protein, 125 aa, Zea mays
  unsure (1)..(125): unsure at all Xaa locations
  Clone ID: MRT4577_135564C.1.pep
PLGKKTSNLPQNRFWGGFCPPRGKKKRPFKGTPLPGKGGQKKKKPLAPXPLVGGGPKIPKGPPPGLNSKGTPGGPRSPPPRGPKPGGXGPSPPPQNPPPLGVLKLGPQPRWFSPFFWGPKFKFGI

SEQ ID NO: 223659 - protein, 77 aa, Zea mays
  Clone ID: MRT4577_135565C.1.pep
DWGRKGLKQFRIREKKGREIELGEAKGKVGSSMQESRNGWNYEGGRPFVLIFFFFFPFPFFFFFFFFFLFFFFFYVF

SEQ ID NO: 223660 - protein, 229 aa, Zea mays
  Clone ID: MRT4577_135566C.1.pep
MTSAPSSRPGFTPSGAAMASPPDLDLAFPQDAFPRLSVATPTRLLLGTVSSALVGFSLGATQGGQMAQLGFRAEHAHKMPDTTTGWYFYHKSKNYHAMQGGIREGFRMGFKTGFWSLLALSLESTVDPLSRGQRHVFHHDSHASGSWRVFTLASPVINNRRPDRAIRSCSVAYGGIQDLVGLARGRRIICRFRTSTFGLLRMMLEYCSKSKHTHVIIVPLLKILISRLT

SEQ ID NO: 223661 - protein, 118 aa, Zea mays
  Clone ID: MRT4577_135568C.1.pep
ISVAGLVLALASLLIIACATGKQGNRGRKRERHASRRHSIVVPERQCGAAAGVVSADVYQPSNGPAPSPSPSGTSSSYDLSGANKSWFTYDELAGITGGFSAANVIGEGGFGKVYMGP

SEQ ID NO: 223662 - protein, 77 aa, Zea mays
  Clone ID: MRT4577_135569C.1.pep
GWRDQILYGCTRYGDLAFVSLDFVVSLGWLTRTMWSVSLSWILSAMGLSRPPQPVSWSKGVTAASPQRARLRAPCPV

SEQ ID NO: 223663 - protein, 434 aa, Zea mays
  unsure (1)..(434): unsure at all Xaa locations
  Clone ID: MRT4577_13556C.1.pep
EARIAMARCAGFVEKAKPYVAMISLQFGYAGMNVLTKVSLNQGMSHYVLVVYRHAFATLSIAPFALVLERSSSLISDFWRSSXASALMMTDHDACDCGKLMAACRKVRPKMTWPIFWQIFVLAMLGPVIDQNFYYAGLKFTGPTFACAMSNILPAMTFVLAVIFRMEKLQMRKVTCQAKVLGTVLTVAGAMLMTLYKGPLMQLAWTTNRHASASASASPAAEIIISGRDWFLGSVFVVVATLAWASLFVLQAHTIKQYSAQLSLTTLVCFVGTLQAVVVTFVMERRASVWTIGFDMNLLAAAYAGIVTSSIAYYVQGLVIQKAGPVFASAFSPLMMIIVAVMGSLILSEKIYLGGVLGAALIVAGLYSVLWGKHRETQEKEEAADTKMALPTAAASSMQDAAAGVAVDGAGCNVGNGLTRSSSNAAAGAAANAV

SEQ ID NO: 223664 - protein, 35 aa, Zea mays
  Clone ID: MRT4577_135570C.1.pep
NQTLRYRLFVEGNARVAIRSRETTLPKLYNINYHI

SEQ ID NO: 223665 - protein, 92 aa, Zea mays
  Clone ID: MRT4577_135571C.1.pep
STGAEKILTFRFTGSRSPQNGGRGKTTCQAIIVPYPERQTITHVNSMSIPGGPLHSPTCWMRGHGGGNYPTIKMGDWTPLFFPHLSSGPQNL

SEQ ID NO: 223666 - protein, 133 aa, Zea mays
  Clone ID: MRT4577_135572C.1.pep
GRGRKGNRGDRKGPKKGNAPRRSGESKAGEGTIENPDPARKRVFPRLRATPKKRKDRPRGKANSPRGGGGKGGWGKKWAPKKKNQPCPGEKGGPPRGKGGEKGTAGKKNPRDKGGRERPKRAQNFGGKPENPR

SEQ ID NO: 223667 - protein, 70 aa, Zea mays
  Clone ID: MRT4577_135573C.1.pep
PAIHLNYPVNPLLDHAPSFQRDLFIGDITHLLHNYYINNLQSLHLLLDHLCIYPNIIHNAQNPNIYTINF

SEQ ID NO: 223668 - protein, 160 aa, Zea mays
  Clone ID: MRT4577_135574C.1.pep
EGGVETEKRRGAGSPGALGSTMGSPGGGVHTQLILSAGAQEGKTARVQHPVQGKIHNRWGRAGAAEGGATLGGTNDGRTLGFLGPRGLGWWWCNWWITSFQRLRGGGVLLASEAKLGDTLFGDRIFPPRGDVYQEETSFLKTGRQRSIGILMTKAKGHQL

SEQ ID NO: 223669 - protein, 124 aa, Zea mays
  unsure (1)..(124): unsure at all Xaa locations
  Clone ID: MRT4577_135575C.1.pep
EPGADQPFRWPGPFESSLIIRKPPKPGXAEKFQGVAKPFHPFVPKEDSFFSKFKVELFKLVXQLIGNHFLNTYPNFGRTIPVGEANRYPKVPVPRFLEAGRFVLKAVPNESVLVTIRPVLTSRA

SEQ ID NO: 223670 - protein, 79 aa, Zea mays
  Clone ID: MRT4577_135576C.1.pep
RFFCEADDGFASGCNGATRAHLEKEEFCGRPLGLRFHGETGELYVADAYYGLMVVGQSGGVASSVAREADGDPIRFASL

SEQ ID NO: 223671 - protein, 198 aa, Zea mays
  Clone ID: MRT4577_135577C.1.pep
IEGTPSKLNARTNYDSDNIMVLVRNDYSLSASDLGKHLFNWTRTSFSVKYNHPDIPCIRSEGLPLALPDSRSANVIVLKEGTPFISIHGSDALEPVQTPRKLPNTAGKSDIVLDDSQNQTYDGARSHVISADSEATETPTRNTYVWLFSFFPIFLVIGYLLSLTSASKSCRQFVIQLIKPFTRDKKSVDIRGRSEGSP

SEQ ID NO: 223672 - protein, 96 aa, Zea mays
  Clone ID: MRT4577_135578C.1.pep
MASLSMTTSAAARAQWTPRQNKLFEQALAVYDKDTPDRWHNIACAVGGGKSADDVRRYYELLEEDVGHIESGKVPFPAYRYPAGYGAADRLKQLKI

SEQ ID NO: 223673 - protein, 101 aa, Zea mays
  Clone ID: MRT4577_135579C.1.pep
GQGVNAESNAYGHSGRRSSYGHVVQVHIHRVTYREHHNARLHKCTWPCLCNCSPHHRDHSDWCECHYHGLARQYYSHRIENSLAHRHYPGSRLQAQYSSCG

SEQ ID NO: 223674 - protein, 185 aa, Zea mays
  Clone ID: MRT4577_13557C.1.pep
FSPPSFQLQFLNPITARVHRRAHLKLPVTPAPPTTPAPALGVAFGYPASSFGPDASPSISSRDASLDLLSRSPAISNHGSCDGDPHVTANAEIHRPDADRSPDLPPSPSVAFSVAPSVLAHGWHGGLIPSVRLQPDVVPRPCLRCGEDLCINCSTPFRRQSPFSTPCRLHKPDDCWVVGMEPREA

SEQ ID NO: 223675 - protein, 206 aa, Zea mays
  unsure (1)..(206): unsure at all Xaa locations
  Clone ID: MRT4577_135580C.1.pep
RGRPGFLFWLSAFLAASLPPSDPRSDCHGWTILTDEQIVEFKEAFTLFYKDGDGCITTKXLGXTLMLLIARINPTEAELQDMINEVDADGNGTIDFPELLNLMERXSKDTDSEEELKEDFRALDKXHNGFISAAELRHVMTNLSRECDDDEVEXMIREADVNGDGQINYDXLAKVMMAKRDMSADSKLVPLLMVVTSLDLQTDCFW

SEQ ID NO: 223676 - protein, 90 aa, Zea mays
  unsure (1)..(90): unsure at all Xaa locations
  Clone ID: MRT4577_135581C.1.pep
QLDTVVNNSGSSQSDLTAITPIDENSFQXLQQVAPVSTPMANAAHQMHDSVASYSLNSLDLLQEPIKHDNDYNCQLYQHESRVRTVRSEI

SEQ ID NO: 223677 - protein, 66 aa, Zea mays
  Clone ID: MRT4577_135582C.1.pep
RAPLHPLRTRHRQGQQAQAVAAAMSDCAGDLRYQATNCAFFCSDRDASSTVTLFCRWAPLLGVNEL

SEQ ID NO: 223678 - protein, 123 aa, Zea mays
  unsure (1)..(123): unsure at all Xaa locations
  Clone ID: MRT4577_135583C.1.pep
KRALVQVYSAPFKQGXPPPKGVXLGRKKKTPPAKKDNXRAKRFRPPLXETKKSPPVPRKLXKRKEGXPLPPPLXEQFGSGRVLASIFFPPGQGGPTDGXPLRGKSFXFFLKKLQRKKGKSPVA

SEQ ID NO: 223679 - protein, 273 aa, Zea mays
  unsure (1)..(273): unsure at all Xaa locations
  Clone ID: MRT4577_135584C.1.pep
PASGREAEIEQRNPFLRGLENSRAKRRKTDEARPSEAAESEQQEEHSLTLSQHSSPSQSDQEQNGGGAHKLSPSPNASVSALQPFARLKANDGAPSAPGRGGGGVSSRPALKTDQFLRTVAPQHHRQEVQFLSSDHKKPQPRPXXPPLIGAEVHGTIDGAFDSGYLMTAVVNGQLFRGVLFAPGPGVTAPRPTVHHQILTSSAMPPQQRPLLAHAIPVHARPVPQATGFVLPNCVHRARQGFPAKAVKSEPERGGSDLHDVVLTXLGGPGGGK

SEQ ID NO: 223680 - protein, 64 aa, Zea mays
  Clone ID: MRT4577_135585C.1.pep
YSIQGSVNIPDTCYHNNTCSTYTVNSQLVRQRFYYLCLNNALAFRGAAHFSLSIYHNILHARTD

SEQ ID NO: 223681 - protein, 76 aa, Zea mays
  unsure (1)..(76): unsure at all Xaa locations
  Clone ID: MRT4577_135586C.1.pep
SHPSCPRSHLLFFAARXXTTHHLLLSSPCFHRRPLQAPALQRDSCLISFLSTNTHHQCYQTPTRWAYISSTNASIT

SEQ ID NO: 223682 - protein, 1033 aa, Zea mays
  unsure (1)..(1033): unsure at all Xaa locations
  Clone ID: MRT4577_135587C.1.pep
MGNFRSLINSMELKEIPLIGRKFTWSNQRQDPTLVKLDHVFCTSSWEDFFPDCLLYSNASVCSDHCPLTLKFREDCRGKRRFHFEGFWPKLPGFNEVVADSWNQPMLATCPLERLSLKLRRLAKQLQSWGHREVGNVSNQLGLAREVMHRLESAQDFRVLSEDEFWLIGKLKQHCFVYASMERTIARLRSRIKYLKEGDANTKFFHMQARFRKKRNFISYLEDEGRVVSNHEDMQEVLDGFFSGLLGADFLRQSTINLSSCHREAVDLSDLECPFSEKEVLDTIACLPSDKAPGPDGFTGRFYKSCWSIIKVDLLAALSIIHQGNFQRLGQLNSSYIILIPKKMDASSAGDFRPISLIHSVAKLVTKLLANRLGPRLHELVEANQSAFIRGRSIHDNFMLVQQSIKSLHKRKVDSLFLKLDISKAFDSVSWAFLLEVLSHLGFGPIWRNLISNLLATASTQVLLNGSPGIHIKHRRGLRQGDPLSPMLFVLIMDVLSSLFRAAECRGLLHSLERAGVRNRLSIYADDVVLFVKPIEEDLKCVRLILNCFGSASGLVTNLNKSYAIPIRCEEHVVQEGCNVLRCSLASFPCSYLGLPISDRKLKRNDLKMWIDKIADRLPNWKARLLNLAGRTTLVRFVLSAIPIYLLIAIKIPKWVIKSIDKIRRGFLWKGRKEVNGGSCAVPXGXVTRPLSLGGLGVPNLQLMSWALQAKWLWLEKTDPTRPWLGLCIPVQQQVRQFFNASVISVVGNGTNTFFWSDRWLNGQRIQDFAPEVVNMVSSKPFSSRTVAQALHNGQWIRDITNPLSLIGLHQYLQLWDALSGVVLNLEEDRHVWVHSSSGVFSSKSCYSALFMGAIIFQPWKWVWKSWAPPKCKFFVWLAIRNKCWTADRLQRKGLPHPVVCPLCDQEQETILHLLCSCSFARQFWHIIFSALRMGHLTPTREAGSFVDWWGKVHRRVPKHIRKGFHSLIILGAWCLWLHRNRAVFDGVNPSLSTIQRLFLDEVECWCLAGAKQLESLGLLAAFARGARAFPSV

SEQ ID NO: 223683 - protein, 82 aa, Zea mays
  Clone ID: MRT4577_135588C.1.pep
IKLERVGLAETNTKPSIGMIHKQHPTVISRANESKPPPAFRGYLMGPRTENIFDQRMIRNNELTDCIASLDTELSNQPTYYL

SEQ ID NO: 223684 - protein, 105 aa, Zea mays
  Clone ID: MRT4577_135589C.1.pep
RPGFSGRGRFFVPPHVQGAGGVFAPGFFGGLGFVFFEKKKWKEKKQKKKKEISPSGPFFFFRKKKKKKKKKKKKKMYPNLALFCLKKKKKKKKKKKKKKMKQNTH

SEQ ID NO: 223685 - protein, 100 aa, Zea mays
  Clone ID: MRT4577_13558C.1.pep
PRLLDDVKKPEKTITETEISKRPLWHTYPGCRLPETNPSVLEPQPMVSSFGRGRGRATAAETMLGGRGRGYGRSFHGAESSQTQSRGSRNDGNSYAGRGT

SEQ ID NO: 223686 - protein, 86 aa, Zea mays
  unsure (1)..(86): unsure at all Xaa locations
  Clone ID: MRT4577_135590C.1.pep
GPTKEYRLHKMVKKAIAIWTIISNGGNLNMFGDATVMARDVPGMLHTIVFSPXFLDSSKTQSYVKGMQMKGRYLPNVWWHIPSNKP

SEQ ID NO: 223687 - protein, 118 aa, Zea mays
  Clone ID: MRT4577_135591C.1.pep
IIYSRSSFTELSGHPVHIHEHITKTKVRQMMLHKNATMDIIYFNIMIIIFITIKATVQFLLLVTHLLKHNLFTTHMVQSYPHIIYILYKRHVQSRCILLIIPYHIFLMHPKDTTHNVV

SEQ ID NO: 223688 - protein, 258 aa, Zea mays
  unsure (1)..(258): unsure at all Xaa locations
  Clone ID: MRT4577_135592C.1.pep
PCSLPSLLSSPPKRSKTQGEDSSASASVLLRAHEFERERSGNGEGSVLREDGPQEGPLDAXEDKILVAHIHSHGHGNWRALPKQAGLLRCGKSCRLRWINYLRPDIKRGNFTDEEEQSIIQLHQLLGNRWSAIAARLPGRTDNEIKNVWHTHLKKRLDLSAQEQHEEASAAKKRKKPAAAARKREGKIKMRKLDALTAKAAPVLSSPRRSVSSTLTESRHRPRAGEEQHGNSGSSASASASVKEECFTSSKESEESRS

SEQ ID NO: 223689 - protein, 94 aa, Zea mays
  Clone ID: MRT4577_135593C.1.pep
AQHNHKAVSKKKVTSIHTANVPPQQDQQLQASPLATVMAGARLGGLVRLVRHLEVAPPSSCAGTTPRRTAASADLSAPAALLLQVRVHLGAVAA

SEQ ID NO: 223690 - protein, 64 aa, Zea mays
  Clone ID: MRT4577_135594C.1.pep
THQTLHSFAKLTPHAPYLRQSLATYKTYGLVYPLLHPTATPINTFPIIKHSLSQKRRPLSRCHT

SEQ ID NO: 223691 - protein, 64 aa, Zea mays
  Clone ID: MRT4577_135595C.1.pep
SMIGATRTLISFSVPLFQLEIVGCSSPVKVQKIDTWESAGGRRRRRPDSSRLVVAPTHRERTLG

SEQ ID NO: 223692 - protein, 95 aa, Zea mays
  unsure (1)..(95): unsure at all Xaa locations
  Clone ID: MRT4577_135596C.1.pep
SFHSVPLSVASFHNEYITGVRVTWKQMTGGVWGDPHGYQRHVIHGCHRGELWWSGRLRESDEVLNGGEASLSLVRRGPRSLDEVSGERAIRFYDX

SEQ ID NO: 223693 - protein, 77 aa, Zea mays
  unsure (1)..(77): unsure at all Xaa locations
  Clone ID: MRT4577_135597C.1.pep
MGAYKYVGEVLIKKQSDVIPFVQRVRCWEYRQQPGIVRLTRATRPDKDCRLGFKDKQGCVFYXRVRVRRRGWNRPVP

SEQ ID NO: 223694 - protein, 152 aa, Zea mays
  unsure (1)..(152): unsure at all Xaa locations
  Clone ID: MRT4577_135598C.1.pep
LXWFSXXXXGFRXXCLXXXXLXLXXLXCXXALXXXFLLWXXGXXXXXXVARXXXXXRPXXXSXXPRAXXGARXARRXXXAPGAPPASRXSGXAPRPGXPPXXCRGXXPXRXXWGGAXXCRRWWRXPPXXGXRXPVAAPXWXRPGXCVVXWCV

SEQ ID NO: 223695 - protein, 92 aa, Zea mays
  Clone ID: MRT4577_135599C.1.pep
MMQIVSCPYVKTVATTKTGVLPGMAPPIVPMIHPQVAIAASPATLAGATAVSEWTEYKTADGTTYYYNNRTLESTWEKPQELKTKKKKGGPP

SEQ ID NO: 223696 - protein, 124 aa, Zea mays
  unsure (1)..(124): unsure at all Xaa locations
  Clone ID: MRT4577_13559C.1.pep
FGSSLGAMAILMAVEQSLPRVGMIPPXWGLXLRANRFGTMAVIWLFGSYANSFIQSSGALEGYCNGQLADSKLPEQRFPRELELQELIGSRIPHSKMVENGEKDLVLEKDQVLDDVDADYAMRD

SEQ ID NO: 223697 - protein, 97 aa, Zea mays
  Clone ID: MRT4577_1355C.1.pep
MRPQLILVGTLAVLAILAALGEGSSSWPCCNNCGACNRKQPPECQCNDVSVNGCHPECMNCVKVGAGIRPGMGPGPVVTYRCDDVLTNFCQNSCPEA

SEQ ID NO: 223698 - protein, 70 aa, Zea mays
  Clone ID: MRT4577_135600C.1.pep
TAWSTVRLFKGLVRGRKGSSPCHRGLRPGLGTITESATRAVGRATYEMNTVHNTKFGWFKLCYSRKVCFE

SEQ ID NO: 223699 - protein, 92 aa, Zea mays
  Clone ID: MRT4577_135601C.1.pep
IKPIYFAVVNAFKIVEQVAGGVPLSKVKVANVLNVELGLLPTHVLKVELKPAKEKGQIVGVNGRTAENHGERKRGVFSFFFYPPFFFFFFFF

SEQ ID NO: 223700 - protein, 38 aa, Zea mays
  Clone ID: MRT4577_135602C.1.pep
NVRIRMNDEVKVGLCKRGDLNFIMFLIFFIVFFVFIIY

SEQ ID NO: 223701 - protein, 98 aa, Zea mays
  Clone ID: MRT4577_135603C.1.pep
RVGGVLAMSRAFGNRLLKPYVVAEPEIQEEQVSGGLECLVLASDGLWDVVENEEAVFLGRSEDTPESAARKLTEIAYSRGSADNITCIVVQFHHDKTG

SEQ ID NO: 223702 - protein, 69 aa, Zea mays
  Clone ID: MRT4577_135604C.1.pep
FGGIMKCDVIASGIVNAAKEVALKVPVVVRLEGTNVDHGKRILKESGMALITPEDLDDAAQKAVKAAYK

SEQ ID NO: 223703 - protein, 86 aa, Zea mays
  Clone ID: MRT4577_135605C.1.pep
HSTALGPAHFHLYLPQTNRGIRPARFYLLPGLAPNTSSILGGGFRVLQTWPLGLGSNSLNPCHKGLLPCPLFLAPPLLGLVCGSPS

SEQ ID NO: 223704 - protein, 130 aa, Zea mays
  unsure (1)..(130): unsure at all Xaa locations
  Clone ID: MRT4577_135606C.1.pep
MRVLIVALAVLAVVASXATSTHTISGXSXQPPPSADIAAAVHLPPIHYLTAQEDIPPTVQLPSPVHLPPPYHVSPQAYLAPPPCQXXTEPQLPQHYLQTHKCACEQKHASSXQLQETCGFNRTHSLNHAI

SEQ ID NO: 223705 - protein, 51 aa, Zea mays
  unsure (1)..(51): unsure at all Xaa locations
  Clone ID: MRT4577_135607C.1.pep
CSVPARGRPLFPKDPSSDRSFPWTATSGQSVLPTVFKHINKRMRRNLXGFP

SEQ ID NO: 223706 - protein, 244 aa, Zea mays
  unsure (1)..(244): unsure at all Xaa locations
  Clone ID: MRT4577_135608C.1.pep
MGSSAALQPKQLYQLVVNNFVAVLAAXTAILYVLLRPRAVYLVDYACFRTRPNCRVPFATFLEHAKLVTFVEGASIDERSVRFMTRLLERSGLGEETCLPPAHHYIPPYRNMEASRAEVELVIFSAIDDLLAKTGISPSAIDILVVNCSLFAPVPSFTDMVINRYGMRPDVRNVHLSGMGCSAGLISVGLARNLLQVAGRGAHALVVSTETITPNYYVGKERAMLLPNWLFRIGGAAVLLSTSR

SEQ ID NO: 223707 - protein, 43 aa, Zea mays
  Clone ID: MRT4577_135609C.1.pep
EEREIIERIERVKKAREEHERAQREEEARRQSGAQYGSFPGGF

SEQ ID NO: 223708 - protein, 164 aa, Zea mays
  Clone ID: MRT4577_13560C.1.pep
TTSSQRNHARRESRCRRALSYVASMAAARSSSPCQLIICSMFAMAGLSHRRADDQMSSMLLAVPFPPPNNRPAYADDKVWRMVTAVEMGYYNLCTGLRGHKTNSVGVNRLTLLYLGIQIEHRPNSLRSNEIKQTGERNSLRSNEFRTTPLNPSWQYLSQNKTNR

SEQ ID NO: 223709 - protein, 60 aa, Zea mays
  Clone ID: MRT4577_135610C.1.pep
PERPHDYLIQLPNPEHLWTQTQALDGYGYCHHFWNIRMLCGGHLALINIPLIAKPHIFSS

SEQ ID NO: 223710 - protein, 129 aa, Zea mays
  unsure (1)..(129): unsure at all Xaa locations
  Clone ID: MRT4577_135611C.1.pep
MATAYNLRSRDEPDDFDEFDSTPYGGGYDLFVTFGRPLPPSDETCYPCSAPSTSYDAPHYAAEEPSPYAHHQKPQPAYGFRPQNEQPSYGREDDDSGYGSKPKPQPAYGFRPQAEEQRPSYGGGXGGRL

SEQ ID NO: 223711 - protein, 214 aa, Zea mays
  unsure (1)..(214): unsure at all Xaa locations
  Clone ID: MRT4577_135612C.1.pep
CLIITCRAFPAFXSEXXHLTDLRIXGTNLQGPIPKNFSNLSNLEVLMLGDLAGNHSYLNVIGAWANLSVLSLRKCGLTGQVPNTPPNLPKLKYLDLTSNNLSGSIGGLLLSYKTSNYIENLTILNCLRMNECNINNLTNRATSFAINCGGKQVEYSDLMPIMFSEDSTDLGGSGFHVNATSHWVVSHVGSDPFNESTGIVNTSDIFETNMQELY

SEQ ID NO: 223712 - protein, 99 aa, Zea mays
  unsure (1)..(99): unsure at all Xaa locations
  Clone ID: MRT4577_135613C.1.pep
MLQARMLPFFLIPVPAEXVCENPILNPYMIQQAIAAGILPLSXLXLQQPTVLLQXTPLVHWLXAQNIKAHQLPQLALGNLAAYSHQQQFLAFNQLAALN

SEQ ID NO: 223713 - protein, 535 aa, Zea mays
  unsure (1)..(535): unsure at all Xaa locations
  Clone ID: MRT4577_135614C.1.pep
MQLPPLRVCRITSLNVSGHGNISAIPRELFKHTCEVSLDLSNNNLSGSIPPEVINLSKLETCXHFNNNPLSGAFPHELSLLRNLRSLWMFDNYIVGPFPAFIQNLTNLTDLRIYGTNLQLPIPKNLSNLSNLEVLMLGDLAGNHSYLNVIGAWANLSVLSRRKCGLTGQVPNTPPNLPKLKYLDLTSNXLXGSIGGLLRPYKTSNYIYVGGNNLSGPVPSEIVQSSVSLDVSYNYYVDGSLSNNPSGQKQFINYLGTSIDASGRINSGNLTILNCLRMNECNINNLTNRATSFAINCGGKQVEYSDLMPIMFSEDSTDLGGSGFHVNATSHWVVSHVGSDPFNESTGIVNTSDIFETNMQELYQTARTSTSSLWYYVVGLANGNYTVQLFFAEIVITHGPGKRLFDIDIQDQNIRKDFDITKEAGGSRKATNITYEVTVDNSILAIHLYWSGRGTCCIPYEGAYGPLVSAIKVTHSQDPKTSPPQAPHSDSARDDVKRRGVVAGIAALSIAAAVISSSVVYLWWKWVSLVKRPMA

SEQ ID NO: 223714 - protein, 88 aa, Zea mays
  Clone ID: MRT4577_135615C.1.pep
KGSPLLTKGVVPDGSNEWAISGGTGEFFMAKGVVKKRSLPHRDGPGNPAELSMQVFCPVFGSSQHPNKQGSSISVPKIGLWGAPFYLI

SEQ ID NO: 223715 - protein, 64 aa, Zea mays
  unsure (1)..(64): unsure at all Xaa locations
  Clone ID: MRT4577_135616C.1.pep
XENVSKKAKNNMRKAXEGARAAKAISVTXEKNNNTSTSKMWSMXDNSKSKTGRNYHDNWCLTTI

SEQ ID NO: 223716 - protein, 76 aa, Zea mays
  Clone ID: MRT4577_135617C.1.pep
VLLLSFPLILTVSGGRWRGILAVYTRRFDHTELDSDFPSAGAYRSRRTAGLSVWRDGRNTRDDASVPRIGTSSDVY

SEQ ID NO: 223717 - protein, 67 aa, Zea mays
  Clone ID: MRT4577_135618C.1.pep
SIFAQPFSPFHSSIPIQMSDLGMSTTSDVTKCKECGVLTSQNNIINKTVDEQTFKTQKDEQPNQQTS

SEQ ID NO: 223718 - protein, 229 aa, Zea mays
  Clone ID: MRT4577_135619C.1.pep
MSGTLAKIAEIEAEMARTQKNKATAHHLGLLKARLAKLRRELITPKGGGGGGPGEGFDVAKTGDARIGFVGFPSVGKSTLLSNLAGVYSEVAAYEFTTLTTVPGVIRYKGAKIQLLDLPGIIEGAKDGKGRGRQVIAVARTCNLILIVLDVLKPLGHKKIIENELEGFGIRLNSKPPNIGFKKKDKGGINLTATCPQSELDAETVKSILAEYKIHNADVTLRSDATADD

SEQ ID NO: 223719 - protein, 1108 aa, Zea mays
  Clone ID: MRT4577_13561C.1.pep
MASSLLTTDRRWGATPARKSGMTVLGKVPKPINLPSQRLENNGLDPNLELVPKGTHTWGSKAPSTTPNAWSSSSILSTKNDGSSSSSSHFNGRPSSGGGSRPSTAGSEPLGSPNAWGPNSRPSSASGTFPSSHLPMATNRPRSAETRPGSSQLSRFADNASDNVKASIRTIDRPGSSSHGPGFTLSTGDFPTLGSEANSQRGHSSKGRPISSSGKEVSQGEQVKSLTTGNGELISQSNNQPVDIMKTEQHAHTGGAPVLATNVPNEGLQPRPYPPNFPMPHPQFDSWRAPPGHPPEGMWHRGLVPGGPYRPVGPPGSFPVEPFGYYGQFPPNSEVAARQGPGHGGYQAKNGDVYHPTPPNSYIMNQPVIPVRPVYQGPVPYDGYYGPRAHFNNANVRDPHFVGGPGILNQFPNQNDRFHPGHPQNRPGRHETVPREQLESDKIHVFHRGNPGSLHDNSDRLGGSREFERNAQPASPLLPHPDGNRTDVNMRTDTRDTFSESERTRVLTKSVPNQRGSVGTEHLSVYDNAHSHHRETGDGTLRKKFKEDGSAALHPVIKKNAALIERPESLNNKARNVDARNLPESASSKEFNKHKKSTDVSSNDVMGMACKSDPAVSVSCVSPAVQRLPNVPIKGTILGPAHPQLTEFSKAEKLGDSISDHVHRKSDSSRNSYHGPSKDRPANKFGSHGRGESSTTDLRNNIDHGQQPEIASQLQPAIVPDDMPASLDYESQRAKMKELAAERAKKLKAEEEERIKNQKAKALAKLEELNRRSSVLQKKSNDIKVETYDAHDKQHAGLDVTAKLDTSTEPHDVIAPDRLTDLLPPNDPNHTMVHIQAQSTAQSHALDGGKDPDAHATSSLVKNTHSNMEPVVQKSISQLHDITVVKAKQGYRKRHVSEEKISDEKASASITTRNITKNVDVLIDTVTAVVAPHDDPPTQNKKGTRHLRSKKKLDDAPVTSKHPPVVLNEPNTVKVSTEPKTHTGGVIISSSIVPTEGTIVTVGSITVGGISLKPMNQERVKSPDGTNNTESSQPRPQQTRKSGKHQHVLRPVEKPHGNDGILCAPVKPPVPNEHSDGAMPTAAVADLTKPVGKAINDGENVTRTKRAQ

SEQ ID NO: 223720 - protein, 109 aa, Zea mays
  Clone ID: MRT4577_135620C.1.pep
MEVAAASARPVLRVAAICGSLRKASFNRGLLRAAAEVCEDSIPGLRIDELDISDLPIINTDLETGSGSSTVFPPAVEAFRAKVCQADCFLFGAPEYNYSIASAYSSMDG

SEQ ID NO: 223721 - protein, 105 aa, Zea mays
  unsure (1)..(105): unsure at all Xaa locations
  Clone ID: MRT4577_135621C.1.pep
EAGHKQGKNTPKESVEALKLWVYKVLKQLHPDIGIWPKGMSIMRSFMGLIFKNIQSKQTXLDRYVRQPXAPSSRAKPXVGLVLPVKLDKNIVTSGSQTVSFVASS

SEQ ID NO: 223722 - protein, 49 aa, Zea mays
  Clone ID: MRT4577_135622C.1.pep
TRRLEWPRKTADHYGRRDATGARPVTECMISRSVAFPVSDVRDGERDTS

SEQ ID NO: 223723 - protein, 183 aa, Zea mays
  unsure (1)..(183): unsure at all Xaa locations
  Clone ID: MRT4577_135623C.1.pep
MPPDREDAAGAGADVAADELQSVSFGWCSDRSRSRSASTASTATASCSTSSSGPLHQHLSLPAPRRNPSPSPAPTPTLPTQIPRLGAVSLSDIRFLRRLGAGDIGSVYLAEVRRPTPTXGAAGKEKHTSTLAAAAVVVAAKVMDRKELEGRNKEGRARTEREILEAVDHPFLPRLYGVAEGDR

SEQ ID NO: 223724 - protein, 582 aa, Zea mays
  Clone ID: MRT4577_135624C.1.pep
MGVAGHNDPLLGETTCGSLLQQLQLIWDEVGESDEDRDKMLLQLEQECLDVYRRKVDQASSSRSCLLQQLSNSKSELTRLLSALGESSISGAPDKTSGTIKEQLAAISPSLETLRRKKESRVKEFAHVQLQIQILRDEIAGDLHIGEQLETPHVNADDLSVRRLNEYLSELQALQKEKSTRLSRILESVSSVHDLCSVLGMDFVGTVTKVHPSLDDSVGVQSKSISGETISKLSKMVIVLEEEKSKRFAKIQALASQLSDLWNLMDSPVEEQQPFRHVTCIMSSTLDDVIVPGALALDVIQQAELEVERLDQLKASRMKDIAFKKQTELEDIYARAHVAVDSSAARDRIMSIIESSSFEPSELLADMENQILKANEESLSRKDILERVDRWMSACEEESWLEDYSRDDNRYSATRGAHLNLKRAEKARVLVNKIPAIVDTLLAKTRAWEQEHGVAFTYDGVPLLAMLDEYKILRQEKEDEKRRMRDQKKMNEQLAAEQEKLFGSKPSPARPQSSSRKVAGARTNGGGTPARRLSALQSGGRTASRDGRRDASRPVAPVNYVAIAKEDVASQASSNHTGPSTP

SEQ ID NO: 223725 - protein, 162 aa, Zea mays
  Clone ID: MRT4577_135625C.1.pep
RGPRTLIARAQPQESARRARGPCKPEQSARRAGRTRAVSAGPRRAGWSRGALGRRSRGGAARAGTGAGSDAGRHTGRARAAGQPSARGTARRPGCDDRVPTVMSASSPSHSDGLKATLLRGWCRRLMVARVRALATAARTAGSRTLARGESVDARKREKKKK

SEQ ID NO: 223726 - protein, 60 aa, Zea mays
  Clone ID: MRT4577_135626C.1.pep
WGCDTGGGYSSRHRPPLNQRAQNIQPNQHLLKAGAAHAARLYRRSCREEGHPGRSFRRPP

SEQ ID NO: 223727 - protein, 61 aa, Zea mays
  unsure (1)..(61): unsure at all Xaa locations
  Clone ID: MRT4577_135627C.1.pep
GXXGGKVTRQWLGFPAPVNRKPPFHREQNNPGDKLAGPPTCQLKGPMPKKCLFNKGGPCFG

SEQ ID NO: 223728 - protein, 67 aa, Zea mays
  Clone ID: MRT4577_135628C.1.pep
TTVVAKPLQPMLVITECTSWTSTTPPYMETPPWYKGKLIGTYNERHIACLTRGYRYRRARALHGTIY

SEQ ID NO: 223729 - protein, 140 aa, Zea mays
  Clone ID: MRT4577_135629C.1.pep
QQGSRCGHWRWIFLALWFFFSSCRCCYSSTLPVPSCPLSLRHWRVCVFHFFLLCTLCFDFELGWFLLRLICSAAVAVTCSCRSPWGILLSCHAGVGMCLVAGLLDLRFIFKANRLVIVDLVSSSPSQHVGCRIGSDLSSS

SEQ ID NO: 223730 - protein, 34 aa, Zea mays
  Clone ID: MRT4577_13562C.1.pep
KSIDWWGTAGEHCPLAKCPTAKGVDLGDGVCPVF

SEQ ID NO: 223731 - protein, 73 aa, Zea mays
  Clone ID: MRT4577_135630C.1.pep
LSNPETWLSFEDMLDNPLNSTQWINDPQTGPVMLQISRLFQTLTRKQVALFHSAIRPQQPPGADPRPGRVDRT

SEQ ID NO: 223732 - protein, 63 aa, Zea mays
  Clone ID: MRT4577_135631C.1.pep
VVIAPVEYFSSEYFLLKVNNHLHHSEPMGVCYIHRAIAWLGGRRNTQYNNVRCVSSFRTDIAS

SEQ ID NO: 223733 - protein, 44 aa, Zea mays
  Clone ID: MRT4577_135632C.1.pep
MNISRTLSQLCYRALATTEQASRASSKCISISLNSCQMGRSCLH

SEQ ID NO: 223734 - protein, 159 aa, Zea mays
  unsure (1)..(159): unsure at all Xaa locations
  Clone ID: MRT4577_135633C.1.pep
AAGGRDPSEDVDQESAAAVAGEQQQQQAAEAEEEEGRQAPVPREKILQRINSKKGAKSYQLGKQLSFKWTTGAGPRIGCVRDYPSELQQQALEQVNLSPRCXAARRPGRLATRAKLQQPPSAXTTAAAARGCEASTPSEALRSPLQHGALAVAAAAESE

SEQ ID NO: 223735 - protein, 98 aa, Zea mays
  unsure (1)..(98): unsure at all Xaa locations
  Clone ID: MRT4577_135634C.1.pep
MQKEDHHVAVSAEQPKIDPKLYERILLISVQQSRLITMFMHLQIXPVAPGGCNDLEDSTKXNTTHXHLDHKTVLSKEDRIHYSFITYPQHYACIPNSL

SEQ ID NO: 223736 - protein, 89 aa, Zea mays
  Clone ID: MRT4577_135635C.1.pep
RPTRAKLHTTASPYQFILNTTIISLAPLVDSDMALAHMNLNMAMNPRAHALANPVLAAIPKTDPKLHLLLLTFAADSALSFEANRRDIF

SEQ ID NO: 223737 - protein, 78 aa, Zea mays
  Clone ID: MRT4577_135636C.1.pep
RRRDANFIAFVFFLLHFSFWFQVVNPYTKYALTMTPVALSIEEALPKKMQSYLVGMLVRTCLVLSTVAVALLFPYFGE

SEQ ID NO: 223738 - protein, 79 aa, Zea mays
  unsure (1)..(79): unsure at all Xaa locations
  Clone ID: MRT4577_135637C.1.pep
FSXKIFFFLNPGGGGGFLLLVFLLGGGEPLPAHKPVAMLPNRRFPQMLLFDNHSLLCLETFSCSFFIFGXACNFPRSSL

SEQ ID NO: 223739 - protein, 81 aa, Zea mays
  Clone ID: MRT4577_135638C.1.pep
EQPALVSRCWGDRALSLWIGTILHNRSSNPNLGRGILIYIRTYTWGEVLYIDSEHITLTELDLVNLVCMLCSKCTTSFVQY

SEQ ID NO: 223740 - protein, 106 aa, Zea mays
  Clone ID: MRT4577_135639C.1.pep
NISVNPGEQVDDFAVRLSTLHQQLVIHGDRDITEERVVEKFLRTVPAKYSQIVVAIEQFLDFEALTLEEVTGRLKAVDNREEQILTEPVAINGKLLYTEEQWKARC

SEQ ID NO: 223741 - protein, 326 aa, Zea mays
  Clone ID: MRT4577_13563C.1.pep
MGMACKSDPAVSVSCVSPAVQRLPNVPIKGTILGLAHPQLTEFSKAEKLGDSISDHVHRKSDSSRNSYHGPSKDRPANKFGSHGRGESSTTSSLPVADLRNNIDHGQQPEIASQLQPAIVPDDMPASLVFPIQRAKMKELAAERAKKLKAEEEERIKNQKAKALAKLEELNRRSSVLQKKSNDIKVETYDAHDKQHAGLDVTAKLDTSTEPHDVIAPDRLTDLLPPNDPNHTMVHIQAQSTAQSHASDGGKDPDAHATSSLVKNTHSNMEPVVQKSISQLHDITVVKAKQGYRKRHVSEEKISDEKASASITTEILRKMLMFSSTQ

SEQ ID NO: 223742 - protein, 61 aa, Zea mays
  Clone ID: MRT4577_135640C.1.pep
TFSLALHDKAIANAAPILRANTQPLQHRQSVLKSYLTNCMRPCYRNRILSHTANQLWLNAF

SEQ ID NO: 223743 - protein, 95 aa, Zea mays
  Clone ID: MRT4577_135641C.1.pep
QKTVGEAKTMAKDEAQKFLFARDIIVIARVQTEASLSEQSTELQALRSTVSTVCAHLSPPPPVKVALPDWLRTLPDHVEYVVLEGVVYGSSIALR

SEQ ID NO: 223744 - protein, 158 aa, Zea mays
  Clone ID: MRT4577_135642C.1.pep
LPRPYWRQPRAFPKLLHPKIKMPPGKKGSRCILNPQDDMEAMVAASVEVRQLVMSSTQVVSHVLPSSSKFLHNVGLQPASKTSSISAKVHELQSQLETKRQEKDGLRQEMESLKATSQEFMTTIANQTIEIENLKKSLAENNSLLRQILSTNRGMSPP

SEQ ID NO: 223745 - protein, 69 aa, Zea mays
  Clone ID: MRT4577_135643C.1.pep
IQEANEMKLVAVRIPRLRPAPFFLHVCLNPPDSCNISSVINYQLSIIVFLIPNSLMCLTYLLEPANKAK

SEQ ID NO: 223746 - protein, 172 aa, Zea mays
  unsure (1)..(172): unsure at all Xaa locations
  Clone ID: MRT4577_135644C.1.pep
MPPGKKGSRCILNPQRQEKYKDTQPSAINLFKEMYCGKKKXFSKIVQKAIDDMEAMVAASVEVRQLVMSSTQVVSHVLPSSSKFLHNVGLQPASKTSSISAKVHELQSQLETKRQEKDGLRQEMESLKATSQEFMTTIANQTIEIENLKKSLAENNSLLRQILSTNRGMSPP

SEQ ID NO: 223747 - protein, 46 aa, Zea mays
  unsure (1)..(46): unsure at all Xaa locations
  Clone ID: MRT4577_135645C.1.pep
HFDALIQYGSYNKKTLGVKQLWLSYLASRKKALVAGGTVXXNAPLW

SEQ ID NO: 223748 - protein, 78 aa, Zea mays
  Clone ID: MRT4577_135646C.1.pep
PRGKIPPSGFKGANPPPAKVPHKHVGGGQVPPFLRGQKSGGRGPVLSLNTFMGTWAKRDPPPQKISTNFSLLGPGEFH

SEQ ID NO: 223749 - protein, 200 aa, Zea mays
  unsure (1)..(200): unsure at all Xaa locations
  Clone ID: MRT4577_135647C.1.pep
MVSATMGSLPNNIMLAFAVLAALVDVGSRGPPKVPPXPNISNNYXSEWLTRYGHLKXSPNTASAPDNIAACAIKNVXNLPPYSTLTACGNSLASVKDFKACSSCYSHRXCKEKPDCSDNPDMEYIPDMNYXPIALYHFHLNDXDFVSLDKPRVNDQIPHCGIMNDELRTVQCXTTVGQKTLFHIDKVCKPSYLDELDDYE

SEQ ID NO: 223750 - protein, 64 aa, Zea mays
  Clone ID: MRT4577_135648C.1.pep
HTYVAEQLMCEIDGKQLTSAAIFGHDGAMCAQSSAVTEFTPKDMDGIMNDFDDPVQLAWTCLIL

SEQ ID NO: 223751 - protein, 69 aa, Zea mays
  Clone ID: MRT4577_135649C.1.pep
QVYMEKPDISFTRIDSGQASYHTWNFEAYTTVSLQQSLATTIALMNNSHLNEDFLGEQLQLSAFSINKL

SEQ ID NO: 223752 - protein, 85 aa, Zea mays
  Clone ID: MRT4577_13564C.1.pep
QLITFTVQIIRNYTVFSFLSRYRPSFLACHHVEAPSIVASTYIFMLHLPLYCFIEGVLCLEDLFRIHGATEIIFVFPFCNLCSKK

SEQ ID NO: 223753 - protein, 126 aa, Zea mays
  unsure (1)..(126): unsure at all Xaa locations
  Clone ID: MRT4577_135650C.1.pep
QTSGQVIATIVCLGNSIMGMGAVHDELLARGSCGPPNVRLGPTITSNYKGKWHNDMDTXFGQRNGDVAPENERSCGIRNVKLLPYNGITACSIVPIFSVRKGCQPCCQVRCKVMPECSINRVTVLI

SEQ ID NO: 223754 - protein, 79 aa, Zea mays
  Clone ID: MRT4577_135651C.1.pep
FFLVAEPFYRRSSSSTEAPSLALPFLLRPTPPSPPIFFETPSPMAAVLQPQAVTHPVCVQWNMLLNATVCFPVPHHYLP

SEQ ID NO: 223755 - protein, 143 aa, Zea mays
  unsure (1)..(143): unsure at all Xaa locations
  Clone ID: MRT4577_135652C.1.pep
MGNASSMLTQYDIEEVQEHCSYLFSQQEIVSLYERFCQLDRSAKGFISEDEFLSIPEFSLNPLSXVIFKVYDIDGKGKITFKDLLEVLRDLTGSFMSEEQREQVVTEVLEEAGYTRDYAFSLEDFIQIIDHPGLKMEVEVPID

SEQ ID NO: 223756 - protein, 55 aa, Zea mays
  Clone ID: MRT4577_135653C.1.pep
MADRGKAIGAGAAKKATERSDQVGQQTKVVSTAAKPEHENRYGFVYFGGGGCLSL

SEQ ID NO: 223757 - protein, 225 aa, Zea mays
  Clone ID: MRT4577_135654C.1.pep
MRPWRPAGDCRPVPSRPFPFFPSTPAKFTAALFGGNYCWIVGRRKEGRGAMGNASSMLTQYDIEEVQEHCSYLFSQQEIVSLYERFCQLDRSAKGFISEDEFLSIPEFSLNPLSKRLLRMVDGLNFKDFVAFLSTFSAKASLRQKIEFIFKVYDIDGKGKITFKDLLEVLRDLTGSFMSEEQREQVVTEVLEEAGYTRDYAFSLEDFIQIIDHPGLKMEVEVPID

SEQ ID NO: 223758 - protein, 44 aa, Zea mays
  Clone ID: MRT4577_135655C.1.pep
QSVVLLDRSQGKVMNCGGGGSCGTCIVEIIDGKELLNERTSTEN

SEQ ID NO: 223759 - protein, 65 aa, Zea mays
  Clone ID: MRT4577_135656C.1.pep
CGSGPAFHPFVKVLLIQVEFVQKEMHDAIRTGSPDQHISFLGMCIVMMGKYWCEQLPLDPRPLDV

SEQ ID NO: 223760 - protein, 71 aa, Zea mays
  Clone ID: MRT4577_135657C.1.pep
KTTNLFFGGLPLQNLGGGCFSGAIHEKGFFCPPCLNKNGLLLLFLPPPGPILELHASISFGFFHWGGLKAP

SEQ ID NO: 223761 - protein, 131 aa, Zea mays
  Clone ID: MRT4577_135658C.1.pep
MPSSTPPSVQPTPSLQTLTSPAVAQNTHIDVSEIKSKIFKRIGHERGNKYFQHLERFLSSRLSKNEFEKLCLVALGRENLPLHNHLICSILHNASRACGPPVINDPKLVRGATTSGHAVVPPVWDNGGALN

SEQ ID NO: 223762 - protein, 458 aa, Zea mays
  unsure (1)..(458): unsure at all Xaa locations
  Clone ID: MRT4577_135659C.1.pep
MANIRALLVGLSRARGSLAEAGRCASTRPSILASLGAHYKIPMPARWFSSTGLPPHLVVGMPALSPTXGNIAKWRKQEGDKXYLAKILAPEGSKDVQVGQPIAVTVEDVEDIKSIPADTSFGGEQKEEQSTESAPQNKVVNVSEQSSTVSRISPAAKLLIKEHGLDTSSLRASGPRGTLLKGDVLAALKSGINSSSTKEKKSPAQPSSQPTRDSQSQASSISQKDDTYEDIPNSQIRKVIAKRLLESKQTTPHLYLSKDVVLDPLLAFRNELKELHGIKVSVNDIIIKAVAIALRNVPEANAYWNNDKEETQKCDSVDISIAVATEKGLMTPIIRNADQKTISAISAEVKQLAEKARAGKLAPNEFQGGTFSISNLGMYPVDHFCAIINPPQSGILAVGRGNKVVEPVVDSDGTEKAAAVTKMSLTLSADHRVFDGQVGGKFFTELALNFSDIRRLLL

SEQ ID NO: 223763 - protein, 152 aa, Zea mays
  Clone ID: MRT4577_13565C.1.pep
MTSEIENGKELEDELARTHINGDSSGRNCSGDDKEARVPLPWELLQPVMRVLGHCLLAPLNPPEVRDAAADAVRVVYARACHDLVAQAILASRSLIELDKSARKAAKAAAAAASGQIVAVGTAGSNASSSRPSSKPNTPSKQRKPDTLLVSK

SEQ ID NO: 223764 - protein, 70 aa, Zea mays
  Clone ID: MRT4577_135660C.1.pep
VVLNGAAQAREELCRATVGLARDSMSKRRATRGEQRAWRKRGMWGLVARGLAPGCHSGRQWRGSVFVDVT

SEQ ID NO: 223765 - protein, 157 aa, Zea mays
  Clone ID: MRT4577_135661C.1.pep
QLVSETTVLGIRSHHRHGFMDSLLGFVLEEMDKRFAALDSKWEKQFGDLIHNKEDRVAKLEQSQADLVSWRPAVDAAVDDIKLDLRRLNKQMDRSIIESAATDSGLLPHPEPGAPRAPAGFYTDGPIGHRDQHYLRDQGFGSVMTYFPDPKRGRVLG

SEQ ID NO: 223766 - protein, 228 aa, Zea mays
  unsure (1)..(228): unsure at all Xaa locations
  Clone ID: MRT4577_135662C.1.pep
MANIRALLVGLSRARGSLAEAGRCASTRPSILASLGAHYKIPMPARWFSSTGLPPHLVVGMPALSPTMNQGNIAKWRKQEGDKIEVGDVICEIETDKATLEFESLEEGYLAKILAPEGSKDVQVGQPIAVTVEDVEDIKSIPADTSFGGEQKEEQSTESAPQNKVVNVSEQSSTVSRISPAAKLLIKEHGLDTSSLRASGPRGTLLKGDXLAALKSGINSSSPXKKKK

SEQ ID NO: 223767 - protein, 111 aa, Zea mays
  Clone ID: MRT4577_135663C.1.pep
MANIRALLVGLSRARGSLAEAGRCASTRPSILASLGAHYKIPMPARWFSSTGLPPPLVGGMPALSPTMNQGNIAKWRKQEGDKVVLLLAVIFLNSIRKISYFQLRVSHFFV

SEQ ID NO: 223768 - protein, 37 aa, Zea mays
  Clone ID: MRT4577_135664C.1.pep
HAILRRNGPSRFSRLEERDLAIGGSLPQLSKIGFGVR

SEQ ID NO: 223769 - protein, 82 aa, Zea mays
  Clone ID: MRT4577_135665C.1.pep
GPRPKGGGLLTPTRAHFWGNGGVPKTGGGHPLERVMMMFNKGKKTRWSRGARPLLGGGPTGPPCRWGWGNFPRAGTQNLYLG

SEQ ID NO: 223770 - protein, 66 aa, Zea mays
  Clone ID: MRT4577_135666C.1.pep
ATHRATASHTQLARSTIRGAGNGSLHDLLISSGRGASRPSITRPPRLLPTTALLQDHHHHGPALRN

SEQ ID NO: 223771 - protein, 88 aa, Zea mays
  Clone ID: MRT4577_135667C.1.pep
MAAASASMDRISQRVSSQEVPTDLTDRIGDCVFTLHKAVIVPKCGYIRRAGAASQTQGPEGGAVQLELLTLTIGAVAYHNEARCWYCD

SEQ ID NO: 223772 - protein, 115 aa, Zea mays
  unsure (1)..(115): unsure at all Xaa locations
  Clone ID: MRT4577_135668C.1.pep
VLKQVHPDIGISSKAMSIMNSFINDIFXKLAGEAPKLGRVHKKPPLPFREIQTSVGLVLPGELAKHPVSEGTKAVPQFPRNLARFGIPGFVKRVFFCVLFPVPPPTRLVASLPAL

SEQ ID NO: 223773 - protein, 125 aa, Zea mays
  Clone ID: MRT4577_135669C.1.pep
MVAKNETQQQDVEMESAEDIENQKREQDSASVQEIREHCRQIEKAVLTKEPRFILRVLRSLPNTRRKLNPIVLRNLTAHLYPAGVERDTINLFIDTLQPGQELEVLRTRASINTPIPEVDAYLHL

SEQ ID NO: 223774 - protein, 49 aa, Zea mays
  Clone ID: MRT4577_13566C.1.pep
RHRSTVGKLVSLCIVSTQFSRRRAFICRTYGVGHTYTSLCMALFTLSYI

SEQ ID NO: 223775 - protein, 60 aa, Zea mays
  Clone ID: MRT4577_135670C.1.pep
SSTSSHHIWLFQRKCRAPERLSSSTGSPFMPSLRSRLRQYYLMLGSPAKVPAMLPNACIP

SEQ ID NO: 223776 - protein, 71 aa, Zea mays
  Clone ID: MRT4577_135671C.1.pep
KGQILPLPWCLKIKKKKKKKKKKKKKKKKKKKKKKKKKKKKKQKKKKKRPPRPRPPKKKGNPPGGGNQKQT

SEQ ID NO: 223777 - protein, 112 aa, Zea mays
  Clone ID: MRT4577_135672C.1.pep
MYKEEVSWFEQRLQQLELPMQLDLPPQPPPPQLPVSVPVQAPLRMWGGRRPKPKAREPNKREMDEEEKQKLTVEIENLPEDKVLNVLQIVHKRNRDPALSAEVVELDFDELD

SEQ ID NO: 223778 - protein, 88 aa, Zea mays
  unsure (1)..(88): unsure at all Xaa locations
  Clone ID: MRT4577_135673C.1.pep
QTTKTPNGDIPQQYEFSGYPKIHHDTTAPXIRTATVGKSQNIFMGLNTGXIEKGIXFQLKNQAKKTDIYGVEPLKTPVLNSKKPGPHK

SEQ ID NO: 223779 - protein, 81 aa, Zea mays
  unsure (1)..(81): unsure at all Xaa locations
  Clone ID: MRT4577_135674C.1.pep
HLKISCLLMLRESGSNASTASIFPQFLQAPISSILTQFLSPTEPSVYENLILQPYKIQHAITSCFLPLSPLXFQQPVTLLQ

SEQ ID NO: 223780 - protein, 71 aa, Zea mays
  Clone ID: MRT4577_135675C.1.pep
FYKTMVFKTDFFYKVAKHLLAKNTMVFSNTMVLPQNSKNTLLTNTPYNVKEWALDKLLQIGQKTCPSSCQC

SEQ ID NO: 223781 - protein, 125 aa, Zea mays
  unsure (1)..(125): unsure at all Xaa locations
  Clone ID: MRT4577_135676C.1.pep
MNAKRLTPILLXAVLMMTCLVCAXNCAIAGGHDVXTTPGSGLRWSSSSDADKTMLXSRDINVILCLKAQXAGYKSXYCCFTLPGLPCWPDQNTCWIEWPRHKRLXSTRFMKLTVAMSSISAIVFS

SEQ ID NO: 223782 - protein, 74 aa, Zea mays
  Clone ID: MRT4577_135677C.1.pep
LVTPSSGFPSISTNNARLGPNALLSLSFPPTFWSGRVAARTGYDAAASNCWTETTPHATDVQVTVHDGGILDQA

SEQ ID NO: 223783 - protein, 62 aa, Zea mays
  Clone ID: MRT4577_135678C.1.pep
RDMGTHRQCSIDVTSSIHCSIPYSVRFLNGVLVALPCPAESAAGARARPIGEKPDHQSLPPD

SEQ ID NO: 223784 - protein, 52 aa, Zea mays
  Clone ID: MRT4577_135679C.1.pep
VMFILFIHLCYIDSRHIHLYLFIGLIIEISLPLGPREFFVRSMMRNHKFISF

SEQ ID NO: 223785 - protein, 122 aa, Zea mays
  Clone ID: MRT4577_13567C.1.pep
VHPNMINGPKMGHVINMLEMSDLQFLPYKRPGARKHGGSPQGPDRFSPNLGVRRDPKQVATQVPVQIIYWSLDRIDIVHVIFFPSVNTFFPTVFQRLKMVCDCIIYVEHPSLCHAIKKQMGC

SEQ ID NO: 223786 - protein, 67 aa, Zea mays
  Clone ID: MRT4577_135680C.1.pep
RVNIKDTSHVYSPLRLFRFPPLSRSFSTGGFGPGSCFSRTTLFISCQTSSHVRRFLYIYYPWEPCWL

SEQ ID NO: 223787 - protein, 293 aa, Zea mays
  unsure (1)..(293): unsure at all Xaa locations
  Clone ID: MRT4577_135681C.1.pep
MFPSPGRAVMALGHGGQHMTASSTAGGMAASSSSTPTITFAXQPAVPSPSSXATSSLALAHPHHHGVLGYGSACLLLDHRHPTTTTSSASPSHAAPSTVVPAPTLHHHFHGHAAGAPHVSLSPPTRASPPPPHPWSTAAACEEEPEPHHDHRQQAGQGGRPPRGKGAAVSEGSAAALGVGAVRMKKAGGGGGGKARRKVREPRFCFKTMSDVDVLDDGYKWRKYGQKVVKNTQHPRSYYRCTQDNCRVKKRVERLAEDPRMVITTYEGRHVHSPSRDEDDDAARANAEMSFIW

SEQ ID NO: 223788 - protein, 101 aa, Zea mays
  Clone ID: MRT4577_135682C.1.pep
LRVRRALSVSGGGDWAASAAALRQDPRLHLPYARRRASPQVEWEAEMSRGRSPEPLDFFIWTVQVLRLLSFFVLSFNLVSYIAIWMSKCIIDLPANLLGNK

SEQ ID NO: 223789 - protein, 70 aa, Zea mays
  unsure (1)..(70): unsure at all Xaa locations
  Clone ID: MRT4577_135683C.1.pep
AFASQSAAVAARGRGKVVXXTPGGFGGLDEVAVMGAPVAERSRRSPPHAVSARRAGGXRRVVPGQVGIGS

SEQ ID NO: 223790 - protein, 48 aa, Zea mays
  Clone ID: MRT4577_135684C.1.pep
NRPLASPKRDRLLGGVTQVLLPTSRGPGGFTGLLVLKICRRPEGYRKR

SEQ ID NO: 223791 - protein, 163 aa, Zea mays
  Clone ID: MRT4577_135685C.1.pep
MPSMNSTVFHAYAYGTAFWYGLRGLCRVYDPIMVIGWFRPPSQLNLAPNDLETYNVRNDGWCLITLALVLISLTNAVPFTAESAKKFSSVPYAKAIVAATIFHHVATGIGAYQHYKLPSHYNTSMDIGVWGNIWLSLTGLFTLALLQSDAGDMSVKRAAQKVK

SEQ ID NO: 223792 - protein, 66 aa, Zea mays
  Clone ID: MRT4577_135686C.1.pep
YLLCHVAALASATNACIIPQCSLARSYIIPQVLRPVTLMALGHPSVQAYRLQPAIAASVLQPPSAQ

SEQ ID NO: 223793 - protein, 79 aa, Zea mays
  Clone ID: MRT4577_135687C.1.pep
YGSGSIFSTCISVLAFFKPNIFKTVLTKLDLINPSATLIYKDTMVFYIMRYLVASLKIVFAKLWYSIYRGIVGVLETPL

SEQ ID NO: 223794 - protein, 58 aa, Zea mays
  Clone ID: MRT4577_135688C.1.pep
LARELPPGVSRTGVRTESSVWLRSLERKQREQGQSQHLQGHGRRTVNCVMPSCDAAFP

SEQ ID NO: 223795 - protein, 345 aa, Zea mays
  Clone ID: MRT4577_135689C.1.pep
MATAVLRRPFFAALLPAAGPRARRYPAGKTHAQNCRFRMATAVLRRPFLAALLLPAAGGASGTSSWFCPRRRRSSPSVRAVSSDSPKPVASTSSPTGGDSPDEEPPVLPLLQELADCLILPPKLLAQLPSDLRLDLNDAAFDLSNGPVLDECGQEVGDLLLNLAKAWELADTSTSNSIAKQLPLMEPYLTRSAKSAFGKRLVSAGRRFQSMGQYNQGELKKIAETMIKNGKLLSKHPVVQSDVQAMKEKRRLKFGELEFGVTAQSATIGSAVAAIFGLISWQLARGVQSIPDNTTQYTNDNALQLAKSLKTALLVLGYTSTGLSLFAAFGLLLLAQQINSENKSE

SEQ ID NO: 223796 - protein, 271 aa, Zea mays
  unsure (1)..(271): unsure at all Xaa locations
  Clone ID: MRT4577_13568C.1.pep
DACRYRSGIPGSTHASASGCPSGTLSDSGRNSLSSLPTYSTGGAEPTTNSPGGHLPSHGPGRGALPGPARGVPTGPSHSDSGRSSSSKSTGSLGGRVAGGLLGSGARASPGSSSGGDRSPPPPPPPPPSDEALLHCVLEGKLRDREAELQQLRDSMDESEATVCQAFGARQRRWPRERGEDCAAQAQQATQRVQRAQQLLQLQVFQLQQEKRQLQDDFAQLLQEREQLERRCATFEREQRELGPRLEETKWEVCQKXGEISLLKQXTEESQ

SEQ ID NO: 223797 - protein, 26 aa, Zea mays
  Clone ID: MRT4577_135690C.1.pep
KSAASTLISRPSHFSFLGRRTGSSLV

SEQ ID NO: 223798 - protein, 107 aa, Zea mays
  Clone ID: MRT4577_135691C.1.pep
VTAVPHSESTILNTSSSLLRSLTICSSVSPRLTSMFASISPPIILSVITNNWLFIFIQNIACTDTHKVPVYAIPYERLPHWSIERQGMRSTTSASACQLLRFVPRAE

SEQ ID NO: 223799 - protein, 134 aa, Zea mays
  Clone ID: MRT4577_135692C.1.pep
MPIRNIAVGRPEEATHPDTLKAALAEFISTFIFVFAGSGSGIAYNKLTDNGAATPAGLISASIAHAFALFVAVSVGANICGGHVNPAVTFGAFVGGNITFLRGIVYVIAQLLGSIVAYLLLAFVTAYTVPAFGL

SEQ ID NO: 223800 - protein, 184 aa, Zea mays
  unsure (1)..(184): unsure at all Xaa locations
  Clone ID: MRT4577_135693C.1.pep
QPRRGTTGPTAPQELADCLILPPKLLAQLPSDLRLDLNDAAFDLSNGPVLDEXQRTQHSATGYMLEVSAQPSTLTMLISLLRXCGQEVGDLLLNLAKAWELADTSTSNSIAKQLPLMEPYLTRSAKSXAFGKRLVSAGRRFQSMGQYNQGELKKIAETMIKNGKLLSKTPVVQSDGQAMKRKRR

SEQ ID NO: 223801 - protein, 94 aa, Zea mays
  Clone ID: MRT4577_135694C.1.pep
DIKKTIKAASKGPPKGIIGFLEKNLVFTHFLGDNRLNIFYPKAGIAFKNPFFKIVFWVDKKWGYNNRVVDLIPPKFKNQKGFFPPPFQERVPLG

SEQ ID NO: 223802 - protein, 56 aa, Zea mays
  Clone ID: MRT4577_135695C.1.pep
PSAGHSLLISSDESAPSAGHVRNCPGSVASDSPLGHDWMQGRTMAAPPARSPFCLP

SEQ ID NO: 223803 - protein, 104 aa, Zea mays
  unsure (1)..(104): unsure at all Xaa locations
  Clone ID: MRT4577_135696C.1.pep
SESQEHPPASCATAAAYVNIYDISPLNHYLYWCGLEMLHSGIQVHGMEDGFGAHDYPTSGVLRGYPRSWPGVIFRGSVLRXVTHMPRSEGRTPIEDVGEDYGGG

SEQ ID NO: 223804 - protein, 25 aa, Zea mays
  Clone ID: MRT4577_135697C.1.pep
DFTKLTLIYNSQYIHSQCKTLHSYQ

SEQ ID NO: 223805 - protein, 158 aa, Zea mays
  Clone ID: MRT4577_135698C.1.pep
ISLSLPILPASPPPSTKSAPPKAHPSHGRAMPPSVDAMPAPGDAAGGGDVRMISSKELRSHASADDLWISISGDVYDVTPWLPHHPGGDLPLLTLAGQDATDAFADYHLFSARPLLRRFFVGRLSDYAVSPACRDYRRLLAQVSSPGLFQRVRPIPKV

SEQ ID NO: 223806 - protein, 66 aa, Zea mays
  Clone ID: MRT4577_135699C.1.pep
RPGRDNTASRSFERPTRREILTHHLRVAPPVRRQVRTHCHPLWPSVAALIRVLTPCGRGLTGIGGW

SEQ ID NO: 223807 - protein, 82 aa, Zea mays
  Clone ID: MRT4577_13569C.1.pep
LFCRESRLNFLLFSTHNNSSGSGPLSFLPWVSGSGHQLYFIRASRRRKCSVASREEEEGKQTAWSYRKGIMGKSLRGPTCQV

SEQ ID NO: 223808 - protein, 476 aa, Zea mays
  unsure (1)..(476): unsure at all Xaa locations
  Clone ID: MRT4577_1356C.1.pep
MAAPTVVLLPVWGAGHLMSMLDAGKRLLTRGGRALSLTVLVMRAPTEQLAAXSTPTYAGXEASGLDVRFVRLPAVQPPTDFHGIEEFISRLVQLHAPHVRAAISSLASPVAAVVMDFFCTALLDVTRELAVPAYVYFTASAGMLAFFLRLPSLHEEVTVQFEEMEGAVDVPGLPPVPPSSLPVPVMDKNHPNYTWFMYHGRRFAEADGIIVNTAAELEQSVLAAIADGRCTPGVRAPTVYPIGPVISFSPPPTNTEHPHECVRWLDTQPAASVVLLCFGSQGFSAAPQAHEIAHGLERSGHRFLWVLRGPPAPGERHPSDANLSELLPDGFLERTKGRGLVWPTKAPQKEILAHAAVGGFVTHGGWNSVLESLWFGVPMAPWPLYAEQHLNAFTLVAYVGVAVAMKVDRKRNNFVEASELERAVKELMGGGEEGRKAREKAMEMRDACRNAVEEGGSSYSSLRRLSEKICKVDKNL

SEQ ID NO: 223809 - protein, 205 aa, Zea mays
  Clone ID: MRT4577_135700C.1.pep
MPSTGTHVREISENPSKNAVTSPTDPKTKAVDIDRKLKLYGVIEAFRQGKMPNNEQCVRALDYALGNSPITESKLSKDGKDLVEDFRDIIKIAKQIVVEKNDDELLQNFIYHTTKVQTPSADQVKNVNTSTSQQEMQQDGEQAVEHLRTLGKLIFTNSEFRKLLKDVGILGRDVAADAATKAANAARPSEEQLRQVDETAPSNQW

SEQ ID NO: 223810 - protein, 82 aa, Zea mays
  Clone ID: MRT4577_135701C.1.pep
CSVSVLSACSASSTRSRPCSVAGSPPAVERSSWACRMARCPWNGQAYDRSDPGTRSCLGSATGPGAALRLRRTFHPSDPPRK

SEQ ID NO: 223811 - protein, 678 aa, Zea mays
  Clone ID: MRT4577_135702C.1.pep
GKLTEEAEEILELLRSTWRTLGITETVHDTCYAWVLFRQFVLTGEQGLLKVVIDHLRKIPLKEQRGPQERLHLKSLRSSVDAEGSYQDFTFFQSFLSPIQKWTDKKLNDYHLHFSEGSSLMADVVTVAMLTRRILGEENDKVAESPDTDQIDRYITSSVKNTFLKMAHSVEFKADTTNEHVLASLAEETKKLLKKDTAIFTPVLTKWHPQAAVVSASLIHKLYGNKLRPFLEHAEHLTEDVVSVFPAADALEQYIMSVMASVTGDDGLDSLCRHKLVPYQIESKSGTLVLRWVNGQLERIETWVKRAADQEVWDPISPQQRHGNSIVEVYRIIEETADQFFAFKVPMRDGELNSLCRGLDKAFQVYTQLVTAPLVDKEDLAPPIPVLTRYKKELGIKAFVKKEVQEVRTVDERKASEITQLTMPKLCVRLNSLYYGISQLSKLEDSINERWARKKSENTNIRRKSEKSKSAVPNQKNQFDGSRKEINTAIDRLCEFTGTKVIFWDLQQPFVENLYRNGVAQARLDTITEVLDLVLNQLCDVIVEQLRDRVVTGLLQACLDGFLRVILDGGSTRVFSPNDAALLEEDLETLKEFFVSGGDGLPRGTVENLVSRVRPVINLIKQETRVLIDDLREVTQGGKSKFGADSKTLLRVLCHRNDSEASHYVKKQFKIPSSAPSA

SEQ ID NO: 223812 - protein, 124 aa, Zea mays
  Clone ID: MRT4577_135703C.1.pep
LDPGSHLGIQTTLNLQTLQTYPFSGPKKHAWMAWAPPPLVSSWGATSGPAPLPSPLGPLLPPFDWCRTPKAFAKALSASGFFLAGFSCWWPSDHPELGRQKKPCSPVAQKGPSGRVGPPRNSGP

SEQ ID NO: 223813 - protein, 40 aa, Zea mays
  Clone ID: MRT4577_135704C.1.pep
TLNFVLIYAVLAHVLCCNPPEPEPEPDQACVDIPDWGFLY

SEQ ID NO: 223814 - protein, 119 aa, Zea mays
  unsure (1)..(119): unsure at all Xaa locations
  Clone ID: MRT4577_135705C.1.pep
MAPRPAAAVFVVAAVVVLLPPPAAAAAPPVGVNWGTMMSHPIHPSAVVEMLRANGVDRVKLFDADPWTVSALAGSGVQXMLAAPNDQLASWXRDRXXARDWVXQNVTANIKRXVDVRVN

SEQ ID NO: 223815 - protein, 127 aa, Zea mays
  unsure (1)..(127): unsure at all Xaa locations
  Clone ID: MRT4577_135706C.1.pep
AGGAGPXXHXLAGSIRAQQLQQLVLANLADYSQQQQXLAFNQLAALNSATXLRQQGYYSXXPAACPRWGVALSRRGVLYTAXWLXQGRQALPWSQLGGGSPSTFLXQPQLGPVYQDAGPNAGTLFQL

SEQ ID NO: 223816 - protein, 140 aa, Zea mays
  Clone ID: MRT4577_135707C.1.pep
MVLHPPLNSVNDWVGDCPSFVVVVDSSTFSATMEVEYALNEQCDLGFIQHLRVDYDETFSLAAKPTTVHMEFAMKDLGSLHHFLSVTVERCLGGLFLHQRTYTLEVINCAVMTDCNPCTTLIDLNTKLVVDSRPPIKDAT

SEQ ID NO: 223817 - protein, 112 aa, Zea mays
  Clone ID: MRT4577_135708C.1.pep
SSCPRWWWSTALWTRRLPSPAPSTDLKSQPTLPPPRVLVTYFTGAEEAIVFAEGATAQGIRDQIVARGRLIDTEKMFRDGGEKWPVVIPEEELGMSFPGIKPKKAEDKPQAE

SEQ ID NO: 223818 - protein, 116 aa, Zea mays
  unsure (1)..(116): unsure at all Xaa locations
  Clone ID: MRT4577_135709C.1.pep
HHGARADAAEHDTEPQATTRRGQRPQRAPNPQGGGGRHPKSHRRTSQTAEPAKKHEPTPPPTPAPAPPTPPPRKETPPPKPPRRATQEPQSRPQPETQGEEPPXNNPRTQKPPGKR

SEQ ID NO: 223819 - protein, 50 aa, Zea mays
  Clone ID: MRT4577_13570C.1.pep
RLFLSRTLDSVSYVRLYVHPVLVQRLRAFNMVSQTQCHIMSLTVHYLRDQ

SEQ ID NO: 223820 - protein, 143 aa, Zea mays
  Clone ID: MRT4577_135710C.1.pep
MLKFLSKVVVEYCPLDPRKAAAVELLAQCNGRKAKDSNPACSVELRRLPSPAPSTDLKSQPTLPPPRVLVTYFTGAEEAIVFAEGATAQGIRDQIVARGRLIDTEKMFRDGGEKWPVVIPEEELGMSFPGIKPKKAEDKPQAE

SEQ ID NO: 223821 - protein, 113 aa, Zea mays
  Clone ID: MRT4577_135711C.1.pep
MIFGRRRGRAPEGHAPKHQESTANPNRTSAPGKKQREAQSQTRQGKDQDGRQSASKHEERQPIGTADDGACDDKDHKEPPPATTVEPAELKAEGHYRADIGETRANARSLNIT

SEQ ID NO: 223822 - protein, 89 aa, Zea mays
  Clone ID: MRT4577_135712C.1.pep
RARRLPRRRKHAPIITHSRSLLPVGPSSLLPDPSLTLSLSSSLHDHWWSTPPPFWSIALTSFLGSLSLENAHGTENSLSPNQLIGETTY

SEQ ID NO: 223823 - protein, 84 aa, Zea mays
  Clone ID: MRT4577_135713C.1.pep
HTCSELADTIIKHSALCLVGLLNIGMGMATAAANRKLGYGPGRGGGGGCRGGGGGYGGPDYGSGSGYGERVSIASAAGGYGHKA

SEQ ID NO: 223824 - protein, 280 aa, Zea mays
  unsure (1)..(280): unsure at all Xaa locations
  Clone ID: MRT4577_135714C.1.pep
MAKSYTLLFIALVVLALLVSPIACSRKLAKPNKPKPTHKPAARVTPGSNHTDIPAVSAAYGSGGWLSAGATYYGAPNGDGSDGGACGYQTAVGQRPFSSMIAAGSPSLFKGGKGCGACYEVKCDSNPACSGQPATVVITDECPGGVCLAEAAHFDMSGTSMGAMAKPGMADRLRSARILKMQVQRPPSGCSNPFYLLVEFXDGDGDLSAVDLIPGAAXWTPMVQNWGALWRYNSNSGKALSAPFSLRLTSDSGKVLVASNVIPASWKAGGTYRSLVNYYP

SEQ ID NO: 223825 - protein, 178 aa, Zea mays
  unsure (1)..(178): unsure at all Xaa locations
  Clone ID: MRT4577_135715C.1.pep
CGARPAGVREDTKLVVYEYMENGSLDRWLHPKDNAATAALDWPTRLGIAMGAGGGLIFLHDECAQPIMHRDVXSSTILLDPGFRAKIAXFGLARXLLXSGEPESVSAVSGXFGFMAXECGRGALVHXXGDVXAFGVVLLVLASGGVCRGGGGGARWLLAWRRGRGCGSGGGPSSRRGG

SEQ ID NO: 223826 - protein, 103 aa, Zea mays
  unsure (1)..(103): unsure at all Xaa locations
  Clone ID: MRT4577_135716C.1.pep
MVADSFLSTSESENPGHPDKLCDQLSDAVMDACLAQDPDSKVACKTCSNTNMXMSVSEISTPGSANYXKIARDTCCEIALTSDYVRFHDDRCKALWTLEKQTP

SEQ ID NO: 223827 - protein, 94 aa, Zea mays
  Clone ID: MRT4577_135717C.1.pep
VLWKRGILYKGINMGNPRVLPAQQCINRGPRNKSGLPKKKINCSHPGVHNFGSLKRAGYNLQAKSPKGGGNAGGFLLIDQYHQKNEARVTFLCF

SEQ ID NO: 223828 - protein, 87 aa, Zea mays
  unsure (1)..(87): unsure at all Xaa locations
  Clone ID: MRT4577_135718C.1.pep
RTAIVINISVPQGLTSSIFAKRPDIIFEWLGXPHASDCGIVNVYTPTDGAEIGXAFGGGKAAGGGLXSGSDSCKQHIRRTTCREVLE

SEQ ID NO: 223829 - protein, 59 aa, Zea mays
  Clone ID: MRT4577_135719C.1.pep
PWDYGLDHSRNHHRILGAHHSLVHVLNLGLGDPGTDLHIMRLVTSRTRCVVGEAVHAAQ

SEQ ID NO: 223830 - protein, 62 aa, Zea mays
  unsure (1)..(62): unsure at all Xaa locations
  Clone ID: MRT4577_13571C.1.pep
KXRREPRVPDAWVXNCLVYIHVMVLETRPFFSHATLYGIFDCLCTNSTSCNSRIQTIKKKEI

SEQ ID NO: 223831 - protein, 47 aa, Zea mays
  Clone ID: MRT4577_135720C.1.pep
KFIQKNQSLFICKKTYLHCMIGPDYSLSCKAGQCFTLSSVTMSVFSP

SEQ ID NO: 223832 - protein, 61 aa, Zea mays
  unsure (1)..(61): unsure at all Xaa locations
  Clone ID: MRT4577_135721C.1.pep
PRGXAGXGESNKKKKKKKKKKKKDYKPGPLSRPTTRAPRDHGFLPSCVPAFRPGISPLCKQ

SEQ ID NO: 223833 - protein, 354 aa, Zea mays
  Clone ID: MRT4577_135722C.1.pep
MCVEGLDDAAGRLGFGDQDTDRRAGDAMERVCENTVAVDFKQTKLNNFVPFIRSGEWSDIGGRDYMEDAHVCISDLAKNFGYDSVDDEVISFYGVFDGHNGKDAAHYVRDNLPRVIVEDADFPLELEKVVKRSFVQTDSKFAEKFSHHRGLSSGTTALTAMIFGRSLLVANAGDCRAVLSRRGTAIEMSKDHRPCCMNERKRVESLGGYVDDGYLNGQLAVTRALGDWHLDGMKEVGEPGGPLSAEPELKMVTLTKDDEFLIIGSDGIWDFFSSQNAVDFARRRLQDHNDLRLCCREMVDEAVRRGASDNLTAVMVSFHPDAPPPSRANKRTGRVTRSISAEGLHSLRVLLEGQ

SEQ ID NO: 223834 - protein, 95 aa, Zea mays
  Clone ID: MRT4577_135723C.1.pep
YYGFCMLAFCNFGSFIFVCLFFFFFFFFFFFFFFFFFLVVCKLHSFNIAAISYKISQQFLLDLAAVLMQFTSQIWGYRSSPYFHLLAVQQTHIFI

SEQ ID NO: 223835 - protein, 94 aa, Zea mays
  unsure (1)..(94): unsure at all Xaa locations
  Clone ID: MRT4577_135724C.1.pep
PAVAVLTVTIQHIRSLPSLKRMLHEVKEMHSNPSPDFMSLPLEEDILEXQFDILAPRDSQFEGEIYHGRIQLPSHYTFKPPSFMLLTYKQICSP

SEQ ID NO: 223836 - protein, 80 aa, Zea mays
  unsure (1)..(80): unsure at all Xaa locations
  Clone ID: MRT4577_135725C.1.pep
LRGAATDRLAAATMAITSRALIGKPAAGTRDVFGEGRITMRKTAAKPKXXXGVXGXAPWXTGADRVLYXLGPLSGSPPSS

SEQ ID NO: 223837 - protein, 27 aa, Zea mays
  Clone ID: MRT4577_135726C.1.pep
VYGNEVHAHKLELDVDFNLEVRFESLR

SEQ ID NO: 223838 - protein, 747 aa, Zea mays
  Clone ID: MRT4577_135727C.1.pep
NRLSGDVPAWLGKLAAVQHVDLSDNALTGGLPDSLGDLKALRYLSLSRNQLSGAVPASMSGCTKLAELHLRGNNLSGSIPDALLDVGLETLDVSSNALSGVLPSGSTRLAETLQWLDLSGNQLTGGIPTEMSLFFKLRYLNLSRNDLRAPLPPELGLLRNLTVLDLRSTGLYGAVPADFCESGSLAVLQLDGNSLSGPIPDSIGNCSSLYLLSLGHNGLTGPIPAGISELKKLEILRLEYNNLSGEIPQQLGGLENLLAVNISHNRLVGRLPASGVFQSLDASALEGNLGICSPLVAERCRMNVAKPLVLDPNEYTQGGGGGDNNLETGGGGGVEAPRKRRFLMSVSAMVAIFAAVAIVLGVIVITLLSVSARRRVEAAGVGGPGHDRKEVDESIVTTSSTTTTKSSSSPPPGGKVKEKLATGKMVTFGPGSSLRSEDLVAGADALLSKATEIGRGALGTVYRAAVGDGRVVAVKKLAAAHLVRSREEFEREVRVLGKARHPNLLALRGYYWTPQLQLLITDYAAHGSLEARLHGGGEAAPMTWEERFRVVSGTARALAHLHQAFRPALVHYNVKPSNILLADAECNPAVGDFGLARLLHGSGSGRQVAMAGSRFRQGGGGGMGYVAPELACQSLRANDKCDVYGVGVLILELVTGRRAVEYGDDDVVVLTDQVRALLEHGNALECVDPGMGGRGHVPEEEVVPVLKLGMVCASQIPSNRPSMAEVVQILQVIKAPVGGGGRMQASF

SEQ ID NO: 223839 - protein, 110 aa, Zea mays
  unsure (1)..(110): unsure at all Xaa locations
  Clone ID: MRT4577_135728C.1.pep
XXXXXXXXXXXSXXXLXXXPXXPXTTIXXXISXSTFLPPHNDXPIQILHYQNXYKYEPHYXYFHDKNNQPLVGHLIATELMYLSDDEKGGETIFPNAEGKLLQPKDDTWS

SEQ ID NO: 223840 - protein, 69 aa, Zea mays
  Clone ID: MRT4577_135729C.1.pep
MSCLALLFKNTAEEQSDGGFLNAFGAIIVGAPVGINYFTPTDVENYMVSAPCHGAMLGAWLGAWPMPLD

SEQ ID NO: 223841 - protein, 98 aa, Zea mays
  Clone ID: MRT4577_13572C.1.pep
APCAPVLGLREGTGVTYDLAPRVVVVVQLLTVVVSPTLLCFFKRIRHVTGCGGHSFVDPPSVRSAVAIVRDPLVRISVMLSNSLKNDLFWVCLPVQRQ

SEQ ID NO: 223842 - protein, 218 aa, Zea mays
  Clone ID: MRT4577_135730C.1.pep
MGKAAKSSRKGKKAWRSNISTDDIDEFYEKQTRDAHAGAAAIPSLPSDSLFFVDKPASASTSSAATASDPAPKDVPVKRKIEKNREKVLHHESVLKRNPYIQTIPSSLMSKKDKKKFKKHAKKKELQESREEKSVPMEEDSAEKNLDIWGGDAKGAPLPKKGMKRLNKNRSTTSVIPAVEVEPQGCSFNPPHEAHQDALALAVADEMRKIYTKELGPT

SEQ ID NO: 223843 - protein, 203 aa, Zea mays
  Clone ID: MRT4577_135731C.1.pep
RLVFPVPGEVGSLPQEYAELEVNFFLLPRVLGVRSKGAPKAPKARRLPKRKILMLNIGPRPSGARVVTEEILSPKLQHTGPLCARGGNKVGLPRRVHKRRRLNGWGQIQAEFSPKRKKEPGVKPHPPASPELKSGSPKNILLLVPSLRPCRSKVPGSLHSGVSPVLFCWPLTKKNQKTKTEQKNKKKNKKKKKKKKKKKKKLE

SEQ ID NO: 223844 - protein, 106 aa, Zea mays
  Clone ID: MRT4577_135732C.1.pep
VDLYFPAPTNPRAQDSRLVDKHAPRPTRTAELIETPTTTTPMFWMDLTETRGVGERERGGRKEPYDDEVDEVREGVDHRDQEERQQARDADHVVGWDRRLEASCRI

SEQ ID NO: 223845 - protein, 383 aa, Zea mays
  unsure (1)..(383): unsure at all Xaa locations
  Clone ID: MRT4577_135733C.1.pep
MPALLVNTVSVSPAASRLGSSRPATARRAASARHGHRCRAEASGSSWVSDYDLYELLGVERSSPQSEIKAAYRSLQKRCHPDVAGAAGGHDMAVVLNEVYALLSDPDARLAYDQEQARRSEFAGYTGRPLYSSWVGAESERRAVFVDEVRCVGCLKCALHASRTFAVESVYGRARAVAQWADDEDRIVDAINTCPVDCISMVERSDLAALEFLMSKQPRGRVRVSEGNAVGARAPNIFNEVAKFKKRFDEMKQKSAAREFQESEAARQSRTSAVHAIRSMSNWWYWRXSGSGHRPRSPLSSLRASCRRRRRXADPVTERLQEAAAARRKTGGAATATAHAGREDYWTPQLNLPSSASPPSIHQRGRGTPAHQGHGRRRGAAGE

SEQ ID NO: 223846 - protein, 115 aa, Zea mays
  Clone ID: MRT4577_135734C.1.pep
ADAWADAWADAWADAWGKINRPALELLLGSSNIPCLLPFSSVFSYPSDRGSAMPALLVNTVSVSPAASRLGSSRPATARRAASARHGHRCRAEASGSSWVSDYDLYELLGVEPSS

SEQ ID NO: 223847 - protein, 218 aa, Zea mays
  unsure (1)..(218): unsure at all Xaa locations
  Clone ID: MRT4577_135735C.1.pep
DAINTCPVDCISMVERSDLAALEFLXSKQPRGRVRVSEGNAVGARAPNIFNEVAKFKKRFDEMKQKSAAREFQVIADCFCLLRCSSETXDRTLPAQESEAARQSRTSAVHAIRSMSNWWYWRXSGSGHRPRSPLSSLRASCRRRRRXADPVTERLQEAAAARRKTGGAATATAHAGREDYWTPQLNLPSSASPPSIHQRGRGTPAHQGHGRRRGAAGE

SEQ ID NO: 223848 - protein, 85 aa, Zea mays
  Clone ID: MRT4577_135736C.1.pep
LGVGVFFCFVFFFFFFLGPAQKNWMFLLRKKIRVQVHTGPTAHVEIFVDSCPKQVQALLIWAGPDPKVCLGRSSVKIWHPGLVLG

SEQ ID NO: 223849 - protein, 44 aa, Zea mays
  Clone ID: MRT4577_135737C.1.pep
FSFHNHKPINKQPKHPKYYPNILLFIIFYITYTIFYNIINYTRL

SEQ ID NO: 223850 - protein, 120 aa, Zea mays
  unsure (1)..(120): unsure at all Xaa locations
  Clone ID: MRT4577_135738C.1.pep
PYTAGGVAPSRIRHGGRTSMLSESWRRKQSDVMRFVQRVRXWQYRQQPAIARLTRTTRPDKAXRRLXNKAKQGNADNRARVNPGVSKRPVPKGIAYGKPKHQGIPQLKRQRQQQVCSLRT

SEQ ID NO: 223851 - protein, 67 aa, Zea mays
  unsure (1)..(67): unsure at all Xaa locations
  Clone ID: MRT4577_135739C.1.pep
KTMTSIIHQVHKLLPHKPNTTSSHQFSLSSSSILDATDLTFRRLRQVSNGISHTXGRPAGSQLVEGC

SEQ ID NO: 223852 - protein, 87 aa, Zea mays
  Clone ID: MRT4577_13573C.1.pep
LICESSSGALLSTYPTCPLQNMTRPPKGNQLNVGRKKKTCWKGPRQPWGIHQTVRTSHNQKIHGSGRSRPKAAPLNNKTNSHYNIGC

SEQ ID NO: 223853 - protein, 78 aa, Zea mays
  unsure (1)..(78): unsure at all Xaa locations
  Clone ID: MRT4577_135740C.1.pep
KPGGVVKTVVRLCSFDNLQALPVNSRGSXNPGSRRSVANSAFFRSAKVGDWVNYLSPEMAQKLDRITQEKLRGSGLCF

SEQ ID NO: 223854 - protein, 120 aa, Zea mays
  unsure (1)..(120): unsure at all Xaa locations
  Clone ID: MRT4577_135741C.1.pep
SYARRGGGPRINTLWRYVNTVILVPVARISCYLKRGRYIAPRXTVAPVYLXACVFHDCFAEVWEVSVIVDTNPIKTRIITLHVLLEMRMDEELVKLLIEETIDAGGAVPNIXPDLLPYKT

SEQ ID NO: 223855 - protein, 62 aa, Zea mays
  Clone ID: MRT4577_135742C.1.pep
ETMVQEICRDIKKLDCAKRHITTTITALHRLTMLVSAVEQLQVMASKRQYKEASAQLEVRII

SEQ ID NO: 223856 - protein, 78 aa, Zea mays
  Clone ID: MRT4577_135743C.1.pep
TWKQGPQTHFFLKPLVNNVGGPPFFSGPGLRPKNGCKLVLFFLPHISLWTISSRDGFCTNFFLCPFYFNPTPFIFSRV

SEQ ID NO: 223857 - protein, 104 aa, Zea mays
  Clone ID: MRT4577_135744C.1.pep
PPHKRIFSHVKFYPQKGFFLGVFSYTPKKALWSAGVYHPIKSLVGPYSKVPILDISEDGQKFVPVSLDRPIKIWSCKSSPQDNEMGLDLDNWFHCCQPCSFFFS

SEQ ID NO: 223858 - protein, 46 aa, Zea mays
  unsure (1)..(46): unsure at all Xaa locations
  Clone ID: MRT4577_135745C.1.pep
SKWVVYQSLVSTDKHYMRNVIAIEPSWLTEAAPHXYQFRTFSPAPH

SEQ ID NO: 223859 - protein, 351 aa, Zea mays
  Clone ID: MRT4577_135746C.1.pep
SLTLEGVVYVVDSGFSKQKCYNPISDIESLVVAPISKASARQRAGRAGRVRPGKCFRIYTEEYYLNEMQSEGIPEMQRSNLVSCIIQLKALGIDNILGFDWPASPSPEAMIRALEVLFSLGILDEDAKLTVPIGYQVAEIPLDPMISKMILSANDFGCSDEILTIASFLSVQSVWVSVRGVKKEFDEAKLRFAAAEGDHVTFLNIYKGFHQSGKSSQWCYKNFLNYQALKKVVDIRGQLLRIVKSFGIQLKSCDRDMQAVRKAIIAGSFTNACHLEEYSQNGMYKTIRTLQEVYIHPSSVLFRVNPKWVVYQSLVSTDKHYMRNVIAIEPSWLTEAAPHFYQFRTFNPAPH

SEQ ID NO: 223860 - protein, 95 aa, Zea mays
  Clone ID: MRT4577_135747C.1.pep
ASLAFHLFRGLGWAPAFLGCAPGRPLGCFFATGKFWWGLPLWIRAPKEVALKLAVCFYGPKIRDQVPGIVGYGFNPYVESVFYSFLVWPARFRKP

SEQ ID NO: 223861 - protein, 247 aa, Zea mays
  unsure (1)..(247): unsure at all Xaa locations
  Clone ID: MRT4577_135748C.1.pep
MSLTLLQGYSSAEDDDDPAAGAGAGTELSESGDSSAEXPDRTKTRSPLLQSRPPSSAADXPKGGDAGGSDGGSLLPSALEAFADVSGPPDFLRHRVAEPEEGTEALGVLDRRGKEGSKQPPPGAVVVAKPQIVAIRERVTTTGANPPGSVTAGSIDGKRVIGAANPGPEDAADLLRMCLQCGVPKTYSHGKGMVCPQCGGRPMQTKEPEKKKGSTVKDKEKVKRMRGQSSHASWKSETEMALRQQFD

SEQ ID NO: 223862 - protein, 109 aa, Zea mays
  unsure (1)..(109): unsure at all Xaa locations
  Clone ID: MRT4577_135749C.1.pep
XWHRGERQPADQRRGRRPHPGERHGGRGKRRPTADGAPRRKGHRPSLPGNTEPTHNPPTLRNKAKDHRGATQHPEKHQTDNSTQRGTETERGPGAKASHRTKEQRPHNP

SEQ ID NO: 223863 - protein, 199 aa, Zea mays
  unsure (1)..(199): unsure at all Xaa locations
  Clone ID: MRT4577_13574C.1.pep
MGSAGEALPPPASETRPWDNYSQAKLSTVALAPKERRAASNAPAGGEGGWSGQDEKPAADDDWLPINARRNAKWWYAAFHNVTAXWGVGVTVLVLSWVITVYTLWQMVEMHECVPGXKRFDRYHELGQHAFGEKLGXXIVVPSSWXXEVXLNIVYRITGGQSLQRXHDVVCHGRCRRXQLPYFIMVFASVHFVLSQLPD

SEQ ID NO: 223864 - protein, 69 aa, Zea mays
  Clone ID: MRT4577_135750C.1.pep
LIVCLFLGICSWRMAEPDRLHDHRHHLPLHRASRTLLLLCLLLHMMQYICPASLPTVRTIKLGSFQLSG

SEQ ID NO: 223865 - protein, 668 aa, Zea mays
  Clone ID: MRT4577_135751C.1.pep
MPASLLPPTFLPHHLRRFAPAGCTTSSVTSSSVSIPASRYDFEPLLAYLSSPSVSASLTSPSPPASVPAPEHRLAASYSAVPSHEWHALLRDLAASDVSLPLAFALLPFLHRHRLCFPLDLLLSSLLHSLSVSGRLLPHSLLLSFPPSLSDPPSPLLLNSLLAASAAASRPAVALRLLSLLREHDFLPDLASYSHLLASLLNTRDPPDAALLERLLGDLRESRLEPDAPLFSDLISAFARAALPDAALELLASAQAIGLTPRSNAVTALISALGTAGRVAEAEALFLEFFLAGEIKPRTRAYNALLKGYVRIGSLKNAEQVLDEMSQCGVAPDEATYSLLVDAYTRAGRWESARILLKEMEADGVKPSSYVFSRILAGFRDRGDWQKAFAVLREMQASGVRPDRHFYNVMIDTFGKYNCLGHAMDAFNKMREEGIEPDVVTWNTLIDAHCKGGRHDRAAELFEEMRESNCPPGTTTYNIMINLLGEQEHWEGVEAMLSEMKEQGLVPNIITYTTLVDVYGRSGRYKEAIDCIEAMKADGLKPSPTMYHALVNAYAQRGLADHALNVVKAMKADGLEVSILVLNSLINAFGEDRRVVEAFSVLQFMRENGLRPDGITYTTLMKALIRVEQFDKVPVIYEEMITSGCAPDRKARAMLRSGLKYIKHMRVA

SEQ ID NO: 223866 - protein, 56 aa, Zea mays
  unsure (1)..(56): unsure at all Xaa locations
  Clone ID: MRT4577_135752C.1.pep
KSPIPLVPCTISTVFGRPQMDSPYSXKNLFVGPIIRKLKYFLDQSLKKKFPGSLQV

SEQ ID NO: 223867 - protein, 117 aa, Zea mays
  Clone ID: MRT4577_135753C.1.pep
FPVSPQTRPRGSHPAAMRAKVSFPPVLRISLRRYLFRLVVASRRAVLCDEQTDDESDRIHSITPCGQPRHLSERTHRSCCIDASIFFWCFLVSFGCLFCLYLFIYFLVGMMRKEIQV

SEQ ID NO: 223868 - protein, 90 aa, Zea mays
  unsure (1)..(90): unsure at all Xaa locations
  Clone ID: MRT4577_135754C.1.pep
AHVVSKSELPPRPXDXRKAKSTKRLTMCTSLIRXVRAVAPYDKRITELLEDGKDLXRVLNIAKRKIVTQPRAKKNTEEMLRVLRKMRSTC

SEQ ID NO: 223869 - protein, 58 aa, Zea mays
  Clone ID: MRT4577_135755C.1.pep
GRQQAQRQREEDAAGRGDREDVDEQEERLARVRLARHSTRRRRTTLGSLPRTRERPRG

SEQ ID NO: 223870 - protein, 129 aa, Zea mays
  Clone ID: MRT4577_135756C.1.pep
MKPFFIRKAGPSRWSVLLAPGGWGEALPSKGSPVYAEASSPHVVNTAWAMLALIYAGQVQRDPTPLYGAAKELINMQQESGEFPQQEHIGSFNCSFYFNYGNYRNLFPIWALGEFRRRIVAEKKRNQQT

SEQ ID NO: 223871 - protein, 58 aa, Zea mays
  Clone ID: MRT4577_135757C.1.pep
MSEGTANCVDILIAIILPPLGVFLKYGCGHEFWICLLLTFLGYIPGIIYAIYAITKNN

SEQ ID NO: 223872 - protein, 44 aa, Zea mays
  Clone ID: MRT4577_135758C.1.pep
IYCGDNIHCNGEKLPKTNFKMAFFVFQFKNPVHVRPLRCNKHLE

SEQ ID NO: 223873 - protein, 103 aa, Zea mays
  Clone ID: MRT4577_135759C.1.pep
CYSNTCWISDFVDYLARARIWLRRVREKVRRVFSWSSVVGVVSCMVLGSVAKARCISRRLLQAGRASCYVSAINTVKCACVCIVFGSKSSRKVLSSRVRAPAV

SEQ ID NO: 223874 - protein, 145 aa, Zea mays
  unsure (1)..(145): unsure at all Xaa locations
  Clone ID: MRT4577_13575C.1.pep
MGSAGEALPPPASETRPWDNYSQAKLSTVALAPKGRRAASDAPAGGEGGWSGQDEKPAADDDWLPINARRNAKWWYAAFHNVTAMVGAGVLTLPYAMSELGWGVGVTVLVLSWVITVYTLWQMGEMHECVPGKRXXRDHELGADA

SEQ ID NO: 223875 - protein, 48 aa, Zea mays
  Clone ID: MRT4577_135760C.1.pep
SIAPWIISYSAPNLTKCTETQLLKFPYLTSHLWTQFSSSSIWFLGQVA

SEQ ID NO: 223876 - protein, 94 aa, Zea mays
  Clone ID: MRT4577_135761C.1.pep
MASEDSKDMLKNVDWKTVGGAVTTESSQPVVKKRLPKKIRQVPECYFLPRRSLPSALAIYGAVCAAGVGAGMLIEVWINKKIKEDSAIIWEMDK

SEQ ID NO: 223877 - protein, 53 aa, Zea mays
  Clone ID: MRT4577_135762C.1.pep
YFITIVNRSHCHFFHSIITIKTKKNFVYLLLMYFFTPELISYPYLPTYHLSLY

SEQ ID NO: 223878 - protein, 54 aa, Zea mays
  Clone ID: MRT4577_135763C.1.pep
LRPVLFSSIESRRTSSASPYYTAEKPYQFFSIASFLCCVLTWRRLLIKKYPPVQ

SEQ ID NO: 223879 - protein, 89 aa, Zea mays
  Clone ID: MRT4577_135764C.1.pep
PTRTSYYSPTPPGYNRHHQTTPQQPFITLEPRPQQPPKPLVSCRPQPKAIPATEDTALDATVCLNSNQDEEKPTEPALLQKPKLPKLKS

SEQ ID NO: 223880 - protein, 89 aa, Zea mays
  Clone ID: MRT4577_135765C.1.pep
HLGSGQRPSWVGAIHTEHVVWVLSRAGVRQALNGIWAAVTLLSIVPTFYGCNALASVKRYDARIDSTSAVSDDYCLHRIRGGTRMAFCR

SEQ ID NO: 223881 - protein, 100 aa, Zea mays
  Clone ID: MRT4577_135766C.1.pep
KHPLHDVHIGGADLLVHPSEMVALSPFCYRQVSRLALGGVNQFYLQQAHRVNLMCTISCEPDCMKPQLTSQHPFVSVASAYEWMYTRHRQCPLLVLLPPQ

SEQ ID NO: 223882 - protein, 422 aa, Zea mays
  unsure (1)..(422): unsure at all Xaa locations
  Clone ID: MRT4577_135767C.1.pep
MGYVLSAVARVLEQPTAWGAAREMALLAGPLWAAVLLGLLLGWAWRPRWAAGLVAAPAPAAAAQPPFATLGFWKAXAPRPSPRPARLRRRRAARGGGGGDEVSVRGGRSSEAASEELAVGKRDLANLWRLVEGRDGGPAWIKMMDRSLPTMTYQAWRRDAQTGPPQYQSSSIFEDATPEEVRDFFGDDEFRVSNKWDDMLVYHKTLEECQTTGTMKVHWVRKFPFFCSDREYIIARRIWKLGGAYYCVTKGIPCSSIPRRNKPRRVDLYYSSWCIRAVESRRGNGGGSTACEVLLFHHEDMGIPYEIAKLGIRQGMWGCVKRIEPGLRAYQQARAAGEPVSRSALMAQINTKVGDSFVRSLESDSDGSETVEAEEKPARNRVARFLVLGGAVALACTLDQGLLTKALIFGVARKFVGQRKAL

SEQ ID NO: 223883 - protein, 183 aa, Zea mays
  Clone ID: MRT4577_135768C.1.pep
MVHSFLSTRGDSCNYTKNLMMPVSAAYREAANVFCKPKASTEYIAYSSDGFKLLIPYKWNLIKERKFHRQVLRYEDNFDPNSNEYVIIHTTFNKTIHDYCYTKEFLYQFDYLLLRQAYCVKTDYDGGFKTDSEATVNILESSTPEIDGKLDYAMYVLTKTADCDQGRTHHLIEGTEYHGMLYI

SEQ ID NO: 223884 - protein, 94 aa, Zea mays
  Clone ID: MRT4577_135769C.1.pep
APNLGFQLRFMAQRRPSLGFAKNPLFASWPGKSQKWLFPFKYHPFCKKRPLYVIALVKQKTIFVIGKPGLCYPVTQEKIKILVWGSPPLLGWAG

SEQ ID NO: 223885 - protein, 53 aa, Zea mays
  Clone ID: MRT4577_13576C.1.pep
NKGLPKPFGGGFDPKTALGKVNFFGPHGLKTKKTPHFFKTSPNWGGFSFPNYK

SEQ ID NO: 223886 - protein, 76 aa, Zea mays
  Clone ID: MRT4577_135770C.1.pep
DVVGEISLDVVAEVGDRALGGLHVLQDHLGLRVPGRPEAGHGCPRVGQPRGLLSGQTGRRSRCEHRYICHGRFGFM

SEQ ID NO: 223887 - protein, 128 aa, Zea mays
  Clone ID: MRT4577_135771C.1.pep
MGTTQLAHEAGQLGDGTARQAHVPTRGRGRRDDVRRSEHRLGPSLDRLASDVDRLVVEKPEKPKGDGFGKMHFSVLADRLGARLDHLRLLYLISDHTLNAPVAVDIAITADRCDFSRRCAVARAIRVD

SEQ ID NO: 223888 - protein, 66 aa, Zea mays
  unsure (1)..(66): unsure at all Xaa locations
  Clone ID: MRT4577_135772C.1.pep
ERGKGRKSPLXDDQTRGAALRCDETDRVCVFVLGLGVVWEGGFKAVTCARRVRPGWRAGNVEGGRR

SEQ ID NO: 223889 - protein, 103 aa, Zea mays
  Clone ID: MRT4577_135773C.1.pep
NFEKGFLSPAEIFVKNICCGGEHTPGARLCAQGNRALSQHTGREGNWLEEKLATKPIVSCVSYFHISRFLESYFLGSYFLVSCFLVSYFLTSCFLIAAPSVAI

SEQ ID NO: 223890 - protein, 53 aa, Zea mays
  unsure (1)..(53): unsure at all Xaa locations
  Clone ID: MRT4577_135774C.1.pep
PHSRSGSKLHAQRPSGHTRFGLQRLAYYVDVTVAFVMRALSXLSISLXHNKWL

SEQ ID NO: 223891 - protein, 38 aa, Zea mays
  Clone ID: MRT4577_135775C.1.pep
TPRVVHSLQCEHRHYAGRPKHLSHPTTPECLTAVPHES

SEQ ID NO: 223892 - protein, 105 aa, Zea mays
  Clone ID: MRT4577_135776C.1.pep
ATGGRCRVEPTPESPRGGEQQSRRSGYSLIPGSVLCPAVRSVLTEVLQGFFKVARFFQTVFAATTDCPRRGTSGGQYWCSTYVPYLLVKVDEQKANALSTSFEKQ

SEQ ID NO: 223893 - protein, 91 aa, Zea mays
  Clone ID: MRT4577_135777C.1.pep
MLWSERRRCEYPSCVMRSSLGRYGDWSLVTFTRLVPWSCSALRRYVCTVGQCTERAFGHDGLLWSEWARLRSATGWEPEETGRERVSYVSS

SEQ ID NO: 223894 - protein, 131 aa, Zea mays
  unsure (1)..(131): unsure at all Xaa locations
  Clone ID: MRT4577_135778C.1.pep
LLEADEAQSFVHKLQLSVSGGLPHAVPVPGLRTEEHELVKAVFQVLQGFETSWFYWDSDVPWYHEKAXIYVAHLSLTGLRSLLSPFLFTATCLKQVELFVGKVRMQHHKIPTLDXVASSXDSWLKSSAKQL

SEQ ID NO: 223895 - protein, 127 aa, Zea mays
  unsure (1)..(127): unsure at all Xaa locations
  Clone ID: MRT4577_135779C.1.pep
MVLPRRTPELLEADEAQSFVHKLQLSVSGGLPHAVPVPGLRTEEHELVKAVFQVLQGFETSWFYWDSDVPWYREKAGIYVAHLSLTGLXSLLSPFLFTATCLKQVELFVGKVRMQHHKIPTLGCVAS

SEQ ID NO: 223896 - protein, 58 aa, Zea mays
  unsure (1)..(58): unsure at all Xaa locations
  Clone ID: MRT4577_13577C.1.pep
YFYTLKKPLLYIYGQPYKCTMCVPVLTLVTARVSALICRLVSXTMCCSKKKKKRKAAP

SEQ ID NO: 223897 - protein, 107 aa, Zea mays
  Clone ID: MRT4577_135780C.1.pep
INYFSTQPLNNKMKCSTNYTCFGHSILSLSLMGMVQKHAINIMNDMIHFMSSCVLIGSSIKTSLALHCCFVLSASSPCSSFFATCGLSLQRLSTSMGTIAHTSVLGD

SEQ ID NO: 223898 - protein, 54 aa, Zea mays
  unsure (1)..(54): unsure at all Xaa locations
  Clone ID: MRT4577_135781C.1.pep
MGXGYWGGGVXTPGIGKTLKPFVTVGVWGTPGPRQTFWGLKHRRGASPQKSTLV

SEQ ID NO: 223899 - protein, 45 aa, Zea mays
  Clone ID: MRT4577_135782C.1.pep
MTHSKKVTYFCSGTTTQTRAGHQTCSGHPFGALLEGFFNFSWNQY

SEQ ID NO: 223900 - protein, 111 aa, Zea mays
  Clone ID: MRT4577_135783C.1.pep
HMSFASSYKEAFWFKGIQKRSFEFNVFNEAVSLKGVEWKVIVQGKEEWIGIVQGVPVIGLSPRAHLVSCQVIRQAKGSAFDIGIERTVQLHGTRHKDWCWSPSINGSLKSV

SEQ ID NO: 223901 - protein, 121 aa, Zea mays
  Clone ID: MRT4577_135784C.1.pep
FSGTGSNVTSLYITGVLYKINNYIIRRQRSCNPKLTGRRRPRPLTNITASSTRLILGYLFLTENDAQTKLPRTMADLRRCQSVGEKLPHPRQHPVSLIATTMSTTPRWCFRVELRSVNDHA

SEQ ID NO: 223902 - protein, 59 aa, Zea mays
  Clone ID: MRT4577_135785C.1.pep
PQGQLHPAHLCQEGSGVREVDMDDIKSAEKQKMKQEGFECSLMSNGISAEGLKSWTYRP

SEQ ID NO: 223903 - protein, 139 aa, Zea mays
  Clone ID: MRT4577_135786C.1.pep
MLQGVLSRAPATDAAAAMKAKRAGASPGEEEEGDGRSARGKRQQLLGLGPATALASAAAAEEGPETRGLRLLSLLLRCAEAVAMDQLTEARELLPEIAELASPFGSSPERVAAYFGDALCARVLSSYLGAYSPLALRPL

SEQ ID NO: 223904 - protein, 154 aa, Zea mays
  Clone ID: MRT4577_135787C.1.pep
ETESAAVGTRGFNTSKHKKYGSVGLLAPNMHARIVHVETGCSLPPGSCGELWLHGPAIMKGYLNHVDPCAINGGWLRTGDIAYFDFDGYLYIVGRLKEVIKYKGFQIAPADLEAVLIEHPGIVDVAVTSTEDEEAGEVPVAFVVRKSGSGLSCT

SEQ ID NO: 223905 - protein, 49 aa, Zea mays
  unsure (1)..(49): unsure at all Xaa locations
  Clone ID: MRT4577_135788C.1.pep
VITTLTLTXVXPPILXTLVNPNKKXSYPPLCXIHCGIHLYYQSLXHXXX

SEQ ID NO: 223906 - protein, 161 aa, Zea mays
  unsure (1)..(161): unsure at all Xaa locations
  Clone ID: MRT4577_135789C.1.pep
MVSACAADPARRGLLDWKTRFHIIEGIARGLLYLHRDSRLRVVHRDLKASNILLDHDMIPKISDFGMARIFGGDQNQVNTNRVVGTLGYMSPEYAMEGLFSVRSDVYSFGILILEIVSGQKNSSFHHMEGSLNIVGYAWQLWNADRXERLIDPAILAXCSV

SEQ ID NO: 223907 - protein, 190 aa, Zea mays
  unsure (1)..(190): unsure at all Xaa locations
  Clone ID: MRT4577_13578C.1.pep
FDGVSRDLGLSISEFSVCGWLANEDAMVXGAXVASGXMAKYDARXGSLMIAGVPNAMGWLAISLXRDTSYXLYGGRSLEGYNVGVIDYVGPXIYVAKISTYNMKGALGAENPMSATLGVGLSXAHGSLIPRMLIAIIGTXPCLLTIPSLFFIPQSSIWTSTMNIKDECXDSLHVLRGMDADITDLRKIYR

SEQ ID NO: 223908 - protein, 116 aa, Zea mays
  Clone ID: MRT4577_135790C.1.pep
EIVHGDKTYTITEATTLTITDCPCTVTKPVITTSAVVCHDCPAPPAHHGNNSTLVPVYPTGKPGHGGESGKPGSPAGPGATPTAGAPSEVPTAGAGKVAALSGAGLAAVVGLAAFL

SEQ ID NO: 223909 - protein, 148 aa, Zea mays
  Clone ID: MRT4577_135791C.1.pep
MKFATALAFAAGVAAHAKNVTYTTEVVTAYTTYCPGPTEIVHGDKTYTVTEATTLTITDCPCTVTKPVITTSAVVCHDCPAPPAHHGNNSTMVPVYPTGKPGKPGSPAGPGATPTAGAPSEVPTAGAGKVAALSGAGLAAVVGLAAFL

SEQ ID NO: 223910 - protein, 128 aa, Zea mays
  Clone ID: MRT4577_135792C.1.pep
VCGSRPADKVSSSSVTDVVKIIREGKKRLPLEFARWAAGEEGADGVDPYQITSDYRTLLVSDWTRLGFAEVDYGWGPPAHVVPLTNLDYIATCILVKPWAHKPGARLITQCVTPDRVSRFHDAMVDMN

SEQ ID NO: 223911 - protein, 73 aa, Zea mays
  Clone ID: MRT4577_135793C.1.pep
PLPKKSPWALPPGHLNGPQTNQNVCGGKGPSFPSKKIRVFVKQFAIGTPHNPPTMGPKNKVTGNQKRKALRFL

SEQ ID NO: 223912 - protein, 342 aa, Zea mays
  unsure (1)..(342): unsure at all Xaa locations
  Clone ID: MRT4577_135794C.1.pep
MSPTEQSPDAWADAWADAWADAWGENVTCIQFNPVDDRYFISGSLDEKVRIWSIQNREIVDWKDLHEMVTAACYTPDGQSALIGSHKGSCHIYDTSDNKLLQKKQIDLQIKKKKSSQKKITGFQFVXLPGSTSRVLITSADSRIRVVDGLNLVHKYKGFRNTNSQISACLAANGRYVISASEDSHVYIWRNDGSLEKGRSKANVTVTNSYEHFHCQDVTVAVAPPSNGSAVVSRSNSTKHDERDSVLEHPMLHAVPEKLQDSSDLQLQSGNILSTSSNHSGDRATWPEELMTPTKQSPQSSASLLSGADQAPSWSAWGTVIVTAGRGGQIRAFQNFGFPARV

SEQ ID NO: 223913 - protein, 83 aa, Zea mays
  unsure (1)..(83): unsure at all Xaa locations
  Clone ID: MRT4577_135795C.1.pep
ILYSPPPYRTAESIITATKTPXXQLLPLSESERITSIIPVSXFLXNQYLMILTIKGYNKKIPLKTFSXNQSTNIKTIQLIPPK

SEQ ID NO: 223914 - protein, 568 aa, Zea mays
  unsure (1)..(568): unsure at all Xaa locations
  Clone ID: MRT4577_135796C.1.pep
SSSATDDSQDSAGASVHHGRVRVKVRQSGKSYKELSGLFMNQEIQAHNGSIWSIRFSPDGRYLASAGEDCVIHVWEVSEFERKREENGLCNPLVAMVCNGSPETTLALASSLDGSNREKKRRARFLEGRRSVSSDRLMVPEHVFALSEKPIRTFVGHSEDVLDLCWSKSQYLLSSSMDKTVKLWHISSASCLKTFSHSDYGKNHPPLALNLCHSASMLNFLLLNLYXVTCIQFNPVDDRYFISGSLDEKVRIWSIQNREIVDWKDLHEMVTAACYTPDGQXNHLYIILXLISSSCYDLTHLFLSFSKSALIGSHKGSCHIYDTSDNKLLQKKQIDLQNKKKKSSQKKITGFQFLPGSTSRVLITSADSRIRVFDGLNLVHKYKGFRNTNSQISACLAANGRYVISASEDSHVYIWRNDGSLEKGRSKANVTVTSSYEHFHCQDVTVAVAPPSNGSAVVSRSNSTKHDERDSVLEHPLLHAVPEKLQDSSDLQPQSGNILSTSSNHSGDRATWPEELMTPTKQSPQSSASLLSGADQAPCWSAWGTVIVTAGRGGQIRAFQNFGFPARV

SEQ ID NO: 223915 - protein, 523 aa, Zea mays
  Clone ID: MRT4577_135797C.1.pep
MASRIASFPSFLAFVVVTVATLFPSSSSRQQPAAAVPQPRGFYISCGSDKDVQVGSIKWAKDEGFTAVGNASAINKPHLLPLLAALRYFPDATARKYCYQLPVVKGTRYLVRTTYFYGGFDGGKEPPVFDQIVDGTLWSAVNTTDNYRRGMSTYFEMVAQGQGKTMSVCLARRPDTASSPFISALEVIDLADSMYNTTDFSRFTMTTVVRSRFGSKGDIVSYPDDPYNRYWAPFADANPMVESHSSISPDDFWNQPPAKALKAGITTSRGKKLAVQWPTTELPAATYYVALYFQDPRTASPFSWRVFDVAVNGNDFFRGLNASAAGVMVYSSMMQLAGKTEILPAGNETSPVGPLINAGEIYQIVPLGGRTATRDVVAMEDLASSLKNLPPDWAGDPCLPQQHSWTGVECSQGSPVRVLSLDLKNHGLSGSLPDSIVHLTGMKTIYLSGNNLSGPIPDLSSMHALTAVRLDSNQFSGTINPSMEKLANLKELHLNNNNLTGKIPDGLKNKAGLDLRTEGNKFE

SEQ ID NO: 223916 - protein, 341 aa, Zea mays
  unsure (1)..(341): unsure at all Xaa locations
  Clone ID: MRT4577_135798C.1.pep
MWRERRRALLLLVAGAALGLIGAALASAPPEAALKVGFYHATCPIAEDVVLAEMRLILMEDATVAPSLLRMHYHDCFVQGCDGSIMLQSRKKGKAERDALPNRSMRGFDAIERIKARLETVCPLTVSCADIIAMAARDAVYLSHGPWYDVETGRRDGNVTVAEYVDNDLPPPDSNIVDVKTFFSVKSLNSKDIAVLFGCHSIGTSHCGPIQKRLYNFTGNMDGQDPSLDPAYAAELRKLCPPPPRPGDDDRKVKVPLDPGSNYTFDLSYYRHVLATGGLFQSDGSLLHDPVTRGYVEKVVKASSPDXYYADFATAMVKMGRTDVLVGDHGEIRPTCGIFVD

SEQ ID NO: 223917 - protein, 73 aa, Zea mays
  Clone ID: MRT4577_135799C.1.pep
SSHLLQQGRGDDRSSSSLMDGEYSQSCRRVSGEASSFVSRVLAIIKYSVEECQALFLVIDSLLPAGSEDPNRP

SEQ ID NO: 223918 - protein, 93 aa, Zea mays
  Clone ID: MRT4577_13579C.1.pep
SLPNSQLIHAVIEYGGLIQYHGHIDLATTRLNGSRHNNILSSYNLLRLRLSNRAILRQLHDPIGSLPNIKRLNRSNTGDSERTPENTCTLPHL

SEQ ID NO: 223919 - protein, 100 aa, Zea mays
  Clone ID: MRT4577_1357C.1.pep
MRPQLILVGTLAVLAILAALGEGSSSWPCCNNCGACNKKQPPECQCNDVSVNGCHPECMNCVKVGAGIRPGMGHGPVVTYRCDDVLTNFCQSSCPEAPAP

SEQ ID NO: 223920 - protein, 58 aa, Zea mays
  Clone ID: MRT4577_135800C.1.pep
MGVISGFPVPNLGNRKLNPPRKREMYHFLLQHKKCYPGIPGYLLTSVCGICYSEGFNT

SEQ ID NO: 223921 - protein, 33 aa, Zea mays
  Clone ID: MRT4577_135801C.1.pep
FSVDTLTTSEKEFLKKHKRLVFFLTISSEVFQI

SEQ ID NO: 223922 - protein, 255 aa, Zea mays
  unsure (1)..(255): unsure at all Xaa locations
  Clone ID: MRT4577_135802C.1.pep
MVAHQEAEATTTTTVDPMRLASRWRSPAEWVATAAALDSEPMPSELNTANSSGLFAVVSVDKMSVKYLGVNHHGHDVGVVQADCPAPMHRAVYYFEMTVRNAGLKGQTSIGFTTESFKMRRQPGWESQSCGYHGDDGYLYRGPGKSESFGPKFTSGDIIGAGINYIEQLLFFTKNGSLIGAFPKDIKGPLYPTIAVHSQDEELTVNFGKEQFCFDIEGYILEQKXTQQSISDKLYLQPDISHWIVRSYLLHYGYQ

SEQ ID NO: 223923 - protein, 198 aa, Zea mays
  unsure (1)..(198): unsure at all Xaa locations
  Clone ID: MRT4577_135803C.1.pep
RRSAFTGAWRHAARVPGDGSLTVRPSEGPPISSGARVSTTQHPPSCLLLWSAAPLWRETWLRQRIALWTGTGGFSAAQRVLQXTGSPITVXPVGRATLXGRIINVIGEPIDEKGDIKTNHFLPIHREAPAFVEQATEQQILVTGIKVVDLLAPYQRGGKIGLFGGAGVGKTVLIMELINNVAKAHGGFSVFAGVGERT

SEQ ID NO: 223924 - protein, 124 aa, Zea mays
  unsure (1)..(124): unsure at all Xaa locations
  Clone ID: MRT4577_135804C.1.pep
MAAPTSSAASTLAPFSHPKTLAAATAAGGSSSVAFSPAASHPACALSVSXPAAMPSLDFDTAVFNKEKVSLAGHEEYIVRGGRNLFPLLPEAFKGVKQIGVIGWGSQGPAQGQNLRDSLVEAKP

SEQ ID NO: 223925 - protein, 250 aa, Zea mays
  unsure (1)..(250): unsure at all Xaa locations
  Clone ID: MRT4577_135805C.1.pep
MAAPTSSAASTLAPFAHPKTLAAAAAAASSISSVAFSPAASHPACALSASTRRRAVAAMVAAPAKVGAAMPSLDFDTAVFNKEKVSLAGHEEYIVRGGRNLFPLLPEAFKGVKQIGVIGWGSQGPAQAQNLRDSLVEAKSDIVVKIGLRKGSKSFEEARGAGFTEENGTLGDIWETVSGSDLVLLLISDSAQADNYEKIFSHMKPNSILGLSHGFLLGHLQSHGLDFPKNISVVAVCPKGMGPRXRRLYV

SEQ ID NO: 223926 - protein, 74 aa, Zea mays
  Clone ID: MRT4577_135806C.1.pep
LFRSETYREKPPCNVTKHGDNCTEAWTRCNHERVSQTDCESRLTNNEAGLVLDELRNRYSSFHSENLGSSAPLT

SEQ ID NO: 223927 - protein, 159 aa, Zea mays
  unsure (1)..(159): unsure at all Xaa locations
  Clone ID: MRT4577_135807C.1.pep
GYSKVRKERLGDRITALHQIVSPFGKTDTASVLQETIGYIRFLLGQIEALSYPYMGXTAMGPPFKMDQQLEXNHAGLLPDQYPGQLLNHNNNTGARQPAAVGQPDEQQQQQGGANNNDETKKDLRSRGLCLVPVSCTSHFGGDNAADYWAPAPLGGILR

SEQ ID NO: 223928 - protein, 305 aa, Zea mays
  unsure (1)..(305): unsure at all Xaa locations
  Clone ID: MRT4577_135808C.1.pep
MPESWSQMLLGEFAGERYAATACLLSKGVEDWGDHAAAAASACMVGGGGGVEEEGSAAMPLYSLYGGGSHSHSHSHLAAAGDHEMPPAPAAAAAGANKSQLSQMLLASSPRSCVTTSLGSNMLDFSNNGVPPAPDQLKSHHHHQSDNSSEVRKERLGDRITALHQIVSPFGKTDTASVLQETIGYIRFLLGQIEALSYPYMGXTAMGPPFKMDQQLEXNHAGLLPDQYPGQLLNHNNNTGARQPAAVGQPDEQQQQQGGANNNDETKKDLRSRGLCLVPVSCTSHFGGDNAADYWAPAPLGGILR

SEQ ID NO: 223929 - protein, 93 aa, Zea mays
  Clone ID: MRT4577_135809C.1.pep
PYSPDFSVGSCRVEELGFHIPKTPLVRGMGEEGTVKRVVSLEGFRAQRSDQNMRWLAGLSNSHQVSPMFVSWIESENGFRESVSSPAASSAAQ

SEQ ID NO: 223930 - protein, 102 aa, Zea mays
  Clone ID: MRT4577_13580C.1.pep
SIGVRSWFVMAYLRGLWLFFLDREKIVYACFGLDVSSCLFVFLVLPVTTRVRISACLSGGVCIFGYDDDGRVSQVGALNCCAASDGDEKKKKKNPRVRPRVR

SEQ ID NO: 223931 - protein, 472 aa, Zea mays
  Clone ID: MRT4577_135810C.1.pep
GKQSSSASAVLERKCRSFSDSTTSNLKGSSRVAKGFAASISGSEVSVDLSFTGTLSPSPSFDAKVVSNSNSAPAASTDLSLALPSSDSLTPSLSHDSNTEVVDSSSKINFSYDEEQKVWIPQDKKDEIVLILVQRQKELQAHTRDWTDWAQQKVMQVAHRLAKEKDELQSLRKEKEEADRLQEERHHLEESTRKKLLEMESAISRANAQLEKAEASARRREVENAQLTLQMEAAKRHAAESATNISELLKKDENSRKRSQRWESDRALLQEDLAAQKSRLSRVQEHLQHAKELKDQVQARWKQEEAGKIEVIALVTSKKKEREQIETSMRSEENLLHLKAANDTERYKSEIRALEQRIAQMKVSLDSSKVAAPKWGADNKTYALHLSEGRKNSSAQILSNIAVPQDPSFDDIQRDRECVMCLSEEMSVVFLPCAHQVVCAKCSDLHEKQGMKECPSCRTPIQRRVRARPAGC

SEQ ID NO: 223932 - protein, 69 aa, Zea mays
  Clone ID: MRT4577_135811C.1.pep
MHSYHKFAGSDDEDESDMEADFASIQREERRSAALARREDEEQLRLIKEEERRERANKRKRAAQKESRS

SEQ ID NO: 223933 - protein, 64 aa, Zea mays
  Clone ID: MRT4577_135812C.1.pep
GVSVLFQIGLKGHPAESPAFLLSIYFSGKLFWFFKNKLVFRVLIVFPYFPALSSLCVTLFHVHQ

SEQ ID NO: 223934 - protein, 54 aa, Zea mays
  Clone ID: MRT4577_135813C.1.pep
KQAPATRCSAWRSKPPRTVIRSITANEGKRARSESRRKACRHLHEDEAREAGSA

SEQ ID NO: 223935 - protein, 100 aa, Zea mays
  Clone ID: MRT4577_135814C.1.pep
LSVRCASCASSSLRMRLGRTLYLWRRSVGSPCASASASAGGRGRRVRLCGSSGGSWCRGPCASCRRRGGRSCFPARPLPWRRLGFSVWALALLDIWARAW

SEQ ID NO: 223936 - protein, 83 aa, Zea mays
  unsure (1)..(83): unsure at all Xaa locations
  Clone ID: MRT4577_135815C.1.pep
IRHEAQPTLPVLRRIDTTRXKPLLSFYFTSFQLRLPPATAASQCCSFILALDQPRRTSHPPVCLLYLDRTAPYPVPLCQWLLR

SEQ ID NO: 223937 - protein, 38 aa, Zea mays
  Clone ID: MRT4577_135816C.1.pep
YDVHIKHYIDNYSYLGLKSKMTTNIASKRAAFVRPFTS

SEQ ID NO: 223938 - protein, 77 aa, Zea mays
  Clone ID: MRT4577_135817C.1.pep
PSPNTRRLCMRWWTQLQQRDTTQAWRPPAETPDMAAVMATRRRGRRPACLYVRGENYRGLRQKRQRDFCPKGRCGSN

SEQ ID NO: 223939 - protein, 68 aa, Zea mays
  Clone ID: MRT4577_135818C.1.pep
RNKAVTAGSLLSRLRVPALGVSGFWPCFLNTGSGALCINHLPCLTFCRSFAGSWDEYTRPRHTPIGAP

SEQ ID NO: 223940 - protein, 278 aa, Zea mays
  Clone ID: MRT4577_135819C.1.pep
MSDSASMAAAIEARFSSRDLIGCGSFGDVYKGFDKELNKEVAIKVIDLEEAEDDIEDIQKEISVLSQCRCPYITDYYGSYLHQTKLWIVMEYMAGGSVADLLQAGPPLDEMSIACILRDLLHAIEYLHSEGKIHRDIKAANILLTESGDVKVADFGVSAQLTKTMSRRKTFVGTPFWMAPEVIQNSEGYNEKADIWSLGITAIEMAKGEPPLADIHPMRVLFIIPRENPPQLDEHFSKPMKEFVSLCLKKNPAERPSAKELFKHCFIKNARKTSKLLS

SEQ ID NO: 223941 - protein, 138 aa, Zea mays
  unsure (1)..(138): unsure at all Xaa locations
  Clone ID: MRT4577_13581C.1.pep
GLRRREFVLTGSRRTDEGSASCTPHGITPRSQVGKRAWXLYCLTARTXPAAQVPXGDNTCEHYHYDAFNTFLSQTGAGXKHVXRAIFGDLXPTVIDEGRTATYRQLFHPAQLINGWGDAASSLARGHYTXLGTESEDL

SEQ ID NO: 223942 - protein, 160 aa, Zea mays
  Clone ID: MRT4577_135820C.1.pep
MDHRLVAALLVLLGLLLSPAPAAAAAGDEEPLIRQVVGGADPLDNDLGLDSQFLGFVQRFGKTYRDAEEHAHRLSVFKANLRRARRHQMLDPSAEHGVTKFSDLTPAEFRRTFLGLKTTRRSFLREMAGSAHDAPVLPTDGLPEDFDWRDHGAVGPVKNQ

SEQ ID NO: 223943 - protein, 64 aa, Zea mays
  Clone ID: MRT4577_135821C.1.pep
RCLLSHLAEAISDYIIYQVNSGAQCIQIFDSWGGQLPPHVWEQWSKPYIKKVTSFSCFHVLPTS

SEQ ID NO: 223944 - protein, 64 aa, Zea mays
  Clone ID: MRT4577_135822C.1.pep
NRETHYFIYCTLEKAKQNGYNALKPKRRRVCLHNLSPRKKTKNFWAETTQPISFGKGPHFGAPK

SEQ ID NO: 223945 - protein, 62 aa, Zea mays
  Clone ID: MRT4577_135823C.1.pep
ATAPGLHTYFYMILNSMASRVLCTQYLFLFCSVMYVTFKMMPSWFLKECLMNIQSSLFVFEL

SEQ ID NO: 223946 - protein, 87 aa, Zea mays
  Clone ID: MRT4577_135824C.1.pep
KKTIPPNLITPHQRGGIKSYNVRWKPPNARLIRTDRNLTRLGPLRADHRIAGAHKPDHPLPVKRLRLGTLVGGLTLVKLKTALLGVL

SEQ ID NO: 223947 - protein, 138 aa, Zea mays
  Clone ID: MRT4577_135825C.1.pep
ASNAGGGAGGGPLDFLRNNPQFQAVREMVHTNPQILQPMLVELSKQNPQILRLIEENHDEFLQLLNEPFEGGEGDFLDQPEEDEMPHAISVTPEEQEAIGRLESMGFDRARVIEAFLACDRNEELAANYLLEHAGEED

SEQ ID NO: 223948 - protein, 174 aa, Zea mays
  unsure (1)..(174): unsure at all Xaa locations
  Clone ID: MRT4577_135826C.1.pep
GPLPILFPQGLXAGGGAGGGPLDFLRNNPQFQAVREMVHTNPQILQVLYSLFWLTFYGFLCSTCLNFLLVPCXPMLVELSKQNPQILRLIEENHDEFLQLLNEPFEGGEGDFLDQPEEDEMPHAISVTPEEQEAIGRLESMGFDRARVIEAFLACDRNEELAANYLLEHAGEED

SEQ ID NO: 223949 - protein, 349 aa, Zea mays
  unsure (1)..(349): unsure at all Xaa locations
  Clone ID: MRT4577_135827C.1.pep
MKLTVKTLKGTHFEIRVQPNDTIMAVKKNIEEIQGKDSYPWGQQLLIFNGKVLKDESTLEENKVNEDGFLVVMLSKGKTSGSTGTSSSQHSNTPATRQAPPLEAPQQAPQPPVAPITTSQPEGLPAQAPNTHDNAASNLLSGRNVDTIINQLMEMGGGSWDKDKVQRALRAAYNNPERAVEYLYSGIPVTAEIAVPMXSRGNTTDRVATRTEVAPTGEAGLSGIPNTAPLDLFPQGASNAGSGAGGGPLDFLRNNPQFQAVREMVHTNPQILQPMLVELSKQNPQILRLIEENHDEFLQLLNEPFEGGEGDFLDQPEEDEMPHAISVTPEDPNICPSNLLLITPNKKPK

SEQ ID NO: 223950 - protein, 103 aa, Zea mays
  Clone ID: MRT4577_135828C.1.pep
RTRGRTRTLFYSLLYMMRAGSTDTVLLLTKLAFQCKRRYLHAFALWNIMKNDVSYKGQANFLHTLSDISSSIHNTSRIHYHSWIACLMSSSRLTLMRILCMNG

SEQ ID NO: 223951 - protein, 77 aa, Zea mays
  unsure (1)..(77): unsure at all Xaa locations
  Clone ID: MRT4577_135829C.1.pep
MDPSGPAGPSSAAGSGDDALAPPQQQVQPLAQAQPQPQQAAPPPQLXRYESQKRRDWNTFWQYLRDHRPPLTLARCS

SEQ ID NO: 223952 - protein, 56 aa, Zea mays
  unsure (1)..(56): unsure at all Xaa locations
  Clone ID: MRT4577_13582C.1.pep
GFPAQVWVATXKDLXPVEEEAFRSILHQYEGPKLRLXLSVNKALALLVMLADKDDA

SEQ ID NO: 223953 - protein, 56 aa, Zea mays
  Clone ID: MRT4577_135830C.1.pep
MVCPWFFYAPVRFPCLQFFFLAAPQKKKKKKKKKKKKKKKKKKKKKKKKKKKKKKK

SEQ ID NO: 223954 - protein, 68 aa, Zea mays
  Clone ID: MRT4577_135831C.1.pep
PFQGKVFRQEANLELLQIFTACRVSLSCLTDRLNYAPMRMCGSFLILLGEQQIEVQTATAVNNNTNLE

SEQ ID NO: 223955 - protein, 85 aa, Zea mays
  Clone ID: MRT4577_135832C.1.pep
WGEGIAAIKSSIGSVVLHLRKLPIGLCMHRSLLFKRGRQGRGVAADVVIGEVDGGDAVDARVALVLDAGVEADDVLLCMVGQLHW

SEQ ID NO: 223956 - protein, 38 aa, Zea mays
  Clone ID: MRT4577_135833C.1.pep
HVIWDPKSLWSIMTLVADLLLLQFKPLRVFSFLLKELI

SEQ ID NO: 223957 - protein, 108 aa, Zea mays
  Clone ID: MRT4577_135834C.1.pep
KTQILGYLIFEKLWAWSFKEKQLETSVHSFATENGLQWQRYDFILLYSLYFHQAHVLSCTEQMHVCNGGHYWNTDRVASATQKGASMPLRARVITACVQARRAPAPAR

SEQ ID NO: 223958 - protein, 78 aa, Zea mays
  Clone ID: MRT4577_135835C.1.pep
KKAHGAVCSCPPPLVRRLSHSVCVEAGPHVRGRWRGGSLCRQGWKTKPSPSSTPPWCTRPRWGPCTLSSSCKGFNSLA

SEQ ID NO: 223959 - protein, 109 aa, Zea mays
  Clone ID: MRT4577_135836C.1.pep
PPFPSQIQPLLGFLLIEILSKPSSPKGFLGQGDPPEWASNARGLGGFKRFNPPLVKIKGKVVGENPPPHFRNRNGPPEFPPKLFFPHPFSPRGAPPGVPSKGIPPSISF

SEQ ID NO: 223960 - protein, 175 aa, Zea mays
  unsure (1)..(175): unsure at all Xaa locations
  Clone ID: MRT4577_135837C.1.pep
SEQRSPQPCRLRRPRTRHAPRHAALFLPLLLLLLGLHATSAAAARADDRPDAELTCTKPYPDPKKPSVKPPGPGAXXSPTFPGLGIPGMGGFRIPGMGADGWGVCYGGPAGXGYALGGEVAPTVTSYEKGPCYRKKXTCPNKCXYSNSCTGKGYXGSSGRCRCTVDCKVKCTAYC

SEQ ID NO: 223961 - protein, 164 aa, Zea mays
  unsure (1)..(164): unsure at all Xaa locations
  Clone ID: MRT4577_135838C.1.pep
KKKKRFTQGGGASEAQPPHQPXENGQHXQXPPQGPGGPXXPQQQAPPRPXNQQQQAPQXDQGAXPQPGGQQQQXXAPPPQNPXPXQTQXXATPPQQXAXXPQQQXXXPPQQQXXXXPXXPRREAXKXGRXGXENXXARXGREXXPXQRXXGRGPARETEQANGA

SEQ ID NO: 223962 - protein, 73 aa, Zea mays
  Clone ID: MRT4577_135839C.1.pep
PSGGGNGDGYQQQQQLQHSVSALSELVMVNPMVYLQQQQLFLSSPFAMGNAPTYLQQQLLQHQLLQQIGPAFT

SEQ ID NO: 223963 - protein, 100 aa, Zea mays
  unsure (1)..(100): unsure at all Xaa locations
  Clone ID: MRT4577_13583C.1.pep
PSFTSLTATYNVIDSQNSLATQLIILQVHPPFTLMGYKHQALTDYTLQQVIALNXLXHPISHVELHSLAHITIHTITTQHXQQLLPALNHLAIVNPVTYL

SEQ ID NO: 223964 - protein, 56 aa, Zea mays
  Clone ID: MRT4577_135840C.1.pep
LAHQAPKLTNQPVQAPLIYPHFINPISNHATANDTIRVGYQYYVQRPRQRNLGLIN

SEQ ID NO: 223965 - protein, 199 aa, Zea mays
  Clone ID: MRT4577_135841C.1.pep
VCLFGCCVQDEWAVCKVFNKQLAARTEPIMAAAGAGELERVGSLGFLSELLDSAELPPLIGADVDEVIDFNGPASTSGAPGTSHSHLPVKMEEHALLHMQYQQPPPPPPPPTSYYSSQYFSLPAMNSGDVLPPAIRRYCKAEQQVVSGQTAASAVSPSRETGLSADPNAEISSAVTPSSHQFLPEFDDPVLNLADLWKY

SEQ ID NO: 223966 - protein, 93 aa, Zea mays
  unsure (1)..(93): unsure at all Xaa locations
  Clone ID: MRT4577_135842C.1.pep
WVPLYVKFRLCEPFYMFVLRIKPXICVQPLKPHHQLLIFAFHGLGEHXTNPAAVGIVYSSPRNGRAGRLQRSEPYVLVLKREGLYFHLKMIDR

SEQ ID NO: 223967 - protein, 152 aa, Zea mays
  unsure (1)..(152): unsure at all Xaa locations
  Clone ID: MRT4577_135843C.1.pep
PTKPWDRGGWAGXPRSTDRSSSSRPGEGFSTSRGPRGSGPGRRTRAGTGATTTGSPPTRSPRWGRRSARSRGTGXDLRRRRXAPTPPAAPPCSTSGSPGEGRRRSSSPAERSTGSSSXGRRGRRRLVLHVQQRVLLHLDREVAVARARRAGG

SEQ ID NO: 223968 - protein, 474 aa, Zea mays
  Clone ID: MRT4577_135844C.1.pep
MANASKHLQPSSQAGNDKKYQGTLVASPAKAISPKCVNRIVPSKQLILGGGSIGHVASFLIKVVALEAVRRVSKTRCPFIWNSVQALQILVYPPFSWIQRWAPLRFLVQGIQKLSMPLLFLSVTTTVSELSSKHDDEPDNNTEHSETPSETNELASTSGTSDAADGTKEIVQENWLVLLFRELEKQGITLPERFTEDELRRFYVAANGDFQSLLSSVKKTIHWRETFHILTLQELDRWSHLVFWHGFDTMLRPCLVVRLGLACSSIPPHDRPRFGQAVVSQIDHGVVNLINEEDSRITVLLDCHGISPFRFPMQMMRSFITVVQENYPNRLGVLFVIRLPPVVRVIAQTFLQVLKPATKQKLRFEGDSYKKALAEFLQAVPAFLGGKCSCPRCESPRDDSVIQAGEGSKKQPRLVSVDDGSPVTDLDFDLDEEIPSPYSCENAIRAAIIGLLMVCIFVAFLAGMIDPASVPASA

SEQ ID NO: 223969 - protein, 268 aa, Zea mays
  Clone ID: MRT4577_135845C.1.pep
APRGEKTGWVMHEFRLEGRLPQPLPRSAKVRPSCTYSFRRSALQASLLPLISGRWAWANKSPLFFFLPPCLFLLRAVQDEWAVCKVFNKELQAARSEPLLAAAGAAELERVGSLGFLNELLDSAELPALIGADVDEVIDFKGPAPASVPDASYLPVKMEEEHALLQMQQCQYQPPPPMLYPSQYFSLPAMNSGHLPPAIRRYCKAEQQVVSAQTASVISPSRETGLSTDPNAAGGYAEISSATTPSSSHQFLPELDDPALNLADLWKY

SEQ ID NO: 223970 - protein, 44 aa, Zea mays
  Clone ID: MRT4577_135846C.1.pep
GIAGAGGAVFFFFFFTVNRSLTLYPGKRKTEECFTISILFFHPW

SEQ ID NO: 223971 - protein, 77 aa, Zea mays
  Clone ID: MRT4577_135847C.1.pep
TEPVYGPVPLSESAQAWQQPNPFQASGQAQMGAGGYPGDWVNLFFSGPPLGFSKPAVPQSTHQYHVVCGPLFFSESR

SEQ ID NO: 223972 - protein, 211 aa, Zea mays
  Clone ID: MRT4577_135848C.1.pep
MDLSRHNVKSINGGVQLKQLKMLKMEDQNDICVDYSDTLSSDEFDNMNISIYRTMEEQLSMFKDGEDRDFSYVQDMLASACDLPEHLEDWQVSSDVFLCLENKYSKLVLWSKSDRKLLFDLVNSILADMTIPDIGLCSKLMMKRWPEIDHGQLTEIVRQMVQKRSNCGHFFLEDVQPLPLDHGSEVELVGTKIAMMIHDDIMTDFIVGIMS

SEQ ID NO: 223973 - protein, 92 aa, Zea mays
  Clone ID: MRT4577_135849C.1.pep
LCLIYQGPTRRDAAALDPELLQLVELAPGALRENSIADVLYSQWLVLPETTKLLGSTAIGLKTKDGVVLAIEKRVTSPLLVLSHFLSGHSVK

SEQ ID NO: 223974 - protein, 105 aa, Zea mays
  Clone ID: MRT4577_13584C.1.pep
RLKWSWAVMQIPDPIHGLGMSKQFFSGDARKKRPLIMTANSIKADSPLGNRHGLLVLVSNWGPTPQPSAGVARREKRITRNLERSGGAVASPSSPSPAGVRHHLR

SEQ ID NO: 223975 - protein, 125 aa, Zea mays
  Clone ID: MRT4577_135850C.1.pep
VGFFFFFVLRTQKKGVPFFIGTLVFTGHTPKKNLRKCRKKKKQSWVFTQPGLVASLWIGGIPHLFASPQRVAGPGLHFFYMQCNPILGEEQDACSWPGRTEKLGKVQQKQRVRIKQKNFALGRRF

SEQ ID NO: 223976 - protein, 69 aa, Zea mays
  unsure (1)..(69): unsure at all Xaa locations
  Clone ID: MRT4577_135851C.1.pep
EQPWLHRVAAAASTFLGTRLVDPAPQNGRIVARFXFGVGGKAKPAPKNVVKTSTSSDRTLWLAVDAKSE

SEQ ID NO: 223977 - protein, 102 aa, Zea mays
  Clone ID: MRT4577_135852C.1.pep
WPSGSSIAGSVAMMPSSLSSRRPPPWIPHRFVSQQAIQAEQHSPKKQEGTACGEDRVGSWKAGTGRGCPLGMWIGSLVEHGLFGSKIEAGNGTPSPRPATIG

SEQ ID NO: 223978 - protein, 114 aa, Zea mays
  unsure (1)..(114): unsure at all Xaa locations
  Clone ID: MRT4577_135853C.1.pep
LSDLTSHPCFDSNSLCRKLLHYPGSHVVRQVRGCDALPLFDKATNXXLVVESHPEGRLPLFWRITAEGCVAFSDDIDMLKGSCGKSLAPFPQGCFYSNALGGLKCYQNPKHKVT

SEQ ID NO: 223979 - protein, 77 aa, Zea mays
  Clone ID: MRT4577_135854C.1.pep
EIKGPGHLKTQKGQLKGKKGKAYYTERKNNKSLGRARVHVATFKTKCGYWTKSTKKFIGGKKKKKNPREQPNKNLFI

SEQ ID NO: 223980 - protein, 136 aa, Zea mays
  Clone ID: MRT4577_135855C.1.pep
GTPGATHPTAILQCLPFTRPLTAYLLEGYHSQNCSKTEWCFMCELEKVLIEGKQGKSPVSPTGILYHLNEIGVSFGQGEEEDAHEFMRYAIDNMQSASMEEAKKNGIQQLAEETTLVQFIFGGYLRSKIKCTKCQV

SEQ ID NO: 223981 - protein, 95 aa, Zea mays
  unsure (1)..(95): unsure at all Xaa locations
  Clone ID: MRT4577_135856C.1.pep
SSFKLLPHRSGQFFPFGSPVRLXHHGXQLGSPXAKRKAGQSRFIPFXXMDSXSTRRNQLGPEXXPLITXXVGTGTRXRHQGXSXXXHHARADFES

SEQ ID NO: 223982 - protein, 74 aa, Zea mays
  Clone ID: MRT4577_135857C.1.pep
AVRSSHSTFFGSLQARGFDLDFRLTDDPKLSLHRYGQYLYDGLVLFAPSTPRNCSFPASPLGDPDLCCCSRLRP

SEQ ID NO: 223983 - protein, 116 aa, Zea mays
  unsure (1)..(116): unsure at all Xaa locations
  Clone ID: MRT4577_135858C.1.pep
RAHGGGARREEDGGGTYTADEALESMGLGNSHAPALAYSGMAKTSEAMEMTLSSLGGRALHASWGPSAHEESLTTRGGFXPPPVGAYAWGIVLDNYGGTPKNNSTNTATAGAGLRS

SEQ ID NO: 223984 - protein, 252 aa, Zea mays
  Clone ID: MRT4577_135859C.1.pep
MPEHSENAAADLMGNIMETIAENLPRQKSVRFDDGDGSSISEQAKKLFGGGESRKKSVHHVLGGGKSADVLLWRNKKISSSVLGVATLVWVFFEWLDYHFLTILCFMLALGMAVQFAWSIFAAVLNRGSPSSVPRVQLPEELFASAGAAAGAQVNRALGFLQDVACGRDLKRLVIVIAGFFAAAVVGSFCNLLTVIYIGFVCAHTLPVLYERYQDQVDDFLYNMLGVVQSQYQKLDTKGILKGGVSKFRKNE

SEQ ID NO: 223985 - protein, 77 aa, Zea mays
  Clone ID: MRT4577_13585C.1.pep
VAVAPFRLDSPKLPLCGINVAVSSCDLLELPVTVSAIFFFTAEVQVLLTLCNDTPGARRWQVVQKYPVALRRAEGGS

SEQ ID NO: 223986 - protein, 78 aa, Zea mays
  Clone ID: MRT4577_135860C.1.pep
EKKKATARICFNRSFPSPIPPLVSKVFQGPYPFPRPMAGGGPLAVRPSNHSGGGSQPPGILTSWGPLAPGRGRTVAPF

SEQ ID NO: 223987 - protein, 57 aa, Zea mays
  Clone ID: MRT4577_135861C.1.pep
LFSALWDSVQSSKVRASGFHPNRSPLGCRCSSVDSDLDRWLVSCYQRRRVSSICSRH

SEQ ID NO: 223988 - protein, 167 aa, Zea mays
  unsure (1)..(167): unsure at all Xaa locations
  Clone ID: MRT4577_135862C.1.pep
SCFQIPQDLEGHEGCYFCKRYFEKRTSRRCDCLEGVHEVLXDADFFNDSKLREMENGAKEFNVPAFRENRRLVAIKDGGLHDPSVLVFKSSWSWSSKSKVKESEMFDYPQTSMPQRPSNDEDIAFMSIIELXELIRTKXITSRELTDVFLRRLKRYGXVLESVITYP

SEQ ID NO: 223989 - protein, 75 aa, Zea mays
  Clone ID: MRT4577_135863C.1.pep
VGLDPAELLGGDAHVGAADDLYGRFEPGVRMRYGPATTGSVSGNVSLTLGLQHAGAGNQGPDGSGRFSLRDYNGC

SEQ ID NO: 223990 - protein, 259 aa, Zea mays
  unsure (1)..(259): unsure at all Xaa locations
  Clone ID: MRT4577_135864C.1.pep
PAGSGAEGHQVASHTWSHQDLSVITEEQRYDQMVKNEMAIRNIXXGKYPTYMRPPYSSCNAACQGVMKKLGYVVSYFDLDTDDYNQLKNIQVAKDNFKRILDSTAGGPATGDRLAIAHDIHEQTALNLTGYMLEYLKSKGYRGVTMGECMGEPEANWYRKTGEVVTPPSNGGGNTGTPISTDGQCGSGKGTCVGSPFGNCCSSFGWCGSTDGHCKTGCNSAFGTCTGGSTSPSKPVSTDGQCGAKAAGATCLSSPFGTA

SEQ ID NO: 223991 - protein, 81 aa, Zea mays
  Clone ID: MRT4577_135865C.1.pep
GQGDKGEGQMRQTRCLKPSSLPRTSLQKEAVRFMYKNGCLTPAQLMNHPRGELTPEDFHSLLLADVHPEVGQGITKIMTLE

SEQ ID NO: 223992 - protein, 106 aa, Zea mays
  Clone ID: MRT4577_135866C.1.pep
VVSSEFGSRKDAPAHPKLNSMKLIEGYFMRAGFVSAFKDIHERLGEVWPKKFSRLALLSEECRDEVIKADIQGRKEKLERMKKKGIVTARKSKTRARRGKFVRQQK

SEQ ID NO: 223993 - protein, 108 aa, Zea mays
  Clone ID: MRT4577_135867C.1.pep
GPFPFRGAHAWKGAWGGLMGFTGLVKREFVWGIYLGAPGVFPFPSLKTGANGILYKPIKGGMGPFKRRVRGGHQGGGKILKNWPLYRGPPGPRKKHFLFFFFFLWKFS

SEQ ID NO: 223994 - protein, 48 aa, Zea mays
  Clone ID: MRT4577_135868C.1.pep
MSQQLQNSRLLHSQGLVDLAFKAVPLVCCIGPWTSRCVLISHCLVHYL

SEQ ID NO: 223995 - protein, 65 aa, Zea mays
  Clone ID: MRT4577_135869C.1.pep
YMICSAIPVVGSPLCWGYFDRTVKISDLITPNVIFTIHSCSLFRVRFCFFASPYGITAYELIWWQ

SEQ ID NO: 223996 - protein, 163 aa, Zea mays
  unsure (1)..(163): unsure at all Xaa locations
  Clone ID: MRT4577_13586C.1.pep
IGGILVSHVTSRARVSGLNPVTQSHPPQIHFGRSCSDNLEFSRPSAELGGAAHKKRKQLMVMGPPIHGAVDQAPSIKERSLVLAVSTPSLLAGAAGATAIPGAQRRGNETADRAGAWWQLVAEADRSGAGEWRSLWFLDFGGGEGRGGXLARRRGDERSGGAK

SEQ ID NO: 223997 - protein, 91 aa, Zea mays
  Clone ID: MRT4577_135870C.1.pep
MAASARGGGARWPQAVLAPSSSSSSSSPSARTPSPSSPGKKKKNTRGVCKKKVVRRSCLHHTRTRRRRDGSIAGTTSSSLARTTAAAATTL

SEQ ID NO: 223998 - protein, 288 aa, Zea mays
  Clone ID: MRT4577_135871C.1.pep
HVSLIVVPFHKQQTVDGGMEPINPHVRGFNESLLSTSPCSVAILVDRGLSAAAARMATEHHVALFFFGGPDDREALAYAWRMVEHPGVTLSIVRFVPPDYRARTVSCSAYRPPADSDSRAITINTEGKSELEMDEDYLSEFRARNHGNIAITYATRTVANSEETVAAIRAMDNNLQELYIVGRRPGEVRSPMTAALEEWMENPELGPIGDMLVSSDFSMSVSVLVVQQYVVAAAPAPVPAPAASSDPVRQYVSNANQRAAAAASGAYRTSAASAANSRWSGSGGTVGF

SEQ ID NO: 223999 - protein, 118 aa, Zea mays
  Clone ID: MRT4577_135872C.1.pep
MVKDGGVKKVAVAAPAPEEATPTGLTATPTLTVKLPAPEAREKCYKKTVGEDATFLEIAKDYFNQFKEVPAQKHWICFKSYFVQKRGSVFGNRKQKIDPAVKDETPEVVKPAAAAVVP

SEQ ID NO: 224000 - protein, 92 aa, Zea mays
  unsure (1)..(92): unsure at all Xaa locations
  Clone ID: MRT4577_135873C.1.pep
CGSWXACFSRSPAWCCRCAPVRSAPRCRSGXSVRRSPPGRSCRPAAGLCLGSCVLGSGPPCAPPPPPWFPPSVGVRFFLLLVPXSXLXXACL

SEQ ID NO: 224001 - protein, 122 aa, Zea mays
  Clone ID: MRT4577_135874C.1.pep
VPPEQGARCTIPFAAAKMVNVPKTKKTYCKNKECKKHTLHKVTQYKKGKDSLSAQGKRRYDRKQSGYGGQTKPVFHKKAKTTKKIVLKLQCQSCKPYSQHAIKRCKHFEIGGDKKGKGTSLF

SEQ ID NO: 224002 - protein, 124 aa, Zea mays
  Clone ID: MRT4577_135875C.1.pep
VHGEMSHPISSSPFAMCPIARLGNLHFSRPSIVVSSYIQSFVLRQTSQSFCEPTMMELYLLLISTYLLSNCNVRLCCAWFLFHGICDTVLLNYQRNSGQHYLVLKSTLIGVLQWSGPSHAVCFC

SEQ ID NO: 224003 - protein, 85 aa, Zea mays
  Clone ID: MRT4577_135876C.1.pep
DVTSLHELTHRRNVTQLCRHHHPQSPSAYLDLCLIFRRFLFSLLMRFFFHLALIVASLRALLGASPAAASAAGSRYGWGTPAGLE

SEQ ID NO: 224004 - protein, 81 aa, Zea mays
  Clone ID: MRT4577_135877C.1.pep
VHGEMSHPSSSSPFAMGPMARLGNLHFSRPSIVVSSYIQSFVLRQISQSFCEPIMMELYLLLISTYLLSNCNVRLCCAWFL

SEQ ID NO: 224005 - protein, 91 aa, Zea mays
  Clone ID: MRT4577_135878C.1.pep
PRVTPRVRHHFYLHSLLLMPSSSYPLQFPHILSRFIFTSSYSIYLAHYSSPSLQTNSTISILITLYQHILNLSFIIMHMYTYISEFYIRLT

SEQ ID NO: 224006 - protein, 59 aa, Zea mays
  Clone ID: MRT4577_135879C.1.pep
PLFRPLVLPPFFSFSFFWCFGFFFFPFFFYPFFFFSKYITLIHETLCPVFKNLFLRTLL

SEQ ID NO: 224007 - protein, 79 aa, Zea mays
  unsure (1)..(79): unsure at all Xaa locations
  Clone ID: MRT4577_13587C.1.pep
HQCTALVSVHSRQTGFYSSAPPFMTSYGIXLKTVTTEVEEMITKAEKNGQMHTEMGGLAHDQHGMRVVMSVTGSKILMI

SEQ ID NO: 224008 - protein, 87 aa, Zea mays
  Clone ID: MRT4577_135880C.1.pep
MKNVAKCDTWCELQNPANHRVFERKLRPKPSGGGHVCLGVTREPAADAAAGDAPRSARKEATMRAKWKKKRMRRLKRKRRKMRQRSK

SEQ ID NO: 224009 - protein, 119 aa, Zea mays
  Clone ID: MRT4577_135881C.1.pep
ALLLFFFFFFFFSRGWEKKRFLITEKIQTIFFKDSIRLACRDPSISFDRREILCCTTKIFHGASTLPNVKRRVGQKQACSIVCDPTTDPGTSPEAKRTFSFPIFNHKIWDQPHGVGTKN

SEQ ID NO: 224010 - protein, 253 aa, Zea mays
  Clone ID: MRT4577_135882C.1.pep
MATNENLPPNVIRQLAKELKNLDESPPEGIKVIVNDDDFSTIFADIEGPAGTPYENGVFRMKLLLSRDFPHSPPKGFFSTKIFHPNIATSGEICVNTLKKDWNPSLGLRHVLLVVRCLLVEPFPESALNEQAGKMLLENYEEYARHARLYTGIHALKNKSKTGAISESTTALNVDKSSTAPNENAPSMPPAIPTSAASRALGTNLQDQSPTVSDPTVGAAAAAAARRKDGPMPSKVPVDRKKMDARKKSLKRL

SEQ ID NO: 224011 - protein, 62 aa, Zea mays
  Clone ID: MRT4577_135883C.1.pep
RAVIGLGSVFEIKRSCTFCILPGGRYRRNTTPTTSAAGRYILSLSYELVSNKTPAEIRLNTH

SEQ ID NO: 224012 - protein, 88 aa, Zea mays
  Clone ID: MRT4577_135884C.1.pep
DVTSLHELTHRRNVTQLCRHHHPQSPSAYLDLCLIFRRFLFSLLMRFFFHLALIVASLRALLGASPAAASAAGSRYGRGTPAGIEVPN

SEQ ID NO: 224013 - protein, 169 aa, Zea mays
  Clone ID: MRT4577_135885C.1.pep
LTRGFEERFDDGWDSRWVKSDWKKSQGQAGTFRHTAGTYSGDPDDKGIQTTGDAKHFAISAKFPQFSNKDRTLVIQYSLKIEQDIECGGAYIKLMSGYLNQKKFGGDTPYRPDATYSILIDNREREFGSMYTDWDILPSRKIKDDEAQKLLVSRYREYIEGSDQVSGSG

SEQ ID NO: 224014 - protein, 80 aa, Zea mays
  Clone ID: MRT4577_135886C.1.pep
PSDGSPHVDTQKEPTHKTLSNSTVSIDCLPEISITSLYKNRDACWMELVSCFGKNNCIAALSMPLQKKKKIRNAYDREMF

SEQ ID NO: 224015 - protein, 252 aa, Zea mays
  unsure (1)..(252): unsure at all Xaa locations
  Clone ID: MRT4577_135887C.1.pep
MATNENLPPNVIRQLAKELKNLNESPAEGINVTVNDDDFTTIFADIEGPAGTPYENGVFRMKLLLSHDFPQSPPKGFFLTKIFHPNIATSGEICVNTLKKDWNPSLGLRHVLLVVRCLLVEPFPESALNEQAGKMLLENYEEYARHARLYTGIHALKNKSKTGAISESTTALNVDKSSTAPNESAPSDATXAIPTSAASRALGTNLQDQSPTVSDPTVGAAAPARRKDGPMPSKVPVDRKKMDARKKSLKRL

SEQ ID NO: 224016 - protein, 81 aa, Zea mays
  Clone ID: MRT4577_135888C.1.pep
AEFASRNHKPQASYVDIAGPKARLHMPTKDPHQTRAGWATWEVPLKLDMWQPHPKGHRMIGARLPYGPPRLKKLHSCPTME

SEQ ID NO: 224017 - protein, 34 aa, Zea mays
  Clone ID: MRT4577_135889C.1.pep
IICDVRYLVQPLLVILSMLSGSCVVSICPVMPFV

SEQ ID NO: 224018 - protein, 99 aa, Zea mays
  Clone ID: MRT4577_13588C.1.pep
KKSIVFFVSHFSFFFWLSLKMILLPSATNVMGCLASLAWDLLGFFPPVPYFFSLFFHKPFSPLSFFFFLLLPSSPPLPPPPSHTHIPPPPPLYKLDQLN

SEQ ID NO: 224019 - protein, 76 aa, Zea mays
  unsure (1)..(76): unsure at all Xaa locations
  Clone ID: MRT4577_135890C.1.pep
DLPGRMAPHRAPAWRSGRLITFAHRXSHLGSDEAPRVPSGSREAPAGSKPIVSRAASPSEVGRGTCLVRDTTGCPV

SEQ ID NO: 224020 - protein, 580 aa, Zea mays
  Clone ID: MRT4577_135891C.1.pep
MDPHRRSPEYNSLLLAGPRLGPLKQAHARLVVSGHGDSLPLITKLATLAVAAGAASYARLLAASHPAPDSFLFCSLTRATARRGLPAAALAFYRCLLAAALPFSSFAFTSVAKACADLSAIRAGMGIHAHAVLLGLGSNRFVQTSLVVLYSKCGQLDVARKLFDAIRDKSVVAWNAMISGYEQNGLAGRAIEVYREMQMAGEAPDSATFVATLSACAQAGALDLGRQVDKLIVSERMEMNVVLGAALVNMYARCGLVNKAREWFNMLQERNVVTWTSMIAGYGMHGHGGEAVKLFNLMRQQGPPPNDVTFVAVLSACAHAGLVSEGRDAFASMKSVYGLVPRVEHYCSMVDMYGRAGLLDDAMRFIHDSIPGEPGPEVWTAMLGACKMHKDFNLGVEVAERLIALEPESPSHRVLLSNLYALSGKMNHVEKVRDTMIKRRLKKPIGYSLIEIAGVAHLFRMGEKSHPKTSEIYQYLEKLIEKITDVGYVPKTDSVLHELEEEEREFALRYHGEKLAVAFGLMMTSGCTTPIRIIKNLRICEDCHLAIKYMSAVENREIIVRDMHRFHHFKAGKCSCQEYW

SEQ ID NO: 224021 - protein, 72 aa, Zea mays
  unsure (1)..(72): unsure at all Xaa locations
  Clone ID: MRT4577_135892C.1.pep
FSTLSSQYWPLARWCRVHPACKRLTXAMLLTSSEGTNTSGASECESVSDKAPSPATLPATSSSLPSPAIPSH

SEQ ID NO: 224022 - protein, 100 aa, Zea mays
  unsure (1)..(100): unsure at all Xaa locations
  Clone ID: MRT4577_135893C.1.pep
KLEWSQKLTKADDVIPISAKSGHEVDDINEQILSKLPLGPAYFRQDVARVHRERRYDGEKVREKIXVHLRHDMPDPCQVXVLSNKXQSGAEDYSQAEIVV

SEQ ID NO: 224023 - protein, 42 aa, Zea mays
  Clone ID: MRT4577_135895C.1.pep
CLYKQHSIRCVACTLNESINIYSSTAILLNVFGVVFKLRLIF

SEQ ID NO: 224024 - protein, 125 aa, Zea mays
  Clone ID: MRT4577_135896C.1.pep
MIEEEVCPSSETLTAVVSVFARHKFLPHGKKLHSFAIRSGLMDTILVASFVDLYAKCGELVSSIQLFEEFNGGSKYLWSAMIWAFIYHGMFLDAIHLFERMMGSFYFPNADILRGLLINYTEINA

SEQ ID NO: 224025 - protein, 220 aa, Zea mays
  unsure (1)..(220): unsure at all Xaa locations
  Clone ID: MRT4577_135897C.1.pep
VQHGQYDTRRMARXXLFLHXTXXGXXGVTHLKPLGASVTDRLGHDAMFEPRPXHRDGSIAQHMFLRDRGSRRRXVXRKPARDEEGAVRGTNHADGWATKNGAEEXRRFSSAFRILXCRXTRSAEKCCFAAMATQCSAWARLAAXMLRXXAPLHRHCPXXRRGXPVRDWVGNWRQSGEATAEDRHGLQPRRGDTVRGTGPITDWCSTHXAXHRLADEXXRC

SEQ ID NO: 224026 - protein, 65 aa, Zea mays
  Clone ID: MRT4577_135898C.1.pep
IYLFKGASSRRFHLHYCSPNWRHIFSVVWTATSIYEHPIMMPLSNILSLRSIKVVYYSKDALEDY

SEQ ID NO: 224027 - protein, 177 aa, Zea mays
  unsure (1)..(177): unsure at all Xaa locations
  Clone ID: MRT4577_135899C.1.pep
XYILIRFFLPFEVTSLKKKITSAFRPTRPADAHHKAISKLLTASIFPLPRTPNEPWRFTHCPTRTKPCKPKRKAKAIGGTNPDPEVGLRGDEEQGKLCVSAHSAPPLNRPRGKRKALAELATSSGANMNHDSAPRPSKPRTRSAARIEGEAEEARKRRESGLRRLRALAVGHEAALP

SEQ ID NO: 224028 - protein, 58 aa, Zea mays
  Clone ID: MRT4577_13589C.1.pep
LLHTAKRAGPDPNSLDKTASHNVQALVTSFVYCLGKIVKDLINNIVVRIFPHKKTSIF

SEQ ID NO: 224029 - protein, 72 aa, Zea mays
  Clone ID: MRT4577_135900C.1.pep
GDRNRGCLHILLERNMHLHPLHLSPHLRDKLVYKLIKDVEGTCNRRHEFLEAITAVEDHCKGLIQEGTGYVT

SEQ ID NO: 224030 - protein, 49 aa, Zea mays
  Clone ID: MRT4577_135901C.1.pep
SAHSIQSERRPFALLLNIAPSGGCCEHQLRVRATGINWWPSAVRRFPAP

SEQ ID NO: 224031 - protein, 106 aa, Zea mays
  Clone ID: MRT4577_135902C.1.pep
TPTKSKKGPVGKANRGGGGTFRSNQEKPGGLLAHHLGLKTGGTSLLGRPSLEKTKMGGSLGQKQKKSGAKKHHAWGGAKQTSVKLDFAFGERIFGGFAWPPPKRKI

SEQ ID NO: 224032 - protein, 45 aa, Zea mays
  Clone ID: MRT4577_135903C.1.pep
LRVCLSAWRTWRRHSSPWYSYYVPTGSIYSYTWPRILIQCRLTAA

SEQ ID NO: 224033 - protein, 183 aa, Zea mays
  Clone ID: MRT4577_135904C.1.pep
SKRRTRPMGSIVHSQSNNVWLSANPVVAGKYAALGLNPSRSEGSCAFIESMLTGSIEKTSSPDEISKCKNSMMETEHNVNGKGGGVLFNFLVSLQLFFFSKISWLFIVDIIVVYSILSNLCLVGTTAQFETKMDQAEPARSGVRSKICTVLYLPTSQNTVPPNRKAECLVTVRSQSLCCLQRT

SEQ ID NO: 224034 - protein, 389 aa, Zea mays
  unsure (1)..(389): unsure at all Xaa locations
  Clone ID: MRT4577_135905C.1.pep
MLRLQKHLSLRLQEHLLPLHRSASLIQLSLQRSLLSTGSATYSSPGHFAADDYLVSTCGLTREQAANAAKCISHWKSSSNADAVLSFLTGPALGLSNAEIALLVAKDPRVLSCSVDNTLRARLARFRSHGFSAAQISEFVRVAPXLLSQIQHRREARLLDALXLGSPDRFLRLVKRNFYLLSSDLDKVVKPNIQLLQECGLSIQEIGSLCVANPRLLTSKPDRIRAVLVRAGEMGVPRKTLLFRHAVTAVAGLCPETFASKLKMMANILGCSEAEVARMVQKNPLVLRRSMETIQRACEFLINVVGVGTNFILDKPTILMYSLERRLVPRHYVMKVLQDKGLMRKDHSFYTLAAISASVFCSRYVHPHKNVLPNLAAAYASGCNGKIAI

SEQ ID NO: 224035 - protein, 66 aa, Zea mays
  Clone ID: MRT4577_135906C.1.pep
FFTLLRNTNGWPCKNVSIINDPSIFFYSKSSHIVYMRLWFVFPINLVFNCYLKFLTTQSHFTFVFC

SEQ ID NO: 224036 - protein, 46 aa, Zea mays
  Clone ID: MRT4577_135907C.1.pep
RATENGTTGVDDVRILLTPADLPSTNKEASLLALQDSNNKETSIVG

SEQ ID NO: 224037 - protein, 50 aa, Zea mays
  Clone ID: MRT4577_135908C.1.pep
NTNTFKVIYLFRWVERGDRTLFLVKRQGLDGQIGAKDIVRWEVWLGSPIC

SEQ ID NO: 224038 - protein, 94 aa, Zea mays
  unsure (1)..(94): unsure at all Xaa locations
  Clone ID: MRT4577_135909C.1.pep
VRWDGNXVRLLRXKLFRFRDGSGVSAGAXGATLSRERPNRNRSHHQPRSTHPPTQPNRGIWSSFPIPFGSLVRAQPARIHKGRRLLLNPRSRRI

SEQ ID NO: 224039 - protein, 90 aa, Zea mays
  Clone ID: MRT4577_13590C.1.pep
SKILKPEGLISAQSNDFPNFSHQFAIPPPVDPFFIWIVQLNVYSCYDGPFKFSPVSTPCAYHGLPACLLSCCSEPRCFEFLHARVVPATL

SEQ ID NO: 224040 - protein, 96 aa, Zea mays
  Clone ID: MRT4577_135910C.1.pep
GRDTTRRGRELAIICMPCHEIMACHEISPRAPPARYRRALLLSSPATTGGACGGGLVGGCKCGANNQGYYEGSPQIIVGAMVIVIYFCQIKQIFPN

SEQ ID NO: 224041 - protein, 59 aa, Zea mays
  Clone ID: MRT4577_135911C.1.pep
PMCRLRSRSEFHWGTAVRTAAIQESPHGGQQTEGLLRCRRVQHAFHCCLKLITTAAQSG

SEQ ID NO: 224042 - protein, 293 aa, Zea mays
  unsure (1)..(293): unsure at all Xaa locations
  Clone ID: MRT4577_135912C.1.pep
LLPPISPLPQSYSYLPTHPPRPSLQPPEEQGEMSSGMGKVVCVTGASGYIASWLVKLLLHRGYTVRATVRDTADPKKTLHLQALDGAKDRLHLFKASLLEEGSFDAAVAGCDCVFHTASPFYHNVKDPKAELLDPAVNGTLNVLRSCKKASIKRVIITSSMAAVAYNGKPRTPDVVVDETWFSSAEVCEKNEQWYVLSKTLAEEAAWKFANDNGFEIITINPAMVIGPLLQPTLNTSAEAILKFINGSSSTYPNFSFGWVNGXDGALSHILAYEVPSANXRYCMVERVLTLGD

SEQ ID NO: 224043 - protein, 77 aa, Zea mays
  Clone ID: MRT4577_135913C.1.pep
APLPPSLPSPIVTAASDRSPRCGSPPPPPGVTVTDQKQRPSPGLHGRVLPAGAVAAPPRVADGATGPRAAPIPAAPP

SEQ ID NO: 224044 - protein, 111 aa, Zea mays
  Clone ID: MRT4577_135915C.1.pep
SWVWVFFYFKRTAKTPPRTRVRTGGYWGGALVPPTHPTSAKQVKQRDITQTQKPTQRKRTPNKTQPHAPFNFKCTKGGEKKNTQAPPTALPSPDKQGKKKRRDLPSPMPPP

SEQ ID NO: 224045 - protein, 84 aa, Zea mays
  unsure (1)..(84): unsure at all Xaa locations
  Clone ID: MRT4577_135916C.1.pep
PFSRKAAWISLAYSKQQXLLPFNQLAGVXPSTLLTHSQLXLFHQNAAPSRGTFXQVQHGLPFIQPVLTNISVFYQQPIXDGALF

SEQ ID NO: 224046 - protein, 274 aa, Zea mays
  Clone ID: MRT4577_135918C.1.pep
PDSRRVRDASNEAHKRNSADGNPIHTSESDSFIYKSLEGIQDQEFCNAFQLPPEKVFKPCHLLISCLRSPIYLGGRYLKLSRNVSQSCWIIDDERMGEASVEEIIGENVRAICRGDSCKFHAAGREDIDVRMLGSGRPFLVEVLNVRSIPSETEVQQIEERINNSEKKYVIVRNLKLVDNEIWTMMREGEAEKQKQYTALIWTSRDLTDDDLHNISIMKEMEIVQKTPIRVLHRRSPLERKRIIHWMEIEKITGSSNYYLLHLCTQPSHNRVQS

SEQ ID NO: 224047 - protein, 50 aa, Zea mays
  Clone ID: MRT4577_13591C.1.pep
HGWTTVVSLSVVECGLPIALPSPPVPMGDAESSATVPMDVELAAPPPPPP

SEQ ID NO: 224048 - protein, 77 aa, Zea mays
  Clone ID: MRT4577_135920C.1.pep
FVLMCTYQCGLIVTAYQRAYTNASLSLHATESDQRPCETPTLTKFHLRRTRKEATRSQIHSFGRSHRLECDNYNLTL

SEQ ID NO: 224049 - protein, 459 aa, Zea mays
  unsure (1)..(459): unsure at all Xaa locations
  Clone ID: MRT4577_135921C.1.pep
MSCSWRHQLPPALLHLDVDCLLPFSLLRPGLTTTFQSSLMLHPQMTTAIAIEDVRREVRILSSLTGHSNLVQFYDAFEDEDNVYIVMELCKGGELLDRILARGGKYSEEDAEXVMVQILGVVSFCHLQGVVHRDLKPENFLFSSKDENSPLKVIDFGLSDFVKPDERLNDIVGSAYYVAPEVLHRSYGTEADMWSIGVIAYILLCGSRPFWARTESGIFRAVLKAEPSFDEAPWPTLTAEAKDFVKRLLNKDYRKRMTAAQALSHPWIRNAQQVKVPLDMIIYKLMRAYISSSSLRKSALRALAKTLTTNQLFYVREQFELLGPNKNGYISLQNLKSALVKNSTDAMKDSRVVDFVNTVCTLQYRKLDFEEFAASAISVYQMEALETWEQHARRAYELFDKEGNRPIVIEELASELGLGPSVPLHVVLQDWIRHADGKLSFLGFIKLLHGVSSRSIPKA

SEQ ID NO: 224050 - protein, 74 aa, Zea mays
  Clone ID: MRT4577_135922C.1.pep
VPHHERLKKKLVFVRLKNRRCTTGAQTESSFLFSYHTSCYTVAHCSQFFILESVSTSINLILFKTIFWISNCES

SEQ ID NO: 224051 - protein, 137 aa, Zea mays
  Clone ID: MRT4577_135923C.1.pep
TKKLCTVKTNLKKKKKKKKKKKKKKKKKKKKKKKKKKKKKKKKKKKKPLKPPPFWASPLLRGFFPLGAKNPPVKKNPPPPWASGDFPGPNAPFFLGKKGFPFPAKKIPPLGRGAKLRGRFFGGGFFLNFWKNPGVGN

SEQ ID NO: 224052 - protein, 65 aa, Zea mays
  Clone ID: MRT4577_135924C.1.pep
SICSAAAPTKEDQAASFCNGCNASTRMWEPLGSSFLSLLFFSFSASSSLVHALCYLSLSVSQLLL

SEQ ID NO: 224053 - protein, 70 aa, Zea mays
  Clone ID: MRT4577_135925C.1.pep
EIWKGGNFTPTSSGEASPLLHPPGEGRKNRPNKTMAFSPFCEWGVVTLTPPLLGSGSGSGSIRVVYFFPY

SEQ ID NO: 224054 - protein, 231 aa, Zea mays
  unsure (1)..(231): unsure at all Xaa locations
  Clone ID: MRT4577_135926C.1.pep
MAPNWDRLIRFIATDGRELRGQPILPSADFDIGTTTEETGLKAKVIDVKNNDIFDPATKVTDEEVTVKKLLGPVTQDEVPIIRCIGLNFIKHIQEGGRTLPPFPSTFIKANTCLTDHNAPIIIPKIAQDNQADYEGELCFIISRDAXDVSESDAFSYIGGYLSGNDVSSRKLQRDPLLAGTVPQWNFSKGFDTYAPLGPQIVSTAVIPDPSVLQLQTRVNGELRQDSGIDD

SEQ ID NO: 224055 - protein, 74 aa, Zea mays
  unsure (1)..(74): unsure at all Xaa locations
  Clone ID: MRT4577_135927C.1.pep
RAAEGYKKMMTLKSSDGXEFEAEEADWMENADHAHMIDDDCSDNGITFPNDDSKILSEASEYVNKHVHAAGGVG

SEQ ID NO: 224056 - protein, 184 aa, Zea mays
  Clone ID: MRT4577_135928C.1.pep
MRYRQPRRHLFLPFSPPAPVSSTSPRHARRPAPPLRFSATTRMRWRVRAGLLLLLVPAPSPPRRRALVPLRLRAPPQALVLLKPKEVAGIIKDFDEPGTLAPTGLFVGGTKYMVIQGEPGVVIRGKKHQRRGCTFVVLLYHSASLQVLNQSLYGRWFMWSRGSVGSDIYYQRWYSASAREALRR

SEQ ID NO: 224057 - protein, 48 aa, Zea mays
  Clone ID: MRT4577_135929C.1.pep
PSLTVLARSWQQVARCRAWDMGGHRGARRARLAPYLLHQTRRAHQDHP

SEQ ID NO: 224058 - protein, 568 aa, Zea mays
  Clone ID: MRT4577_13592C.1.pep
MSSAGVIVLGPVPEDPAFLPICFNGSRSQHCSSGSQLQDSILIFLAVPGMPPMPMSVLGSESIASVKLRIQQFKGFVATKQRLVLDGHELARNNSPVKDYGLAEGNVLHLVIRLSDLRVINIETATGRKFQFQVDQSRNVKFLKNKLEAEGDEDIGNLEDHKLEYDGEELEDHQLIADISRRDDAVIHLFIRKPAKVWTQQVDGDTLVTVVNPQGKGNLQNEAGSMNSANSVGVRPAPVEPIVNRKAKLSREVMKMINSTIAGLEKGHLPVMSAEGSGGVYFMRDATGQKNVAVFKPIDEEPMAKNNPRGVPLSTDGEGMKRGTIVGGGAFREVAAYILDHPVSDSKSGHSFGFSGVPPTTLVRTSHRGKNFKIGSLQMFMDNNGSTEDMGPRPFPVKEVHKIAVLDIRLANADRHAGNILVCKEGEGGNYKLIPIDHGYCLPEKFEDVTFEWLYWPQAREPFSDETIEYIKSLDAEEDIKLLKFHGWELPPRCARVLRISTMLLKKGAARGFTPYDIGRILCRETVNRESEIEDIIQEAEDAVLPGSSENMFLETVSEIMDRHLDKE

SEQ ID NO: 224059 - protein, 78 aa, Zea mays
  Clone ID: MRT4577_135930C.1.pep
MDRFRDRIYAVAVKLLKLEEVAGIIKDFDEPGTLAPTGLFVGGTKYMVIQGEPGVVIRGKKVMASRVLLLSGDLCPYL

SEQ ID NO: 224060 - protein, 251 aa, Zea mays
  unsure (1)..(251): unsure at all Xaa locations
  Clone ID: MRT4577_135931C.1.pep
MVVRSSSRIANRKSKMEEEDNGSANPPKPKAEGDKDNPAGRSRAKSPRQKTKADTKKKTKETRAEKRRAPSPASQKDEEEQAYDAEGCSITKQRLSLRKKGAKTEEKQQTEESRYRGRAPPSSPERKEEYASDIEGCSMSFGTKQALSLHKNDICPEKGCCRKFFSHKYLLQHRKVHADDRPXKCPWKGCSMAFKWPWARIEHMRVHTGDRPYVCLEPGCGQTFRFVSDFSRHKRRTCVQRRKQRSKAKQQ

SEQ ID NO: 224061 - protein, 561 aa, Zea mays
  Clone ID: MRT4577_135932C.1.pep
HASGRKRFSSVKSDPLSDVFEDIDITKEYGNYSSSTRQSLEAWSAAELDLSLVENTIEYICRYEAEGAILVFLTGWDEISKLLDKIKGNNFLGSPNRFLVLPLHGSMPTVNQREIFDRPPANMRKIVLATNIAESSITIDDVVYVIDCGKAKETSYDALNKLACLLPSWISKASAHQRRGRAGRVQPGFCYRLYPKIIHDAMPQFQLPEILRTPLQELCLTIKSLQLGAVSSFLAKSLQPPDPLSVKNAIELLKTIGALDDMEELTSLGRHLCTLPLDPNIGKMLLMGSVFQCLDPVLTIAAALAYRNPFVLPIDRKEEADAVKRSFAGDSCSDHIALVKAFVAWKDAKRSGRERTFCWESFLSPMTLKMMDDMRNQFFDLLSDIGFVSKTAGVKAYNRYGNDLEMVCAVLCAGLYPNVVQCKRRGKRTAFYTKDVGKVDIHPSSVNAFVNQFPLPFLVYSEKVKTASIYVRDSTNISDYALLLFGGSLSPSKTGEGIEMLGGYLHFSAPKRTIELIQKLRGELDKLLQKKIEEPGLDIFSQGKGVVAAAVELLHSQNFDH

SEQ ID NO: 224062 - protein, 134 aa, Zea mays
  unsure (1)..(134): unsure at all Xaa locations
  Clone ID: MRT4577_135933C.1.pep
MSEPNTDSYDDDRDAELLIALFAVDIWGSSPSGVSRRTMVQTGIQWVERTLESSDDCFDMFRMRRTVFRRLHDTLVQNYGLVPSRGVSTTEVLAIFLWACGGPQSFRQIRNKFGHSLETISRKFXEVLNAIYRM

SEQ ID NO: 224063 - protein, 57 aa, Zea mays
  Clone ID: MRT4577_135934C.1.pep
GECCFHGTSDECFANQLVGYGQPATRREFERLYVMMRQSALHKKKKKKTGVSYGLWE

SEQ ID NO: 224064 - protein, 59 aa, Zea mays
  Clone ID: MRT4577_135935C.1.pep
LQQRFSNIYHIQSMHPVKRTNQVTTGGTVSHRSASQAMMMAQGLEKECGAHTEQINQLQ

SEQ ID NO: 224065 - protein, 72 aa, Zea mays
  Clone ID: MRT4577_135936C.1.pep
LHSPAVWGRCRCYNNAYFARVGGISLVEMNYLEVDFLFGIAFYLNVKPSGFTYYSAQLHIVKTVMFKQLGGG

SEQ ID NO: 224066 - protein, 113 aa, Zea mays
  unsure (1)..(113): unsure at all Xaa locations
  Clone ID: MRT4577_135937C.1.pep
MIISKKNRREICRTIFHDGVLYDNKDYNLYKLPKLDVPNLXVIKLMHSFKSNEYIRKTFSCQYYYWYLTNDGIEHMRSLLNLPSEVVPNTLKKSSKPPDQSFGSGPPGDRPMG

SEQ ID NO: 224067 - protein, 83 aa, Zea mays
  Clone ID: MRT4577_135938C.1.pep
ITIIILILRHMNTLQNCSLQVCISSLPASIAATHSVLSSQKPKTLVNKTTQFSIQFTKTPKTPDQVCNQNTCKQNSSLFSKYL

SEQ ID NO: 224068 - protein, 125 aa, Zea mays
  Clone ID: MRT4577_135939C.1.pep
RGEEQKTQLGGGGKGTHLRKNQARDSKNEGNRGPGPHYKGGPTLPPPQKKRKKQGVPAPSQKGSLNRGDPGGTLKVTGPCPPVPPKSWGTPCHRTTGGGCMELCSQPCNGVSKGNPKKRASRQGG

SEQ ID NO: 224069 - protein, 149 aa, Zea mays
  unsure (1)..(149): unsure at all Xaa locations
  Clone ID: MRT4577_13593C.1.pep
GRCARGFGHATTGGXMXKSYVGTEPTGLHVVNPQLRTLRWRDIQTGRLWIIFTRPMIIHLSEDLLMSSDKTIHCRSAHGHIVNSAQITDQLAQNVTMHNLHVHHSKHTMGGHMRDSLTQIGCPTRAXGDGMSLLYVTNVWIDHICMLNC

SEQ ID NO: 224070 - protein, 60 aa, Zea mays
  Clone ID: MRT4577_135940C.1.pep
QKTGLLKFPGGICNCPVTKIFWGLLCKTKSLCFLDKNFPPKNKVGWAFGNISRKKTPFGS

SEQ ID NO: 224071 - protein, 166 aa, Zea mays
  Clone ID: MRT4577_135941C.1.pep
KREGGWVVERLLNQLLIELDGADQRQGVYVIGATNRIDVIDDAVLRPGRFGKKHYVPLPGAHERVSILKAHARSKPISTDVHLDALARRAECNNLTGADLASLVNEAAMAALEERLEFIENGTSSMGSSCLIKLSHFERALSKIKPSVSEQQIKYYEALSKRYSSN

SEQ ID NO: 224072 - protein, 99 aa, Zea mays
  Clone ID: MRT4577_135942C.1.pep
GPQKKTGPQYDYKLGTPPLVNARESLVFSTWGCSAHNFAKNPNNVGTKISALLPFGGVFFGGWASVPILLRPSSFWFPVPVPSSKWIMLPPGSNFLSNT

SEQ ID NO: 224073 - protein, 139 aa, Zea mays
  Clone ID: MRT4577_135943C.1.pep
EFKGGRFLFFTKYNGLPDSVFIRRRACRTPRLTRNRSSWSGHPRRLVPLPAQSNTRAEQQRTLSKSGELNDVRGVVAEVAERLEGGMVVPVLDGQDTPYGSREGRHGPPAGAHAHDVVHHLRAASFRWGSEGLYSRANS

SEQ ID NO: 224074 - protein, 77 aa, Zea mays
  Clone ID: MRT4577_135944C.1.pep
MTSERGGGRRVASCSDPATEAGSVQGSLWFRFPGPQNGTQHRFCSTSRSGRMEGAKGKECTAGHSWPAPALWCLLPV

SEQ ID NO: 224075 - protein, 113 aa, Zea mays
  unsure (1)..(113): unsure at all Xaa locations
  Clone ID: MRT4577_135945C.1.pep
WLILTNSESDKVRTVAWSEGKWHPHVYKAADASFDQLKDMVSIDESVHVANNTNHVAQQRQCVWIGIXAPXVLFAREFYLKALYNMLDHILERRHHLNERWIMDGLPSSLMRT

SEQ ID NO: 224076 - protein, 101 aa, Zea mays
  unsure (1)..(101): unsure at all Xaa locations
  Clone ID: MRT4577_135946C.1.pep
MEDMEPNIENHMAKDQPTTAVFTVDEAVMDAHTSGERQNATAMKGMLRXGILDVQQQRSKAYYTLRREFFEYKAYRGEXDYQQLYDNITAENNNCSKQVLE

SEQ ID NO: 224077 - protein, 91 aa, Zea mays
  Clone ID: MRT4577_135947C.1.pep
SNLYSLNAGSRTMSDKREFPTVPLVKLGSSFTKVQDYLRRFESIPDMLELDHLTVSGDVTFGKNVSLQGTVIIIAYHGDTFDIPPGAVLEH

SEQ ID NO: 224078 - protein, 137 aa, Zea mays
  unsure (1)..(137): unsure at all Xaa locations
  Clone ID: MRT4577_135948C.1.pep
PRTRGGRRRTQAPPPPPRRARPAQHPPGAAPAGGGAXTTARPTSAASSRRSSGSGTRARPRGSARRPQRRGRPRPGGPSRRRHRPRSPTRTRSPRGGPTRPPSRPRQRRPTPARRPRQQTGRRPRRRRPRDRERRGN

SEQ ID NO: 224079 - protein, 99 aa, Zea mays
  unsure (1)..(99): unsure at all Xaa locations
  Clone ID: MRT4577_135949C.1.pep
QNIYSLLNYEAPAPRCVPNRTRTAHSSAQGRAAWKHXDLSGSAQGKKYXLKSHRQSDAGRGTIYPVNAIALHPIYGTFVTQRCDGFANDRDVINKKRLF

SEQ ID NO: 224080 - protein, 232 aa, Zea mays
  unsure (1)..(232): unsure at all Xaa locations
  Clone ID: MRT4577_13594C.1.pep
GKNFKIGSLQMFMDNNGSTEDMGPRPFPVKEVHKIAVLDIRLANADRHAGNILVCKEREGGNYKLIPIDHGYCLPEXWLISVTIRIWFICLHLICFIWLIRNLRRHMLXFEDCTFEWLYWPQAREPFNDETIEYIKSLDAEEDIKLLKIHGWELPPRCARVLRISTMLLKKGASRGFTPYDIGRILCRETVNRDSEIEVIIQEAEDAVLPWSSENMFLETLSEIMDRHLHKE

SEQ ID NO: 224081 - protein, 92 aa, Zea mays
  Clone ID: MRT4577_135950C.1.pep
SNTPLLPKVTPTFSHNHQPILSPNPIPNNINPTFYEVTPRESPDFPLVSHPPHVFPEHLSGLPPHKDVEFAIELNARYGSPHPTQSYRTPPT

SEQ ID NO: 224082 - protein, 51 aa, Zea mays
  Clone ID: MRT4577_135951C.1.pep
VFNGFCTGCLACCPSSFSPVQWRLGCALFLSALMTLCIFGFPIWGFTRRVL

SEQ ID NO: 224083 - protein, 132 aa, Zea mays
  unsure (1)..(132): unsure at all Xaa locations
  Clone ID: MRT4577_135952C.1.pep
QEGTKKQADTPPQFPRCDYFFFNPFSYTWEVQKYTSVPQQXYNFHPYTYYKSVDPFKTSSKTPISPSKSLISFDIPPTSIXSNSFYCYFLNNSSMKKNTPLNTVKNSPKLSSLFYPPFHDPTSTATPKTLPF

SEQ ID NO: 224084 - protein, 103 aa, Zea mays
  Clone ID: MRT4577_135953C.1.pep
NYLGPVQIPKVHLMQAPFHKRNFSGGIFFKPRGTGQNNVTPFPEREIFPWEWGQRKDFFFPHFYRDGKENASSFLGCRGFKNNLLLNIFCFFFLKKNFFFFFP

SEQ ID NO: 224085 - protein, 377 aa, Zea mays
  Clone ID: MRT4577_135954C.1.pep
METPLSTRRITRSLAAASAQKSAAAGMDSAALFSLSKNAVAGETHAQTRAALHDITNDSPVVGLAAGSLHATDTTPAKTRRRAPRCTPGSGEALLRGQVKALLHKVDEEQGCAAAGALVRPKRIQALLGVSRSPAQLLAPTPANTPQIGPVSAPREGVGLHDGATVVPCVIDEEELLIPKLQVIAGSLPPPQPEEKLGECQLNRALVFDDSPDNSDESSGSAVPSSVSLQEGSAGKTSSPEEGDSSSAWSTQVHASSEKGDQEELDVEELAADYTEEEEEFEEEDDWEEDSDDGCYDDLCDEMSRMTVLDEGEKKTGLPQFEGKHTRFIYNSDDEIEREEVADAAEARAELGALMLRGLPVPEGRHLRFHDDEDDEE

SEQ ID NO: 224086 - protein, 160 aa, Zea mays
  unsure (1)..(160): unsure at all Xaa locations
  Clone ID: MRT4577_135955C.1.pep
RFGRNTLCCTILRIRRIIQHSVLRPNRYLHAGGGSWRWRAWLGPAGPAGGRRASARWVSGAGPSRCPGARAGTAGVGSRCCRTVPLRSTASSDGQSFRSSXGGLSXVNMLHLLLVACQQAXRGPLLLLAWGPPGPRGRLHLSHLGPVGSRGRRRGVQQVL

SEQ ID NO: 224087 - protein, 84 aa, Zea mays
  Clone ID: MRT4577_135956C.1.pep
TNQCGSLPHFTTLFRPTSIYEHLRCHMCFYHQHTQHSCVSYTTSSHNIYDGCHHHFRDQRARCDSVCVTCAAHVIPMDHFTLSN

SEQ ID NO: 224088 - protein, 159 aa, Zea mays
  Clone ID: MRT4577_135957C.1.pep
MDSSSSSTASSSQAQAQPDFDYLFKLLLIGDSGVGKSSLLLRFTSDSFEDLSPTIGVDFKVKMVNIAGKKLKLAVWDTAGQERFRTLTSSYYRGAQGIIMVYDVTRRETFTNLSDIWAKEIDLYSTNQDCIKMLVGNKVDKESERAVTKKEGIDFAREY

SEQ ID NO: 224089 - protein, 131 aa, Zea mays
  Clone ID: MRT4577_135958C.1.pep
LLVEPADYNACNTSSYDKQFDDGSTSVALDRAGAFFFISGVEANCRANEKLIVMVAGAGAPAPAPDRQGSGSSSSPSTSAPVPSKGGGAPVPPSSPKAPAAKNSTAKGAPPAAGTDRNGAGACAGLAVAGL

SEQ ID NO: 224090 - protein, 182 aa, Zea mays
  unsure (1)..(182): unsure at all Xaa locations
  Clone ID: MRT4577_135959C.1.pep
HAGTVTAVLNAVNAYAEWVPVTDLAKYGLIHGCGSLLSYSDFRLHACEFFKVICQRKRPVDVAVAEYDAAMCNIFQVLMNISQQFLTRSGMQPSSIDESEYEFASCVCETMVALGSSNMQCILADGARTFQFLQQMLEYYQHYKITLHFQSLLFWLVVLREPSKSKSIARVSGDXXAAGNSA

SEQ ID NO: 224091 - protein, 75 aa, Zea mays
  Clone ID: MRT4577_13595C.1.pep
GSKMSQKSTRPSSSSSRWCTLASTKWIDHARAQSTTGLLTSVSYGYLKDHENIVYCCNHVVVLRKDFHGVKNAKA

SEQ ID NO: 224092 - protein, 235 aa, Zea mays
  unsure (1)..(235): unsure at all Xaa locations
  Clone ID: MRT4577_135960C.1.pep
MAHLLLHGTLDATILEADHLTNPTRATGGAPGIFRKFVEGFEDSLGLGQGSTRLYATVDLGRARVGRTRVITGDPVNPRWYEVFHIYCAHFASDVVFSVKAAQPIGATLIGRAYLPVRDLIAGQEIERSLDILDASKKRLPHGPKIRVRLRFQDVSADPRGWGXRGVGGARNPGVPYTFFSQRAGCRVTLYQDAHTPDAFAPRIXXLAGGRLYQPGRCXWKDVFDAISNARHLIY

SEQ ID NO: 224093 - protein, 105 aa, Zea mays
  unsure (1)..(105): unsure at all Xaa locations
  Clone ID: MRT4577_135961C.1.pep
ITHTNPRDPRRVFLIALPNLTLAASAIYTHASGSCGCQPPNPVDVHTPVHMSPTIQQAPTERPSPPVHMPHGERDAPXVHGINRGDCAGYPHHYPTKSPRPKAHS

SEQ ID NO: 224094 - protein, 129 aa, Zea mays
  unsure (1)..(129): unsure at all Xaa locations
  Clone ID: MRT4577_135962C.1.pep
NNPDSIPSQGNPAPIVVSKRANTNDFCKAVLVQKXPRARLESRTLGTNGVGMGYCNSAATTEPXRLLVAVEGHSGFRFSAMEVETLVKYQLPVVVIVFNNNRFQRRDPRSPDQITGPYKDYPAPNSFVP

SEQ ID NO: 224095 - protein, 153 aa, Zea mays
  Clone ID: MRT4577_135963C.1.pep
MATKDPAATGGEPAIGIPYHPAPGAQGHYYYAPPPNPYAAGMPPPNAIYAGAPKGVPLQQTMFRDTPAPFHCQACGEAAVSSVRSKPSLASVVACMMPFMLGVCFLCPSMDCLWHKYHYCPSCGEKVGEFRKSDPCLVVDAARWSEPSFAVPA

SEQ ID NO: 224096 - protein, 154 aa, Zea mays
  Clone ID: MRT4577_135964C.1.pep
MATTKDPATTGGEPAIGIPYHPAAEAQGHYYYAPPPNPYAAGMPPPNAIYAGAPKGVPLQQTMFRDTPAPFHCQACGEAAVSSVRSKPSLASVVACMMPFMLGVCFLCPSMDCLWHKYHYCPSCGEKVGEFRKSDPCLVVDATRWSEPSFAVPA

SEQ ID NO: 224097 - protein, 91 aa, Zea mays
  Clone ID: MRT4577_135965C.1.pep
FGLGWFFSRGWAFCVSLFLFRMVSIFLSFGALLFASPPGFCRPPVLCDPLWLASGVPVFSFGGALFLLSRCPFLLGFFFPGLVSFSLRWVF

SEQ ID NO: 224098 - protein, 117 aa, Zea mays
  Clone ID: MRT4577_135966C.1.pep
ERLRRLDERRAERLHVEPDGRVYGFAQARDVVERHHRRRWQVLVQLARSSVVVGYWVTYELLLRVTPSSSAIFVLRQLLARSCSVAAGVSHGQSQSSPLGGVLLATRGMGVDSMPSD

SEQ ID NO: 224099 - protein, 139 aa, Zea mays
  Clone ID: MRT4577_135967C.1.pep
MARVVRCADLLPEPLAHEEVLTGRQLSPMACSVSTIPVEPSKQATKSYALVILIKIEVAYRSWAPYRPTTHTYGVFKDRAALRPAWSTTSAYNWAPRCQGSTHRPWHKPMVFGVGCVIQRLKTHGVLEGVNRWSCKNQL

SEQ ID NO: 224100 - protein, 38 aa, Zea mays
  Clone ID: MRT4577_135968C.1.pep
TNTERTLSNPISPTGQGKAKIRPLICNSPSLVSIRLCV

SEQ ID NO: 224101 - protein, 86 aa, Zea mays
  Clone ID: MRT4577_135969C.1.pep
FPELPPTARSPAAALSRRVPAPAPRSYRDTSASGGRPPGCIPSGLLPQAPLLRARDWRSSPMALGCQLRAPTCFSAPARPPSPHPL

SEQ ID NO: 224102 - protein, 62 aa, Zea mays
  Clone ID: MRT4577_13596C.1.pep
RPGQRLLHMRRPSIPLHPVRVLCSGLTTLARMRGQGTPVEVGSIPAAGCSWSMRENLYITPR

SEQ ID NO: 224103 - protein, 70 aa, Zea mays
  Clone ID: MRT4577_135970C.1.pep
MASKYIHACRWPSDLTHDDQDHALQSATIPLNPHKASGISQLMPCACKVQCSLNKLYGSELILDGKQRAT

SEQ ID NO: 224104 - protein, 35 aa, Zea mays
  Clone ID: MRT4577_135971C.1.pep
LRICEVPKAGPAASRAHEGDELIAIRSLGLGLNGK

SEQ ID NO: 224105 - protein, 58 aa, Zea mays
  Clone ID: MRT4577_135972C.1.pep
KLNKATYSQNKYYFLPKLLNISGSTTAWTTHEIPRATALLAEQAYSTWGQGQAESAAA

SEQ ID NO: 224106 - protein, 52 aa, Zea mays
  Clone ID: MRT4577_135973C.1.pep
GNQSTYNDLSVNIHKRNCTKSSRIYRVTVTLMHLHFSTTANQQVNSMHMLNY

SEQ ID NO: 224107 - protein, 63 aa, Zea mays
  Clone ID: MRT4577_135974C.1.pep
SITRHKRKQNTRVIAFNFRDSSYWGRGASEPDSGADSIIKMPSHPDTNSLMPKATDRLGHICR

SEQ ID NO: 224108 - protein, 48 aa, Zea mays
  Clone ID: MRT4577_135975C.1.pep
ARNPCCLSIYLSHLLLPTYLSIMIHIFLHSSFCSIWSFVLKGKPLTKY

SEQ ID NO: 224109 - protein, 138 aa, Zea mays
  unsure (1)..(138): unsure at all Xaa locations
  Clone ID: MRT4577_135976C.1.pep
PRSPQRLPHQTISLLAPRASRTKGPVFCLXDXVLDKLDTVNHDHELPSKDCQLXLLIIKAYKTLXRDREPYPRYFMIAQLTRSYYFAVLHXSTNSLVSPSDPHSYMTLLWTITAXDECLAIIEDIDMLKGSCRYLLAT

SEQ ID NO: 224110 - protein, 80 aa, Zea mays
  Clone ID: MRT4577_135977C.1.pep
FVDDSVIVFRFLIQVAIVGIGKDCALLLMVTELYMTLSIRLVRVVVNLSCMYRGCVHDTDHSSCDKGHQVQDRSQASIGS

SEQ ID NO: 224111 - protein, 42 aa, Zea mays
  Clone ID: MRT4577_135978C.1.pep
PRPWGVQKTLIMIKCLDARLVSSPVIISDPERVQKKKKKKAA

SEQ ID NO: 224112 - protein, 63 aa, Zea mays
  Clone ID: MRT4577_135979C.1.pep
LVSSLLNSAFLSRSNFAGTEFIIVVFCSEKCLSVPLRIVFNESVIAFVVLYAIARLGAHVTVY

SEQ ID NO: 224113 - protein, 113 aa, Zea mays
  Clone ID: MRT4577_13597C.1.pep
MSSAGVIVLGPIPEDPAFLPICFNGSRSQHCSSGSQLQDSILIFLAVPGMPPMPMSVLGSESIASVKLRIQQFKGFVATKQRLVLDGHELARNNSPVKDYGLAEGNGLHLVIR

SEQ ID NO: 224114 - protein, 327 aa, Zea mays
  Clone ID: MRT4577_135980C.1.pep
PAGNDPIHSLGAARAFLLGRQRRAAPPPSLPPPRTLAAGAKDASAAPPPSLPPPRTLAAGAKYSPPSRMDILEGSIAVRGRGKNKRKWIPVEDDELIKALVDVSLDPRWRSDGSFKNGYTSVLEARLAEKLPDSKISATPHIESRLRYFKTKYSALEQMLNKSGFTWDPTKKMIQCEKQQYETHCKFISVDSTSSSSKKRKKEWKGKKTSSSDPLLDVFNEVSGDLKVATMSIGKMAQAMDREASNQEKERDEDPQQKLREKAINEVRRLEFTGSEVIKAAGVFVRMPDQMGMLFALPEPLRREYIVDMLRDEAARREREVKVKGLV

SEQ ID NO: 224115 - protein, 118 aa, Zea mays
  Clone ID: MRT4577_135981C.1.pep
MIKSDDEIVSTYHRAFDHGYPTPSLEREGVLTKLLPALQAKDILSRGRFGSWRYEVGNQDHSFMLGVEAVDHVVNGAVELTLNYPDFVNGRKNEERRLVDGAQIFTKPSLALRNKGVD

SEQ ID NO: 224116 - protein, 66 aa, Zea mays
  Clone ID: MRT4577_135982C.1.pep
SIGFLIFCLILFIWIRRSKNKGKGKQDGHPSIMTSDTIKLWEGEKTGTFFAVFSFSQIRNGTDNFS

SEQ ID NO: 224117 - protein, 194 aa, Zea mays
  unsure (1)..(194): unsure at all Xaa locations
  Clone ID: MRT4577_135983C.1.pep
AERLLPPRRLPPPPRLPHPRRRLPAPTTRSASADVVSRSAVLEYLAIENNPDAKGLYGVSFPYYDELSKVYSKDMATGEGAEDMIDAVQNLEEQLVRVNANDAEDAEHMTSVETPRRSVDSTSSSSKKRKKEWKGMKTSSSDPXLDVFNEARGDLQXATLSIGKMAQXLDREASNPEKGRNEDPQHKVRRDSDQ

SEQ ID NO: 224118 - protein, 312 aa, Zea mays
  Clone ID: MRT4577_135984C.1.pep
MDISEGSIAVRGRGENKRKWIPVEDDELIKALVDVSLDPRWRSDGSFKNGYTSVLEARLAEKLPDSRISATPHIDSRLRYFKTKYSALEQMLNKSGFTWDPTKKMIQCEKQQYETHCKNNPDAKGLYGVSFPYYDELSMVYSKDMATGEGAEDMTDAVQNLEEELVRVNANDEEDGEDMTSVETPRRSVDSTSSSSKKRKKEWKGKKTSSSDPLLDVFNEVSGDLKVATMSIGKMAQAMDREASNQEKARDEDPQQKLREKAINEVRRLEFTGSEVIKAAGVFVRMPDQMGMLFALPEPLRREYIVDMLRGN

SEQ ID NO: 224119 - protein, 77 aa, Zea mays
  Clone ID: MRT4577_135985C.1.pep
WFGPKRWLHVPKKEATTRRGSPYLFKCVCPDRPQGLYTYNRNSPDMLYALNWLHRIALLCATYLQTYTDCTPHRGPL

SEQ ID NO: 224120 - protein, 124 aa, Zea mays
  Clone ID: MRT4577_135986C.1.pep
ENSNPPTLAGINDPIHSLGAARAFLLGRQCHAAPPPSLPPPRTLAAGAKYSPPSRMDILEGSIAVRGRGKNKRKWIPVEDDELIKALVDVSLDPRWRSDGSFKNGYTSVLEARLAEKLPDSKIS

SEQ ID NO: 224121 - protein, 85 aa, Zea mays
  Clone ID: MRT4577_135987C.1.pep
QVCARTLGCFPPKYVSPAGPGDMRSLSWMLPLTLSMVSKNSPSRVIVCSVRVLTKELQLGSTTGSPVGVLGCMCVSSKRRVVEVP

SEQ ID NO: 224122 - protein, 84 aa, Zea mays
  Clone ID: MRT4577_135988C.1.pep
LIIALSVRHRQPSPISSPGGDDGPKKFWPEVVGLTLEKPKRVILWDKPDPDIVVLPVGPPVPMDFPPTRVCIFVDPVAEAPPLG

SEQ ID NO: 224123 - protein, 74 aa, Zea mays
  Clone ID: MRT4577_135989C.1.pep
ARVRNLGTYIKNALGFFFVGFFFAHEHESFIDTEDQSTRQRQRGGCTMAPGLYIFFLDKDTGRGTWRGSKQNKE

SEQ ID NO: 224124 - protein, 127 aa, Zea mays
  Clone ID: MRT4577_13598C.1.pep
YYEDDPVGLPSFNQVSPCSPQLDSVGAKDRAVEVCPSSSLTGPRSASGCPDVSSSTMWFNAWHVKIVTSSRYQVRLTAQCFSIYRLISLHGKGFVFSFPQSMGFHISDWAVMRHSRQQGLHLIIQKC

SEQ ID NO: 224125 - protein, 123 aa, Zea mays
  Clone ID: MRT4577_135991C.1.pep
MKALSVGIGRVPRVVHRARWYIGRGVVPPLGKSARGGGVEPGAGGGALASEVGPNDLDLKDLNIVVSIVTHTPKGMGHYVVPDVRLRMMKGDAKGMMEGEDIPKPCHELTQQNSPSTTTSKSK

SEQ ID NO: 224126 - protein, 65 aa, Zea mays
  Clone ID: MRT4577_135992C.1.pep
KEHDGCTSSWNWSEELLERACIVLEDCLFTIGGPGMVFTNKVFWAHECIESRKFYLCANFELTLK

SEQ ID NO: 224127 - protein, 52 aa, Zea mays
  unsure (1)..(52): unsure at all Xaa locations
  Clone ID: MRT4577_135993C.1.pep
CIVNASKRCWLDHLKVLGRGGSVSSVLYVQVWECPSXRRYLPNACEFQQKNI

SEQ ID NO: 224128 - protein, 50 aa, Zea mays
  Clone ID: MRT4577_135994C.1.pep
GKVKLTKKVIRTQKSTDGPSATTKPPPTMLAFVFLLAQAPQALPTTVVAS

SEQ ID NO: 224129 - protein, 117 aa, Zea mays
  unsure (1)..(117): unsure at all Xaa locations
  Clone ID: MRT4577_135995C.1.pep
HQRPSRSSRWHHHCPRRTATATPVPRPALSKQSTHGHRRNTCSPRPPLIKPNEGRLVNCLQACRSGILRWTVLPEVEQGRIPTKVSGHLSVRHGCSPASTARAIAEKEGAEDSCXVW

SEQ ID NO: 224130 - protein, 145 aa, Zea mays
  unsure (1)..(145): unsure at all Xaa locations
  Clone ID: MRT4577_135996C.1.pep
KQGPXPKSGKPKTPKKHLKGKTPRESPERGNPKGKTPEKRAQKGKPRRGGKRKGEGRKGKGAGRHGRGXGEPAPRPGXPKQRPEQKGGKKKGQRPRGQVKAGPDRWGGANGGGPTRQKHPGGKKGETPGRPPRRGQPQGLPPSTP

SEQ ID NO: 224131 - protein, 64 aa, Zea mays
  Clone ID: MRT4577_135997C.1.pep
PKRLMTPASHWSTASLLHDSCAIMMILCELRPCLKRLQMTYIYTCPDHHIGQTCLINAHDCANS

SEQ ID NO: 224132 - protein, 739 aa, Zea mays
  unsure (1)..(739): unsure at all Xaa locations
  Clone ID: MRT4577_135998C.1.pep
MPPSSVSGGSGPGGVSPDAIIEWLQDEMGYPSAPPAPEQLRKICRGNMIPVWSFLLRRVRSERTVATARRNILVHGVAARRAREGGAMGAGAGDAAAREAEARERDLAAEEAERLRGIVRRQRKELRARIAEVAREEAERKRVLGERSNARHKQVMLQAYEQQCDEAHKIFAEYQRRLHQFVNQARDVRRSSIGVAGATGALVDMQLQSDRDDLYPSTINSNXIAXDFLETTGXRVTWIGCEFHSADLNXRLXSTFGVVHWLDMGCLCVVNAHMRVIVLVNEIXEHSXLVALEYLNVPSLLLQSIITYTSRMKTLIHRETDKIDIRADAELLRYKYENEQVIDAASTDASSPLPYQVYGNGKTGSQLSTRGTYDQLLERQKEHVQQFLATEDALNKAAEAKALSQKLLQRLYGTADMAANKKPRTGIPPQNVTNCRXCECWTXAKEREVAGLKASLSTLTSEVHRLYKLCAEWKEAEDSLKKKWKKIEEFDARRTELECIYSALQRANMDASSFWEQQPLSARGYASSTIIPACHTVVDMSTNSRDLIERELAAFSQSLDNSLCRLPATPQALLEAVGSNGVTGSEALAAAEKHAALLTARAGARDPSAVPSICRISAALQYXCSPGTEGTDSGLASVLNSLEFCLKPCGSEASILEDLSKSINLVHTRRNLVENDRVLLNRAHRAQQEYERXDEWYEQPAATIVDWVTIDGQSVGAWINLVKQLHMEISRRTLAMSSV

SEQ ID NO: 224133 - protein, 76 aa, Zea mays
  unsure (1)..(76): unsure at all Xaa locations
  Clone ID: MRT4577_135999C.1.pep
SAGLKLYTRPGACSDTIVPWAVTAAVLLCPYAXSEQVALNQGYRWGNHHRGSYIILTMKSPILYIHYSSDLGCDIP

SEQ ID NO: 224134 - protein, 373 aa, Zea mays
  Clone ID: MRT4577_13599C.1.pep
MEQVVNTVMDLVMPPASMVMLAFAWPTLSFLRGVEWALKTLTKEDMLGKVVVITGASSAIGEQIAYEYARRNANLVLVARREQRLFAIRDNARLLGAGHVLVIAADVVKEDDCRRLVADTVSYFGQLNHLVNTVSLGHDFSFEEAGDTTAFPHLMDINFWGNVYPTHAALPYLRRSHGRVVVNASVESWLPMPRMSLYSAAKAAVVDFYETLRYEVKEEVGVTVATHGWVGGDAGGSKFTLDQHQEGAAADQVQWKQQGEREPAAATLLGGHVEAYARALVAGACRGDAYVKRPSWYDVFLVFRVFAPDVLAWTFRLLLSTSTPAPAGPSAIAARRPPPAALPAPPLRPLLEYPPAAVYRGPAHAQQVVQKLE

SEQ ID NO: 224135 - protein, 53 aa, Zea mays
  Clone ID: MRT4577_1359C.1.pep
KKKKKKKTKKKKKIKKKKKKKKKKKPKKKKKKKKKVCPWGGTPLLFKPGPEPP

SEQ ID NO: 224136 - protein, 84 aa, Zea mays
  Clone ID: MRT4577_135C.1.pep
FDKTNQKYNITASNQFMLKIPLHLALRCPPVYHPLSFSSPFLHFQLCIFLHNPSCCSSFLILSALSLSISSSTVMHLAFNLCFY

SEQ ID NO: 224137 - protein, 88 aa, Zea mays
  Clone ID: MRT4577_136000C.1.pep
KLAGEQEKLVSERWLPELRNAVQEARRCFDDCQRVRGLVDEWYEQPAATIVDWVTIDGQSVGAWINLVKQLHMEISRRTLAMSSVGDD

SEQ ID NO: 224138 - protein, 98 aa, Zea mays
  Clone ID: MRT4577_136001C.1.pep
METETEAAAARRAKESLELAFQMSQILDTGLDRHTLSLLMALCDRGANPEALAALVRELSSAAPPTSAAASSPVLLKSLNGTGVVFQARQDLAAGIAG

SEQ ID NO: 224139 - protein, 166 aa, Zea mays
  Clone ID: MRT4577_136002C.1.pep
RQRKELRARIAEVAREEAERKRVLGERSNARHKQVMLQAYEQQCDEAHKIFAEYQRRLHQFVNQARDVRRSSIGVAGATGALVDMQLQSDRDDLYPSTIKSNRLPEDLLETAGERSIRKACETLAADMIETIRSSFPAFEGCGINSSCQLDAKKLGIDLGGEIPTY

SEQ ID NO: 224140 - protein, 96 aa, Zea mays
  Clone ID: MRT4577_136003C.1.pep
METETEAAAARRAKESLELAFQMSQILDTGLDRHTLSLLMALCDRGANPEALAALVRELSSAAPPTSAAASSPVSNGAAGPASAIAPTFSSGLRRP

SEQ ID NO: 224141 - protein, 26 aa, Zea mays
  Clone ID: MRT4577_136004C.1.pep
HFSAADDRLTLLPPNAHPEDELIVAN

SEQ ID NO: 224142 - protein, 274 aa, Zea mays
  unsure (1)..(274): unsure at all Xaa locations
  Clone ID: MRT4577_136005C.1.pep
PSVRQQPLSARGYASTTIIPACHAVVDMSTNSRDLIERELAAFSQSLDNSLCRLPATPQALLEAVGSNGVTGSEALAAAEKHAALLTARAGARDPSAVPSICRISAALQYXCSPGTEGTDSGLASVLNSLEFCLKPCGSEASILEDLSKSINLVHTRRNLVENDRVLLNRAHRAQQEYERVANYCLKLAGEQEKGXGERWLPELRNAVQEARRCFDDCQRVRGLVDEWYEQPAATIVDWVTIDGQSVGAWINLVKQLHMEISRRTLAMSSVGDD

SEQ ID NO: 224143 - protein, 478 aa, Zea mays
  unsure (1)..(478): unsure at all Xaa locations
  Clone ID: MRT4577_136006C.1.pep
GTGTAIPGAAAIERQLEQQLQEQRSSLAAVEEALAADPSNADLLEVHEELLAAIKDAEEGLLHLKRSRLLKQVDEIFPDRESMSQSPEVASESLDPDDVEPEPLESHDFSVGSKCRFRHNNGRWYNGCIIGFEGSGDARISFLTPTSENMSVLXMPSKALKRFTPTRWEQSLVGSSILATSGYNSGLWRRAELESWDDNLKIGQIVFQDDGSSASLPSDSLSVSEYAHMSDEDEGSLSDEESEFSDDADQEDGSVHQGLGLLEFTNFSGIQTDTMIFAKWEHHTRGVASKMMAKMGYREGMGLGVSGQGMLDPIPVKVLPPKQSLDHALASSEADGGSGKKRSRGGKRKREKKFAELARAAKAEEAERSVFNFINSHLXPRRFDXKVRKGSSVETNGLAKKEDRRSLVAYGEEVKELRIRVEKLEEMKNRNCKDKAFFEAASRKLEETRKALADAEATHASATSAVTRKEKEKKWLKF

SEQ ID NO: 224144 - protein, 439 aa, Zea mays
  unsure (1)..(439): unsure at all Xaa locations
  Clone ID: MRT4577_136007C.1.pep
MSDKKDDEAGTSTPCVAAAAAPAPRPSTYAPMGALRDEECANLLALVSTVSRPLEDAVADFLARVPPDRRLRFGTSISFVLEDKMMLQPAERLVAFAIXYIKAACDETSEEAEQAFLQLLLSSTNGDNIEVLKQSAVAYLNGSDYASQVFLPREQLEKQCSYDAARPLPFSSNFRDATVRSTIPDPDVLQSFGSSSELSSIIPNRDDMVATLLQQTSLKGLPPQWIRPSPPRLEIFEGELQWLNIDNNHELLWDSTMCADTSRGAVIRDLVEQACKAPLALAQHEEITKYLRKDWKLVYHCGMTPQKLPDLVEHNPHIAVEVLSKLINSPDMDAYFDAIVHMDMSLHSMEVVNRLTTAVVLPPGFVHDYISNCIRSCEDIKDKYMQNRLVRLVCVFLQSLIRNRIIDVQDLFVEVQAFCIAFSRIREAVGLFRLLKSLE

SEQ ID NO: 224145 - protein, 137 aa, Zea mays
  Clone ID: MRT4577_136008C.1.pep
AGRSGTTSHDPVSPTHKNSLVSKTKSEKTPSTCNAPHGPQSSGLRRRTSTRICCPSNIQQITLTTTRWLTRTRAPEYHLLRSYTHKPALPLQDRYPQLHPIYLHPLLSHASPKRILHGDPLLAQGPITQHLRLQRLG

SEQ ID NO: 224146 - protein, 498 aa, Zea mays
  unsure (1)..(498): unsure at all Xaa locations
  Clone ID: MRT4577_136009C.1.pep
MAGEGEDEAAAIERQLEQQLQEQRSSLAAVDEALAADPSNADLLEVHEELLAAIKDAEEGLLHLKRSRLLKQVDEIFPDKESISQSPEVAIESLDPDDVEPEPLESHDFSVGSKCRFRHNNGRWYNGCIIGFEGSGDARISFLTPTSENMSICKFFLQQRCRFGSNCRMSHGIVMPSKALKRFTPTRWEQSLVGSSILATSGYNSGLWRRAELESWDDNLKIGQVVFQDDGSSASLPSDSLSVSEYADMSDEDEGSLSDEESEFSDDADQEDGSVHQGLGLLEFTNFSGIQTDTMIFAKWEHHTRGVASKMMAKMGYREGMGLGVSGQGMLDPIPVKVLPPKQSLDHALASSEADGGSGKKRSRGGKRKREKKFAEQARAAKAEEAERSVFNFINSHLXPRRFDXKVRKGSSVETNGLAKKEDRRSLVAYGEEVKELRIRVEKLEEMKNRNCKDKAFFEAASRKLEETRKALADAEATHASATSAVTRKEKEKKWLKF

SEQ ID NO: 224147 - protein, 113 aa, Zea mays
  unsure (1)..(113): unsure at all Xaa locations
  Clone ID: MRT4577_13600C.1.pep
MEQVVNTVMDLVMPPASMVMLAFAWPTLSFLRGVEWALKTLTKEDMLGKVVVITGASSAIGEVXYRRVLVLVARREQRLFAIRDNARLLGAGHVLVIAADVVKEDDCRRLVAD

SEQ ID NO: 224148 - protein, 96 aa, Zea mays
  Clone ID: MRT4577_136010C.1.pep
METEKEAAAARQAKESLELAFQMSQILETGLDRHTLSLLMALCDRGANPEALAALVRELSSAAPPTAAEAPSPVSNAAAGPAPATASMFSSGLRRP

SEQ ID NO: 224149 - protein, 219 aa, Zea mays
  unsure (1)..(219): unsure at all Xaa locations
  Clone ID: MRT4577_136011C.1.pep
MDPMFSSEWSVSEIKMAKSLIASRNTSSNLASDDDASNKKHSDIVDELQARFPWKGKHEVIGLYVDLTMEMINTPPEVGDDGLVLDDDNFGMPVEEQPQMKYTGRFWTREEHRNFLRGLNMYGRGNWMYISRDFVPTKTPMQIYSHAQKFFRRXERTCSWKQRHDIXNDIGLYDMLSPRQITALSLSQDIVHYTIKISFLGSGRTSITCTSCYLSFSLS

SEQ ID NO: 224150 - protein, 327 aa, Zea mays
  unsure (1)..(327): unsure at all Xaa locations
  Clone ID: MRT4577_136012C.1.pep
MSDKKDDEAGTSTPSVAAAAAPAPAPRPSTYAPMGALRDEECANLLALVSTVSRPLEDAVADFLARVPPDRRLRFGTSISFVLEDKMMLQPAERLVAFAILHQGYSSQLANPFLPLLINAACDETSEEAEQAFLQLLLSSTNGDNIEVLKQSAVAYLNGSDYASQVFLPREQLEKQCSYDAARPLPFSSNFRDATVRSTIPDPDVLQSFGSSSELSSIIPNRDDMVATLLQQTSLKGLPPQWIRPSPPRLEIFEGELQWLNIDNNHELLWDSTMCADTSRGAVIRDLVEQACKAPLALAHMRKFSNXLLKDYSSVYHTAMTPQKLPD

SEQ ID NO: 224151 - protein, 96 aa, Zea mays
  Clone ID: MRT4577_136013C.1.pep
METETEAAAARRAKESLELAFQMSQILDTGLDRHTLSLLMALCDRGANPEALAALVRELSSAAPPTSAAASSTVSNGAAGPASAIAPTFSSGLRRP

SEQ ID NO: 224152 - protein, 116 aa, Zea mays
  Clone ID: MRT4577_136014C.1.pep
MSMFVLYQKKKKKKKKKNMDMSLHSMEVVNRLTTAVVLPPGFVHDYISNCIRSCEDIKDKYMQNRLVRLVCVFLQSLIRNRIIDVQDLFVEVQAFCIAFSRIREAVGLFRLLKSLE

SEQ ID NO: 224153 - protein, 61 aa, Zea mays
  Clone ID: MRT4577_136015C.1.pep
TSRLSRVFYVINLSLVSPQAVLGTLAMVERGGPFAYTLMLYATETSRSMILWLQYVLVTLL

SEQ ID NO: 224154 - protein, 72 aa, Zea mays
  Clone ID: MRT4577_136016C.1.pep
KSGGSPKHGKKWPAWFYRAILKKYLNSKGSLKRVFITKNYPPRVRSGMKNGQPLLENPPQWNLPYWRAPEGG

SEQ ID NO: 224155 - protein, 91 aa, Zea mays
  unsure (1)..(91): unsure at all Xaa locations
  Clone ID: MRT4577_136017C.1.pep
VGNPGGGRGGQGPKGGGGGGGSSPKGPPGGDDKGHDSKTPGKKGGATGRTETGKQGPATESXPKGAPNGGSSGRGXGGGGTPGGGEIRNGD

SEQ ID NO: 224156 - protein, 86 aa, Zea mays
  Clone ID: MRT4577_136018C.1.pep
LKTEPCAGLSFRFKFPLGSTRYKVGEPWIIKNTSSQVTRGRLRSSKRKRRSPRNGSVFLKIIPCPCDESDRALYGVSMSALALGVH

SEQ ID NO: 224157 - protein, 145 aa, Zea mays
  Clone ID: MRT4577_136019C.1.pep
HAQCGMDGPSIIDSYIVPFIIYITYVREHKEIRTLRTLFDSCTLLHYYTYNNISYIWLWQKSFVGSVARPPLNYFADGHTMDACASVLFCSPVAHSHCSCFLFLGWVGGGCADHANAIYTDSIAQKDSKKERIKRGGRKERNNGD

SEQ ID NO: 224158 - protein, 270 aa, Zea mays
  unsure (1)..(270): unsure at all Xaa locations
  Clone ID: MRT4577_13601C.1.pep
MGAVNHLVNTVSLGHDFSFEEAGDTTAFPHLMXAHRMHVMPSIVEDQRAHAYITQQMQRMHNYIMQDINFWGNVYPTHAALPYLRRSHGRVVVNASVESWLPMPRMSLYSXDDKPTFFFLPPLVVSTLKKKAVYXGVARHXAAKAAVVDFYETLRYEVKEEVGVTVATHGWVGGDAGGSKFTLDQQQQHQXKARRRIRCSGSSSRESARRRRRRCLPRRSARCSSTRRRRCPGAPPTPSRWCRSWNERLRMLRAVETELSSSLRYCCDDL

SEQ ID NO: 224159 - protein, 93 aa, Zea mays
  Clone ID: MRT4577_136020C.1.pep
LNHDGFAAYPCTSYKYFESDKCFPCPDQGCPQMGHYADKFAGRTSEEQQKFFLNTGEASNFARWRYGVSITLSGRTATGQIKVALFGNKGNTH

SEQ ID NO: 224160 - protein, 56 aa, Zea mays
  Clone ID: MRT4577_136021C.1.pep
ATASDGGCVFSDFSHFTPPHRGSLIAAELGFSPFLPAWTLCSRAVPDMDPGGPICV

SEQ ID NO: 224161 - protein, 252 aa, Zea mays
  unsure (1)..(252): unsure at all Xaa locations
  Clone ID: MRT4577_136022C.1.pep
MAAAPVVVPRMKLGSQGLEVSAQGLGCMGMSAAYGERKPDQDMIALLRHAVAAGVTFLDTSDIYGPHTNELLLGKALQGGVREQVQLATKFGITATWEVHGDPAYVRAACEGSLARLGVDCIDLYYQHRIDKNVPVEITMGEIKKLVQEGKVKYVGLSEASASTIRRAHAVHPITAVQLEWSLWSRDVEEDIIPTCRELGIGIVAYSPLXRGFLSSGPXLVDTLPEDDFRKNLPRFQPEXNMKKNAEIFERV

SEQ ID NO: 224162 - protein, 596 aa, Zea mays
  Clone ID: MRT4577_136023C.1.pep
MAGGGKKEKGEGLGRALIRQRNKAAAAAKERGEALAFGRRRAMPLESVIDVSDIDAVLQRAAEADQLAEAASVSSDSDLVIDLDATGETEDDRRRLRKEQEALHASSLRVPRRPPWHSQMTVEELDVNERRAFLVWRRNLARLEENDKLILTPFEKNIDIWRQLWRVLERSDLLVMVVDARDPLFYRCPDLEAYAKEIDEHKRTILLVNKADLLPLNIRKRWADYFKAHDILYVFWSAKAATATLEGKKLSGYSEGESASLDLDTKIYERDELLMKLQAEAESIVAQRRISPTVDDHEASSSDSVSSVTKHVVVGFVGYPNVGKSSTINALVGEKRTGVTHTPGKTKHFQTLIISEELTLCDCPGLVFPSFSSSRHEMVACGVLPIDRMTKHREAIQVVADRVPRDILEQIYKIALPKPKPYEPQSRPPTAAELLRAYCASRGHVSHAGLPDETRAARQILKDYIDGKIPHFELPPGVTGPEVDFEQIAGSESPTTSAANESVTDDLDEEDDDAVDPAESNMRDVLDDLESFDLGNGGSKTTAKKKEASHKHHKKPQRKKDRSWRVGNDGGDGTAVVRVYQKPAVNLSTVSLSGRV

SEQ ID NO: 224163 - protein, 71 aa, Zea mays
  unsure (1)..(71): unsure at all Xaa locations
  Clone ID: MRT4577_136024C.1.pep
VKEGEKISFLGLFERAVFPREVSIGYIKGGKQHFYPFPQLEPLSLXKNDSLLVKSGFEGEPPIFMGGEFSG

SEQ ID NO: 224164 - protein, 47 aa, Zea mays
  Clone ID: MRT4577_136025C.1.pep
QCRGINNSYNIRGCKPHNSSEQTHITRWRGQLSADHGIRAAHWPDAA

SEQ ID NO: 224165 - protein, 42 aa, Zea mays
  unsure (1)..(42): unsure at all Xaa locations
  Clone ID: MRT4577_136026C.1.pep
TPPGVFPLVTXXLVKRXGQMNFEFRXXHYRRKLSTLACXXGT

SEQ ID NO: 224166 - protein, 144 aa, Zea mays
  unsure (1)..(144): unsure at all Xaa locations
  Clone ID: MRT4577_136027C.1.pep
GTLRKHAAAADFGCETAESKERFRQRLWCFLFENLNRAVDELYLLCELECDMEQINESILVLEEAISDFQELKSRAEHFXYQKISWXPKEGMPMAVKADHRRPHALSWEVRRMTSSPHRQEILSSSLEAFQRIQLELACKQAGI

SEQ ID NO: 224167 - protein, 103 aa, Zea mays
  unsure (1)..(103): unsure at all Xaa locations
  Clone ID: MRT4577_136028C.1.pep
PXAATGNXXDNXGAKNXXXXXXKGTKGRXNRXPTTSEGEGGXGVFFFXKXXPQKKGRPAAXARQRKPXRRKDXAHXXXEDNAGAXGNPKGEKKGXATTGPTEK

SEQ ID NO: 224168 - protein, 107 aa, Zea mays
  Clone ID: MRT4577_136029C.1.pep
FSYMSTLNLLIHHVYHLIHEESSNRSRTFAISSANNGLVAKPARPLKNTRTRKLGRSTINICIGRCKIVLECIPCTIEPNSLSINRVEITISRGSILQFKTLIELVY

SEQ ID NO: 224169 - protein, 137 aa, Zea mays
  Clone ID: MRT4577_13602C.1.pep
MEGRNPVQRFVDSPKPYNRRKARGMQTRMDSSDVMSSDPYVIINLGHQTMKTKVVKSSLNPVWNERLMLSIPDPVPLLKLQVYDKDTFTTDDRMGEAEINIQPLVAAAKAHETSAIADTAQLNKWLAKDGIWIPRDS

SEQ ID NO: 224170 - protein, 246 aa, Zea mays
  unsure (1)..(246): unsure at all Xaa locations
  Clone ID: MRT4577_136030C.1.pep
MGRSPCCEKAHTNKGAWTKEEDDRLVAYIKAHGEGCWRSLPKAAGLVRCGKSCRLRWINYLRPDLKRGNFTEEEDELIIKLHSLLGNKXQPDRPQALRHPLRHXVLSVYDLFVGSXWSLIAGRLPGRTDNEIKNYWNTHIRRKLLSRGIDPVTHRPINEHTSNITISFEDWGQGKALKCPDLNLDLCISPPCQEEEEAMLLRPVKREEAGLCFSCSLGLPKSADCKCSNFLGLRTAMLDFRRLEMK

SEQ ID NO: 224171 - protein, 76 aa, Zea mays
  Clone ID: MRT4577_136031C.1.pep
PRVRPRVRITVWMMSELHCTCLSLLSYIVRGQAVSGCGQPASGAHAAGLFLLCAGRLVSLQLYIICYVVSDVQFMF

SEQ ID NO: 224172 - protein, 274 aa, Zea mays
  Clone ID: MRT4577_136032C.1.pep
MGRSPCCEKAHTNKGAWTKEEDERLVAHIRAHGEGCWRSLPKAAGLLRCGKSCRLRWINYLRPDLKRGNFTEEEDELIVKLHSVLGNKWSLIAGRLPGRTDNEIKNYWNTHIRRKLLSRGIDPVTHRPVTEHHASNITISFETEVAAAARDDKKGAVFRLEEEEERNKATMVVGRDRQSQSHSHSHPAGEWGQGKRPLKCPDLNLDLCISPPCQEEEEEMEEAAMRVRPAVKREAGLCFGCSLGLPRTADCKCSSSSFLGLRTAMLDFRSLEMK

SEQ ID NO: 224173 - protein, 68 aa, Zea mays
  Clone ID: MRT4577_136033C.1.pep
MRPSRKSGLVARMSIRIHPVPRLPRHICRTTPDIVSHSHIPTCTVGSRQSATVQSRARGKNSSSRPRF

SEQ ID NO: 224174 - protein, 307 aa, Zea mays
  unsure (1)..(307): unsure at all Xaa locations
  Clone ID: MRT4577_136034C.1.pep
GSTPLSRRGSPCCEKAHTNKGAWTKEEDERLVAHIRAHGEGCWRSLPKAAGLLRCGKSCRLRWINYLRPDLKRGNFTEEEDELIVKLHSVLGNKXPPRASPSPSYPSSFVSFPKLAGYVTCRWSLIAGRLPGRTDNEIKNYWNTHIRRKLLSRGIDPVTHRPVTEHHASNITISFETEVAAAARDDKKGAVFRLEEEEERNKATMVVGRDRQSQSQSHSHPAGEWGQGKRPLKCPDLNLDLCISPPCQEEEEMEEAAMRVRPAVKREAGLCFGCSLGLPRTADCKCSSSSFLGLRTAMLDFRSLEMK

SEQ ID NO: 224175 - protein, 91 aa, Zea mays
  Clone ID: MRT4577_136035C.1.pep
YLCYCGCIFWVLRGLIGGGSQGLVQQHMLAPGCSPGRRGPSFRGCMIQIPTLLCRHNAACSPQGFTEPFVILSYGLHAYLHSFPPEQTKTA

SEQ ID NO: 224176 - protein, 218 aa, Zea mays
  Clone ID: MRT4577_136036C.1.pep
MGRSPCCEKAHTNKGAWTKEEDDRLVAYIKAHGEGCWRSLPKAAGLVRCGKSCRLRWINYLRPDLKRGNFTEEEDELIIKLHSLLGNKWSLIAGRLPGRTDNEIKNYWNTHIRRKLLSRGIDPVTHRPINEHTSNITISFEDWGQGKALKCPDLNLDLCISPPCQEEEEAMLLRPVKREEAGLCFSCSLGLPKSADCKCSNFLGLRTAMLDFRRLEMK

SEQ ID NO: 224177 - protein, 156 aa, Zea mays
  unsure (1)..(156): unsure at all Xaa locations
  Clone ID: MRT4577_136037C.1.pep
SLDLTIRAQQVQXIVIPVINQVSLAILYPYFQQRQFLPFIKLSSLNRNDYLQHKLCPFSQLDIAYSQQHQLFPFKQLSALNADAYFTQQIVITFNQLSAXQAVXFMTQQQFSPLYQQFPANPASFLQIQQLLPFDQRAFTKCTVFDQRPNIGGALF

SEQ ID NO: 224178 - protein, 70 aa, Zea mays
  Clone ID: MRT4577_136038C.1.pep
RSSCLWHMYTWASDTMVDVTACFVGQNRKQRQRACASGGLALDKPLHRTGMHPISVIPSASGSGSKKPPT

SEQ ID NO: 224179 - protein, 113 aa, Zea mays
  Clone ID: MRT4577_136039C.1.pep
MFGKLNPLKVCAPVIVEEFAKLAHRLNFMYAYPLIESNKRIRLTQFLSSTYSTGGALRDSGFDTQEESFHQLDPYFPFDPYQLPVSKRWLTEDYVNWKSIPGLNAEDDEDSDD

SEQ ID NO: 224180 - protein, 191 aa, Zea mays
  unsure (1)..(191): unsure at all Xaa locations
  Clone ID: MRT4577_13603C.1.pep
GTLSPLXSLAMXXLNLEFPVRLXXNPHVISSDQVWVGVVPVGPSGHALNSSYRTRNTIQYKQELGTAIVNFARIVPDGLLVFFPSYSMMDMCVDFWKNRNHSNSASENTIWQRICKHKQPVIEPRQSSNFQSAIEDYRAKLHDSSSGAIFFAVCRGKVSEGLDFADRAGRAVIVTGMPFATPTDAKVRLKR

SEQ ID NO: 224181 - protein, 41 aa, Zea mays
  Clone ID: MRT4577_136040C.1.pep
TIKSTQDNLFSHPHTSGFGFFFYFHPTLIYLPFFHSTLLFI

SEQ ID NO: 224182 - protein, 53 aa, Zea mays
  Clone ID: MRT4577_136041C.1.pep
VAYDGPGLGAWGEIVFTAAETAEEEEEEGVQGCQTCGCGWNPFGRCQFYCHLR

SEQ ID NO: 224183 - protein, 55 aa, Zea mays
  Clone ID: MRT4577_136042C.1.pep
VTSPVVQHMGARSCVVSYTSSVLKLFPIPIDMIVQHLRCETYLEFICMLVMLYLI

SEQ ID NO: 224184 - protein, 51 aa, Zea mays
  Clone ID: MRT4577_136043C.1.pep
IRSVALLYAWPFLLNRTAVRMIRSRRSPDYPRRYKYMFAWNHGHSLQPLRP

SEQ ID NO: 224185 - protein, 74 aa, Zea mays
  Clone ID: MRT4577_136044C.1.pep
DSEDPVVDTKFRPMTVTHMSPGPQRCWGHFFQNICRDHNLIITQDQLSTGFLRTGPLAQLIACFAKTPPGQMLF

SEQ ID NO: 224186 - protein, 319 aa, Zea mays
  Clone ID: MRT4577_136045C.1.pep
MRKPECPAANSSNAGAAAAKLRKGLWSPEEDERLVAYMLRSGQGSWSDVARNAGLQRCGKSCRLRWINYLRPDLKRGAFSPQEEELIVSLHAILGNRWSQIAARLPGRTDNEIKNFWNSTIKKRLKNSSAASSPAATDCASPEPNNKVAAAGSCPDLSVLDHQDGGHHHAMTTTTAGLWMVDSSSSCTSSTSPMHQFQRPTTTMAAAVASGSYGGLVPFPDQVRGVVADTGGFFHGHAAPAFKHQVAALHGGGYYYGSAPRHHGMTTTTTTVALEGSGGCFISGEGMLGVPPLLLEPMSAVLEQDQGQTLMASSGSNNP

SEQ ID NO: 224187 - protein, 38 aa, Zea mays
  Clone ID: MRT4577_136046C.1.pep
ISCSELKEMMTALRSKTTSDEVKRMMSELDRNVDVYID

SEQ ID NO: 224188 - protein, 105 aa, Zea mays
  Clone ID: MRT4577_136047C.1.pep
LDTRGFHALIPLKVRIAGARTGCRSCYFSTTSLSMQKMIQGVIALVPLMVSGKFQDSVVVTLAGCLHQALFHRFKPGSQFPTYGLITAGVFTKQCVTRQNRNKQS

SEQ ID NO: 224189 - protein, 139 aa, Zea mays
  Clone ID: MRT4577_136048C.1.pep
MPRRSSGRSAPRPAPRAAPVRNPPQPARQAPPPAPVRDGGGSMFGGIGSTIAQGMAFGTGSAMAHRAVDAVLGPRTIQHETVASEAAAAAPAPPVMNADACSIHSKAFQDCLNNYGSEISKCQFYLDMLNECRRGGVSA

SEQ ID NO: 224190 - protein, 68 aa, Zea mays
  Clone ID: MRT4577_136049C.1.pep
KTEFRNPSIYEKLIQFCAIDELGTNYPKDMFDPHGWSEDSYYEALAKAQKIEMDKLEKAKKERTKIEF

SEQ ID NO: 224191 - protein, 77 aa, Zea mays
  Clone ID: MRT4577_13604C.1.pep
SRVLMRSSWWFCEVDSGYRIRRFWTSCVTTWCPGLSRRRAARSSARSPPLGLSSSTKTRTAATTIWRSRRLRARGLR

SEQ ID NO: 224192 - protein, 60 aa, Zea mays
  Clone ID: MRT4577_136050C.1.pep
KAKRVKANFPFKVKFKLPFKGQPKPVRFFAPLLKDNFNFFPEKLQLQVRLGKRRRQAPFL

SEQ ID NO: 224193 - protein, 138 aa, Zea mays
  Clone ID: MRT4577_136051C.1.pep
MPRRSSGRSAPRPAPRAASLRNPPQPARQAPPAPVRDGGGSMFGGIGSTIAQGMAFGTGSAMAHRAVDSVLGPRTIQHETLATEAPAAAPAAPAMNADACSFHSKAFQDCLNNYGSEISKCQFYLDMLNECRRGGVSV

SEQ ID NO: 224194 - protein, 139 aa, Zea mays
  Clone ID: MRT4577_136052C.1.pep
MPRRSSGRSAPRPAPRAASLRNPPQPARQAPPPAPVRDGGGSMFGGIGSTIAQGMAFGTGSAMAHRAVDSVLGPRTIQHETLATEAPAAAPAAPAMNADACSFHSKAFQDCLNNYGSEISKCQFYLDMLNECRRGGVSA

SEQ ID NO: 224195 - protein, 75 aa, Zea mays
  Clone ID: MRT4577_136053C.1.pep
KFFGASCNHGQNVMHRRGALGLGQRPDERAGKKPPLLSAVLGGRKPVHGGAARGPSGPAPWYIVPGAGRGPLYVP

SEQ ID NO: 224196 - protein, 87 aa, Zea mays
  Clone ID: MRT4577_136054C.1.pep
MAMRTALTSLPARLRAPAPPAATGGRRLLSDGKGRVLSEEVRAKESGYIQKMERERQEKLKKRLEQEKADSDKAKPADTDKKAEGST

SEQ ID NO: 224197 - protein, 139 aa, Zea mays
  Clone ID: MRT4577_136055C.1.pep
MPRRSSGRSAPRPAPRAASLRNPPQPARQAPPPAPVRDGGGSMFGGIGSTIAQGMAFGTGSAMAHRAVDSVLGPRTIQHETLATEAPAAAPAAPAMNADACSFHSKAFQDCLNNYGSEISKCQFYLDMLNECRRGGVSV

SEQ ID NO: 224198 - protein, 206 aa, Zea mays
  unsure (1)..(206): unsure at all Xaa locations
  Clone ID: MRT4577_136056C.1.pep
MSRLPSELVKDXISHSGADANESNRKFTETVPLPIGLNNYDPLKDXRFRGSATLSPIPRPKMTAWMLGDVHSVSYTKNTRLDYMYGAALDTLNMNLNLVMRIAKKYHAFLTSEAIICMIPRLXLGPGLNKXASKLPTLFTHHXSLLCNVNXTKVTDYVQVKNVLXCLRVAGGNLITEYKPIQHRLQMIVRFLVTLLKKNWQNVTCL

SEQ ID NO: 224199 - protein, 139 aa, Zea mays
  Clone ID: MRT4577_136057C.1.pep
MPRRSSGRSAPRPAPRAAPVRNPPQPARQAPPPAPVRDGGGSMFGGIGSTIAQGMAFGTGSAMAHRAVDAVLGPRTIQHETVASEAAAAAPAPPVMNADACSIHSKAFQDCLNNYGSEISNCQFYLDMLNECRRGGVSA

SEQ ID NO: 224200 - protein, 139 aa, Zea mays; identical to SEQ ID NO: 224189
  Clone ID: MRT4577_136058C.1.pep

SEQ ID NO: 224201 - protein, 139 aa, Zea mays
  Clone ID: MRT4577_136059C.1.pep
MPRRSSGRSAPRPATRAAPVRNPPQPARQAPPPAPVRDGGGSMFGGIGSTIAQGMAFGTGSAMAHRAVDAVLGPRTIQHETVASEAAAAAPAPPVMNADACSIHSKAFQDCLNNYGSEISKCQFYLDMLNECRRGGVSA

SEQ ID NO: 224202 - protein, 546 aa, Zea mays
  Clone ID: MRT4577_13605C.1.pep
MEGRNPVQRFVDSPKPYNRRKARGMQTRMDSSDHGDRQGPRACEELPGKMDNDRADRQRLKACEFPAKMDNNHADRQVSKACESKGNACELPGKMDNDHPVRQGLKARGLLQPKSDASGGGVCEGLKACGLTANKMDATDQCDHKGSKVCGVVTTKMDTSDQGDCQTFKVCGIAAKMDVNDHADHQGSKASGMPTKTDANDQCSNHFVTCPFKTAERLDHLLNQPANRYCADCGAPDPKWVSMTFGVFICIKCSGAHRSLGVHISKVVSVKLDEWADEQVDILADSGGNAAVNMIYEAFVPENYAKPRQDCSAEERNDFIRRKYEAQQFLTNPQLSCPPRRNEKHNHQQHSTSSSRHGLGHSFRNSWRRKEHEAKSTKKTIEVGMVEFVGLIKIDIIRGTNLAIRDVMSSDPYVIINLGHQTMKTKVVKSSLNPVWNERLMLSIPDPVPLLKLQVYDKDTFTTDDRMGEAEINIQPLVAAAKAHETSAIADTAQLNKWLAKDGIWIPRDSAISIVNGKVKQVVNARLQNVERGQLEMELECVPLTQ

SEQ ID NO: 224203 - protein, 78 aa, Zea mays
  Clone ID: MRT4577_136060C.1.pep
AQSISGMEDSSQFMQWALSTLQHDELPPATPPAAIAYDDNGCNTFSSVPALGYSAASVNSMVPAEPPAQEGPRATTAT

SEQ ID NO: 224204 - protein, 139 aa, Zea mays; identical to SEQ ID NO: 224197
  Clone ID: MRT4577_136061C.1.pep

SEQ ID NO: 224205 - protein, 86 aa, Zea mays
  Clone ID: MRT4577_136062C.1.pep
PRFVPRALVVFLAFALPQLSARARGNGRRSAGERGLWINTPRPHECASVLHLPGDDIEAASSSDTTSDSPGVSRQWRECSRNSSPP

SEQ ID NO: 224206 - protein, 135 aa, Zea mays
  unsure (1)..(135): unsure at all Xaa locations
  Clone ID: MRT4577_136063C.1.pep
PXCSKLPPMDVCPIGRRISQPAHVHLPPHRSFPGAGAGSSSPGRAPFQQGRPGPDGPCAAPPRGHHGARRLSPSSAAAASLVSMAPLTAMAPFHVLQRPPRHLPPWIPHASSREHGSFPLHGRRPPHGEQQAGAP

SEQ ID NO: 224207 - protein, 119 aa, Zea mays
  unsure (1)..(119): unsure at all Xaa locations
  Clone ID: MRT4577_136064C.1.pep
GALNSATYLXQQLLPFNQVAVVYQQQLLPLKQLAILNYPAYLQELQLLPFNQLAXVSPASYLTQPQXLAFYQHVAPIRCTLLQVEQLLPFNQLALSHPXTFYHHPIIGRRTTITFSYDV

SEQ ID NO: 224208 - protein, 47 aa, Zea mays
  Clone ID: MRT4577_136065C.1.pep
VQWYVGKGMKKGKFYEEDRNLKALKKEYKEVGIELDKGEDGDEGDEY

SEQ ID NO: 224209 - protein, 144 aa, Zea mays
  Clone ID: MRT4577_136066C.1.pep
MVQKSIQSFCKRRRGEPEPDIQKEILSVIAMKIRKHIRDEVGDAKFSILVDETCDVSKREQMALVLRFVDKDGVLQERFFDCVHVTNTRALTLKQELSHVLAIHSFDIQNLRGQGYDGASNMKGELMQKMWCLLANFFRSFCLS

SEQ ID NO: 224210 - protein, 133 aa, Zea mays
  unsure (1)..(133): unsure at all Xaa locations
  Clone ID: MRT4577_136068C.1.pep
MASPRGRMSFPLRSFLMICLMAQLGASNVVLMANNTTLSFDDVEAIFTPAVKGSGVNGVLYAVEPMDACSPLKTKAIGGSVSPFALVIRGGCHFDDKVRNAQNAGFKAAVVYDTEDNGVLGFMAGSSSGXHIY

SEQ ID NO: 224211 - protein, 68 aa, Zea mays
  Clone ID: MRT4577_13606C.1.pep
RPDFYCSLKCYLLFSSLELVSISFCLHFAGMCIYAFFLICVDRFLVGFWVARRCWALVSPCHCFSPVF

SEQ ID NO: 224212 - protein, 76 aa, Zea mays
  unsure (1)..(76): unsure at all Xaa locations
  Clone ID: MRT4577_136070C.1.pep
MATKXFSLLMLLALSTCVXNATILLECSQAPIASLIAPYLPSIIGXGCENLFIXPYRLKQEMGGSNIPLSKLMIKQ

SEQ ID NO: 224213 - protein, 60 aa, Zea mays
  Clone ID: MRT4577_136071C.1.pep
KYKTFYFFLHFSTKRANSTGAVSFLAFYKTLIKLPLAYYELLERGPLPIRNTLTNPISPS

SEQ ID NO: 224214 - protein, 74 aa, Zea mays
  unsure (1)..(74): unsure at all Xaa locations
  Clone ID: MRT4577_136072C.1.pep
SGAATRPAIVEAATSPWGHTEMAAYCACALPPLSCVSSYSSPRRFRRSGVVAMASVGQKVYAPGVAVXEGNGGL

SEQ ID NO: 224215 - protein, 154 aa, Zea mays
  Clone ID: MRT4577_136073C.1.pep
MINLFDLSAGMSSTNMLTDRARIDGSPACRSRQDAKRTVDPAKVYTNDKVGASNWSSSRNKSNASPLNVALEKEMSRELESKKKSPSVVARLMGLEEDLPGQEPALPSTKRNLKKRHLNGNLVKTNNLHRHQEQYHSGMTTCDKHIGPKETVEI

SEQ ID NO: 224216 - protein, 64 aa, Zea mays
  Clone ID: MRT4577_136074C.1.pep
FLFSLSKLIFFGFFFWVPAHFPAPRGKQRETVKRGWLPQPTLSTQPTAGKTTADPEKAKNKSPP

SEQ ID NO: 224217 - protein, 112 aa, Zea mays
  Clone ID: MRT4577_136075C.1.pep
YDAITVNGDLDWQDKLHKYNKPFFDVCDGLFSNYTWPANDPQDSATVAGDRQYDVYMGIDVFGRNTFGGGQWTTNVALDLLKTVDISAAIFAPGWVYDTKQPPDFQRAQNHW

SEQ ID NO: 224218 - protein, 101 aa, Zea mays
  Clone ID: MRT4577_136076C.1.pep
GYRPRRALVHGGGGSLIRRTGTLLSSPGDKPAPSKVEDVMPIATGLEREELEAELQVRGHSGFGLRNLNVIPAAFDVDFDAFSPGEEAAPSVLRLTCAKHK

SEQ ID NO: 224219 - protein, 228 aa, Zea mays
  unsure (1)..(228): unsure at all Xaa locations
  Clone ID: MRT4577_136077C.1.pep
HDRPRHTRHRAAXQXXAAXXDEVAXRASPXAARSRQXXXRARPRGGEXRXRXATRRXGGPXERARXERXXEXPRXXSXRRRXRXAPAKKXTREXXRCEAXXRESQKRETRRGGYRHGGVXPRRRRRHEXTTIEXXCXTTXXTEXDSAXANXXNXGXASRTXQXATAQAEEXXXXXXXXAXTGNAXPXVXGXEXXXXXXRXNTNPALXRGSXKTHRXXXXSRAXAGTXA

SEQ ID NO: 224220 - protein, 274 aa, Zea mays
  Clone ID: MRT4577_136078C.1.pep
MASSRALALALFLLCALLPAPPVSATLLFGGGESAKKAGVDAEWRPATATWYGEAEGDGSDGGACGYGTLVDVVPMKARVGSVSPVLFKDGEGCGACYKVRCLDRGVCSRRAVTVVVTDECPGGLCAFGRTHFDLSGAAFSRMAVAGAGGRLRDRGQLSVVYRRTACKYGGKNIAFRVNEGSTNFWLSLLVEFEDGEGDIGSMQIKQANSVEWLDMRHVWGATWCLVRGPLVGPFSVRLTTLSARKTLTARDVIPRNWTPKATYTSRLNFQPSL

SEQ ID NO: 224221 - protein, 204 aa, Zea mays
  unsure (1)..(204): unsure at all Xaa locations
  Clone ID: MRT4577_136079C.1.pep
ATGPRPNPQGSYRYGSISVTRTIRLASSAGLVRGRRRYAVNGVSFAEADTPLKLADHYNISGVFRLGGIPDAPXGGGXVRNETAVMDSDHRSFVEVVLENGEDGGVQSWHLDGYGVFVVGMDVGTWSKKSRDGYNLVDAVSRCTVQVYPRGWTAVLIALDNVGMWNMRSEVWARRYPGQQFYLRVYTPSHSFRDELPIPDNALL

SEQ ID NO: 224222 - protein, 97 aa, Zea mays
  Clone ID: MRT4577_13607C.1.pep
QLPPPRRLRRVLPRVLLQRCSTAAAAAPPARRGAPTEGSGEEEEVEEERRGEAAPARPAHRWPSVSAQLAHQISYHPPSVRRLCRAWQASSRTGRRW

SEQ ID NO: 224223 - protein, 96 aa, Zea mays
  Clone ID: MRT4577_136080C.1.pep
PPPILQVSFAYSGRPPFSGPFFLESPFSSFFFFPPFFHFGCQFAVVCNGTLVVGQCLWPPNTRLLYWPILCKTVSWCSLWCSVSGSLLKDVVKPPL

SEQ ID NO: 224224 - protein, 82 aa, Zea mays
  Clone ID: MRT4577_136081C.1.pep
VLFKLRTYGRPTSCLGFPVPFRKVWFSVSDTGEVLEEQTKERDQSGLNNGPDGPRGWPRPRGNNKMVTGPTWINFMEVLGEA

SEQ ID NO: 224225 - protein, 68 aa, Zea mays
  Clone ID: MRT4577_136082C.1.pep
SKPNGACSFVPRPMASKKRVPHEPPPCGCDGHGNCGLLRPYSLDRLSWVVQSFVQVPLNRTRGRTRGR

SEQ ID NO: 224226 - protein, 67 aa, Zea mays
  Clone ID: MRT4577_136083C.1.pep
LILSCRKKDPIPWKKMPKVLVYKKGFWGRLAYELVILYRPNFADRACVFCESINPSYCYENVRDVSM

SEQ ID NO: 224227 - protein, 55 aa, Zea mays
  Clone ID: MRT4577_136084C.1.pep
TTFGMVIQDSRQRDILDSMHGRTTKDSYYTLVLAYRGGEPQRHCLKAVPHQLTLV

SEQ ID NO: 224228 - protein, 148 aa, Zea mays
  unsure (1)..(148): unsure at all Xaa locations
  Clone ID: MRT4577_136085C.1.pep
MGPQAIEAHRAGAEAHRGAELSAEKSTELLAEAHLPRGLLPLFFFEEAGYNRATAFAWMSQSXPLTHTFRPIARQVCYAAEDTTTLEDRRRTRTTGANTKEPLTWDTLYDMLXDRDDPCKTTCKTPTXGIGRTYRGTDMPKEGAGDNG

SEQ ID NO: 224229 - protein, 92 aa, Zea mays
  unsure (1)..(92): unsure at all Xaa locations
  Clone ID: MRT4577_136086C.1.pep
GWDQCSGGREHGSGGGHHGSRGHGGNGGGHHGDGHVGNGGVDGYDGXDGYGRGGLGYDGANRAVMYGTSSSNWRMSSVGFGRACYLDKVREC

SEQ ID NO: 224230 - protein, 73 aa, Zea mays
  unsure (1)..(73): unsure at all Xaa locations
  Clone ID: MRT4577_136087C.1.pep
GFTGVRRVGGRPSVFLIAGSLGDSCQDGVHPRFTXXQAPTSMCCGSMDAVTLAGICSXVNPKEKMVLLGAADL

SEQ ID NO: 224231 - protein, 97 aa, Zea mays
  Clone ID: MRT4577_136088C.1.pep
SSCGKRKIFYIGSNSNVKDAKILILTYKYICIVVYICMYICTTPSIDRQLEMQHGPPNHSTWKSRKGKDDTFFISFFRSHSPCMTFLLMYCWRAPFQ

SEQ ID NO: 224232 - protein, 47 aa, Zea mays
  Clone ID: MRT4577_136089C.1.pep
CWCCLLVKTKEGPWSWGPESNYPSIVRLGNQYFGQGSLNVSWQQLGV

SEQ ID NO: 224233 - protein, 117 aa, Zea mays
  Clone ID: MRT4577_13608C.1.pep
SRPTTRSIMIATVSIYDSCAALLAKSAIIPALIELLNAQQEDDEFVCQIIYVFYQMVFHQATRDVIIKETQAPAYLIDLMHDKNNEIRKVCDNTLDIIAEYDEEWAKNIQSEKFRWH

SEQ ID NO: 224234 - protein, 111 aa, Zea mays
  unsure (1)..(111): unsure at all Xaa locations
  Clone ID: MRT4577_136090C.1.pep
MATESAFRLIGGTGARDWSKGFGAFGSSAGALSGEDLGFVDNDTGVYGGWNKSVPNRSGSAPPSIXENLLLALGHLIDQQSGSLEAXLTTLDNITDSSKFEEQLRADPAFF

SEQ ID NO: 224235 - protein, 145 aa, Zea mays
  Clone ID: MRT4577_136091C.1.pep
MAFMRSRSNASSGMGVAPNIRETFVELQMKKTFRYVIFKIEEKQKQVVVEKTGATTESYDDFLASLPENDCRYALYDFDFVTGENVQKSKIFFIAWSPSTSRIRAKMLYSTSKDRIKYELDGFHYEIQATDPSEADIEVLRERAH

SEQ ID NO: 224236 - protein, 110 aa, Zea mays
  Clone ID: MRT4577_136092C.1.pep
AHASVPFPILITSTPRRPLPTTLAMVSAAASPPPSGKPTQDELKRLAAHRAVELVEPGMTLGLGTGSTAAHALDRLGDLLRAGALPGVAGVPTSLKTDAQAARVGIPLLP

SEQ ID NO: 224237 - protein, 94 aa, Zea mays
  Clone ID: MRT4577_136093C.1.pep
KTQYPKQIGKHKTTNRTVSTHKEAGKNDESRANLGPWDNEHPEPTNTLAAEQMQHSKPYTPIKQPQGLLLRRGHNKPTNIIFEQPSKRANAHKK

SEQ ID NO: 224238 - protein, 211 aa, Zea mays
  unsure (1)..(211): unsure at all Xaa locations
  Clone ID: MRT4577_136094C.1.pep
MDSRGFDSTGREFSSATEMWAQEIGATASASATASEVPPGAAAAAAASSNGDAGEEAGGEGKREEWYSKGIAYWQGVEASTEGVLGGYGCVNDADVKGSAAFLRPILAERFGAAKRHLVALDCGSGIGRVTKNFLIKHFNEVDLVEPVAHFLEAXRENLSSCMDVGHDTHKAANFYCIPLQDFTPEEGRYDVIWIQWCIGQLTDDDFISFF

SEQ ID NO: 224239 - protein, 135 aa, Zea mays
  Clone ID: MRT4577_136095C.1.pep
IHGTGDPPQLRRNSAAGQSLTRRRCPVSPTVPMRWFTIPNYGSPNTKRRLRQTKRSTSHQLWTYGAVGNLAHDEAWYHYEFCVPASNCGESDRPRTNAINGPVSPDLVLHPDPVPQVGPAAKARSTYGDAEPFMC

SEQ ID NO: 224240 - protein, 83 aa, Zea mays
  Clone ID: MRT4577_136096C.1.pep
ARATIYHTRLAYKQVACSTLQQSVTHTITTGHGNNLCYPRLYNNSYHTYRPGFIHDTISIYFVVHELLTHLGIKITILVHHVL

SEQ ID NO: 224241 - protein, 56 aa, Zea mays
  Clone ID: MRT4577_136097C.1.pep
RGLSLPLKANCSNSWSTFPSVILNGESSLPLVNDHRGTNNCRDIKGSKRPNVVAIH

SEQ ID NO: 224242 - protein, 34 aa, Zea mays
  Clone ID: MRT4577_136098C.1.pep
VTSPERPSARCREPIQRSLPSQTSSKHLYNGRLV

SEQ ID NO: 224243 - protein, 66 aa, Zea mays
  unsure (1)..(66): unsure at all Xaa locations
  Clone ID: MRT4577_136099C.1.pep
DMFNEVPRFDPFPELPLVMSVGCVGHVVRCRDRMDFAPPLDCFRXGPPAPRLAGANRRGPGEGNVG

SEQ ID NO: 224244 - protein, 94 aa, Zea mays
  Clone ID: MRT4577_13609C.1.pep
IVVSFAPVIPLKLGLGVCYLQPFPRMGTPLPQRNRFKHIPGLPGSSLKKMFPPPPKFGGCCPFLFVPKFSLCGPPQGGPVFSKGPPPWETPLPL

SEQ ID NO: 224245 - protein, 129 aa, Zea mays
  unsure (1)..(129): unsure at all Xaa locations
  Clone ID: MRT4577_1360C.1.pep
RSTTRRPRKSTPLQPYSEVFGLSGCQGKLIHGRWAMLXTLGPYRQWLTGVTWQDAGKVELXDGSXYLGQPLPYXISTLIWIKCLXIGXIEFXRNAELTRRKAVPGGXYFDRSPGADPERGTAELRRSTR

SEQ ID NO: 224246 - protein, 106 aa, Zea mays
  Clone ID: MRT4577_136100C.1.pep
SAPRGKRPDQEAVPPGQPLLINKGSQGGAKGFPSSFFSFFAPPGIIVPCIRFWVGFGSGGIKYILPPPRDLGPSSDEKNPLLFLLFILVYPLSCVRLFSPAKCKKD

SEQ ID NO: 224247 - protein, 124 aa, Zea mays
  unsure (1)..(124): unsure at all Xaa locations
  Clone ID: MRT4577_136101C.1.pep
MPKQTGVKANGNLADDETAIRRNWTVRNGDPLVHLHIRQXHHGHGREEAKNVVWSRTGSXKLSWASDPEVFYMLNAVARQKELCVAINVCWGDQREKVCDATEXEELHLESLVMASRGLGQIQR

SEQ ID NO: 224248 - protein, 86 aa, Zea mays
  Clone ID: MRT4577_136102C.1.pep
NDGGFWCLDIETRAADIRRNPQICQESEGELNVLIIYYVIAWFSSLCNPNAYSESLPCLVSCDDFAFLLVPFTYSLVLNLISCFDA

SEQ ID NO: 224249 - protein, 124 aa, Zea mays
  Clone ID: MRT4577_136103C.1.pep
LKRDVLQGLYDTKWTLWIGPTGWTERRNGLYFTGPIEVDPSEIEFLEQIGSGSFGAVYAGKCRQKDVAGGVLAKQDFDQKTLEAFRHEVAVMSKIYHPNVNVFMGACTVPGNMMIVTELMRGEL

SEQ ID NO: 224250 - protein, 55 aa, Zea mays
  Clone ID: MRT4577_136104C.1.pep
PRRGCHVQRRLRQLAPPGAVCARAREPARSGQLDDAEAGGWHQPAGRDSQIPRAR

SEQ ID NO: 224251 - protein, 117 aa, Zea mays
  unsure (1)..(117): unsure at all Xaa locations
  Clone ID: MRT4577_136105C.1.pep
AVXXXXWXXXAVXAGCSXXRASXXXXXGRLGXXXXXXFXGPXXXXXXVLXVXGXXXCXXXXLXAPPPPXLXXGXXWLGXXXLAXXSVXXXXXLGXXPSXVXGXVGSPAPVXXXCPLS

SEQ ID NO: 224252 - protein, 46 aa, Zea mays
  Clone ID: MRT4577_136106C.1.pep
AWCCCAWFISMKTKARMAMGILIDFGSSVGEPPVLKKYSSSDCPFC

SEQ ID NO: 224253 - protein, 51 aa, Zea mays
  Clone ID: MRT4577_136107C.1.pep
ESSGGSWATGNAREADRGRLVYVPRRRGVAVTVGRERAEGTQASPDSLRSV

SEQ ID NO: 224254 - protein, 47 aa, Zea mays
  Clone ID: MRT4577_136108C.1.pep
GTVFAPKMGHNFNCKSFAGQNPPSIAPATYFTCQRKGGSAGKRFREK

SEQ ID NO: 224255 - protein, 47 aa, Zea mays
  Clone ID: MRT4577_136109C.1.pep
CNLVKANITPFPNWKKLMGRKVPWGKPQIEPGNKIFEYINHSRRCAN

SEQ ID NO: 224256 - protein, 123 aa, Zea mays
  Clone ID: MRT4577_13610C.1.pep
RSKLLKFWTVFFHFSSHLFYFFQESEKHMEELCSKIKVGDRCEVEPGAKRGTVKFVGRAEALGRGFWVGVQYDEPLGKHDGMVKGIRFFECPQGHGAIVRPEKVKVGDFPERDPFEDEDDDEI

SEQ ID NO: 224257 - protein, 73 aa, Zea mays
  Clone ID: MRT4577_136110C.1.pep
PRLHASLTNLGPVLFRHSQGGQEISGHGLDSGDDLCRHLIRPFLCRGWHRLRQRPSPTTSSRAVFIATPAVPG

SEQ ID NO: 224258 - protein, 72 aa, Zea mays
  Clone ID: MRT4577_136111C.1.pep
NSPLFLFSGQGSNPQILIRHPGASCMGNGALKQSGISLIGYPCLTRMNDGVLWSWDPEKKKKKKRATAVPAT

SEQ ID NO: 224259 - protein, 103 aa, Zea mays
  Clone ID: MRT4577_136112C.1.pep
KGGPLELQALMDPTHYQLVERLTTIQKRGGFFLAVSEGGKLTMAKGEVLNWGTTKTSGSGHKARILLELVKGFRVPPRIPPAPENFLLVWAGKNHPFKWQFWD

SEQ ID NO: 224260 - protein, 107 aa, Zea mays
  Clone ID: MRT4577_136113C.1.pep
PPSVPPWAGIKRPPEFVSPGPILPASARAAHAIGASNLILAPFRSFQGKGFGGPFNKVFRGPGASLKSLFPFFGGQGILGFFSPQKALKRDGVLPWPPWGVLPDQNP

SEQ ID NO: 224261 - protein, 49 aa, Zea mays
  Clone ID: MRT4577_136114C.1.pep
ELTEQALTVNVFQYRKEKSRTPLNRLNTYVRLPIFSQKHIKVRVTKSRA

SEQ ID NO: 224262 - protein, 76 aa, Zea mays
  Clone ID: MRT4577_136115C.1.pep
CLHHLRKKGSYCETRDICTISLLYQASVLIMIPMDMWLSITQMLIQMFSSFLGTVAHVAARGCSYTGTQIQGSELQ

SEQ ID NO: 224263 - protein, 45 aa, Zea mays
  Clone ID: MRT4577_136116C.1.pep
DLLSCHARATARIRPSCSPSHDSASRIRLQLAFCQIGRSCLESKA

SEQ ID NO: 224264 - protein, 60 aa, Zea mays
  Clone ID: MRT4577_136117C.1.pep
PPPLTHSWAQTHSRGTPNPVQRLRCTNAPPIKRQRLSHLQPERSNRDCLDSPTLREIHTC

SEQ ID NO: 224265 - protein, 54 aa, Zea mays
  Clone ID: MRT4577_136118C.1.pep
PLLCGRPDPQSSPWPASSSFPTGYNFVLLWMLLSAVGLVPLDIGVSYLQRRYCG

SEQ ID NO: 224266 - protein, 41 aa, Zea mays
  Clone ID: MRT4577_136119C.1.pep
QQLTYSIVYHILYFKFHYVNNTVSNIKQCFYDHMHDLLETT

SEQ ID NO: 224267 - protein, 245 aa, Zea mays
  Clone ID: MRT4577_13611C.1.pep
MASSKLQLPADDSVLLLITHSNLTTFAADIRVSQQTTVEALKDKLWRKTGTAVASMRLQLRDDSGTKIADLDDDAAPLAAYAPYNGYRIHVVDLDPSSLTSGGWLEDTSLVDKYKMSDETYDKLDTNFRKFKEKMVPKNSPSEDKEESEKHMEELCSKIKVGDRCEVEPGAKRGTVKFVGRAEALGRGFWVGVQYDEPLGKHDGMVKGIRFFECPQGHGAIVRPEKVKVGDFPERAFEDEDDDEI

SEQ ID NO: 224268 - protein, 91 aa, Zea mays
  Clone ID: MRT4577_136120C.1.pep
PWPPLSACGEPSGTRCFAQSVVLRGIDRACHTSQLTPGTPPPSALHACTTGEEILAQYLQQQQPGVMSSSHLLLTPCRVAPPYPQLFSSCS

SEQ ID NO: 224269 - protein, 103 aa, Zea mays
  Clone ID: MRT4577_136121C.1.pep
VTQAAHVDASLRAKDPATGSAPLASDRGGTLHQGPGGVRAPSCRNNSRPIPTWVSPTLTVMWAPQRLYPLGKQIGLGPVPGWAFSRPLRATTGHTLGGGAPSF

SEQ ID NO: 224270 - protein, 57 aa, Zea mays
  Clone ID: MRT4577_136122C.1.pep
RHTRLALDAARSERFAGGIMGSCLCQYMCCRVVSWVVTLHESNCSLKVAVSGSPTKS

SEQ ID NO: 224271 - protein, 130 aa, Zea mays
  unsure (1)..(130): unsure at all Xaa locations
  Clone ID: MRT4577_136123C.1.pep
INSSSSHTFISEKWRPMLLGVQXLSWRLAVKVANDQMLHCVHQLTKAKWYMSDYKFRLDLIFLPLLSVDLVVGMDXLQAYSPMKVDWYNKWMAXPYQGHTVXLQGVQSSLPTRPMFELRLSMGNSRTGQN

SEQ ID NO: 224272 - protein, 52 aa, Zea mays
  unsure (1)..(52): unsure at all Xaa locations
  Clone ID: MRT4577_136124C.1.pep
LTLSSLTCLCRLASSRCVSSAASAAFPSRAQKCPGASNPLSRPVXRIARDPG

SEQ ID NO: 224273 - protein, 54 aa, Zea mays
  unsure (1)..(54): unsure at all Xaa locations
  Clone ID: MRT4577_136125C.1.pep
AIQQIGSVVYGRGGTRVGKTGDXGSAYHYICQLLSCGPRTVPPTPDAAAHLALG

SEQ ID NO: 224274 - protein, 107 aa, Zea mays
  Clone ID: MRT4577_136126C.1.pep
HNHFQNAKFYTLTEHLILPEPIVMSKITWNKLSPAQQVMVKNAAKDAQADERVLWDAKSSSSEAKLKAAGVEFITVDKKPFYDATAPVRAKYGAAYADIIQRIDAVE

SEQ ID NO: 224275 - protein, 134 aa, Zea mays
  unsure (1)..(134): unsure at all Xaa locations
  Clone ID: MRT4577_136127C.1.pep
QQGQERARRAPQAGSATXAXKNPQRTRXPXAXXPQXXPPXTPXGXEHPAGQANRQQQAXAASAXQQPXAQXQQQXGAQRTQQTKATQQQQQQXRPAXSHPAXXNPATNLQQQXPATNPXAPANXAANQQQQQPQ

SEQ ID NO: 224276 - protein, 55 aa, Zea mays
  Clone ID: MRT4577_136128C.1.pep
LTTKLPYHKINKNFPIYYLAFILRKQVHPPTQLKTINSNKSKIFLTKRNIKVLSV

SEQ ID NO: 224277 - protein, 103 aa, Zea mays
  Clone ID: MRT4577_136129C.1.pep
MGRLAKEGKWAADRREVQTRLWQWAGEGKAGPKRFWDLQIGYNSPNSLREEPDSLVYQPCNGYLPRRPRANDHMAHRTVRCPTEKETNQSGFRCHHVHAVTIN

SEQ ID NO: 224278 - protein, 101 aa, Zea mays
  unsure (1)..(101): unsure at all Xaa locations
  Clone ID: MRT4577_13612C.1.pep
PTPAKPPHESGDTRQXXRPSQXPHXTXXXARXGPARPGXGAKRRGXAPXPTHGXXKXTXKXXGXHXRPEXPXXXTXXKXXHKXGPEXSXTGXXXPAETAKP

SEQ ID NO: 224279 - protein, 123 aa, Zea mays
  Clone ID: MRT4577_136130C.1.pep
AEGCHCSHSATTRLGQHTLLINRRKAASLSEKSLRCRSGKHRKQQPLTEAAATKLHFLSPHQASLSHIACSIRHVMSICHLPNDQTRELAQAGCHETQFQFVMTSAHGVLGTAGRPSRMNRPV

SEQ ID NO: 224280 - protein, 93 aa, Zea mays
  unsure (1)..(93): unsure at all Xaa locations
  Clone ID: MRT4577_136131C.1.pep
SELRSCSALCVPSLLAPXVRVARTGRLPFCAHSTTYGRVTMSVECMPGQLRPAHLDGSSTGDFGFYPLGLATVPENFLRYKESEAYHCRWAML

SEQ ID NO: 224281 - protein, 188 aa, Zea mays
  Clone ID: MRT4577_136132C.1.pep
PSNQEAGRLRHHRCSSSKSSAAAACKSYRGVRRRPWGKFAAEIRDTRRRGARVWLGTFATADDAALAYDKAALRMRGPRACLNFPLDVVQRALADGGGRAETTPRVLRRKRRRANHDDAAGGDDTRSDGSVAAATARDPTTTMVSFACAKKDDQVMTPLMAQERSVSDPGAVIEFEDIGGDPAGSRSQ

SEQ ID NO: 224282 - protein, 45 aa, Zea mays
  Clone ID: MRT4577_136133C.1.pep
GGSSIAHYSASSVTESLCWVDLLRIAVSTDSKAVIRLSTQALDSA

SEQ ID NO: 224283 - protein, 120 aa, Zea mays
  unsure (1)..(120): unsure at all Xaa locations
  Clone ID: MRT4577_136134C.1.pep
AHTRKTQDGGTDQIXTIAGKGSATXVQGGGGXISLHFLLNXLNRLTDIXDXFFAQSTVTELPFFASNVRFKRNRVQEAFHLGELNDLYKXGLDNLKGDLNTSIAKGFTSSHRKLSTLPGF

SEQ ID NO: 224284 - protein, 95 aa, Zea mays
  Clone ID: MRT4577_136135C.1.pep
MLHHIVDCITKHIVVGSEMMSSVVVDAAATSSSEKKTSWPEVVGMSIKEATETILKDMPNAYIQVLPVGSPVTLDLRPDRVRIFVDTVAMTPTVG

SEQ ID NO: 224285 - protein, 77 aa, Zea mays
  Clone ID: MRT4577_136136C.1.pep
MMSSVVVDAAATSSSEKKTSWPEVVGMSIKEATETILKDMPNAYIQVLPVGSPVTLDLRPDRVRIFVDTVAMTPTVG

SEQ ID NO: 224286 - protein, 59 aa, Zea mays
  unsure (1)..(59): unsure at all Xaa locations
  Clone ID: MRT4577_136137C.1.pep
ALXXFFXFFXFFFFFXFFFFFFFFFFFFFFFFFGQLNPPVNGPGTNNYYRSELPNRVLN

SEQ ID NO: 224287 - protein, 130 aa, Zea mays
  Clone ID: MRT4577_136138C.1.pep
MADPELEAIRKRRMEELMAKHGGGGANQQNASQQKAQEDAKQEAEERRQMMLAQILSSEARERISRIALVKPDKARGVEDVLLRAAQTGGISEKVSEERLISLLEQINTHTSKQTKVTIQRRRSVLDDDD

SEQ ID NO: 224288 - protein, 77 aa, Zea mays; identical to SEQ ID NO: 224285
  Clone ID: MRT4577_136139C.1.pep

SEQ ID NO: 224289 - protein, 131 aa, Zea mays
  Clone ID: MRT4577_13613C.1.pep
FVGGLNLFPLFGGETPLAKKKNSPLVFFPSPINIFCKQKSPPFGGLFIRPGFSEGPPPSFFSIKVVVLCPLWPFFSPSQGEVETPPPLLHMFFKAVFSPRWSPCGYSRPGCHSGTQFAAFCMPPLSPGFPP

SEQ ID NO: 224290 - protein, 83 aa, Zea mays
  unsure (1)..(83): unsure at all Xaa locations
  Clone ID: MRT4577_136140C.1.pep
MARRRAALAALLVLLLLAACTAAAAAVTVSRKQRQQRQHRGGAPASAARSCDPFAAAGAWVEDXXXPVSGWARWPFVRAAFGG

SEQ ID NO: 224291 - protein, 60 aa, Zea mays
  Clone ID: MRT4577_136141C.1.pep
WMYGKNVTGRYYSKTWTPGKIRADPYISSKPFREKSKPNHTYSRSNHLYLQLPRPQKALK

SEQ ID NO: 224292 - protein, 117 aa, Zea mays
  Clone ID: MRT4577_136142C.1.pep
PEKHPGATPALHKWAPREVPFWEGRGGVWLPPCSPIGQGGLTVLIGPLKLTWAPPSRPFFLAFALGVVCSKRLVWAPKINFSKRVFPIFRGYKFKFPVTNHQKNFFCMPPKKKGPKV

SEQ ID NO: 224293 - protein, 68 aa, Zea mays
  Clone ID: MRT4577_136143C.1.pep
NIFTHFVLCFTQFGLDIAFWTTKILVVRKINNNPRCIGEYPLPLFDTQCHTLPVFLGQLIECSRENNI

SEQ ID NO: 224294 - protein, 35 aa, Zea mays
  Clone ID: MRT4577_136144C.1.pep
SVVLPELAHILSRVTVALTFDNIGQKKWLGARILS

SEQ ID NO: 224295 - protein, 176 aa, Zea mays
  Clone ID: MRT4577_136145C.1.pep
TSKLATKTTKTKVPTTKPPNLRPRPQRQNAQPQDEQAIADLQTVGDFLTDNVEVSEDDPINATKKRPARGITKMEGIFSRSPEMPKIKILLNDRGQPIGKSARQLSSAIGCQVRKKLSIATTDWRLVDINKKYELWEDIKTYYDVDAAALNWVMRTAGKKWKQFKASIKQRYFNPE

SEQ ID NO: 224296 - protein, 81 aa, Zea mays
  Clone ID: MRT4577_136146C.1.pep
CLRRRLGGLPSMGRRRRRRLTSEARPSSESVQVTNTNQVTLLCYLYFTDCYEHELELFCSRLISPLAGPLWSLRWRLHLGH

SEQ ID NO: 224297 - protein, 67 aa, Zea mays
  Clone ID: MRT4577_136147C.1.pep
TRETFGNQKKKKNRCCLVGFFQNSPVMFLSKCPPFKCFSSKIVGCKIFFVKSFFNPPKFKNFSKLAH

SEQ ID NO: 224298 - protein, 60 aa, Zea mays
  Clone ID: MRT4577_136148C.1.pep
SESVELERALSTLRCLPHVHALCLLMFYLYASVYCVCVCVPTRAPVCMRSCCPDWLSQAS

SEQ ID NO: 224299 - protein, 60 aa, Zea mays
  Clone ID: MRT4577_136149C.1.pep
ETQYEVHAFASVMTNGYRVLEYIVAQSIIFQIYDVPINALVSLHFILYFDIDYTLMFHHL

SEQ ID NO: 224300 - protein, 91 aa, Zea mays
  unsure (1)..(91): unsure at all Xaa locations
  Clone ID: MRT4577_13614C.1.pep
MSDTKSALVQHAFYEASGPTVIEYITYGXATIVTCHDAPXRYLVDGVFGSHIVPCHSYKTANILVSFFDKCKPDPSFWNKISQGDHQRIYD

SEQ ID NO: 224301 - protein, 81 aa, Zea mays
  unsure (1)..(81): unsure at all Xaa locations
  Clone ID: MRT4577_136150C.1.pep
LSQISMAMVLVPCARLSGKWVAIYRRGLLYGRAWRVDLCLNERTSSCCPCSAAPSVVDRYVPGWLGRSSCPPHALLXHAGE

SEQ ID NO: 224302 - protein, 85 aa, Zea mays
  Clone ID: MRT4577_136151C.1.pep
GLLLLASSSLLSALIAAQQSGPADLHSKCDGGASDDDRKAEDFTPTAYDHSLYYLHMHNPLTATSHYTAQTKSRGGVTPRILSIL

SEQ ID NO: 224303 - protein, 106 aa, Zea mays
  unsure (1)..(106): unsure at all Xaa locations
  Clone ID: MRT4577_136152C.1.pep
YSPGPKGIPPVRAPESQGTRGRGQIGRETPFRGSQKGPWGVPGGIKGQTDRPGKPGKPGPXAPRMXSGETPKGAPGXELPSTPGGGKKTPGTRGGGGPPGEPPYGG

SEQ ID NO: 224304 - protein, 67 aa, Zea mays
  Clone ID: MRT4577_136153C.1.pep
IHFYCYLTFIIKIVHNSLALYWVKERIRRILPTILTSTSNSCGQKKNALNIYLETHSEHDCTHTLDA

SEQ ID NO: 224305 - protein, 190 aa, Zea mays
  unsure (1)..(190): unsure at all Xaa locations
  Clone ID: MRT4577_136154C.1.pep
MSSPSKRREMDLMKLXMLDLSWMMSDYKVETVNDGMQEFFVEFKGPAESIYQGGVWKVRVELPDAYPYKSPSIGFINKIYHPNVDEMSGSVCLDVINQTWSPMFDLVNVFEVFLPQLLLYPNPSDPLNGEAAALMMRDRPVYEQKVKEYCEKYAKPEDAGITPEDKSSDEELSEEEDDSGDEAILGNPDP

SEQ ID NO: 224306 - protein, 74 aa, Zea mays
  Clone ID: MRT4577_136155C.1.pep
LLLYPNPSDPLNGEAAALMMRDRPAYEQKVKEYCEKYAKPEDAGITPEDKSSDEELSEEEDDSGDEAILGNPDP

SEQ ID NO: 224307 - protein, 53 aa, Zea mays
  Clone ID: MRT4577_136156C.1.pep
GANILSHVSAEYCEKYAKPEDAGITPEDKSSDEELSEEEDDSGDEAILGNPDP

SEQ ID NO: 224308 - protein, 81 aa, Zea mays
  Clone ID: MRT4577_136157C.1.pep
YAISSSTTLFIIGQICLCNIDTKVTTCSPHASAEYCEKYAKPEDAGITPEDKSSDEELSDDDDDDDDNDSGDEAILGNPDP

SEQ ID NO: 224309 - protein, 81 aa, Zea mays
  Clone ID: MRT4577_136158C.1.pep
PLHPKTVLQRVDQFHHEFQSLKFKHGQAFHKVQQHPFPIKVIEFPYPTPLKKWFFSIQLPTKNFSFAFPNTIQTIPNYNIP

SEQ ID NO: 224310 - protein, 189 aa, Zea mays
  Clone ID: MRT4577_136159C.1.pep
MSSPSKRREMDLMKLMMSDYKVEMVNDGMQEFFVEFKGPAESIYQGGVWKVRVELPDAYPYKSPSIGFINKIYHPNVDEMSGSVCLDVINQTWSPMFDLVNVFEVFLPQLLLYPNPSDPLNGEAAALMMRDRPVYEQKVKEYCEKYAKPEDAGITPEDKSSDEELSDDDDDDDDDNDSGDEAILGNPDP

SEQ ID NO: 224311 - protein, 122 aa, Zea mays
  Clone ID: MRT4577_13615C.1.pep
FFFFFFFFLGFFFFFGGVFFFFFIFFFTNKWRRTQKKRGGKKTKHKGGPPGGEGARKGKKNSVKTESFPQGGCKNPYVLTKTQGACKMEIFLTFSAQGGGKPLNKKKPPMLGVIKPHPSGKW

SEQ ID NO: 224312 - protein, 177 aa, Zea mays
  unsure (1)..(177): unsure at all Xaa locations
  Clone ID: MRT4577_136160C.1.pep
PPPCGFFFGTGFGGPLFLFPRAPLPYKAFGVGKTAQKAPFAFFGPRPLXPPGIVVVPGFGFGPVPGPGPVKGPLPPREDXIPRGVPPFRAFLWGFLVGARVLPVPGGGAPRVAPTKIRPPPLSLGLGGGVTCLLKGRPMSSVGPFFGHWGNFCSKKKKKKKKKKKKKKKKKNKKKKK

SEQ ID NO: 224313 - protein, 154 aa, Zea mays
  Clone ID: MRT4577_136161C.1.pep
MILPNKFALNLVGIYQGGVWKVRVELPDAYPYKSPSIGFINKIYHPNVDEMSGSVCLDVINQTWSPMFDLVNVFEVFLPQLLLYPNPSDPLNGEAAALMMRDRPVYEQKVKEYCEKYAKPEDAGITPEDKSSDEELSEEEDDSGDEAILGNPDP

SEQ ID NO: 224314 - protein, 143 aa, Zea mays
  Clone ID: MRT4577_136162C.1.pep
RSSWTSSPAHVVSTTCSSTSMICFPIACCLRRFSELLVVLDPASLQLVVVPCVIKKSQESGEDGANSVIFPKCSAKGQNKNYRRLCEVLLNIERFQELWMEKKVKLRSILVSCLIEDFNRKLSSFPQTLNRVDNGEPNHYIFT

SEQ ID NO: 224315 - protein, 44 aa, Zea mays
  Clone ID: MRT4577_136163C.1.pep
PVVYPLRRLLPLLVPYSPMKFPYPWRFCFNPSTVIKLPPGSPIK

SEQ ID NO: 224316 - protein, 169 aa, Zea mays
  unsure (1)..(169): unsure at all Xaa locations
  Clone ID: MRT4577_136164C.1.pep
NIERAPGVPHXSFFAALSSPRSSPRSSSRCPASGPFSSTCSAPSAHSSRGALVVFVFVMSYPMSLVLVELGWLLVTALARSCRLGRRVPTGGVTRRQEQLKWVRGLXRDNASLADGSACGSRSXQRRGRARRHAAAAVAAGNGGGGEKVCHLGDLVSCFRYVRLLDLVA

SEQ ID NO: 224317 - protein, 66 aa, Zea mays
  Clone ID: MRT4577_136165C.1.pep
PGGVRRHYLWGGDAPGFFLELPPALACKRGWGNFFKTPPPEGLVLFFFFSKYIHPRPAFLKFFLVF

SEQ ID NO: 224318 - protein, 76 aa, Zea mays
  Clone ID: MRT4577_136166C.1.pep
GCYVGFFPSVIACMLSKKKKKKKKKKKKKKKKKKKKKKKKKKFNAPQAKPLIYQYKKKLKEHITIYLSASNLGGVG

SEQ ID NO: 224319 - protein, 56 aa, Zea mays
  unsure (1)..(56): unsure at all Xaa locations
  Clone ID: MRT4577_136167C.1.pep
ELHSSRLFLAVGLQCRAYVKMLHFCLHGRVDLLKTXFVCSEVAWLCQLFTLTRDEI

SEQ ID NO: 224320 - protein, 270 aa, Zea mays
  Clone ID: MRT4577_136168C.1.pep
MAVNVRTMWSSMRAHVAMVVALVFLVSGAWCGPPKVPPGKNITATYGKDWLDAKATWYGKPTGAGPDDNGGGCGYKDVNKPPFNSMGACGNIPIFKDGLGCGSCFEIKCDKPVECSGKPVVVHITDMNYEPIAAYHFDLAGTAFGAMAKKGEEEKLRKAGIIDMQFRRVKCKYDSKVTFHLEKGCGPNYLALLVKYVDGDGDIVAVDVKEKGSDTYEPLKHSWGAIWRKDSDKPLKGPLTVRLTTEGGTKSVYDDVIPANWKANTAYTAK

SEQ ID NO: 224321 - protein, 85 aa, Zea mays
  Clone ID: MRT4577_136169C.1.pep
SPVSSRQHSPTRHLFSPSLAAPSSLASPPQHLSVPRILPPLTGRLGPCFVPFTLSSFVAARCRRRRPAPPGPAALLHGVAPMTLQ

SEQ ID NO: 224322 - protein, 62 aa, Zea mays
  unsure (1)..(62): unsure at all Xaa locations
  Clone ID: MRT4577_13616C.1.pep
MAEMLQYMQSLGATQGFAPPPPLFPPVDPAXFHTPGQFTTASNNPHESPSLSPHQSSRPPRP

SEQ ID NO: 224323 - protein, 83 aa, Zea mays
  Clone ID: MRT4577_136170C.1.pep
AEKLNVEEIVENQRKDVKKPQLDRYKALRQPAASQSALIHTAKRKIYECTLMTTIAHGTDKTTRHYLPTKVKKLVVHNGLAPE

SEQ ID NO: 224324 - protein, 106 aa, Zea mays
  Clone ID: MRT4577_136171C.1.pep
MAAVTAPVEVPAAAPVRTVKVTNVSLSATEQDIKEFFSFSGDIEHGDMKSGDEWSQIAYVTFKDAQGAKTALLLSGETIVDLSVIIAPAPENQPPPTASAPLMSGT

SEQ ID NO: 224325 - protein, 60 aa, Zea mays
  Clone ID: MRT4577_136172C.1.pep
VWDELDLDLDAVPGAEMDRREADKGVAGFHDVEDLSGRPCGWGDEFSYLAEPMQFVEHYD

SEQ ID NO: 224326 - protein, 152 aa, Zea mays
  unsure (1)..(152): unsure at all Xaa locations
  Clone ID: MRT4577_136173C.1.pep
TFFFFFFCTRFIFFFFFFFFYFFFFFFFFFYFFFFFFFFFFCTPRGGRLGGFIQLPGGFFLGFLPLNPLVVLSSSVYFCWKNFLPFSLLPKVSPGTFWVQPXVVXLEQYTIINAGSFLPLQQLKKLGHLVFTYKQHSCQEPILVGGLFLIFP

SEQ ID NO: 224327 - protein, 108 aa, Zea mays
  unsure (1)..(108): unsure at all Xaa locations
  Clone ID: MRT4577_136174C.1.pep
WVPVPPVRTSSTVYDDALAPEGQCANASLAGSPCSVASDCTSVASADSEGVXMGFFGAAAGAKVGLAPMVFKDSAASTASVEAKPRVAPGGRSVFAVNCVPLWGYPTI

SEQ ID NO: 224328 - protein, 95 aa, Zea mays
  unsure (1)..(95): unsure at all Xaa locations
  Clone ID: MRT4577_136175C.1.pep
GGGGGSSKKKEATKPVNPLGVGPLKRENTFFFFYMEGIFSPENSGLPICLGQPRFCDTWGGDVLGGLSFFIRPPFVGFLFPXRTRSATRPSHEPS

SEQ ID NO: 224329 - protein, 49 aa, Zea mays
  Clone ID: MRT4577_136176C.1.pep
QCDTTNPVTIHHLSNTTAMGKHLCIMTGPQDTCETTKDHTFFWSKRQVN

SEQ ID NO: 224330 - protein, 33 aa, Zea mays
  Clone ID: MRT4577_136177C.1.pep
CLLMFRFLSLQSILLATCYNFIYLKPVSNLHLL

SEQ ID NO: 224331 - protein, 384 aa, Zea mays
  unsure (1)..(384): unsure at all Xaa locations
  Clone ID: MRT4577_136178C.1.pep
MRPPPPPPPPQVAGCDLYRGRWTFDAAGEPXRCTRESECEFLTEQVTCMRNGRRDDSYQKWRWQPDGCDLPRYDARLLLERLRNKRLMFVGDSLNRNQWESMVCLVQSVVPWGHKTLHKFVNNGSLNVFTAHDYNATVEFYWAPFLVESNSDDPQAHSVMNRVIAWRAIAKHAKNWKGVDYLVFNSYIWWLNTFEMKVIRRHQHQLEKEEEGVRWSKYALVDRPVAYREVLKTWARWVDRHIDPNRTRVFFMGMSPNHVTPWAWGNDGGIKCAMETQPISNNRTGRLDIGTDWRLHGVARGVLARYLRRVPVHFVDITGLSELRKDAHTSVHTLRQGKLLTPEQQADPKTYADCIHWCLPGLPDTWNHFLYAHILSLSSSAQDH

SEQ ID NO: 224332 - protein, 42 aa, Zea mays
  Clone ID: MRT4577_136179C.1.pep
PLNALPSIPLSYNLLLFMSSINSPKAETETCRPEDYSESVLT

SEQ ID NO: 224333 - protein, 88 aa, Zea mays
  Clone ID: MRT4577_13617C.1.pep
ARPRSCGARSVTYWQRYEMYGWYLLNLSFVWPQWSPCRVWVGVSCLDGSVSVCSVVGVEGASVRLVVRACTLHCLVGDHVPAPFFGYP

SEQ ID NO: 224334 - protein, 53 aa, Zea mays
  Clone ID: MRT4577_136180C.1.pep
EGRAHRHLAPFTTEQNYNLKTTGNKTLSTQLLCKTYPIKENALQGMLDWWDSR

SEQ ID NO: 224335 - protein, 127 aa, Zea mays
  unsure (1)..(127): unsure at all Xaa locations
  Clone ID: MRT4577_136181C.1.pep
MGLAFGMVISRLFGKRGNRILMGGTYSAGKTTILYMLNRAXIVTTIPTIGFNAETAEDTCITCTVWDVGGQDKIRPLWRHYFQNTQGLIFGGDRTDRDRVVEARDELHRMLNEDELHDAVLLXFANK

SEQ ID NO: 224336 - protein, 74 aa, Zea mays
  Clone ID: MRT4577_136182C.1.pep
MMQYLLAIIHLYFSQKCSPYNSLRVLLCRHGKVYSMANNCFLLKFSFPLSGMTRAKILYGMERDMMLIGDYMQP

SEQ ID NO: 224337 - protein, 117 aa, Zea mays
  Clone ID: MRT4577_136183C.1.pep
AQLSSYLELCRDLGVLNAAEFPAVERVSDDDIRDLEKIIMNHVVEERGKDVEKETKALVAVEETRLASKTVVTKEWVVFDDDDNDAAGARPRSLGSYMNPFMAAPWDTVACSRDLLV

SEQ ID NO: 224338 - protein, 68 aa, Zea mays
  Clone ID: MRT4577_136184C.1.pep
TSQFLGGLHSGPPGIARRSNSSAAGRPPSADHLLCVTILGQEQVPLDEAHEGCCDEFVSGLGRHLPVN

SEQ ID NO: 224339 - protein, 63 aa, Zea mays
  Clone ID: MRT4577_136185C.1.pep
YRLRIQTVLVLPVHRRHSKCQRRPCPTQGRKTSWNERLTLPVVEVATVQSEHVLSWREQHIPT

SEQ ID NO: 224340 - protein, 53 aa, Zea mays
  Clone ID: MRT4577_136186C.1.pep
SVAIYQEWIVQVLIYGDDSNMVLSHSIDHNVLNMVLDKELDQDSGLGLQKFNQ

SEQ ID NO: 224341 - protein, 83 aa, Zea mays
  unsure (1)..(83): unsure at all Xaa locations
  Clone ID: MRT4577_136188C.1.pep
TYNIQHTIKTNILPLSHLLLQQSLSLLHQXPLLHLFTQNIITQQLQQLILSNLXSYFHKQXLLPYNQLSSIKLYLXLQQQQLP

SEQ ID NO: 224342 - protein, 149 aa, Zea mays
  unsure (1)..(149): unsure at all Xaa locations
  Clone ID: MRT4577_136189C.1.pep
RNRNFPXRVSSGFSGGSGFLRWAGCEMAAYRCLSTACYRAAGLALRTRHDHCPSTTSFSTLRARILGRPRIIPSHRQPRXRWAGGFRXFVTLSPRQRGRSREPPSRGHVTGKGAWDGALTLTRSIEDPTPPRAGAWRTGGRRGTGGRHV

SEQ ID NO: 224343 - protein, 61 aa, Zea mays
  unsure (1)..(61): unsure at all Xaa locations
  Clone ID: MRT4577_13618C.1.pep
RAWDKVVGVNILDTGRVLRQSTWAXRFAALHVAKEVIPHPXSIREFFKVLQARSSSAASSS

SEQ ID NO: 224344 - protein, 89 aa, Zea mays
  Clone ID: MRT4577_136190C.1.pep
KPGLAGNRTSTTCVHSGDSDMEEMVTTAVDKGQMLSGIGVLLRGQHGVPLVKSVTGRKILRLLKGHGLGPENPEDLYFLLKKAGGVWKH

SEQ ID NO: 224345 - protein, 44 aa, Zea mays
  unsure (1)..(44): unsure at all Xaa locations
  Clone ID: MRT4577_136191C.1.pep
VVLQFPVGRIGRYLKKGRYAQRVCTGAPVYLAAVLXYLAADVLW

SEQ ID NO: 224346 - protein, 291 aa, Zea mays
  Clone ID: MRT4577_136192C.1.pep
SLDLRVRKLLIGRGERFLKIEQPPASFLAAMEEYVSNAPLASTVQRNQAVLAIEDSKKSEVEESQPTLPPPHSPAQEPGPEPVQQVPPAAEPTDLLGINEPTPATSEIDQKNAGALAMVPQDNAPKAPASTTSSGSVETSWELALVTAPSSNGTAVTPSKLAGGLDLLTLDSLYNEAHRRAQQNASYSPWETNPASGPVMQQQMYDPFYASNHPVAAARNVQMAAMEQQQQQQHAFVLQQQQQQQMIVMMMAQQQQQQASSNPLYTAAAAHTYGAGVQLHAGNAYSGAGMM

SEQ ID NO: 224347 - protein, 47 aa, Zea mays
  Clone ID: MRT4577_136193C.1.pep
RAVRPVRIAYRAFALRFVGGPTIYYLDSRRIWFTSLPTAMEVRSRSS

SEQ ID NO: 224348 - protein, 298 aa, Zea mays
  unsure (1)..(298): unsure at all Xaa locations
  Clone ID: MRT4577_136194C.1.pep
AIRALGMYRRAIEQAEQLSEFYEVCKSIHIGRGERFLKIEQPPASFLAAMEEYVSNAPLASTVQRNQAVLAIEDSKKSEVEESQPTLPPPHSPAQEPGPEPVQQVPPAAEPTDLLGINEPTPATSEIDQKNAGALAMVPQDNAPKAPASTTSSGSVETSWELALVTAPSSNGTAVTPSKXIQAEIIHIYFTLHLASLXHTKLNLLQAGGLDLLTLDSLYNEAHRRAQQNASYNPWETNPASGPVMQQQMYDPFYASNHPVAAARNVQMAAMEQQQQQQHAFVLQQQQQQQMIVMMMAQ

SEQ ID NO: 224349 - protein, 148 aa, Zea mays
  Clone ID: MRT4577_136195C.1.pep
VAVHASWPWTVLAQATVMPWEMVRVPAPGFRFCRTDLCSVLAVFSASNLGAVASSSATVVLSAPARVHGRVGQVRQRSITSSTIVAVACARARYPLLDLVVVLRSARFRSKRRPSSSRPWWTRTSVSCPFVHAVDPYEHRVSLESCCR

SEQ ID NO: 224350 - protein, 175 aa, Zea mays
  Clone ID: MRT4577_136196C.1.pep
MVESVAASPSEEQGRGGGLSLPPGFRFHPTDEEIITSYLLREFLDPSFVSRAVGEVDLNSCEPRDLPGKANKGEKEWYFFVHKDLKYPTGSRANRATKEGYWKATGKDREIFKPRARELVGMKKTLVFYTGRAPRGAKSEWVMHEFRLEGKSRGQTMNNPKDEWVVCKVFNKKGE

SEQ ID NO: 224351 - protein, 131 aa, Zea mays
  unsure (1)..(131): unsure at all Xaa locations
  Clone ID: MRT4577_136197C.1.pep
TRGARSAARRREHSHREQNADTHTQSAAHRXAKPKEGADEHPHARAAXKGNRRRARRHQXRDPAAEHGXXKXADRTPAEXRRTDXXXRKARRARRREPGEPAHEAPGPPTEGRPDXXDGRDHGAGGPATNQ

SEQ ID NO: 224352 - protein, 61 aa, Zea mays
  Clone ID: MRT4577_136198C.1.pep
FIFFPSKDGERKRYKGKARERRRRLICCRSAKRKRKRSAGVVKMFLSDCLYGALKSLDLIE

SEQ ID NO: 224353 - protein, 128 aa, Zea mays
  Clone ID: MRT4577_136199C.1.pep
SNIEDLFKNKILNHGTHLEHFSLPRKKRTWDCPFYEPWLHKRSQSKVLKKYWSKPHPPSCKPFPLPMRGPPQTNTWSSSCLTKGPLKGDQKTLSIPPFSKKAPKEGFSPVSPQKPTLKKGLPFGPLFL

SEQ ID NO: 224354 - protein, 64 aa, Zea mays
  unsure (1)..(64): unsure at all Xaa locations
  Clone ID: MRT4577_13619C.1.pep
YVPVPPTPRPSPRYVPPYVPVPPTPRPXPAYVAPTPXTATTDNVPPTPIYVAPTPRSLPAYGPF

SEQ ID NO: 224355 - protein, 47 aa, Zea mays
  Clone ID: MRT4577_1361C.1.pep
AHISELKWETLANLSTQYNLTNSPNRDHNVCKYIQSTYSCHIIIFVN

SEQ ID NO: 224356 - protein, 64 aa, Zea mays
  Clone ID: MRT4577_136200C.1.pep
CTKNMKDASLRKEEMNINCSAGICGPRDNKNSALHLLEETFYSKGQIKIADTGRMHVMKVFESH

SEQ ID NO: 224357 - protein, 59 aa, Zea mays
  unsure (1)..(59): unsure at all Xaa locations
  Clone ID: MRT4577_136201C.1.pep
RREXXXLDLAXQXLVHVRXPRHLXPVRHFTSXRLENXSERERERRSLGCFQLLIHHPAG

SEQ ID NO: 224358 - protein, 89 aa, Zea mays
  unsure (1)..(89): unsure at all Xaa locations
  Clone ID: MRT4577_136202C.1.pep
FPGCGSLLTSILLSLALSVPQSLHHLRAGIHPPGGEGXSXYLLAVLAGNSSPSAEDLTAILHSIXCELDNENMDLLLSQLIGKDITDLI

SEQ ID NO: 224359 - protein, 34 aa, Zea mays
  Clone ID: MRT4577_136203C.1.pep
LTSYNETIYASLITVINVSRITMEWQAQREQRPE

SEQ ID NO: 224360 - protein, 75 aa, Zea mays
  Clone ID: MRT4577_136204C.1.pep
KEGAFKISRSPSHQPLTFVPRGREKSLHHKAKPAPLLKDQTLLRPNLTGSTQGVSTDRRGEQGRRHRGQTRVIGL

SEQ ID NO: 224361 - protein, 57 aa, Zea mays
  Clone ID: MRT4577_136205C.1.pep
HPFHRTSESNDIAVTLDSCTPDPSRSRSFPRLDLPRVPGRAADPDMATKGKLVELGL

SEQ ID NO: 224362 - protein, 39 aa, Zea mays
  Clone ID: MRT4577_136206C.1.pep
YSHDAYGCIGNVELSFYSFCTQKSSMSSFKQFFIQLIIA

SEQ ID NO: 224363 - protein, 36 aa, Zea mays
  Clone ID: MRT4577_136207C.1.pep
QNARLYGTKKFSQAHSAHIIQHRSNLNSIQNFFCCA

SEQ ID NO: 224364 - protein, 36 aa, Zea mays
  Clone ID: MRT4577_136208C.1.pep
LLKKHSPTTNKTFQNSLIAQFPHIIRKHNTLLVKKE

SEQ ID NO: 224365 - protein, 91 aa, Zea mays
  unsure (1)..(91): unsure at all Xaa locations
  Clone ID: MRT4577_136209C.1.pep
PQKKKKKPTKKKKKTPKIQKKKKKKTTHHTKKKTTTKPQNTKNKTHPNTKKTSXPPTTPPFPVXHSPPPPPHNLPLLFLTPQYMSVLVAKP

SEQ ID NO: 224366 - protein, 103 aa, Zea mays
  Clone ID: MRT4577_13620C.1.pep
KRLSCRGTDDIATAREKHVCSNVAHGLHERNRPYFRQNRISEGVTLLVQIRKNLGDNNALIDWMRLPPGPGGLYDARTERVLYHSALEPTASHLTGFARLLKL

SEQ ID NO: 224367 - protein, 149 aa, Zea mays
  Clone ID: MRT4577_136210C.1.pep
MVRPRHVFAYADGTPQLELLCAATTGDLAHLERMVRKLDGGRGRLAEAVEAVKDHGAGALHLAASGQNLEVCEYLVEDVGVNVDAVDEAGRTPLVWAIIVKGGQVDIVKYLLDHGANPDNADRTGITPLHEAVERGHCEVVELLLSRGP

SEQ ID NO: 224368 - protein, 186 aa, Zea mays
  unsure (1)..(186): unsure at all Xaa locations
  Clone ID: MRT4577_136211C.1.pep
VNAVNRDKGYDGIVLESWSRWAIYGVLDDQELRYMALEFVKQLGEVLHSXSIPKSSSHHLELIYVIPAPRMQKLNNKDFGPKDLMHLADTVDGFSLMTYDFSGPQNPGPSAPLKWIHHSLAALPSAKGSSHSNSHSRMIFLGINFYGNDFLLSGVSYKHFGTSRCMTKKWFPKEPEAFAEQPQCLL

SEQ ID NO: 224369 - protein, 352 aa, Zea mays
  unsure (1)..(352): unsure at all Xaa locations
  Clone ID: MRT4577_136212C.1.pep
MPPRRRDRRRLRDPSPPSSDARAPPSALGLRLTLLVPLLILVLVLAALGFSGLLSHSPPHSQTLQTTAHSVYERGLVKRDVSAREILSEHTRVSENRSQRNFANPVLAYVTPWNSKGYDMAKLFITKLTHVSPVWYDLKSDRNRLVLEGEHNFDAKWVSELQTNGSLVVPRIVLEALPAVLLFEKKQKAKAIDIIVSECRDKGYDGIVLESWSRWAIYGVLDDQELRYMALEFVKQLGEALHSVNSKXSSSHHLELIYVIPAPRMQKLNNKDFGPKDLMHLADTVDGFSLMTYDFSGPQNPGPSAPLKWIHHSLAALPSAKGSSHSNSHSRMIFLGINFYGNDFLLSGGTYN

SEQ ID NO: 224370 - protein, 64 aa, Zea mays
  Clone ID: MRT4577_136213C.1.pep
SRKPLSMAGGIILLLLVIPLVVRREWSVMGERSNSFSQDSNNSSPAENKLEPGPLFILVILVIY

SEQ ID NO: 224371 - protein, 59 aa, Zea mays
  Clone ID: MRT4577_136214C.1.pep
PSSWWVGRRSRYVQGTGARRSPSVILIISCLLNFGNALLWAHTASFMADYSERSAGDGH

SEQ ID NO: 224372 - protein, 126 aa, Zea mays
  Clone ID: MRT4577_136215C.1.pep
PSCTLVRTMRRRPPPALTSMRFQRANDPGRTNGVWPRRLSRTASCVVTTRMKSTLGGSAYPGRKRLLDEVNIQHTLPPIPLDPFVRLYWWTVKLSNYSRLRYVDIEHEPYTKGSGSGTKIADSLLP

SEQ ID NO: 224373 - protein, 82 aa, Zea mays
  Clone ID: MRT4577_136216C.1.pep
MALAFDDFGRPFIILREQESKSRLRGLDAHKANVAAGKAVARSLRTSLGPKGMDKILQSPDGDVTISNCSTALSHSPPRSAS

SEQ ID NO: 224374 - protein, 41 aa, Zea mays
  Clone ID: MRT4577_136217C.1.pep
HWQATIMGPPDSPYAGGVFLVNIHFPPDYPFKPPKVSITLL

SEQ ID NO: 224375 - protein, 159 aa, Zea mays
  Clone ID: MRT4577_136218C.1.pep
MAAATTTQRHDDDNNDVESQREHDDDGSSSRREQQEQRRPLLVKRRSLADDGGGMSPVQRAISQTYQSTAHLAKLLPTGTVLAFQLLSPVVTAQGHCVRANRAMAGALLALCALSCFALSFTDSFRDAATGAVRYGFATPWGIWAIDGGAPPDDPRAAA

SEQ ID NO: 224376 - protein, 82 aa, Zea mays
  Clone ID: MRT4577_136219C.1.pep
RRFIGSNNKTMARFTYTEGSTNVCLKELACFYTLHLLTHLSSYNISLFLLLHIIFYPFLTLNFLSTYIQHLYYVLLFNILYF

SEQ ID NO: 224377 - protein, 296 aa, Zea mays
  Clone ID: MRT4577_13621C.1.pep
MGNVTSSVAARLAFFPPAPATYGVEPAAENGALLRMTGVLPDAGVEVRALPTRAGTRVVSAFWRHPAARLTLLYSHGNAADLGQMLGLFLELRAHLRVNIMSYDYSGYGASTGKPSEYNTYNDIEAVYDCLRTEYGIEEEDLILYGQSVGSGPTLHLASRLEKLRGVVLHSGILSGIRVLYPVKVTLWFDIFKNIDKIKQVDCPVLVIHGTADDIVDLAHGKRLWELAKDKYEPLWIKGGGHCNLETYPEYIRHMRKFISAMEKLAKDSSKAAQAPPPSSMAAEERHTKCLRFGKR

SEQ ID NO: 224378 - protein, 41 aa, Zea mays
  Clone ID: MRT4577_136220C.1.pep
SHNGRYYGTCFTTVLYQKVDGPKHVLQLIQLQLDAMINIGW

SEQ ID NO: 224379 - protein, 68 aa, Zea mays
  Clone ID: MRT4577_136221C.1.pep
CITGRLFYRWQYLKLRCHSCLQWNTSSLTDFPAKFLDLHLGLDTDQNLFDSYLHHMLVQPPVWHPHHN

SEQ ID NO: 224380 - protein, 155 aa, Zea mays
  Clone ID: MRT4577_136222C.1.pep
MDMETLADDANAALADDSGGEAERNEAAEAEAEVERYEAAEAEADILRDRFRLAVISIATAEGKKAGMTVADPVVSCIADLAFKSAEQLAKDAELFAQHAGRKSVRMDDVILTAHRNEHLMGLLRTFSQELKGKEPASERKRKKSSKKDETVIEV

SEQ ID NO: 224381 - protein, 162 aa, Zea mays
  Clone ID: MRT4577_136223C.1.pep
MAPRNRTSSRRPLWVIVLIAFVCAIVTGAYLYKPQHYTGCYLSNSCGSQPPLEPVRVYTDDEIAARAVMRDLVLSQPVQSKNPKIAFMFLTPSSLPFEKLWEKFFMGHEDRYTIYVHASREKTVHASPIFAGRDIRSEKVVWGTVTMIDAERRLLANALQDA

SEQ ID NO: 224382 - protein, 108 aa, Zea mays
  unsure (1)..(108): unsure at all Xaa locations
  Clone ID: MRT4577_136224C.1.pep
VNGKVLWFRSLHLSFSATLSXPKXFPHTTPYILHSRPTTRTLGFLMRLDTLGILLLLARLAVGPWTSPISDVVLSPSSHSWTVSVTPSLPTRAHVHTRPPPLPLAVPT

SEQ ID NO: 224383 - protein, 100 aa, Zea mays
  unsure (1)..(100): unsure at all Xaa locations
  Clone ID: MRT4577_136225C.1.pep
PGATTPRGAPPEAPSMDRPPQGARAAQIPNPAQDSVMLLFENASLTPGFTLEDPNPLGNRVPPMSKLGLSLHKADPFXGKGLXIPPLEAPPGETKMEGGD

SEQ ID NO: 224384 - protein, 92 aa, Zea mays
  Clone ID: MRT4577_136226C.1.pep
LCYAGDPLADVADGGCRRRRCGLSLLARIGAAPHKCPLPMMPMAVTFKATQLHLKKDMDQSVKAAKCQPHFSCYRDLFKDDSTHYPAGSRGP

SEQ ID NO: 224385 - protein, 63 aa, Zea mays
  Clone ID: MRT4577_136227C.1.pep
LNVLPDLEPFRFLTILISFKNKSDTTRNNNQSSTRKANIPRTSKDKTKSHNNQAHNQAHTKGQ

SEQ ID NO: 224386 - protein, 130 aa, Zea mays
  unsure (1)..(130): unsure at all Xaa locations
  Clone ID: MRT4577_136228C.1.pep
PVLKSRVVWIGTSQAAVLRGNHLVHRRSKLCLQAILPEENRNMLGLFALHPGRAAWRDGCSQVSDFGCLXQRLLLGGKLSSGRPRSNTLXMSLPWTPCFGGMLDHVLLPLXTKLTXXLNPXFSRRLSRQS

SEQ ID NO: 224387 - protein, 93 aa, Zea mays
  Clone ID: MRT4577_136229C.1.pep
WAAPPPPKVFSPPLSLLFCPTKRRRRSPPLAAPRTNCPSRRPTPLQRRKLPPRRSLMFFSPPFPPFGDASSPSWATALVGCGCPLPHVLLYLK

SEQ ID NO: 224388 - protein, 83 aa, Zea mays
  Clone ID: MRT4577_13622C.1.pep
MLQLFRLHASVCDRAELQDQPCRVPFCSHFRAKMQAEKADKTWRLLVKKVRRARAMVSLANRQVPEVVAMSWVKYSSSKWARN

SEQ ID NO: 224389 - protein, 61 aa, Zea mays
  Clone ID: MRT4577_136230C.1.pep
MTVQIPATSRALSVLLLLRGAEGLLRTYSTGDRRRRVIRDARQQDHDQAFLRTLNFGADSE

SEQ ID NO: 224390 - protein, 79 aa, Zea mays
  Clone ID: MRT4577_136231C.1.pep
PIPATHLLVRPNRHLHAPCPSEPPRPPGPASPPRTGRAATCRPVACASTCGPWPGRGARRPHAAPTARRRRGRTAGRVA

SEQ ID NO: 224391 - protein, 88 aa, Zea mays
  Clone ID: MRT4577_136232C.1.pep
MATSSRRVPLLLLCLGVLVSCSFAAGSLDQELDITWGDGRGKGPDHGPLLTLSLERTFRFRFQSRDQYLFRKNHMQLPVVPGNFGGTG

SEQ ID NO: 224392 - protein, 40 aa, Zea mays
  Clone ID: MRT4577_136233C.1.pep
SASGVLAAFSNKARAMDPADRYLNSECIMQMLQAVQIGLA

SEQ ID NO: 224393 - protein, 217 aa, Zea mays
  unsure (1)..(217): unsure at all Xaa locations
  Clone ID: MRT4577_136234C.1.pep
TLFFLEYLGPXXIYPMFYYXPVYKYLGKEGEXAMHXVXTYXMYXWCFHYXKGIMETFFVXXFSQXTXXXXKVLRNCAYXWXWGXYIAYXCNHXLXTPVSDXXMKIGFXFGXXCXLXXFXCQILXXXFRXPSGSXGXXIXXGFLXNXATCXNXTTEIXKWVXXNIAKQTVGGYVFFVVGGGXMXNXALGKKSRLKKLFDGKDGRPKYXXRWVIXPPXL

SEQ ID NO: 224394 - protein, 144 aa, Zea mays
  Clone ID: MRT4577_136235C.1.pep
IPPLRAYIVLNKILIKRERVRASGGFLFILMSPHSSTLPGGGGGTKIPKHGVKGKKSQIVHEHDFNIETPHRPYHPLSHGVWRKPILTRVPHHPFCGGVFFKLGTEGEEHWGGGPQSTRWGTSEWETAYVRGGGVTKGVGTPLL

SEQ ID NO: 224395 - protein, 239 aa, Zea mays
  unsure (1)..(239): unsure at all Xaa locations
  Clone ID: MRT4577_136236C.1.pep
MGIQVAAVVIPPPCSSPSSSSSSPASPSSSAIATSPQHAVLGARLARSQSSLACWNAAGLGRRRGGEHTIRRALSASIDSVGSDGGDDEEFSRRIQELAVGQHPGAGGCGWPASVERSASSVGLPLSLRMLKRRKQQXLEQGRWDERLVDSAGESARAAVGRAFSSMVLIIRELQSFTLQMREAVVYEDLQGVLARVHAEMHASFVWLFQHIFSGTPALMVSLMLLLANFTVYSMGDSV

SEQ ID NO: 224396 - protein, 104 aa, Zea mays
  unsure (1)..(104): unsure at all Xaa locations
  Clone ID: MRT4577_136237C.1.pep
HAERATCPPALSLPLPIRRAFFLVHRRSIPARTRPARGAEAPGGRHGKHASSVHALTPPMMAVRRPVLSSQHLLLLCPSKTSSXXSSXXXCAXRVRCVWAAXAS

SEQ ID NO: 224397 - protein, 87 aa, Zea mays
  Clone ID: MRT4577_136238C.1.pep
ETRIRSSHRYRRGAPFAGRLPFGFFCWLPFAFFCRPSFSSEILPYSFSGGPHLVPWAFPILRRPQFATPAAIAFFHYGPPIRALSRA

SEQ ID NO: 224398 - protein, 61 aa, Zea mays
  Clone ID: MRT4577_136239C.1.pep
FNFSISRDDIKTRRGEFSYSTSTPLMCKNNTVNPTRYIYPSADTRPSSQYYYSIKREILIR

SEQ ID NO: 224399 - protein, 111 aa, Zea mays
  Clone ID: MRT4577_13623C.1.pep
PRVRPRVRPRVRPRVRPRRLGRGSPGCCQRAMASNGSSLVRRACSTVRRMPSWKKRLVLFAVGVSTLSYACQDNRALQIRDVTGNKKKAVILGTGWTDASSLRNIDTSLYD

SEQ ID NO: 224400 - protein, 99 aa, Zea mays
  Clone ID: MRT4577_136240C.1.pep
TRGRTRGGSPPRLRQSRHHDIFMRSGTNYKVQKWPAAGVVSPTSEASNHETGSFCTCSKRERNSLSVPFQIISYSNFLKKKSKHLRFYQIYKYSNVSQV

SEQ ID NO: 224401 - protein, 47 aa, Zea mays
  unsure (1)..(47): unsure at all Xaa locations
  Clone ID: MRT4577_136241C.1.pep
FFDESRLTFIPVQKGEKRVHILKKKREREKSNSAXKSATXLFKXSRH

SEQ ID NO: 224402 - protein, 60 aa, Zea mays
  unsure (1)..(60): unsure at all Xaa locations
  Clone ID: MRT4577_136242C.1.pep
GDPRGDNYTYIKRMNLEILTHTEPTVEEVLLSHALXPNNTPYNMHTRLTYLMTPYPYTTK

SEQ ID NO: 224403 - protein, 125 aa, Zea mays
  unsure (1)..(125): unsure at all Xaa locations
  Clone ID: MRT4577_136243C.1.pep
HAHPKTDFGWGRPRFVAPAQMFGNGTAYVTQGRHKDYPIKVLFALEPKYLHPFKKAFYGECPLPAHAHTWRRVLLKWDGIVPXXRCGIPRGVPPVIPNHIACFGMQFNPYWVCDKGPPPKKKPNP

SEQ ID NO: 224404 - protein, 47 aa, Zea mays
  Clone ID: MRT4577_136244C.1.pep
SDYSFIEHGKNHTLLPPPTLIPSIKYLTTQEPKSCFTLSSATLMSNS

SEQ ID NO: 224405 - protein, 238 aa, Zea mays
  unsure (1)..(238): unsure at all Xaa locations
  Clone ID: MRT4577_136245C.1.pep
GFVSPQDXGYFQFVAPCTFFGTPFPQEGQKKAPRVMLVFFCIPVGPGRSRVIWAFPRNVGVWLHHITPRWLYHVGQNLILDSDIFLLHVEERKFAAAGLDNWQRACYVPTSSDAMVVAFRNWFRKFCKNQVGWATLQVDQLPPTRTKDQLMERYWSHVVQCRSCNAALKTMKALEAALQVASVAVVGFLAVAKGTVLTSTVQRAAVVSAAVLCFAASRWLANFIQKNFYFQDYIHAYK

SEQ ID NO: 224406 - protein, 95 aa, Zea mays
  Clone ID: MRT4577_136246C.1.pep
ALLFWGFLADPVVQRCWHGNFWLILKKKKKKKKKKKKKKKKKKKKKKKKKKKKKKKKKKKKKKKKKKKKGGPRLKGPNLTPRGWKKKTFFLGPPN

SEQ ID NO: 224407 - protein, 88 aa, Zea mays
  Clone ID: MRT4577_136247C.1.pep
GYSPGPPRGPPRAPSLLPGGFFYWWSPFTYGFPLGVPRSRVSSHVPSASLGAGLVFFVPFFVPWPAGSSVGPGLFWGFFGGRFCGDGF

SEQ ID NO: 224408 - protein, 81 aa, Zea mays
  Clone ID: MRT4577_136248C.1.pep
IPTDGKTSTGENKKKTLLGITLLIYWTQHPIFRGRSLFGHLGVILGHGHQNGNKKQAPKKKGEMPGLFLRFLFGFEEGLPL

SEQ ID NO: 224409 - protein, 174 aa, Zea mays
  unsure (1)..(174): unsure at all Xaa locations
  Clone ID: MRT4577_136249C.1.pep
ATCGSSLKWRPARCLVSPLADMMGCSMARNIAAYCAQKXTDAXLSDAXKSRLYAYSNIAXLTTXFRNGPYPIRSTLARXCGPXSGRWYPDKTNDIQTXCYALGIEVLLXSIGGARENYGLSSTXDSYSADDYLWNNLLAXSDLSRPVGRRXVLDSIDFLVENRQAKHYDDLENE

SEQ ID NO: 224410 - protein, 54 aa, Zea mays
  Clone ID: MRT4577_13624C.1.pep
GHHLANWGEDRNIHRHTDPKKSDHFNHTNSNPYTSSIHLHNIPKRLMARLPTVN

SEQ ID NO: 224411 - protein, 78 aa, Zea mays
  unsure (1)..(78): unsure at all Xaa locations
  Clone ID: MRT4577_136250C.1.pep
MEGGDSAGAGSGGAVAXXYKCRSDASRALQYYLDRSTPYATGRWIYTFADVFFYPLFFYIVQVFYIVNYWLVIYLVKL

SEQ ID NO: 224412 - protein, 103 aa, Zea mays
  Clone ID: MRT4577_136251C.1.pep
PSRRSKSTARERESTTLIPPTAVPCLGAGVRDHQQLLVVVHHGHHHHFTGHRHGMDPTPHHMHWFLSTSIQSQSIAGHAGAFSSLGFFSHRGLGGCYLSFFLP

SEQ ID NO: 224413 - protein, 129 aa, Zea mays
  Clone ID: MRT4577_136252C.1.pep
PLFFFFFCTSAFEYPVNNDMEINYTLGLYTLLSDIRSKKLGHPLLDATGVLTSVSTQIQGIRTGETTNNGWAPYNFTDRPIGHRHQSVPGHMMIPHIGTHHKRNMDISKGGAYAPSMICQKSPSYYELW

SEQ ID NO: 224414 - protein, 101 aa, Zea mays
  unsure (1)..(101): unsure at all Xaa locations
  Clone ID: MRT4577_136253C.1.pep
AEARAESEPGVRAKRRXSIXAKPKSEPWXRAERSSRSSGAXPESEPWVGRSGVSRLPGLSPSPSPGSGGAEFAVFRGLARVRALGRAERSSPSSPVAGRSR

SEQ ID NO: 224415 - protein, 254 aa, Zea mays
  Clone ID: MRT4577_136254C.1.pep
MGAENGSNPSSTVLDGLYGVQLGRPSDPAQTDGGASSSPAACEHHHKRGRGGTAQAQQRLRIRRLWQHRPSCFKPIHCTITCGKHAGETVANVVTSLPFIVLGLQAPRKNLNAAIYANSLVGMGVASRIATSRGIRRLARWADNNYECTCSTQCLSRAVGNENPRLLMVASALLLPFQPLVVSAVHTGLMEVSFARRASMEPELRMAHNLHKVSSLLGGALFIADDCFPETPYIHAAWHLAAAIGVGTCNKLLE

SEQ ID NO: 224416 - protein, 89 aa, Zea mays
  unsure (1)..(89): unsure at all Xaa locations
  Clone ID: MRT4577_136255C.1.pep
SGSNLASFAGMRTLCFCDLXXGLRGVFSPYFLATGFWWSRARPHLLSDWSLVSLWRFFFVLSVSEGGYHFGSLLEYFTVILLSAFFPYC

SEQ ID NO: 224417 - protein, 81 aa, Zea mays
  Clone ID: MRT4577_136256C.1.pep
GPRWGLALKPSIHVGAGVINGASRGPVGVFLFNPSDADFPVKPGAGFAQLFFEVFPPPEVPGVGALHPPVLGAGGFGSPGV

SEQ ID NO: 224418 - protein, 255 aa, Zea mays
  Clone ID: MRT4577_136257C.1.pep
MGAENGSNPSSTVLDGLYGVQLGRPSDPAQTDGGASSSPAACEHHHKRGRGGTAQAQQRLRIRRLWQHRPSCFKPIHCTITCDKHAGETVANVVTSLPFIVLGLQAPRKNLNAAIYANSLVGMGVASSLYHSSRGGIRRLLRWADYTMIATTTLCLSRAVGNENPRLLMAASALLLPFQPLVVSAVHTGLMEVSFARRASMEPELRMAHNLHKVSSLLGGALFIADDCFPETPYIHAAWHLAAAVGVGTCNKLLE

SEQ ID NO: 224419 - protein, 92 aa, Zea mays
  unsure (1)..(92): unsure at all Xaa locations
  Clone ID: MRT4577_136258C.1.pep
CPWPSAGWCVSAPGPAPSFCRGAPSALCSVALVVFCSGVVFAAPVPVWSGALSFWGSSGFLLFGSCPGLVLARFCPCSPPWGCLFKVDLSXG

SEQ ID NO: 224420 - protein, 69 aa, Zea mays
  Clone ID: MRT4577_136259C.1.pep
PPKKAAAPPPRGRRNGPQTHPRPPPRARHTASTTGSHPSFPYSCKRLMIHPAHLGPGEAVLGEASLVPN

SEQ ID NO: 224421 - protein, 121 aa, Zea mays
  Clone ID: MRT4577_13625C.1.pep
GSSNRMDVYGAGWNSGIDMNYNPSVLAVFEVPEPVIEVEALSGKSTSLETPLEFSGSSKVEVPQLERPVVTSTILDASEDIQATEELDETDPCFALFRNEAPTSIDRPHVLFERIELGKHA

SEQ ID NO: 224422 - protein, 89 aa, Zea mays
  Clone ID: MRT4577_136260C.1.pep
MGGAPAGRHGKAEGMGAMAAGGSLLLPWEAGLPALACVQEEEEQGRRVWNLRQGERGWKNLGAMYRERRQRKEEDSVGEKEAVGGGWKN

SEQ ID NO: 224423 - protein, 47 aa, Zea mays
  Clone ID: MRT4577_136261C.1.pep
RIRRLELGIVQVRLMDGLLLGDQLATIFSISYKSSFLCKCRCSTPRC

SEQ ID NO: 224424 - protein, 160 aa, Zea mays
  Clone ID: MRT4577_136262C.1.pep
GAFFFFFFRRTCLYKDNRTKYICKIWELKHETNTMYEGFTHDILIYLYKFISVYTIINMDKAVEWFVALLHFCGSAWGRNVSEPVPVNHDYEQMICQHSSKQHEETATRLGFTLSYLVNCRGQCSKAKFGGRVTPNPLLLLLRTQAWARPWVAGAIGSCC

SEQ ID NO: 224425 - protein, 66 aa, Zea mays
  Clone ID: MRT4577_136263C.1.pep
PLLPPEHFPPPQPPRVQIISLRGGAPAAEPPTCLPLSPIFPPAEPAYICLSMPAPPYIRFFLSASG

SEQ ID NO: 224426 - protein, 137 aa, Zea mays
  Clone ID: MRT4577_136264C.1.pep
KYTDFLDDQVVFTGFAYGGLSELSEAEYTSCSMGSTIAGEIGTFGYRPSVLMDMLAGKRAEVGTKVGAYMRTFSGDCSPSDLETALQLVYQLFTTNVEPREEEVKIVMQMAEEAIYAQERDPYTAFANRVREINYGN

SEQ ID NO: 224427 - protein, 115 aa, Zea mays
  Clone ID: MRT4577_136265C.1.pep
QRPPSVRPASYRRRSRSASRSPVHRGRRGGYNKSPVRSRSPPARKRSPSDRARSVSRSHLSRSVSKSPPVHHPSPLDSPSLERASDGKSRSPSPSGGGKKGLVSYGDGTPDSAGK

SEQ ID NO: 224428 - protein, 45 aa, Zea mays
  unsure (1)..(45): unsure at all Xaa locations
  Clone ID: MRT4577_136266C.1.pep
LLPSCKTSLKNGLVFDCSYAYSLMRIYPLPITVLYNNRIXPIPPP

SEQ ID NO: 224429 - protein, 269 aa, Zea mays
  unsure (1)..(269): unsure at all Xaa locations
  Clone ID: MRT4577_136267C.1.pep
MDSSSSQLLTAATAANSTFYLSQWRSQVMMGVESSLLAQQNSLLRTILACILSFLTATMSSAAGVGGGSLYVPILNIVAGLSLKTSVAFSTFMVTGGTLSNVLYTLLAHGPGLIDYDVAVVSQPCLLLGVSVGVVCNVMFPEWLITVLFTAFLSLATFKTYGTGLKRWRAESAATERGVLEGASTREGAEEALLIGQKEXAGHGYHWVDLAVLLSVWLCFFVIHLFIGGEGAKGAFDIXPCGXAYWLITVAQIPVXVXFTACIMHQKGN

SEQ ID NO: 224430 - protein, 95 aa, Zea mays
  unsure (1)..(95): unsure at all Xaa locations
  Clone ID: MRT4577_136268C.1.pep
HGATSLALSPTRGPGXVEESDPYRLFNLDDYKHLHESPVGLYGWIPFMIGHGSRPSPVFFWLSAAEMXIHVLAPGWDGATAHDNAGIDTLWMAED

SEQ ID NO: 224431 - protein, 148 aa, Zea mays
  Clone ID: MRT4577_13626C.1.pep
GHGSSTPSPPPAMTSASRPPPPMLAFTMGFLPDGPTASPSRIRGPSSWYLTAPQPESAVANHELRARAREPRQPCTYTHSSMLASGPLVPRAAASPSRSGIRLNRYFRPRTPWQTLPLTRVLRVSPQVHAYVHWVERLTTIEPLFDTN

SEQ ID NO: 224432 - protein, 176 aa, Zea mays
  Clone ID: MRT4577_136270C.1.pep
MESALHSSSAYPEPKNIVCRFGVPKAITVDNGTQFEAEAFKDFCDQIGTKIHFASVRHPESNGLVERANDIIMTGIMKLIFNRPRGKWPDELIKVVWSHNTTASRSTGFTPFKLLFGDEAITPEEAKAGSIRTVASAEDEADYHVAKDTIEGTRLQAVENINKYQAEIIKWRDRKV

SEQ ID NO: 224433 - protein, 87 aa, Zea mays
  Clone ID: MRT4577_136271C.1.pep
LAYSFYEPLVSARTSIATSLHSSAGGVMNFRCPCRSDYAAVSIHTMPWMPEQGSECAQPHLMPARRLYLRLVSHDDCNYLTGHLLAH

SEQ ID NO: 224434 - protein, 101 aa, Zea mays
  Clone ID: MRT4577_136272C.1.pep
DRAMSFFVAGGVSTSVRRSFIPWGGGGKTTKWCGEGVSALVWCYGGWVCFRVCGCGSRVVACINLRLTNGVCNPFLLCDLLGCDLRCLVLGTVTSNLGSCL

SEQ ID NO: 224435 - protein, 70 aa, Zea mays
  Clone ID: MRT4577_136273C.1.pep
QEAKVYLVRLNQALTPSRPYFLLAARDYGLQSWQCQLTYDSISCVCFKLLSLYLYNHGMLQEILDAFNRA

SEQ ID NO: 224436 - protein, 137 aa, Zea mays
  unsure (1)..(137): unsure at all Xaa locations
  Clone ID: MRT4577_136274C.1.pep
AGXNLNLRIALSRARRPSQRRRLPLLPSTAASAPPVLAPSRPLRLRLSPLSVPSQRTLRRTDDLTDLGVCLGGGGGRGCVFRGRSCSTGPCSFSPGSGLLAVRRTGRLAVRGGLLLGAFPRLLRTAFGGPGLRVPAA

SEQ ID NO: 224437 - protein, 114 aa, Zea mays
  Clone ID: MRT4577_136275C.1.pep
HTTPCLFGSNVTLLHHLSSFPSPSYVSRPPIFQVLHPGVFHYRSSFRQYPHASPCLNFCASEATRPVSSNVLTLHFLSVQALPSIPLLPVLINFSEEKNVSCCSPSITSGPGGS

SEQ ID NO: 224438 - protein, 170 aa, Zea mays
  Clone ID: MRT4577_136276C.1.pep
MGAGIRILAAALLALAAVRGATAQLRQGYYSASCPNVEAIVQAAVALKVQQTPVAVGATVRLFFHDCFVQGCDASVIIVSSGNNTAEKDHVSNLSLAGDGFDTVIKAKAAVDTQCPSPNLVSCADILTMATRDVIGLADGPAYPVELGRLDGLVSTASNVDGNLPPPSFN

SEQ ID NO: 224439 - protein, 65 aa, Zea mays
  Clone ID: MRT4577_136277C.1.pep
ACDRRLRSGWRNPDINRDVGELKKDRPGLCYDHWLIVSDHLNYLCQLGYIVVYNVPQSDLEGLIR

SEQ ID NO: 224440 - protein, 565 aa, Zea mays
  unsure (1)..(565): unsure at all Xaa locations
  Clone ID: MRT4577_136278C.1.pep
MWHEARRSERKVHDLMDAARRRAQRRAVYLARRRGDPQQALQVSGTRCRVHRDDALYQATEDQQXLIQWNGKQDVLIDRFDGRALLDFIRDSSSRPFRVQGKSEEEEELEEFVNFERYRDLIKHRRRGFSDEAGLQHVVQELEAKALLPFSFDKPQSSQPPASKGAYSQVGYSYKGDGNEESEDLDSDDDDEEEEVDDDDKDFSSDDSSDERMESIAKEFGIKRYNWLVYMDKKNKEQEKRQKEIVKGDPSIKKMSRRERRKASQIEREKEREAARSVGRVSYRDPYREQRRSPSYEAYSRGRRSRSRSRSRSPSHSRRHGRGIHAESNYWSKQKAPRVEYITEFGGSDDTSEPKVSGISPPSSPIRIDIPNRLSGGQILEALHSDPASSLSVEQERTAKLLKPSPSTSSALAKLSKVASGGTGKTPQTEKKETPQERLKRIMSKQLNKQIKKDTAAEIAKKREQERQRQEKLAEVXDTSVVAAVEVLAVPHQEGGDIAEAVVGAEAQEGTDPARSPVPGRPLALQGTEAGQDTENIQAATNKVPCHVVVNLFYRLFHSCSDVYS

SEQ ID NO: 224441 - protein, 45 aa, Zea mays
  Clone ID: MRT4577_136279C.1.pep
SQGPNNQRRLTYISKAANIKGGGGRIKQKTLSGLISYGDYIGART

SEQ ID NO: 224442 - protein, 47 aa, Zea mays
  Clone ID: MRT4577_13627C.1.pep
PLPQNPLEEVIFYIRSRHMLSTIFEACKNQELLNDTLESITNLGIET

SEQ ID NO: 224443 - protein, 485 aa, Zea mays
  unsure (1)..(485): unsure at all Xaa locations
  Clone ID: MRT4577_136280C.1.pep
RTRGRTRGRTRGRTRGKDFSSDDSSDERMESIAKEFGIKRYNWLVYMDKKNKEQEKRQKEIVKGDPSIKKMSRRERRKASQIEREKEREAARSVGRVSYRDPYREQRRSPSYEAYSRGRRSRSRSRSRSPSHSRRHGRGIHAESNYWSKQKAPRVEYITEFGGSDDTSEPKVSGISPPSSPIRIDIPNRSGNSTFXNFCKYTLGELFXWSLLPQSWCSEDDYVRNRIDQDMVMMVXGVKNSCFVDXMHFMVRFIFAKQEEDLTRIYLQSAVDFMTXHLCHVNYYGYNTPYFCRLSGGQILEALHSDPASSLSVEQERTAKLLKPSPSTSSALAKLSKVASGGTGKTPQTEKKETPQERLKRIMSKQLNKQIKKDTAAEIAKKREQERQRQEKLAEVXDTSVVAAVEVLAVPHQEGGDIAEAVVGAEAQEGTDPARSPVPGRPLALQGTEAGQDTENIQAATNKVPCHVVVNLFYRLFHSCSDVYS
